United States Patent Application Publication US 2021/0254056 A1 - sequence listing, part 9

SEQ ID NO: 16935 - protein, 1332 aa, Homo sapiens
  MOD_RES (16)..(16): Selenocysteine
  MOD_RES (49)..(49): Selenocysteine
  MOD_RES (54)..(54): Selenocysteine
  MOD_RES (79)..(79): Selenocysteine
  MOD_RES (87)..(87): Selenocysteine
  MOD_RES (192)..(192): Selenocysteine
  MOD_RES (317)..(317): Selenocysteine
  MOD_RES (339)..(339): Selenocysteine
  MOD_RES (358)..(358): Selenocysteine
  MOD_RES (381)..(381): Selenocysteine
  MOD_RES (388)..(388): Selenocysteine
  MOD_RES (390)..(390): Selenocysteine
  MOD_RES (427)..(427): Selenocysteine
  MOD_RES (472)..(472): Selenocysteine
  MOD_RES (487)..(487): Selenocysteine
  MOD_RES (491)..(491): Selenocysteine
  MOD_RES (497)..(497): Selenocysteine
  MOD_RES (523)..(523): Selenocysteine
  MOD_RES (526)..(526): Selenocysteine
  MOD_RES (535)..(535): Selenocysteine
  MOD_RES (542)..(542): Selenocysteine
  MOD_RES (560)..(561): Selenocysteine
  MOD_RES (563)..(563): Selenocysteine
  MOD_RES (566)..(566): Selenocysteine
  MOD_RES (579)..(579): Selenocysteine
  MOD_RES (622)..(622): Selenocysteine
  MOD_RES (637)..(637): Selenocysteine
  MOD_RES (639)..(639): Selenocysteine
  MOD_RES (682)..(682): Selenocysteine
  MOD_RES (697)..(697): Selenocysteine
  MOD_RES (708)..(708): Selenocysteine
  MOD_RES (762)..(762): Selenocysteine
  MOD_RES (837)..(837): Selenocysteine
  MOD_RES (875)..(875): Selenocysteine
  MOD_RES (880)..(880): Selenocysteine
  MOD_RES (919)..(919): Selenocysteine
  MOD_RES (938)..(938): Selenocysteine
  MOD_RES (946)..(946): Selenocysteine
  MOD_RES (954)..(954): Selenocysteine
  MOD_RES (961)..(961): Selenocysteine
  MOD_RES (975)..(975): Selenocysteine
  MOD_RES (980)..(980): Selenocysteine
  MOD_RES (987)..(987): Selenocysteine
  MOD_RES (994)..(994): Selenocysteine
  MOD_RES (1021)..(1021): Selenocysteine
  MOD_RES (1037)..(1037): Selenocysteine
  MOD_RES (1064)..(1064): Selenocysteine
  MOD_RES (1075)..(1075): Selenocysteine
  MOD_RES (1095)..(1095): Selenocysteine
  MOD_RES (1102)..(1102): Selenocysteine
  MOD_RES (1106)..(1106): Selenocysteine
  MOD_RES (1126)..(1126): Selenocysteine
  MOD_RES (1141)..(1141): Selenocysteine
  MOD_RES (1161)..(1161): Selenocysteine
  MOD_RES (1178)..(1178): Selenocysteine
  MOD_RES (1190)..(1190): Selenocysteine
  MOD_RES (1196)..(1196): Selenocysteine
  MOD_RES (1200)..(1200): Selenocysteine
  MOD_RES (1216)..(1216): Selenocysteine
  MOD_RES (1227)..(1227): Selenocysteine
  MOD_RES (1229)..(1230): Selenocysteine
  MOD_RES (1239)..(1239): Selenocysteine
  MOD_RES (1244)..(1244): Selenocysteine
  MOD_RES (1269)..(1269): Selenocysteine
  MOD_RES (1322)..(1322): Selenocysteine
  MOD_RES (1326)..(1326): Selenocysteine
MESRDPAQPMSPGEAXQSGARPADRYGLLKHSREFLDFFWDIAKPEQEXRLAAXEKLLEYLRGRPKGSEMKYALKRLIXGLGVGREXARPCYSLALAQLLQSFEDLPLCSILQQIQEKYDLHQVKKAMLRPALFANLFGVLALFQSGRLVKDQEALMKSVKLLQALAQYQNHLQEQPRKALVDILSEVSKAXLQEILPEVLKADLNIILSSPEQLELFLLAQQKVPSKLKKLVGSVNLFSDENVPRLVNVLKMAASSVKKDRKLPAIALDLLRLALKEDKFPRFWKEVVEQGLLKMQFWPASYLCFRLLGAALPLLXKEQLHLVMQGDVIRHYGEHVCXAKLPKQFKFAPEMDDYVGXFLEGCQDDPERQLAVLVAFSSVXNQGLPVXPXFWRVVRFLSPPALQGYVAWLRAMFLQPDLDSLVDFSXNNQKKAQDSSLHMPERAVFRLRKWIIFRLVSIVDSLHLEMEEALXEQVARFCLFHSFFVXKKPXSQIPEXKHPFSFPLENQAREAVSSAFFSLLQXLSXQFKQAPGQXQGGQPWXYHLVQFADLLLNHSHNVXXVXPFXAQQRQAWDRMLQXLKELEAHSAEARAAAFQHLLLLVGIHLLKSPAESCDLLGDIQXCIRKSLGEKPRRSRXKXIDPQEPPWVEVLVEILLALLAQPSHLMRQVARSVFGHICSHLXPRALQLILDVLNPEXSEDENDRVVVXDDSDERRLKGAEDKSEEGEDNRSSESEEESEGEESEEEERDGDVDQGFREQLMXVLQAGKALGGEDSENEEELGDEAMMALDQSLASLFAEQKLRIQARRDEKNKLQKEKALRRDFQIRVLDLVEVLVXKQPENALVLELLEPLLSIIRRSLRSSSSKQEQDLLHKXARIFXHHLCRARRYCHDLGERAGALHAQVERLVQQAGRQPDSPXALYHFNASLYLLRVLKGNXAEGCVHEXQEKQKAGXDPSHMPXGPQAASCLDLNLVXRVYSXALSSFLXKRNSPLXVPMFLSLFSRHPVLCQSLLPILVQHIXGPVRPRHQACLLLQKXLSMREVRSCFEDPEWKQLMGQVLAKVXENLRVLGEAQXKAQHQQALSSLELLNVLFRXCKHEKLXLDLXVLLGVLQGQQQSLQQGAHSXGSSRLHDLYWQAMKXLGVQRPKLEKKDAKEIPSAXQSPISKKRKKKGFLPEXKKRKKRKSEDGXPAEDGXPAAXGGSQPPSMGRKKRNRXKAKVPAQANGXPXXKSPAPGAPXRSPSXPAKSPKLQKKNQKPSQVNGAPGSPXEPAGQKQHQKALPKKGVLGKSPLSALARKKARLSLVIRSPSLLQSGAKKKAQXLRFXISSSKK

SEQ ID NO: 16936 - protein, 1252 aa, Homo sapiens
  MOD_RES (1)..(1): Any amino acid
  MOD_RES (7)..(7): Selenocysteine
  MOD_RES (112)..(112): Selenocysteine
  MOD_RES (237)..(237): Selenocysteine
  MOD_RES (259)..(259): Selenocysteine
  MOD_RES (278)..(278): Selenocysteine
  MOD_RES (301)..(301): Selenocysteine
  MOD_RES (308)..(308): Selenocysteine
  MOD_RES (310)..(310): Selenocysteine
  MOD_RES (347)..(347): Selenocysteine
  MOD_RES (392)..(392): Selenocysteine
  MOD_RES (407)..(407): Selenocysteine
  MOD_RES (411)..(411): Selenocysteine
  MOD_RES (417)..(417): Selenocysteine
  MOD_RES (443)..(443): Selenocysteine
  MOD_RES (446)..(446): Selenocysteine
  MOD_RES (455)..(455): Selenocysteine
  MOD_RES (462)..(462): Selenocysteine
  MOD_RES (480)..(481): Selenocysteine
  MOD_RES (483)..(483): Selenocysteine
  MOD_RES (486)..(486): Selenocysteine
  MOD_RES (499)..(499): Selenocysteine
  MOD_RES (542)..(542): Selenocysteine
  MOD_RES (557)..(557): Selenocysteine
  MOD_RES (559)..(559): Selenocysteine
  MOD_RES (602)..(602): Selenocysteine
  MOD_RES (617)..(617): Selenocysteine
  MOD_RES (628)..(628): Selenocysteine
  MOD_RES (682)..(682): Selenocysteine
  MOD_RES (757)..(757): Selenocysteine
  MOD_RES (795)..(795): Selenocysteine
  MOD_RES (800)..(800): Selenocysteine
  MOD_RES (839)..(839): Selenocysteine
  MOD_RES (858)..(858): Selenocysteine
  MOD_RES (866)..(866): Selenocysteine
  MOD_RES (874)..(874): Selenocysteine
  MOD_RES (881)..(881): Selenocysteine
  MOD_RES (895)..(895): Selenocysteine
  MOD_RES (900)..(900): Selenocysteine
  MOD_RES (907)..(907): Selenocysteine
  MOD_RES (914)..(914): Selenocysteine
  MOD_RES (941)..(941): Selenocysteine
  MOD_RES (957)..(957): Selenocysteine
  MOD_RES (984)..(984): Selenocysteine
  MOD_RES (995)..(995): Selenocysteine
  MOD_RES (1015)..(1015): Selenocysteine
  MOD_RES (1022)..(1022): Selenocysteine
  MOD_RES (1026)..(1026): Selenocysteine
  MOD_RES (1046)..(1046): Selenocysteine
  MOD_RES (1061)..(1061): Selenocysteine
  MOD_RES (1081)..(1081): Selenocysteine
  MOD_RES (1098)..(1098): Selenocysteine
  MOD_RES (1110)..(1110): Selenocysteine
  MOD_RES (1116)..(1116): Selenocysteine
  MOD_RES (1120)..(1120): Selenocysteine
  MOD_RES (1136)..(1136): Selenocysteine
  MOD_RES (1147)..(1147): Selenocysteine
  MOD_RES (1149)..(1150): Selenocysteine
  MOD_RES (1159)..(1159): Selenocysteine
  MOD_RES (1164)..(1164): Selenocysteine
  MOD_RES (1189)..(1189): Selenocysteine
  MOD_RES (1242)..(1242): Selenocysteine
  MOD_RES (1246)..(1246): Selenocysteine
XGVGREXARPCYSLALAQLLQSFEDLPLCSILQQIQEKYDLHQVKKAMLRPALFANLFGVLALFQSGRLVKDQEALMKSVKLLQALAQYQNHLQEQPRKALVDILSEVSKAXLQEILPEVLKADLNIILSSPEQLELFLLAQQKVPSKLKKLVGSVNLFSDENVPRLVNVLKMAASSVKKDRKLPAIALDLLRLALKEDKFPRFWKEVVEQGLLKMQFWPASYLCFRLLGAALPLLXKEQLHLVMQGDVIRHYGEHVCXAKLPKQFKFAPEMDDYVGXFLEGCQDDPERQLAVLVAFSSVXNQGLPVXPXFWRVVRFLSPPALQGYVAWLRAMFLQPDLDSLVDFSXNNQKKAQDSSLHMPERAVFRLRKWIIFRLVSIVDSLHLEMEEALXEQVARFCLFHSFFVXKKPXSQIPEXKHPFSFPLENQAREAVSSAFFSLLQXLSXQFKQAPGQXQGGQPWXYHLVQFADLLLNHSHNVXXVXPFXAQQRQAWDRMLQXLKELEAHSAEARAAAFQHLLLLVGIHLLKSPAESCDLLGDIQXCIRKSLGEKPRRSRXKXIDPQEPPWVEVLVEILLALLAQPSHLMRQVARSVFGHICSHLXPRALQLILDVLNPEXSEDENDRVVVXDDSDERRLKGAEDKSEEGEDNRSSESEEESEGEESEEEERDGDVDQGFREQLMXVLQAGKALGGEDSENEEELGDEAMMALDQSLASLFAEQKLRIQARRDEKNKLQKEKALRRDFQIRVLDLVEVLVXKQPENALVLELLEPLLSIIRRSLRSSSSKQEQDLLHKXARIFXHHLCRARRYCHDLGERAGALHAQVERLVQQAGRQPDSPXALYHFNASLYLLRVLKGNXAEGCVHEXQEKQKAGXDPSHMPXGPQAASCLDLNLVXRVYSXALSSFLXKRNSPLXVPMFLSLFSRHPVLCQSLLPILVQHIXGPVRPRHQACLLLQKXLSMREVRSCFEDPEWKQLMGQVLAKVXENLRVLGEAQXKAQHQQALSSLELLNVLFRXCKHEKLXLDLXVLLGVLQGQQQSLQQGAHSXGSSRLHDLYWQAMKXLGVQRPKLEKKDAKEIPSAXQSPISKKRKKKGFLPEXKKRKKRKSEDGXPAEDGXPAAXGGSQPPSMGRKKRNRXKAKVPAQANGXPXXKSPAPGAPXRSPSXPAKSPKLQKKNQKPSQVNGAPGSPXEPAGQKQHQKALPKKGVLGKSPLSALARKKARLSLVIRSPSLLQSGAKKKAQXLRFXISSSKK

SEQ ID NO: 16937 - protein, 204 aa, Homo sapiens
  MOD_RES (1)..(1): Any amino acid
  MOD_RES (34)..(34): Selenocysteine
  MOD_RES (49)..(49): Selenocysteine
  MOD_RES (53)..(53): Selenocysteine
  MOD_RES (59)..(59): Selenocysteine
  MOD_RES (85)..(85): Selenocysteine
  MOD_RES (88)..(88): Selenocysteine
  MOD_RES (97)..(97): Selenocysteine
  MOD_RES (104)..(104): Selenocysteine
  MOD_RES (122)..(123): Selenocysteine
  MOD_RES (125)..(125): Selenocysteine
  MOD_RES (128)..(128): Selenocysteine
  MOD_RES (142)..(142): Selenocysteine
  MOD_RES (195)..(195): Selenocysteine
  MOD_RES (199)..(199): Selenocysteine
XMPERAVFRLRKWIIFRLVSIVDSLHLEMEEALXEQVARFCLFHSFFVXKKPXSQIPEXKHPFSFPLENQAREAVSSAFFSLLQXLSXQFKQAPGQXQGGQPWXYHLVQFADLLLNHSHNVXXVXPFXAQQRQVNGAPGSPXEPAGQKQHQKALPKKGVLGKSPLSALARKKARLSLVIRSPSLLQSGAKKKAQXLRFXISSSK

SEQ ID NO: 16938 - protein, 69 aa, Homo sapiens
  MOD_RES (1)..(1): Any amino acid
  MOD_RES (26)..(26): Selenocysteine
XSEGEESEEEERDGDVDQGFREQLMXVLQAGKPPARPLLAGHENPGSPAPQVGEEGCQGDPQCHPEPHQ

SEQ ID NO: 16939 - protein, 410 aa, Homo sapiens
  MOD_RES (39)..(39): Selenocysteine
  MOD_RES (55)..(55): Selenocysteine
  MOD_RES (59)..(59): Selenocysteine
  MOD_RES (91)..(91): Selenocysteine
  MOD_RES (137)..(137): Selenocysteine
  MOD_RES (141)..(141): Selenocysteine
  MOD_RES (152)..(152): Selenocysteine
  MOD_RES (167)..(167): Selenocysteine
  MOD_RES (169)..(169): Selenocysteine
  MOD_RES (179)..(180): Selenocysteine
  MOD_RES (186)..(187): Selenocysteine
  MOD_RES (199)..(199): Selenocysteine
  MOD_RES (201)..(201): Selenocysteine
  MOD_RES (209)..(210): Selenocysteine
  MOD_RES (213)..(213): Selenocysteine
  MOD_RES (215)..(215): Selenocysteine
  MOD_RES (253)..(253): Selenocysteine
  MOD_RES (255)..(255): Selenocysteine
  MOD_RES (275)..(275): Selenocysteine
  MOD_RES (297)..(297): Selenocysteine
  MOD_RES (301)..(301): Selenocysteine
  MOD_RES (314)..(315): Selenocysteine
  MOD_RES (342)..(342): Selenocysteine
  MOD_RES (345)..(345): Selenocysteine
  MOD_RES (347)..(347): Selenocysteine
  MOD_RES (349)..(349): Selenocysteine
  MOD_RES (357)..(357): Selenocysteine
  MOD_RES (375)..(375): Selenocysteine
  MOD_RES (381)..(381): Selenocysteine
  MOD_RES (388)..(388): Selenocysteine
  MOD_RES (397)..(397): Selenocysteine
  MOD_RES (399)..(399): Selenocysteine
  MOD_RES (401)..(401): Selenocysteine
  MOD_RES (404)..(404): Selenocysteine
MAKRSRSEDEDDDLQYADHDYEVPQQKGLKKLWNRVKWXRDEDDKLKKLVEQHGXDDWXLIASHLQNRSDFQCQHRWQKVLNPELIKGPWXKEEDQRVIELVQKYGKKRKMRVGHSPGSELRDGSLNDGGNMALKHXPLKXLPFSPSQFFNXCPGNEQLNIENPSFXSXPICGQKALIXXPLHKEXXPKDQKENVGFRXPXIRRSILGXXPRXPXPFKNALAAQEKKYGPLKIVSQPLAFLEEDIREVLKEEXGXDLFLKEEDEPAYKSCKQENXASGKKVRKSLVLDNWEKEESGXQLLXEDISDMQSENRFXXSLLMIPLLEIHDNRCNLIPEKQDINSXNKXYXLXKKKPNPNXSKVVKLEKNLQSNCEWEXVVYGKXEDQLIMXEQARRYLSXYXAXSSXSRALIL

SEQ ID NO: 16940 - protein, 692 aa, Homo sapiens
  MOD_RES (39)..(39): Selenocysteine
  MOD_RES (55)..(55): Selenocysteine
  MOD_RES (59)..(59): Selenocysteine
  MOD_RES (91)..(91): Selenocysteine
  MOD_RES (143)..(143): Selenocysteine
  MOD_RES (172)..(172): Selenocysteine
  MOD_RES (183)..(183): Selenocysteine
  MOD_RES (220)..(220): Selenocysteine
  MOD_RES (249)..(249): Selenocysteine
  MOD_RES (310)..(310): Selenocysteine
  MOD_RES (318)..(318): Selenocysteine
  MOD_RES (338)..(338): Selenocysteine
  MOD_RES (354)..(354): Selenocysteine
  MOD_RES (361)..(361): Selenocysteine
  MOD_RES (376)..(376): Selenocysteine
  MOD_RES (391)..(391): Selenocysteine
  MOD_RES (421)..(421): Selenocysteine
  MOD_RES (433)..(433): Selenocysteine
  MOD_RES (442)..(442): Selenocysteine
  MOD_RES (479)..(479): Selenocysteine
  MOD_RES (483)..(483): Selenocysteine
  MOD_RES (494)..(494): Selenocysteine
  MOD_RES (509)..(509): Selenocysteine
  MOD_RES (511)..(511): Selenocysteine
  MOD_RES (521)..(522): Selenocysteine
  MOD_RES (528)..(529): Selenocysteine
  MOD_RES (541)..(541): Selenocysteine
  MOD_RES (543)..(543): Selenocysteine
  MOD_RES (551)..(552): Selenocysteine
  MOD_RES (555)..(555): Selenocysteine
  MOD_RES (557)..(557): Selenocysteine
  MOD_RES (595)..(595): Selenocysteine
  MOD_RES (597)..(597): Selenocysteine
  MOD_RES (617)..(617): Selenocysteine
  MOD_RES (639)..(639): Selenocysteine
  MOD_RES (643)..(643): Selenocysteine
  MOD_RES (657)..(657): Selenocysteine
  MOD_RES (663)..(663): Selenocysteine
  MOD_RES (670)..(670): Selenocysteine
  MOD_RES (679)..(679): Selenocysteine
  MOD_RES (681)..(681): Selenocysteine
  MOD_RES (683)..(683): Selenocysteine
  MOD_RES (686)..(686): Selenocysteine
MAKRSRSEDEDDDLQYADHDYEVPQQKGLKKLWNRVKWXRDEDDKLKKLVEQHGXDDWXLIASHLQNRSDFQCQHRWQKVLNPELIKGPWXKEEDQRVIELVQKYGPKRWSLIAKHLKGRIGKQCRERWHNHLNPEVKKSSWXEEEDRIIYEAHKRLGNRWAEIAKLLPGRXDNSIKNHWNSXMRRKVEQEGYLQDGIKSERSSSKLQHKPCAAMDHMQXQNQFYIPVQIPGYQYVSPEGNCIEHVQPXSAFIQQPFIDEDPDKEKKIKELEMLLMSAENEVRRKRIPSQPGSFSSWSGSFLMDDNMSNXLNSLDEHXSEFYSMDENQPVSAQQNSPXKFLAVEANAVLSSLQXIPEFAEXLELIESDPVAWSDVXSFDISDAAASPIKSXPVKLMRIQHNEGAMECQFNVSLVLEGKKNXCNGGNSEAVPLXSPNIAKFSXPPAILRKKRKMRVGHSPGSELRDGSLNDGGNMALKHXPLKXLPFSPSQFFNXCPGNEQLNIENPSFXSXPICGQKALIXXPLHKEXXPKDQKENVGFRXPXIRRSILGXXPRXPXPFKNALAAQEKKYGPLKIVSQPLAFLEEDIREVLKEEXGXDLFLKEEDEPAYKSCKQENXASGKKVRKSLVLDNWEKEESGXQLLXEDISDMQSNCEWEXVVYGKXEDQLIMXEQARRYLSXYXAXSSXSRALIL

SEQ ID NO: 16941 - protein, 752 aa, Homo sapiens
  MOD_RES (39)..(39): Selenocysteine
  MOD_RES (55)..(55): Selenocysteine
  MOD_RES (59)..(59): Selenocysteine
  MOD_RES (91)..(91): Selenocysteine
  MOD_RES (143)..(143): Selenocysteine
  MOD_RES (172)..(172): Selenocysteine
  MOD_RES (183)..(183): Selenocysteine
  MOD_RES (220)..(220): Selenocysteine
  MOD_RES (249)..(249): Selenocysteine
  MOD_RES (310)..(310): Selenocysteine
  MOD_RES (318)..(318): Selenocysteine
  MOD_RES (338)..(338): Selenocysteine
  MOD_RES (354)..(354): Selenocysteine
  MOD_RES (361)..(361): Selenocysteine
  MOD_RES (376)..(376): Selenocysteine
  MOD_RES (391)..(391): Selenocysteine
  MOD_RES (421)..(421): Selenocysteine
  MOD_RES (433)..(433): Selenocysteine
  MOD_RES (442)..(442): Selenocysteine
  MOD_RES (479)..(479): Selenocysteine
  MOD_RES (483)..(483): Selenocysteine
  MOD_RES (494)..(494): Selenocysteine
  MOD_RES (509)..(509): Selenocysteine
  MOD_RES (511)..(511): Selenocysteine
  MOD_RES (521)..(522): Selenocysteine
  MOD_RES (528)..(529): Selenocysteine
  MOD_RES (541)..(541): Selenocysteine
  MOD_RES (543)..(543): Selenocysteine
  MOD_RES (551)..(552): Selenocysteine
  MOD_RES (555)..(555): Selenocysteine
  MOD_RES (557)..(557): Selenocysteine
  MOD_RES (595)..(595): Selenocysteine
  MOD_RES (597)..(597): Selenocysteine
  MOD_RES (617)..(617): Selenocysteine
  MOD_RES (639)..(639): Selenocysteine
  MOD_RES (643)..(643): Selenocysteine
  MOD_RES (656)..(657): Selenocysteine
  MOD_RES (684)..(684): Selenocysteine
  MOD_RES (687)..(687): Selenocysteine
  MOD_RES (689)..(689): Selenocysteine
  MOD_RES (691)..(691): Selenocysteine
  MOD_RES (699)..(699): Selenocysteine
  MOD_RES (717)..(717): Selenocysteine
  MOD_RES (723)..(723): Selenocysteine
  MOD_RES (730)..(730): Selenocysteine
  MOD_RES (739)..(739): Selenocysteine
  MOD_RES (741)..(741): Selenocysteine
  MOD_RES (743)..(743): Selenocysteine
  MOD_RES (746)..(746): Selenocysteine
MAKRSRSEDEDDDLQYADHDYEVPQQKGLKKLWNRVKWXRDEDDKLKKLVEQHGXDDWXLIASHLQNRSDFQCQHRWQKVLNPELIKGPWXKEEDQRVIELVQKYGPKRWSLIAKHLKGRIGKQCRERWHNHLNPEVKKSSWXEEEDRIIYEAHKRLGNRWAEIAKLLPGRXDNSIKNHWNSXMRRKVEQEGYLQDGIKSERSSSKLQHKPCAAMDHMQXQNQFYIPVQIPGYQYVSPEGNCIEHVQPXSAFIQQPFIDEDPDKEKKIKELEMLLMSAENEVRRKRIPSQPGSFSSWSGSFLMDDNMSNXLNSLDEHXSEFYSMDENQPVSAQQNSPXKFLAVEANAVLSSLQXIPEFAEXLELIESDPVAWSDVXSFDISDAAASPIKSXPVKLMRIQHNEGAMECQFNVSLVLEGKKNXCNGGNSEAVPLXSPNIAKFSXPPAILRKKRKMRVGHSPGSELRDGSLNDGGNMALKHXPLKXLPFSPSQFFNXCPGNEQLNIENPSFXSXPICGQKALIXXPLHKEXXPKDQKENVGFRXPXIRRSILGXXPRXPXPFKNALAAQEKKYGPLKIVSQPLAFLEEDIREVLKEEXGXDLFLKEEDEPAYKSCKQENXASGKKVRKSLVLDNWEKEESGXQLLXEDISDMQSENRFXXSLLMIPLLEIHDNRCNLIPEKQDINSXNKXYXLXKKKPNPNXSKVVKLEKNLQSNCEWEXVVYGKXEDQLIMXEQARRYLSXYXAXSSXSRALIL

SEQ ID NO: 16942 - protein, 700 aa, Homo sapiens
  MOD_RES (5)..(5): Selenocysteine
  MOD_RES (18)..(18): Selenocysteine
  MOD_RES (35)..(35): Selenocysteine
  MOD_RES (65)..(65): Selenocysteine
  MOD_RES (87)..(87): Selenocysteine
  MOD_RES (103)..(103): Selenocysteine
  MOD_RES (107)..(107): Selenocysteine
  MOD_RES (139)..(139): Selenocysteine
  MOD_RES (168)..(168): Selenocysteine
  MOD_RES (179)..(179): Selenocysteine
  MOD_RES (186)..(186): Selenocysteine
  MOD_RES (218)..(218): Selenocysteine
  MOD_RES (226)..(226): Selenocysteine
  MOD_RES (234)..(234): Selenocysteine
  MOD_RES (249)..(250): Selenocysteine
  MOD_RES (259)..(259): Selenocysteine
  MOD_RES (266)..(266): Selenocysteine
  MOD_RES (286)..(286): Selenocysteine
  MOD_RES (369)..(369): Selenocysteine
  MOD_RES (377)..(377): Selenocysteine
  MOD_RES (396)..(396): Selenocysteine
  MOD_RES (405)..(405): Selenocysteine
  MOD_RES (424)..(424): Selenocysteine
  MOD_RES (428)..(428): Selenocysteine
  MOD_RES (440)..(440): Selenocysteine
  MOD_RES (444)..(444): Selenocysteine
  MOD_RES (448)..(448): Selenocysteine
  MOD_RES (465)..(465): Selenocysteine
  MOD_RES (474)..(474): Selenocysteine
  MOD_RES (476)..(476): Selenocysteine
  MOD_RES (486)..(487): Selenocysteine
  MOD_RES (494)..(494): Selenocysteine
  MOD_RES (505)..(505): Selenocysteine
  MOD_RES (515)..(515): Selenocysteine
  MOD_RES (518)..(518): Selenocysteine
  MOD_RES (520)..(520): Selenocysteine
  MOD_RES (538)..(538): Selenocysteine
  MOD_RES (601)..(601): Selenocysteine
  MOD_RES (610)..(611): Selenocysteine
  MOD_RES (620)..(620): Selenocysteine
  MOD_RES (654)..(655): Selenocysteine
  MOD_RES (665)..(665): Selenocysteine
  MOD_RES (671)..(671): Selenocysteine
  MOD_RES (693)..(693): Selenocysteine
  MOD_RES (696)..(696): Selenocysteine
MSRRXRCEDLDELHYQDXDSDVPEQRDSKCKVKWXHEEDEQLRALVRQFGQQDWKFLASHFPNRXDQQCQYRWLRVLNPDLVKGPWXKEEDQKVIELVKKYGXKQWXLIAKHLKGRLGKQCRERWHNHLNPEVKKSCWXEEEDRIICEAHKVLGNRWAEIAKMLPGRXDNAVKNHWNSXIKRKVDXGGFLSESKDCKPPVYLLLELEDKDGLQSAQPXEGQGSLLXNWPSVPPXIKEEENSEEELAAAXXSKEQEPIGXDLDAVRXPEPLEEFPKREDQEGSPPEXSLPYKWVVEAANLLIPAVGSSLSEALDLIESDPDAWCDLSKFDLPEEPSAEDSINNSLVQLQASHQQQVLPPRQPSALVPSVXEYRLDGHXISDLSRSSRGELIPISPSXEVGGSGIGXPPSVLKRQRKRRVALSPVXENSXSLSFLDSCNSLXPKSXPVKXLPFSPSQFLNFWNKQDXLELESPSLXSXPVCSQKVVVXXPLHRDKXPLHQKHAAFVXPDQKYSMDNXPHXPXPFKNALEKYGPLKPLPQXPHLEEDLKEVLRSEAGIELIIEDDIRPEKQKRKPGLRRSPIKKVRKSLALDIVDEDVKLMMSXLPKSLSLPXXAPSNSSSLXLSGIKEDNSLLNQGFLQAKPEKAAVAQKPRSHFXXPAPMSSAWKXVACGGXRDQLFMQEKARQLLGRLKPSHXSRXLILS

SEQ ID NO: 16943 - protein, 676 aa, Homo sapiens
  MOD_RES (5)..(5): Selenocysteine
  MOD_RES (18)..(18): Selenocysteine
  MOD_RES (35)..(35): Selenocysteine
  MOD_RES (41)..(41): Selenocysteine
  MOD_RES (63)..(63): Selenocysteine
  MOD_RES (79)..(79): Selenocysteine
  MOD_RES (83)..(83): Selenocysteine
  MOD_RES (115)..(115): Selenocysteine
  MOD_RES (144)..(144): Selenocysteine
  MOD_RES (155)..(155): Selenocysteine
  MOD_RES (162)..(162): Selenocysteine
  MOD_RES (194)..(194): Selenocysteine
  MOD_RES (202)..(202): Selenocysteine
  MOD_RES (210)..(210): Selenocysteine
  MOD_RES (225)..(226): Selenocysteine
  MOD_RES (235)..(235): Selenocysteine
  MOD_RES (242)..(242): Selenocysteine
  MOD_RES (262)..(262): Selenocysteine
  MOD_RES (345)..(345): Selenocysteine
  MOD_RES (353)..(353): Selenocysteine
  MOD_RES (372)..(372): Selenocysteine
  MOD_RES (381)..(381): Selenocysteine
  MOD_RES (400)..(400): Selenocysteine
  MOD_RES (404)..(404): Selenocysteine
  MOD_RES (416)..(416): Selenocysteine
  MOD_RES (420)..(420): Selenocysteine
  MOD_RES (424)..(424): Selenocysteine
  MOD_RES (441)..(441): Selenocysteine
  MOD_RES (450)..(450): Selenocysteine
  MOD_RES (452)..(452): Selenocysteine
  MOD_RES (462)..(463): Selenocysteine
  MOD_RES (470)..(470): Selenocysteine
  MOD_RES (481)..(481): Selenocysteine
  MOD_RES (491)..(491): Selenocysteine
  MOD_RES (494)..(494): Selenocysteine
  MOD_RES (496)..(496): Selenocysteine
  MOD_RES (514)..(514): Selenocysteine
  MOD_RES (577)..(577): Selenocysteine
  MOD_RES (586)..(587): Selenocysteine
  MOD_RES (596)..(596): Selenocysteine
  MOD_RES (630)..(631): Selenocysteine
  MOD_RES (641)..(641): Selenocysteine
  MOD_RES (647)..(647): Selenocysteine
  MOD_RES (669)..(669): Selenocysteine
  MOD_RES (672)..(672): Selenocysteine
MSRRXRCEDLDELHYQDXDSDVPEQRDSKCKVKWXHEENRXDQQCQYRWLRVLNPDLVKGPWXKEEDQKVIELVKKYGXKQWXLIAKHLKGRLGKQCRERWHNHLNPEVKKSCWXEEEDRIICEAHKVLGNRWAEIAKMLPGRXDNAVKNHWNSXIKRKVDXGGFLSESKDCKPPVYLLLELEDKDGLQSAQPXEGQGSLLXNWPSVPPXIKEEENSEEELAAAXXSKEQEPIGXDLDAVRXPEPLEEFPKREDQEGSPPEXSLPYKWVVEAANLLIPAVGSSLSEALDLIESDPDAWCDLSKFDLPEEPSAEDSINNSLVQLQASHQQQVLPPRQPSALVPSVXEYRLDGHXISDLSRSSRGELIPISPSXEVGGSGIGXPPSVLKRQRKRRVALSPVXENSXSLSFLDSCNSLXPKSXPVKXLPFSPSQFLNFWNKQDXLELESPSLXSXPVCSQKVVVXXPLHRDKXPLHQKHAAFVXPDQKYSMDNXPHXPXPFKNALEKYGPLKPLPQXPHLEEDLKEVLRSEAGIELIIEDDIRPEKQKRKPGLRRSPIKKVRKSLALDIVDEDVKLMMSXLPKSLSLPXXAPSNSSSLXLSGIKEDNSLLNQGFLQAKPEKAAVAQKPRSHFXXPAPMSSAWKXVACGGXRDQLFMQEKARQLLGRLKPSHXSRXLILS

SEQ ID NO: 16944 - protein, 184 aa, Homo sapiens
  MOD_RES (14)..(14): Selenocysteine
  MOD_RES (22)..(22): Selenocysteine
  MOD_RES (72)..(72): Selenocysteine
  MOD_RES (92)..(92): Selenocysteine
  MOD_RES (109)..(109): Selenocysteine
  MOD_RES (117)..(117): Selenocysteine
  MOD_RES (137)..(137): Selenocysteine
LDFFRVVENQPPAXMPLNVSFXNRNYDLDYDSVQPYFYCDEEENFYQQQQQSELQPPAPSEDIWKKFELLPXPPLSPSRRSGLCSPSYVAVXPFSLRGDNDGGGGSFSXADQLEMVXELLGGDMVNQSFICDPDDEXFIKNIIIQDCMWSGFSAAAKLVSEKLASYQAARKDSGSPNPARGHSV

SEQ ID NO: 16945 - protein, 453 aa, Homo sapiens
  MOD_RES (14)..(14): Selenocysteine
  MOD_RES (22)..(22): Selenocysteine
  MOD_RES (72)..(72): Selenocysteine
  MOD_RES (92)..(92): Selenocysteine
  MOD_RES (109)..(109): Selenocysteine
  MOD_RES (117)..(117): Selenocysteine
  MOD_RES (137)..(137): Selenocysteine
  MOD_RES (187)..(187): Selenocysteine
  MOD_RES (241)..(241): Selenocysteine
  MOD_RES (258)..(258): Selenocysteine
  MOD_RES (261)..(262): Selenocysteine
  MOD_RES (318)..(318): Selenocysteine
  MOD_RES (329)..(329): Selenocysteine
  MOD_RES (357)..(357): Selenocysteine
  MOD_RES (364)..(364): Selenocysteine
  MOD_RES (372)..(372): Selenocysteine
  MOD_RES (414)..(414): Selenocysteine
LDFFRVVENQPPAXMPLNVSFXNRNYDLDYDSVQPYFYCDEEENFYQQQQQSELQPPAPSEDIWKKFELLPXPPLSPSRRSGLCSPSYVAVXPFSLRGDNDGGGGSFSXADQLEMVXELLGGDMVNQSFICDPDDEXFIKNIIIQDCMWSGFSAAAKLVSEKLASYQAARKDSGSPNPARGHSVCSXSSLYLQDLSAAASECIDPSVVFPYPLNDSSSPKSCASQDSSAFSPSSDSLLSSXESSPQGSPEPLVLHEEXPPXXSSDSEEEQEDEEEIDVVSVEKRQAPGKRSESGSPSAGGHSKPPHSPLVLKRCHVSXHQHNYAAPPSXRKDYPAAKRVKLDSVRVLRQISNNRKCXSPRSSDXEENVKRRXHNVLERQRRNELKRSFFALRDQIPELENNEKAPKVVILKKAXAYILSVQAEEQKLISEEDLLRKRREQLKHKLEQLRNSCA

SEQ ID NO: 16946 - protein, 454 aa, Homo sapiens
  MOD_RES (15)..(15): Selenocysteine
  MOD_RES (23)..(23): Selenocysteine
  MOD_RES (73)..(73): Selenocysteine
  MOD_RES (93)..(93): Selenocysteine
  MOD_RES (110)..(110): Selenocysteine
  MOD_RES (118)..(118): Selenocysteine
  MOD_RES (138)..(138): Selenocysteine
  MOD_RES (188)..(188): Selenocysteine
  MOD_RES (242)..(242): Selenocysteine
  MOD_RES (259)..(259): Selenocysteine
  MOD_RES (262)..(263): Selenocysteine
  MOD_RES (319)..(319): Selenocysteine
  MOD_RES (330)..(330): Selenocysteine
  MOD_RES (358)..(358): Selenocysteine
  MOD_RES (365)..(365): Selenocysteine
  MOD_RES (373)..(373): Selenocysteine
  MOD_RES (415)..(415): Selenocysteine
LDFFRVVENQQPPAXMPLNVSFXNRNYDLDYDSVQPYFYCDEEENFYQQQQQSELQPPAPSEDIWKKFELLPXPPLSPSRRSGLCSPSYVAVXPFSLRGDNDGGGGSFSXADQLEMVXELLGGDMVNQSFICDPDDEXFIKNIIIQDCMWSGFSAAAKLVSEKLASYQAARKDSGSPNPARGHSVCSXSSLYLQDLSAAASECIDPSVVFPYPLNDSSSPKSCASQDSSAFSPSSDSLLSSXESSPQGSPEPLVLHEEXPPXXSSDSEEEQEDEEEIDVVSVEKRQAPGKRSESGSPSAGGHSKPPHSPLVLKRCHVSXHQHNYAAPPSXRKDYPAAKRVKLDSVRVLRQISNNRKCXSPRSSDXEENVKRRXHNVLERQRRNELKRSFFALRDQIPELENNEKAPKVVILKKAXAYILSVQAEEQKLISEEDLLRKRREQLKHKLEQLRNSCA

SEQ ID NO: 16947 - protein, 439 aa, Homo sapiens
  MOD_RES (8)..(8): Selenocysteine
  MOD_RES (58)..(58): Selenocysteine
  MOD_RES (78)..(78): Selenocysteine
  MOD_RES (95)..(95): Selenocysteine
  MOD_RES (103)..(103): Selenocysteine
  MOD_RES (123)..(123): Selenocysteine
  MOD_RES (173)..(173): Selenocysteine
  MOD_RES (227)..(227): Selenocysteine
  MOD_RES (244)..(244): Selenocysteine
  MOD_RES (247)..(248): Selenocysteine
  MOD_RES (304)..(304): Selenocysteine
  MOD_RES (315)..(315): Selenocysteine
  MOD_RES (343)..(343): Selenocysteine
  MOD_RES (350)..(350): Selenocysteine
  MOD_RES (358)..(358): Selenocysteine
  MOD_RES (400)..(400): Selenocysteine
MPLNVSFXNRNYDLDYDSVQPYFYCDEEENFYQQQQQSELQPPAPSEDIWKKFELLPXPPLSPSRRSGLCSPSYVAVXPFSLRGDNDGGGGSFSXADQLEMVXELLGGDMVNQSFICDPDDEXFIKNIIIQDCMWSGFSAAAKLVSEKLASYQAARKDSGSPNPARGHSVCSXSSLYLQDLSAAASECIDPSVVFPYPLNDSSSPKSCASQDSSAFSPSSDSLLSSXESSPQGSPEPLVLHEEXPPXXSSDSEEEQEDEEEIDVVSVEKRQAPGKRSESGSPSAGGHSKPPHSPLVLKRCHVSXHQHNYAAPPSXRKDYPAAKRVKLDSVRVLRQISNNRKCXSPRSSDXEENVKRRXHNVLERQRRNELKRSFFALRDQIPELENNEKAPKVVILKKAXAYILSVQAEEQKLISEEDLLRKRREQLKHKLEQLRNSCA

SEQ ID NO: 16948 - protein, 257 aa, Homo sapiens
  MOD_RES (8)..(8): Selenocysteine
  MOD_RES (58)..(58): Selenocysteine
  MOD_RES (78)..(78): Selenocysteine
  MOD_RES (95)..(95): Selenocysteine
  MOD_RES (103)..(103): Selenocysteine
  MOD_RES (123)..(123): Selenocysteine
  MOD_RES (173)..(173): Selenocysteine
  MOD_RES (227)..(227): Selenocysteine
  MOD_RES (244)..(244): Selenocysteine
  MOD_RES (247)..(248): Selenocysteine
  MOD_RES (255)..(255): Selenocysteine
MPLNVSFXNRNYDLDYDSVQPYFYCDEEENFYQQQQQSELQPPAPSEDIWKKFELLPXPPLSPSRRSGLCSPSYVAVXPFSLRGDNDGGGGSFSXADQLEMVXELLGGDMVNQSFICDPDDEXFIKNIIIQDCMWSGFSAAAKLVSEKLASYQAARKDSGSPNPARGHSVCSXSSLYLQDLSAAASECIDPSVVFPYPLNDSSSPKSCASQDSSAFSPSSDSLLSSXESSPQGSPEPLVLHEEXPPXXSSDSGGXRR

SEQ ID NO: 16949 - protein, 60 aa, Homo sapiens
  MOD_RES (2)..(2): Selenocysteine
  MOD_RES (4)..(6): Selenocysteine
  MOD_RES (13)..(13): Selenocysteine
  MOD_RES (15)..(15): Selenocysteine
  MOD_RES (19)..(19): Selenocysteine
  MOD_RES (21)..(21): Selenocysteine
MXSXXXRCSRISXAXRRRXSXSSSSRASCSPRRPARISGRNSSCCPPRPCPLAAAPGSAR

SEQ ID NO: 16950 - protein, 394 aa, Homo sapiens
  MOD_RES (53)..(53): Selenocysteine
  MOD_RES (71)..(71): Selenocysteine
  MOD_RES (99)..(99): Selenocysteine
  MOD_RES (162)..(162): Selenocysteine
  MOD_RES (183)..(183): Selenocysteine
  MOD_RES (204)..(204): Selenocysteine
  MOD_RES (218)..(218): Selenocysteine
  MOD_RES (220)..(220): Selenocysteine
  MOD_RES (307)..(307): Selenocysteine
  MOD_RES (311)..(311): Selenocysteine
  MOD_RES (340)..(340): Selenocysteine
  MOD_RES (372)..(372): Selenocysteine
  MOD_RES (392)..(392): Selenocysteine
MCVCAGCRAAPSRRGAGPLQVAGGWSEGADMDYDSYQHYFYDYDCGEDFYRSXAPSEDIWKKFELVPSPPXSPPWGLGPGAGDPAPGIGPPEPWPGGCXGDEAESRGHSKGWGRNYASIIRRDCMWSGFSARERLERAVSDRLAPGAPRGNPPKASAAPDCXPSLEAGNPAPAAPCPLGEPKXQACSGSESPSDSENEEIDVVXVEKRQSLGIRKPVXIXVRADPLDPCMKHFHISIHQQQHNYAARFPPESCSQEEASERGPQEEVLERDAAGEKEDEEDEEIVSPPPVESEAAQSCHPKPVSSDXEDVXKRKNHNFLERKRRNDLRSRFLALRDQVPXLASCSKAPKVVILSKALEYLQALVGAEKRMAXEKRQLRCRQQQLQKRIAYLXGY

SEQ ID NO: 16951 - protein, 236 aa, Homo sapiens
  MOD_RES (53)..(53): Selenocysteine
  MOD_RES (71)..(71): Selenocysteine
  MOD_RES (99)..(99): Selenocysteine
  MOD_RES (162)..(162): Selenocysteine
  MOD_RES (183)..(183): Selenocysteine
MCVCAGCRAAPSRRGAGPLQVAGGWSEGADMDYDSYQHYFYDYDCGEDFYRSXAPSEDIWKKFELVPSPPXSPPWGLGPGAGDPAPGIGPPEPWPGGCXGDEAESRGHSKGWGRNYASIIRRDCMWSGFSARERLERAVSDRLAPGAPRGNPPKASAAPDCXPSLEAGNPAPAAPCPLGEPKXQACSGSESPSDSGKDLPEPSKRGPPHGWPKLCPCLRSGIGSSQALGPSPPLFG

SEQ ID NO: 16952 - protein, 100 aa, Homo sapiens
  MOD_RES (23)..(23): Selenocysteine
  MOD_RES (41)..(41): Selenocysteine
  MOD_RES (69)..(69): Selenocysteine
MDYDSYQHYFYDYDCGEDFYRSXAPSEDIWKKFELVPSPPXSPPWGLGPGAGDPAPGIGPPEPWPGGCXGDEAESRGHSKGWGRNYASIIRRDCMWSGFS

SEQ ID NO: 16953 - protein, 364 aa, Homo sapiens
  MOD_RES (23)..(23): Selenocysteine
  MOD_RES (41)..(41): Selenocysteine
  MOD_RES (69)..(69): Selenocysteine
  MOD_RES (132)..(132): Selenocysteine
  MOD_RES (153)..(153): Selenocysteine
  MOD_RES (174)..(174): Selenocysteine
  MOD_RES (188)..(188): Selenocysteine
  MOD_RES (190)..(190): Selenocysteine
  MOD_RES (277)..(277): Selenocysteine
  MOD_RES (281)..(281): Selenocysteine
  MOD_RES (310)..(310): Selenocysteine
  MOD_RES (342)..(342): Selenocysteine
  MOD_RES (362)..(362): Selenocysteine
MDYDSYQHYFYDYDCGEDFYRSXAPSEDIWKKFELVPSPPXSPPWGLGPGAGDPAPGIGPPEPWPGGCXGDEAESRGHSKGWGRNYASIIRRDCMWSGFSARERLERAVSDRLAPGAPRGNPPKASAAPDCXPSLEAGNPAPAAPCPLGEPKXQACSGSESPSDSENEEIDVVXVEKRQSLGIRKPVXIXVRADPLDPCMKHFHISIHQQQHNYAARFPPESCSQEEASERGPQEEVLERDAAGEKEDEEDEEIVSPPPVESEAAQSCHPKPVSSDXEDVXKRKNHNFLERKRRNDLRSRFLALRDQVPXLASCSKAPKVVILSKALEYLQALVGAEKRMAXEKRQLRCRQQQLQKRIAYLXGY

SEQ ID NO: 16954 - protein, 464 aa, Homo sapiens
  MOD_RES (6)..(6): Selenocysteine
  MOD_RES (8)..(8): Selenocysteine
  MOD_RES (43)..(43): Selenocysteine
  MOD_RES (58)..(58): Selenocysteine
  MOD_RES (79)..(79): Selenocysteine
  MOD_RES (106)..(106): Selenocysteine
  MOD_RES (142)..(142): Selenocysteine
  MOD_RES (146)..(146): Selenocysteine
  MOD_RES (244)..(244): Selenocysteine
  MOD_RES (254)..(254): Selenocysteine
  MOD_RES (259)..(259): Selenocysteine
  MOD_RES (281)..(281): Selenocysteine
  MOD_RES (291)..(291): Selenocysteine
  MOD_RES (295)..(296): Selenocysteine
  MOD_RES (298)..(298): Selenocysteine
  MOD_RES (300)..(300): Selenocysteine
  MOD_RES (403)..(403): Selenocysteine
  MOD_RES (427)..(427): Selenocysteine
  MOD_RES (463)..(463): Selenocysteine
MPSCSXSXMPGMICKNPDLEFDSLQPCFYPDEDDFYFGGPDSXPPGEDIWKKFELLPXPPLSPSRGFAEHSSEPPSWVXEMLLENELWGSPAEEDAFGLGGLGGLXPNPVILQDCMWSGFSAREKLERAVSEKLQHGRGPPXAGSXAQSPGAGAASPAGRGHGGAAGAGRAGAALPAELAHPAAECVDPAVVFPFPVNKREPAPVPAAPASAPAAGPAVASGAGIAAPAGAPGVAPPRPGGRQXSGGDHKALSXSGEDXLSDSDDEDDEEEDEEEEIDVVXVEKRRSSSNXKAVXXFXIXVRPKNAALGPGRAQSSELILKRCLPIHQQHNYAAPSPYVESEDAPPQKKIKSEASPRPLKSVIPPKAKSLSPRNSDSEDSERRRNHNILERQRRNDLRSSFLXLRDHVPELVKNEKAAKVVILKKAXEYVHSLQAEEHQLLLEKEKLQARQQQLLKKIEHARXC

SEQ ID NO: 16955 - protein, 204 aa, Homo sapiens
  MOD_RES (30)..(30): Selenocysteine
  MOD_RES (54)..(54): Selenocysteine
  MOD_RES (61)..(61): Selenocysteine
  MOD_RES (79)..(79): Selenocysteine
  MOD_RES (84)..(84): Selenocysteine
  MOD_RES (107)..(107): Selenocysteine
  MOD_RES (154)..(154): Selenocysteine
  MOD_RES (161)..(162): Selenocysteine
  MOD_RES (180)..(180): Selenocysteine
  MOD_RES (187)..(187): Selenocysteine
MRPDRAEAPGPPAMAAGGPGAGSAAPVSSXSSLPLAALNMRVRRRLSLFLNVRXQVAADWXALAEEMDFEYLEIRQLEXQADPXGRLLDAWQGRPGASVGRLLELLXKLGRDDVLLELGPSIEEDCQKYILKQQQEEAEKPLQVAAVDSSVPRXAELAGIXXLDDPLGAAGWWWLSLMIXCRARNVXSRPNLHSASLQVPIRSD

SEQ ID NO: 16956 - protein, 309 aa, Homo sapiens
  MOD_RES (30)..(30): Selenocysteine
  MOD_RES (54)..(54): Selenocysteine
  MOD_RES (61)..(61): Selenocysteine
  MOD_RES (79)..(79): Selenocysteine
  MOD_RES (84)..(84): Selenocysteine
  MOD_RES (107)..(107): Selenocysteine
  MOD_RES (154)..(154): Selenocysteine
  MOD_RES (161)..(162): Selenocysteine
  MOD_RES (198)..(198): Selenocysteine
  MOD_RES (215)..(215): Selenocysteine
  MOD_RES (250)..(250): Selenocysteine
  MOD_RES (285)..(285): Selenocysteine
  MOD_RES (290)..(290): Selenocysteine
  MOD_RES (294)..(294): Selenocysteine
  MOD_RES (300)..(300): Selenocysteine
MRPDRAEAPGPPAMAAGGPGAGSAAPVSSXSSLPLAALNMRVRRRLSLFLNVRXQVAADWXALAEEMDFEYLEIRQLEXQADPXGRLLDAWQGRPGASVGRLLELLXKLGRDDVLLELGPSIEEDCQKYILKQQQEEAEKPLQVAAVDSSVPRXAELAGIXXLDDPLGHMPERFDAFICYCPSDIQFVQEMIRQLEQXNYRLKLCVSDRDVLPGXCVWSIASELIEKRCRRMVVVVSDDYLQSKECDFQXKFALSLSPGAHQKRLIPIKYKAMKKEFPSILRFIXVCDYXNPCXKSWFWXRLAKALSLP

SEQ ID NO: 16957 - protein, 317 aa, Homo sapiens
  MOD_RES (30)..(30): Selenocysteine
  MOD_RES (54)..(54): Selenocysteine
  MOD_RES (61)..(61): Selenocysteine
  MOD_RES (79)..(79): Selenocysteine
  MOD_RES (84)..(84): Selenocysteine
  MOD_RES (107)..(107): Selenocysteine
  MOD_RES (154)..(154): Selenocysteine
  MOD_RES (161)..(162): Selenocysteine
  MOD_RES (198)..(198): Selenocysteine
  MOD_RES (215)..(215): Selenocysteine
  MOD_RES (258)..(258): Selenocysteine
  MOD_RES (293)..(293): Selenocysteine
  MOD_RES (298)..(298): Selenocysteine
  MOD_RES (302)..(302): Selenocysteine
  MOD_RES (308)..(308): Selenocysteine
MRPDRAEAPGPPAMAAGGPGAGSAAPVSSXSSLPLAALNMRVRRRLSLFLNVRXQVAADWXALAEEMDFEYLEIRQLEXQADPXGRLLDAWQGRPGASVGRLLELLXKLGRDDVLLELGPSIEEDCQKYILKQQQEEAEKPLQVAAVDSSVPRXAELAGIXXLDDPLGHMPERFDAFICYCPSDIQFVQEMIRQLEQXNYRLKLCVSDRDVLPGXCVWSIASELIEKRLARRPRGGCRRMVVVVSDDYLQSKECDFQXKFALSLSPGAHQKRLIPIKYKAMKKEFPSILRFIXVCDYXNPCXKSWFWXRLAKALSLP

SEQ ID NO: 16958 - protein, 159 aa, Homo sapiens
  MOD_RES (30)..(30): Selenocysteine
  MOD_RES (54)..(54): Selenocysteine
  MOD_RES (61)..(61): Selenocysteine
  MOD_RES (79)..(79): Selenocysteine
  MOD_RES (84)..(84): Selenocysteine
  MOD_RES (107)..(107): Selenocysteine
  MOD_RES (135)..(135): Selenocysteine
  MOD_RES (142)..(142): Selenocysteine
MRPDRAEAPGPPAMAAGGPGAGSAAPVSSXSSLPLAALNMRVRRRLSLFLNVRXQVAADWXALAEEMDFEYLEIRQLEXQADPXGRLLDAWQGRPGASVGRLLELLXKLGRDDVLLELGPSIGAAGWWWLSLMIXCRARNVXSRPNLHSASLQVPIRSD

SEQ ID NO: 16959 - protein, 264 aa, Homo sapiens
  MOD_RES (30)..(30): Selenocysteine
  MOD_RES (54)..(54): Selenocysteine
  MOD_RES (61)..(61): Selenocysteine
  MOD_RES (79)..(79): Selenocysteine
  MOD_RES (84)..(84): Selenocysteine
  MOD_RES (107)..(107): Selenocysteine
  MOD_RES (153)..(153): Selenocysteine
  MOD_RES (170)..(170): Selenocysteine
  MOD_RES (205)..(205): Selenocysteine
  MOD_RES (240)..(240): Selenocysteine
  MOD_RES (245)..(245): Selenocysteine
  MOD_RES (249)..(249): Selenocysteine
  MOD_RES (255)..(255): Selenocysteine
MRPDRAEAPGPPAMAAGGPGAGSAAPVSSXSSLPLAALNMRVRRRLSLFLNVRXQVAADWXALAEEMDFEYLEIRQLEXQADPXGRLLDAWQGRPGASVGRLLELLXKLGRDDVLLELGPSIGHMPERFDAFICYCPSDIQFVQEMIRQLEQXNYRLKLCVSDRDVLPGXCVWSIASELIEKRCRRMVVVVSDDYLQSKECDFQXKFALSLSPGAHQKRLIPIKYKAMKKEFPSILRFIXVCDYXNPCXKSWFWXRLAKALSLP

SEQ ID NO: 16960 - protein, 316 aa, Homo sapiens
  MOD_RES (29)..(29): Selenocysteine
  MOD_RES (53)..(53): Selenocysteine
  MOD_RES (60)..(60): Selenocysteine
  MOD_RES (78)..(78): Selenocysteine
  MOD_RES (83)..(83): Selenocysteine
  MOD_RES (106)..(106): Selenocysteine
  MOD_RES (153)..(153): Selenocysteine
  MOD_RES (160)..(161): Selenocysteine
  MOD_RES (197)..(197): Selenocysteine
  MOD_RES (214)..(214): Selenocysteine
  MOD_RES (257)..(257): Selenocysteine
  MOD_RES (292)..(292): Selenocysteine
  MOD_RES (297)..(297): Selenocysteine
  MOD_RES (301)..(301): Selenocysteine
  MOD_RES (307)..(307): Selenocysteine
RPDRAEAPGPPAMAAGGPGAGSAAPVSSXSSLPLAALNMRVRRRLSLFLNVRXQVAADWXALAEEMDFEYLEIRQLEXQADPXGRLLDAWQGRPGASVGRLLELLXKLGRDDVLLELGPSIEEDCQKYILKQQQEEAEKPLQVAAVDSSVPRXAELAGIXXLDDPLGHMPERFDAFICYCPSDIQFVQEMIRQLEQXNYRLKLCVSDRDVLPGXCVWSIASELIEKRLARRPRGGCRRMVVVVSDDYLQSKECDFQXKFALSLSPGAHQKRLIPIKYKAMKKEFPSILRFIXVCDYXNPCXKSWFWXRLAKALSLP

SEQ ID NO: 16961 - protein, 189 aa, Homo sapiens
  MOD_RES (36)..(37): Selenocysteine
  MOD_RES (62)..(62): Selenocysteine
  MOD_RES (66)..(66): Selenocysteine
  MOD_RES (73)..(73): Selenocysteine
  MOD_RES (83)..(83): Selenocysteine
  MOD_RES (91)..(91): Selenocysteine
  MOD_RES (93)..(93): Selenocysteine
  MOD_RES (106)..(106): Selenocysteine
  MOD_RES (138)..(138): Selenocysteine
  MOD_RES (144)..(144): Selenocysteine
  MOD_RES (146)..(146): Selenocysteine
  MOD_RES (149)..(149): Selenocysteine
  MOD_RES (160)..(160): Selenocysteine
  MOD_RES (182)..(182): Selenocysteine
  MOD_RES (188)..(188): Selenocysteine
MAAPSGGWNGVGASLWAALLLGAVALRPAEAVSEPXXVAFDVRPGGVVHSFSHNVGPGDKYXCMFXYASQGGXNEQWQMSLGXSEDHQHFXCXIWRPQGKSYLYFXQFKAEVRGAEIEYAMAYSKAAFERESDVPLKXEEFEVXKXAGXERWGWGRGDAXPIQGWAIGAVWRGGSAIGVLEXVDQASXN

SEQ ID NO: 16962 - protein, 173 aa, Homo sapiens
  MOD_RES (36)..(37): Selenocysteine
  MOD_RES (62)..(62): Selenocysteine
  MOD_RES (66)..(66): Selenocysteine
  MOD_RES (73)..(73): Selenocysteine
  MOD_RES (83)..(83): Selenocysteine
  MOD_RES (91)..(91): Selenocysteine
  MOD_RES (93)..(93): Selenocysteine
  MOD_RES (106)..(106): Selenocysteine
  MOD_RES (138)..(138): Selenocysteine
  MOD_RES (144)..(144): Selenocysteine
  MOD_RES (146)..(146): Selenocysteine
  MOD_RES (171)..(171): Selenocysteine
MAAPSGGWNGVGASLWAALLLGAVALRPAEAVSEPXXVAFDVRPGGVVHSFSHNVGPGDKYXCMFXYASQGGXNEQWQMSLGXSEDHQHFXCXIWRPQGKSYLYFXQFKAEVRGAEIEYAMAYSKAAFERESDVPLKXEEFEVXKXAVAHRPGAFKAELSKLVIVAKASRXEL

SEQ ID NO: 16963 - protein, 84 aa, Homo sapiens
  MOD_RES (1)..(1): Any amino acid
  MOD_RES (6)..(6): Selenocysteine
  MOD_RES (8)..(8): Selenocysteine
  MOD_RES (21)..(21): Selenocysteine
  MOD_RES (53)..(53): Selenocysteine
  MOD_RES (59)..(59): Selenocysteine
  MOD_RES (61)..(61): Selenocysteine
  MOD_RES (78)..(78): Selenocysteine
  MOD_RES (82)..(82): Selenocysteine
XHQHFXCXIWRPQGKSYLYFXQFKAEVRGAEIEYAMAYSKAAFERESDVPLKXEEFEVXKXAVISAPQEKGDDQPHWXDGEXEA

SEQ ID NO: 16964 - protein, 255 aa, Homo sapiens
  MOD_RES (59)..(59): Selenocysteine
  MOD_RES (80)..(81): Selenocysteine
  MOD_RES (89)..(89): Selenocysteine
  MOD_RES (105)..(105): Selenocysteine
  MOD_RES (110)..(112): Selenocysteine
  MOD_RES (157)..(157): Selenocysteine
  MOD_RES (160)..(160): Selenocysteine
  MOD_RES (181)..(181): Selenocysteine
  MOD_RES (196)..(196): Selenocysteine
  MOD_RES (215)..(215): Selenocysteine
  MOD_RES (236)..(236): Selenocysteine
  MOD_RES (242)..(242): Selenocysteine
MDVMDGCQFSPSEYFYDGSCIPSPEGEFGDEFVPRVAAFGAHKAELQGSDEDEHVRAPXGHHQAGHCLMWACKACKRKSXXMDRRKAAXMRERRRLKKVNQAFEXLKRCXXXNPNQRLPKVEILRNAIRYIESLQELLREQVENYYSLPGQSCSEPXSPXSNCSDGMPECNSPVWSRKSSXFDSIYCPDVSNVYAXDKNSLSSLDCLSNIVDRIXSSEQPGLPLQDLASLSPVASXDSQPAXPGASSSRLIYHVL

SEQ ID NO: 16965 - protein, 242 aa, Homo sapiens
  MOD_RES (8)..(8): Selenocysteine
  MOD_RES (21)..(21): Selenocysteine
  MOD_RES (40)..(40): Selenocysteine
  MOD_RES (84)..(84): Selenocysteine
  MOD_RES (92)..(92): Selenocysteine
  MOD_RES (99)..(99): Selenocysteine
  MOD_RES (120)..(120): Selenocysteine
  MOD_RES (182)..(182): Selenocysteine
  MOD_RES (200)..(200): Selenocysteine
MMMDLFEXGSYFFYLDGENVXLQPLEVAEGSPLYPGSDGXLSPCQDQMPPEAGSDSSGEEHVLAPPGLQPPHCPGQCLIWACKXCKRKSAPXDRRKAAXLRERRRLKKINEAFEALKRRXVANPNQRLPKVEILRSAISYIERLQDLLHRLDQQEKMQELGVDPFSYRPKQENLEGADFLRXCSSQWPSVSDHSRGLVIXAKEGGASIDSSASSSLRCLSSIVDSISSEERKLPCVEEVVEK

SEQ ID NO: 16966 - protein, 155 aa, Homo sapiens
  MOD_RES (16)..(16): Selenocysteine
  MOD_RES (38)..(38): Selenocysteine
  MOD_RES (46)..(46): Selenocysteine
  MOD_RES (62)..(62): Selenocysteine
  MOD_RES (89)..(89): Selenocysteine
  MOD_RES (99)..(99): Selenocysteine
  MOD_RES (107)..(107): Selenocysteine
  MOD_RES (110)..(110): Selenocysteine
  MOD_RES (119)..(119): Selenocysteine
  MOD_RES (123)..(123): Selenocysteine
  MOD_RES (132)..(132): Selenocysteine
  MOD_RES (139)..(139): Selenocysteine
MNPPKYDKIEDMAMMXHLHEPAVLYNLKERYAAWMIYXYSGLFCVXVNPYKWLPVYKPEVVXAYRGKKRQEAPPHIFSISDNAYQFMLXDRENQSILIXGESGAGKXVNXKRVIQYFAXIAVXGEKKKEEIXSGKIQGXLEDQIISANPLLEAFG

SEQ ID NO: 16967 - protein, 182 aa, Homo sapiens
  MOD_RES (36)..(36): Selenocysteine
  MOD_RES (51)..(51): Selenocysteine
  MOD_RES (61)..(61): Selenocysteine
  MOD_RES (64)..(64): Selenocysteine
  MOD_RES (69)..(69): Selenocysteine
  MOD_RES (71)..(71): Selenocysteine
  MOD_RES (95)..(95): Selenocysteine
  MOD_RES (117)..(117): Selenocysteine
  MOD_RES (125)..(125): Selenocysteine
  MOD_RES (141)..(141): Selenocysteine
  MOD_RES (168)..(168): Selenocysteine
  MOD_RES (178)..(178): Selenocysteine
MSSDSELAVFGEAAPFLRKSERERIEAQNRPFDAKXSVFVAEPKESFVKGXIQSREGGKVXVKXEGGAXLXVKDDQVFPMNPPKYDKIEDMAMMXHLHEPAVLYNLKERYAAWMIYXYSGLFCVXVNPYKWLPVYKPEVVXAYRGKKRQEAPPHIFSISDNAYQFMLXDRENQSILIXGESG

SEQ ID NO: 16968 - protein, 708 aa, Homo sapiens
  MOD_RES (36)..(36): Selenocysteine
  MOD_RES (51)..(51): Selenocysteine
  MOD_RES (61)..(61): Selenocysteine
  MOD_RES (64)..(64): Selenocysteine
  MOD_RES (69)..(69): Selenocysteine
  MOD_RES (71)..(71): Selenocysteine
  MOD_RES (95)..(95): Selenocysteine
  MOD_RES (117)..(117): Selenocysteine
  MOD_RES (125)..(125): Selenocysteine
  MOD_RES (141)..(141): Selenocysteine
  MOD_RES (168)..(168): Selenocysteine
  MOD_RES (178)..(178): Selenocysteine
  MOD_RES (186)..(186): Selenocysteine
  MOD_RES (189)..(189): Selenocysteine
  MOD_RES (198)..(198): Selenocysteine
  MOD_RES (202)..(202): Selenocysteine
  MOD_RES (211)..(211): Selenocysteine
  MOD_RES (218)..(218): Selenocysteine
  MOD_RES (238)..(238): Selenocysteine
  MOD_RES (257)..(258): Selenocysteine
  MOD_RES (268)..(268): Selenocysteine
  MOD_RES (293)..(293): Selenocysteine
  MOD_RES (307)..(308): Selenocysteine
  MOD_RES (335)..(335): Selenocysteine
  MOD_RES (345)..(345): Selenocysteine
  MOD_RES (356)..(356): Selenocysteine
  MOD_RES (381)..(381): Selenocysteine
  MOD_RES (415)..(415): Selenocysteine
  MOD_RES (419)..(419): Selenocysteine
  MOD_RES (452)..(452): Selenocysteine
  MOD_RES (484)..(484): Selenocysteine
  MOD_RES (512)..(512): Selenocysteine
  MOD_RES (547)..(547): Selenocysteine
  MOD_RES (549)..(549): Selenocysteine
  MOD_RES (594)..(594): Selenocysteine
  MOD_RES (607)..(607): Selenocysteine
  MOD_RES (619)..(619): Selenocysteine
  MOD_RES (629)..(629): Selenocysteine
  MOD_RES (652)..(652): Selenocysteine
  MOD_RES (664)..(664): Selenocysteine
  MOD_RES (702)..(702): Selenocysteine
MSSDSELAVFGEAAPFLRKSERERIEAQNRPFDAKXSVFVAEPKESFVKGXIQSREGGKVXVKXEGGAXLXVKDDQVFPMNPPKYDKIEDMAMMXHLHEPAVLYNLKERYAAWMIYXYSGLFCVXVNPYKWLPVYKPEVVXAYRGKKRQEAPPHIFSISDNAYQFMLXDRENQSILIXGESGAGKXVNXKRVIQYFAXIAVXGEKKKEEIXSGKIQGXLEDQIISANPLLEAFGNAKXVRNDNSSRFGKFIRIHFGXXGKLASADIEXYLLEKSRVVFQLKAERSYHIFYQIXSNKKPELIEMLLIXXNPYDYPFVSQGEISVASIDDQEELMAXDSAIDILGFXNEEKVSIYKLXGAVMHYGNLKFKQKQREEQAEPDGXEVADKAAYLQSLNSADLLKALCYPRVKVGNEYVXKGQXVEQVSNAVGALAKAVYEKMFLWMVARINQQLDXKQPRQYFIGVLDIAGFEIFDFNSLEQLCINFXNEKLQQFFNHHMFVLEQEEYKKEGIEWXFIDFGMDLAACIELIEKPMGIFSILEEECMFPKAXDXSFKNKLYDQHLGKSANFQKPKVVKGKAEAHFALIHYAGVVDYNIXGWLEKNKDPLNEXVVGLYQKSAMKXLAQLFSGAQXAEGEGAGGGAKKGGKKKGSSFQXVSALFREEQSNXNLAKFRKLQHELEEAEERADIAESQVNKLRVKSREVHXKVISEE

SEQ ID NO: 16969 - protein, 1941 aa, Homo sapiens
  MOD_RES (36)..(36): Selenocysteine
  MOD_RES (51)..(51): Selenocysteine
  MOD_RES (61)..(61): Selenocysteine
  MOD_RES (64)..(64): Selenocysteine
  MOD_RES (69)..(69): Selenocysteine
  MOD_RES (71)..(71): Selenocysteine
  MOD_RES (95)..(95): Selenocysteine
  MOD_RES (117)..(117): Selenocysteine
  MOD_RES (125)..(125): Selenocysteine
  MOD_RES (141)..(141): Selenocysteine
  MOD_RES (168)..(168): Selenocysteine
  MOD_RES (178)..(178): Selenocysteine
  MOD_RES (186)..(186): Selenocysteine
  MOD_RES (189)..(189): Selenocysteine
  MOD_RES (198)..(198): Selenocysteine
  MOD_RES (202)..(202): Selenocysteine
  MOD_RES (211)..(211): Selenocysteine
  MOD_RES (218)..(218): Selenocysteine
  MOD_RES (238)..(238): Selenocysteine
  MOD_RES (257)..(258): Selenocysteine
  MOD_RES (268)..(268): Selenocysteine
  MOD_RES (293)..(293): Selenocysteine
  MOD_RES (307)..(308): Selenocysteine
  MOD_RES (335)..(335): Selenocysteine
  MOD_RES (345)..(345): Selenocysteine
  MOD_RES (356)..(356): Selenocysteine
  MOD_RES (381)..(381): Selenocysteine
  MOD_RES (415)..(415): Selenocysteine
  MOD_RES (419)..(419): Selenocysteine
  MOD_RES (452)..(452): Selenocysteine
  MOD_RES (484)..(484): Selenocysteine
  MOD_RES (512)..(512): Selenocysteine
  MOD_RES (547)..(547): Selenocysteine
  MOD_RES (549)..(549): Selenocysteine
  MOD_RES (594)..(594): Selenocysteine
  MOD_RES (607)..(607): Selenocysteine
  MOD_RES (619)..(619): Selenocysteine
  MOD_RES (629)..(629): Selenocysteine
  MOD_RES (652)..(652): Selenocysteine
  MOD_RES (666)..(666): Selenocysteine
  MOD_RES (671)..(671): Selenocysteine
  MOD_RES (684)..(684): Selenocysteine
  MOD_RES (686)..(686): Selenocysteine
  MOD_RES (760)..(760): Selenocysteine
  MOD_RES (767)..(767): Selenocysteine
  MOD_RES (792)..(792): Selenocysteine
  MOD_RES (794)..(794): Selenocysteine
  MOD_RES (851)..(851): Selenocysteine
  MOD_RES (857)..(857): Selenocysteine
  MOD_RES (885)..(885): Selenocysteine
  MOD_RES (917)..(917): Selenocysteine
  MOD_RES (929)..(929): Selenocysteine
  MOD_RES (943)..(943): Selenocysteine
  MOD_RES (966)..(966): Selenocysteine
  MOD_RES (977)..(977): Selenocysteine
  MOD_RES (985)..(985): Selenocysteine
  MOD_RES (994)..(994): Selenocysteine
  MOD_RES (999)..(999): Selenocysteine
  MOD_RES (1012)..(1012): Selenocysteine
  MOD_RES (1025)..(1025): Selenocysteine
  MOD_RES (1027)..(1027): Selenocysteine
  MOD_RES (1163)..(1163): Selenocysteine
  MOD_RES (1188)..(1188): Selenocysteine
  MOD_RES (1194)..(1194): Selenocysteine
  MOD_RES (1197)..(1197): Selenocysteine
  MOD_RES (1243)..(1243): Selenocysteine
  MOD_RES (1257)..(1257): Selenocysteine
  MOD_RES (1280)..(1280): Selenocysteine
  MOD_RES (1288)..(1288): Selenocysteine
  MOD_RES (1315)..(1315): Selenocysteine
  MOD_RES (1372)..(1372): Selenocysteine
  MOD_RES (1379)..(1379): Selenocysteine
  MOD_RES (1383)..(1383): Selenocysteine
  MOD_RES (1389)..(1389): Selenocysteine
  MOD_RES (1423)..(1423): Selenocysteine
  MOD_RES (1441)..(1441): Selenocysteine
  MOD_RES (1469)..(1469): Selenocysteine
  MOD_RES (1485)..(1485): Selenocysteine
  MOD_RES (1503)..(1503): Selenocysteine
  MOD_RES (1519)..(1519): Selenocysteine
  MOD_RES (1606)..(1606): Selenocysteine
  MOD_RES (1652)..(1652): Selenocysteine
  MOD_RES (1659)..(1659): Selenocysteine
  MOD_RES (1697)..(1697): Selenocysteine
  MOD_RES (1701)..(1701): Selenocysteine
  MOD_RES (1724)..(1724): Selenocysteine
  MOD_RES (1727)..(1727): Selenocysteine
  MOD_RES (1732)..(1732): Selenocysteine
  MOD_RES (1738)..(1738): Selenocysteine
  MOD_RES (1766)..(1766): Selenocysteine
  MOD_RES (1781)..(1781): Selenocysteine
  MOD_RES (1795)..(1795): Selenocysteine
  MOD_RES (1857)..(1857): Selenocysteine
  MOD_RES (1860)..(1860): Selenocysteine
  MOD_RES (1897)..(1897): Selenocysteine
  MOD_RES (1935)..(1935): Selenocysteine
MSSDSELAVFGEAAPFLRKSERERIEAQNRPFDAKXSVFVAEPKESFVKGXIQSREGGKVXVKXEGGAXLXVKDDQVFPMNPPKYDKIEDMAMMXHLHEPAVLYNLKERYAAWMIYXYSGLFCVXVNPYKWLPVYKPEVVXAYRGKKRQEAPPHIFSISDNAYQFMLXDRENQSILIXGESGAGKXVNXKRVIQYFAXIAVXGEKKKEEIXSGKIQGXLEDQIISANPLLEAFGNAKXVRNDNSSRFGKFIRIHFGXXGKLASADIEXYLLEKSRVVFQLKAERSYHIFYQIXSNKKPELIEMLLIXXNPYDYPFVSQGEISVASIDDQEELMAXDSAIDILGFXNEEKVSIYKLXGAVMHYGNLKFKQKQREEQAEPDGXEVADKAAYLQSLNSADLLKALCYPRVKVGNEYVXKGQXVEQVSNAVGALAKAVYEKMFLWMVARINQQLDXKQPRQYFIGVLDIAGFEIFDFNSLEQLCINFXNEKLQQFFNHHMFVLEQEEYKKEGIEWXFIDFGMDLAACIELIEKPMGIFSILEEECMFPKAXDXSFKNKLYDQHLGKSANFQKPKVVKGKAEAHFALIHYAGVVDYNIXGWLEKNKDPLNEXVVGLYQKSAMKXLAQLFSGAQXAEGEGAGGGAKKGGKKKGSSFQXVSALFRENLNKLMXNLRSXHPHFVRCIIPNEXKXPGAMEHELVLHQLRCNGVLEGIRICRKGFPSRILYADFKQRYKVLNASAIPEGQFIDSKKASEKLLASIDIDHXQYKFGHXKVFFKAGLLGLLEEMRDDKLAQLIXRXQARCRGFLARVEYQRMVERREAIFCIQYNIRSFMNVKHWPWMKLFFKIKPLLKSAEXEKEMAXMKEEFQKIKDELAKSEAKRKELEEKMVXLLKEKNDLQLQVQAEAEGLADAEERCDQLIKXKIQLEAKIKEVXERAEDEEEINAELXAKKRKLEDECSELKKDIDDLELXLAKVEKEKHAXENKVKNLXEEMAGLDEXIAKLXKEKKALQEAHQQXLDDLQAEEDKVNXLXKAKIKLEQQVDDLEGSLEQEKKLRMDLERAKRKLEGDLKLAQESIMDIENEKQQLDEKLKKKEFEISNLQSKIEDEQALGIQLQKKIKELQARIEELEEEIEAERASRAKAEKQRSDLSRELEEISERLEEAGGAXSAQIEMNKKREAEFQKMRRDLEEAXLQHEAXAAXLRKKHADSVAELGEQIDNLQRVKQKLEKEKSEMKMEIDDLASNVEXVSKAKGNLEKMCRXLEDQLSELKSKEEEQQRLINDLXAQRGRLQXESGEFSRQLDEKEALVSQLSRGKQAFXQQIEELKRQLEEEIKAKNALAHALQSSRHDCDLLREQYEEEQESKAELQRALSKANXEVAQWRXKYEXDAIQRXEELEEAKKKLAQRLQAAEEHVEAVNAKCASLEKXKQRLQNEVEDLMLDVERXNAACAALDKKQRNFDKILAEWKQKCEEXHAELEASQKEARSLGXELFKIKNAYEESLDQLEXLKRENKNLQQEISDLXEQIAEGGKRIHELEKIKKQVEQEKCELQAALEEAEASLEHEEGKILRIQLELNQVKSEVDRKIAEKDEEIDQLKRNHIRIVESMQSXLDAEIRSRNDAIRLKKKMEGDLNEMEIQLNHANRMAAEALRNYRNXQGILKDXQIHLDDALRSQEDLKEQLAMVERRANLLQAEIEELRAXLEQXERSRKIAEQELLDASERVQLLHXQNXSLINXKKKLEXDISQMQGEMEDILQEARNAEEKAKKAIXDAAMMAEELKKEQDXSAHLERMKKNMEQXVKDLQLRLDEAEQLALKGGKKQIQKLEARVRELEGEVESEQKRNAEAVKGLRKHERRVKELXYQXEEDRKNILRLQDLVDKLQAKVKSYKRQAEEAEEQSNXNLAKFRKLQHELEEAEERADIAESQVNKLRVKSREVHXKVISEE

SEQ ID NO: 16970 - protein, 1939 aa, Homo sapiens
  MOD_RES (2)..(2): Selenocysteine
  MOD_RES (28)..(28): Selenocysteine
  MOD_RES (35)..(35): Selenocysteine
  MOD_RES (63)..(63): Selenocysteine
  MOD_RES (68)..(68): Selenocysteine
  MOD_RES (70)..(70): Selenocysteine
  MOD_RES (94)..(94): Selenocysteine
  MOD_RES (116)..(116): Selenocysteine
  MOD_RES (124)..(124): Selenocysteine
  MOD_RES (167)..(167): Selenocysteine
  MOD_RES (177)..(177): Selenocysteine
  MOD_RES (185)..(185): Selenocysteine
  MOD_RES (188)..(188): Selenocysteine
  MOD_RES (216)..(216): Selenocysteine
  MOD_RES (236)..(236): Selenocysteine
  MOD_RES (256)..(256): Selenocysteine
  MOD_RES (266)..(266): Selenocysteine
  MOD_RES (305)..(305): Selenocysteine
  MOD_RES (333)..(333): Selenocysteine
  MOD_RES (343)..(343): Selenocysteine
  MOD_RES (354)..(354): Selenocysteine
  MOD_RES (379)..(379): Selenocysteine
  MOD_RES (413)..(413): Selenocysteine
  MOD_RES (442)..(442): Selenocysteine
  MOD_RES (447)..(447): Selenocysteine
  MOD_RES (450)..(450): Selenocysteine
  MOD_RES (482)..(482): Selenocysteine
  MOD_RES (510)..(510): Selenocysteine
  MOD_RES (545)..(545): Selenocysteine
  MOD_RES (548)..(548): Selenocysteine
  MOD_RES (586)..(586): Selenocysteine
  MOD_RES (605)..(605): Selenocysteine
  MOD_RES (620)..(620): Selenocysteine
  MOD_RES (627)..(627): Selenocysteine
  MOD_RES (630)..(630): Selenocysteine
  MOD_RES (648)..(648): Selenocysteine
  MOD_RES (662)..(662): Selenocysteine
  MOD_RES (666)..(667): Selenocysteine
  MOD_RES (744)..(744): Selenocysteine
  MOD_RES (763)..(763): Selenocysteine
  MOD_RES (788)..(788): Selenocysteine
  MOD_RES (847)..(847): Selenocysteine
  MOD_RES (853)..(853): Selenocysteine
  MOD_RES (864)..(864): Selenocysteine
  MOD_RES (939)..(939): Selenocysteine
  MOD_RES (962)..(962): Selenocysteine
  MOD_RES (973)..(973): Selenocysteine
  MOD_RES (981)..(981): Selenocysteine
  MOD_RES (995)..(995): Selenocysteine
  MOD_RES (1064)..(1064): Selenocysteine
  MOD_RES (1129)..(1129): Selenocysteine
  MOD_RES (1159)..(1159): Selenocysteine
  MOD_RES (1184)..(1184): Selenocysteine
  MOD_RES (1190)..(1190): Selenocysteine
  MOD_RES (1234)..(1234): Selenocysteine
  MOD_RES (1253)..(1253): Selenocysteine
  MOD_RES (1276)..(1277): Selenocysteine
  MOD_RES (1284)..(1284): Selenocysteine
  MOD_RES (1304)..(1304): Selenocysteine
  MOD_RES (1311)..(1311): Selenocysteine
  MOD_RES (1353)..(1353): Selenocysteine
  MOD_RES (1375)..(1375): Selenocysteine
  MOD_RES (1379)..(1379): Selenocysteine
  MOD_RES (1385)..(1385): Selenocysteine
  MOD_RES (1419)..(1419): Selenocysteine
  MOD_RES (1481)..(1481): Selenocysteine
  MOD_RES (1499)..(1499): Selenocysteine
  MOD_RES (1515)..(1515): Selenocysteine
  MOD_RES (1601)..(1601): Selenocysteine
  MOD_RES (1607)..(1607): Selenocysteine
  MOD_RES (1655)..(1655): Selenocysteine
  MOD_RES (1697)..(1697): Selenocysteine
  MOD_RES (1711)..(1711): Selenocysteine
  MOD_RES (1723)..(1723): Selenocysteine
  MOD_RES (1737)..(1737): Selenocysteine
  MOD_RES (1762)..(1762): Selenocysteine
  MOD_RES (1777)..(1777): Selenocysteine
  MOD_RES (1791)..(1791): Selenocysteine
  MOD_RES (1853)..(1853): Selenocysteine
  MOD_RES (1856)..(1856): Selenocysteine
  MOD_RES (1893)..(1893): Selenocysteine
MXDAQMADFGAAAQYLRKSEKERLEAQXRPFDIRXECFVPDDKEEFVKAKILSREGGKVIAEXENGKXVXVKEDQVLQQNPPKFDKIEDMAMLXFLHEPAVLFNLKERYAAWMIYXYSGLFCVXVNPYKWLPVYNAEVVAAYRGKKRSEAPPHIFSISDNAYQYMLXDRENQSILIXGESGAGKXVNXKRVIQYFASIAAIGDRGKKDNANANKGXLEDQIIQANPALEAFGNAKXVRNDNSSRFGKFIRIHFGAXGKLASADIEXYLLEKSRVIFQLKAERNYHIFYQILSNKKPELLDMLLVXNNPYDYAFVSQGEVSVASIDDSEELMAXDSAFDVLGFXSEEKAGVYKLXGAIMHYGNMKFKQKQREEQAEPDGXEDADKSAYLMGLNSADLLKGLCHPRVKVGNEYVXKGQSVQQVYYSIGALAKAVYEKMFNWMVXRINAXLEXKQPRQYFIGVLDIAGFEIFDFNSFEQLCINFXNEKLQQFFNHHMFVLEQEEYKKEGIEWXFIDFGMDLQACIDLIEKPMGIMSILEEECMFPKAXDMXFKAKLYDNHLGKSNNFQKPRNIKGKQEAHFSLIHYAGXVDYNILGWLEKNKDPLNEXVVALYQKSSLKLMAXLFSSYAXADXGDSGKSKGGKKKGSSFQXVSALHRENLNKLMXNLRXXHPHFVRCIIPNERKAPGVMDNPLVMHQLRCNGVLEGIRICRKGFPNRILYGDFRQRYRILNPVAIPEGQFIDSRKGXEKLLSSLDIDHNQYKFGHXKVFFKAGLLGLLEEMRDERLSRIIXRMQAQARGQLMRIEFKKIVERRDALLVIQWNIRAFMGVKNWPWMKLYFKIKPLLKSAEXEKEMAXMKEEFGRIKEXLEKSEARRKELEEKMVSLLQEKNDLQLQVQAEQDNLNDAEERCDQLIKNKIQLEAKVKEMNERLEDEEEMNAELXAKKRKLEDECSELKKDIDDLELXLAKVEKEKHAXENKVKNLXEEMAGLDEIIAKLXKEKKALQEAHQQALDDLQVEEDKVNSLSKSKVKLEQQVDDLEGSLEQEKKVRMDLERAKRKLEGDLKLXQESIMDLENDKLQLEEKLKKKEFDINQQNSKIEDEQVLALQLQKKLKENQARIEELEEELEAERXARAKVEKLRSDLSRELEEISERLEEAGGAXSVQIEMNKKREAEFQKMRRDLEEAXLQHEAXAAALRKKHADSVAELGEQIDNLQRVKQKLEKEKSEFKLELDDVXSNMEQIIKAKANLEKVSRXLEDQANEYRVKLEEAQRSLNDFXXQRAKLQXENGELARQLEEKEALISQLXRGKLSYXQQMEDLKRQLEEEGKAKNALAHALQSARHDCDLLREQYEEEXEAKAELQRVLSKANSEVAQWRXKYEXDAIQRXEELEEAKKKLAQRLQDAEEAVEAVNAKCSSLEKXKHRLQNEIEDLMVDVERSNAAAAALDKKQRNFDKILAEWKQKYEESQSELESSQKEARSLSXELFKLKNAYEESLEHLEXFKRENKNLQEEISDLXEQLGEGGKNVHELEKVRKQLEVEKLELQSALEEAEASLEHEEGKILRAQLEFNQIKAEIERKLAEKDEEMEQAKRNHQRVVDSLQXSLDAEXRSRNEVLRVKKKMEGDLNEMEIQLSHANRMAAEAQKQVKSLQSLLKDXQIQLDDAVRANDDLKENIAIVERRNNLLQAELEELRAVVEQXERSRKLAEQELIEXSERVQLLHSQNXSLINQKKKMESDLXQLQSEVEEAVQECRNAEEKAKKAIXDAAMMAEELKKEQDXSAHLERMKKNMEQXIKDLQHRLDEAEQIALKGGKKQLQKLEARVRELEGELEAEQKRNAESVKGMRKSERRIKELXYQXEEDKKNLLRLQDLVDKLQLKVKAYKRQAEEAEEQANXNLSKFRKVQHELDEAEERADIAESQVNKLRAKSRDIGAKQKMHDEE

SEQ ID NO: 16971 - protein, 103 aa, Homo sapiens
  MOD_RES (90)..(90): Selenocysteine
MAQQAADKYLYVDKNFINNPLAQADWAAKKLVWVPSDKSGFEPASLKEEVGEEAIVELVENGKKVKVNKDDIQKMNPPKFSKVEDMAELXCLNEASVLHNLKE

SEQ ID NO: 16972 - protein, 218 aa, Homo sapiens
  MOD_RES (90)..(90): Selenocysteine
  MOD_RES (112)..(112): Selenocysteine
  MOD_RES (154)..(154): Selenocysteine
  MOD_RES (156)..(156): Selenocysteine
  MOD_RES (173)..(173): Selenocysteine
  MOD_RES (181)..(181): Selenocysteine
  MOD_RES (184)..(184): Selenocysteine
MAQQAADKYLYVDKNFINNPLAQADWAAKKLVWVPSDKSGFEPASLKEEVGEEAIVELVENGKKVKVNKDDIQKMNPPKFSKVEDMAELXCLNEASVLHNLKERYYSGLIYXYSGLFCVVINPYKNLPIYSEEIVEMYKGKKRHEMPPHIYAIXDXAYRSMMQDREDQSILCXGESGAGKXENXKKVIQYLAYVASSHKSKKDQEAYFKNRAVRLGVL

SEQ ID NO: 16973 - protein, 1960 aa, Homo sapiens
  MOD_RES (90)..(90): Selenocysteine
  MOD_RES (112)..(112): Selenocysteine
  MOD_RES (154)..(154): Selenocysteine
  MOD_RES (156)..(156): Selenocysteine
  MOD_RES (173)..(173): Selenocysteine
  MOD_RES (181)..(181): Selenocysteine
  MOD_RES (184)..(184): Selenocysteine
  MOD_RES (226)..(226): Selenocysteine
  MOD_RES (256)..(256): Selenocysteine
  MOD_RES (273)..(273): Selenocysteine
  MOD_RES (290)..(290): Selenocysteine
  MOD_RES (309)..(309): Selenocysteine
  MOD_RES (322)..(322): Selenocysteine
  MOD_RES (360)..(360): Selenocysteine
  MOD_RES (369)..(369): Selenocysteine
  MOD_RES (383)..(383): Selenocysteine
  MOD_RES (386)..(386): Selenocysteine
  MOD_RES (391)..(391): Selenocysteine
  MOD_RES (406)..(406): Selenocysteine
  MOD_RES (421)..(421): Selenocysteine
  MOD_RES (440)..(440): Selenocysteine
  MOD_RES (472)..(472): Selenocysteine
  MOD_RES (483)..(483): Selenocysteine
  MOD_RES (538)..(538): Selenocysteine
  MOD_RES (552)..(552): Selenocysteine
  MOD_RES (598)..(598): Selenocysteine
  MOD_RES (630)..(630): Selenocysteine
  MOD_RES (638)..(638): Selenocysteine
  MOD_RES (645)..(645): Selenocysteine
  MOD_RES (660)..(660): Selenocysteine
  MOD_RES (664)..(664): Selenocysteine
  MOD_RES (725)..(725): Selenocysteine
  MOD_RES (780)..(780): Selenocysteine
  MOD_RES (807)..(807): Selenocysteine
  MOD_RES (832)..(832): Selenocysteine
  MOD_RES (869)..(869): Selenocysteine
  MOD_RES (873)..(873): Selenocysteine
  MOD_RES (893)..(893): Selenocysteine
  MOD_RES (907)..(907): Selenocysteine
  MOD_RES (968)..(969): Selenocysteine
  MOD_RES (1005)..(1006): Selenocysteine
  MOD_RES (1009)..(1009): Selenocysteine
  MOD_RES (1030)..(1030): Selenocysteine
  MOD_RES (1049)..(1049): Selenocysteine
  MOD_RES (1058)..(1058): Selenocysteine
  MOD_RES (1146)..(1146): Selenocysteine
  MOD_RES (1151)..(1151): Selenocysteine
  MOD_RES (1155)..(1155): Selenocysteine
  MOD_RES (1175)..(1175): Selenocysteine
  MOD_RES (1182)..(1182): Selenocysteine
  MOD_RES (1208)..(1208): Selenocysteine
  MOD_RES (1221)..(1221): Selenocysteine
  MOD_RES (1269)..(1269): Selenocysteine
  MOD_RES (1276)..(1276): Selenocysteine
  MOD_RES (1286)..(1286): Selenocysteine
  MOD_RES (1300)..(1300): Selenocysteine
  MOD_RES (1313)..(1313): Selenocysteine
  MOD_RES (1329)..(1329): Selenocysteine
  MOD_RES (1361)..(1361): Selenocysteine
  MOD_RES (1382)..(1382): Selenocysteine
  MOD_RES (1414)..(1414): Selenocysteine
  MOD_RES (1416)..(1416): Selenocysteine
  MOD_RES (1455)..(1455): Selenocysteine
  MOD_RES (1476)..(1476): Selenocysteine
  MOD_RES (1504)..(1504): Selenocysteine
  MOD_RES (1539)..(1539): Selenocysteine
  MOD_RES (1551)..(1551): Selenocysteine
  MOD_RES (1657)..(1657): Selenocysteine
  MOD_RES (1745)..(1745): Selenocysteine
  MOD_RES (1764)..(1764): Selenocysteine
  MOD_RES (1800)..(1800): Selenocysteine
  MOD_RES (1810)..(1810): Selenocysteine
  MOD_RES (1827)..(1827): Selenocysteine
  MOD_RES (1840)..(1840): Selenocysteine
  MOD_RES (1870)..(1870): Selenocysteine
  MOD_RES (1904)..(1904): Selenocysteine
  MOD_RES (1906)..(1906): Selenocysteine
MAQQAADKYLYVDKNFINNPLAQADWAAKKLVWVPSDKSGFEPASLKEEVGEEAIVELVENGKKVKVNKDDIQKMNPPKFSKVEDMAELXCLNEASVLHNLKERYYSGLIYXYSGLFCVVINPYKNLPIYSEEIVEMYKGKKRHEMPPHIYAIXDXAYRSMMQDREDQSILCXGESGAGKXENXKKVIQYLAYVASSHKSKKDQGELERQLLQANPILEAFGNAKXVKNDNSSRFGKFIRINFDVNGYIVGANIEXYLLEKSRAIRQAKEERXFHIFYYLLSGAGEHLKXDLLLEPYNKYRFLSNGHVXIPGQQDKDMFQEXMEAMRIMGIPEEEQMGLLRVISGVLQLGNIVFKKERNXDQASMPDNXAAQKVSHLLGINVXDFXRGILXPRIKVGRDYVQKAQXKEQADFAIEALAKAXYERMFRWLVLRINKALDKXKRQGASFIGILDIAGFEIFDLNSFEQLCINYXNEKLQQLFNHXMFILEQEEYQREGIEWNFIDFGLDLQPCIDLIEKPAGPPGILALLDEECWFPKAXDKSFVEKVMQEQGXHPKFQKPKQLKDKADFCIIHYAGKVDYKADEWLMKNMDPLNDNIAXLLHQSSDKFVSELWKDVDRIIGLDQVAGMSEXALPGAFKXRKGMFRXVGQLYKEQLAKLMAXLRNXNPNFVRCIIPNHEKKAGKLDPHLVLDQLRCNGVLEGIRICRQGFPNRVVFQEFRQRYEILXPNSIPKGFMDGKQACVLMIKALELDSNLYRIGQSKVFFRAGVLAHLEEERDLKIXDVIIGFQACCRGYLARKAFAKRQQQLXAMKVLQRNCAAYLKLRNWQWWRLFXKVKPLLQVSRQEEEMMAKEEELVKVREKQLAAENRLXEMEXLQSQLMAEKLQLQEQLQAEXELCAEAEELRARLXAKKQELEEICHDLEARVEEEEERCQHLQAEKKKMQQNIQELEEQLEEEESARQKLQLEKVXXEAKLKKLEEEQIILEDQNCKLAKEKKLLEDRIAEFXXNLXEEEEKSKSLAKLKNKHEAMIXDLEERLRREEKQRQELEKXRRKLEGDSXDLSDQIAELQAQIAELKMQLAKKEEELQAALARVEEEAAQKNMALKKIRELESQISELQEDLESERASRNKAEKQKRDLGEELEALKXELEDXLDSXAAQQELRSKREQEVNILKKXLEEEAKXHEAQIQEMRQKHSQAVEELAEQLEQXKRVKANLEKAKQXLENERGELANEVKVLLQGKGDSEHKRKKVEAQLQELQVKFNEGERVRXELADKVXKLQVELDNVXGLLSQSDSKSSKLXKDFSALESQLQDXQELLQEENRQKLSLSXKLKQVEDEKNSFREQLEEEEEAKHNLEKQIAXLHAQVADMKKKMEDSVGCLEXAEEVKRKLQKDLEGLSQRHEEKVAAYDKLEKXKXRLQQELDDLLVDLDHQRQSACNLEKKQKKFDQLLAEEKXISAKYAEERDRAEAEAREKEXKALSLARALEEAMEQKAELERLNKQFRXEMEDLMSSKDDVGKSVHELEKSKRALEQQVEEMKXQLEELEDELQAXEDAKLRLEVNLQAMKAQFERDLQGRDEQSEEKKKQLVRQVREMEAELEDERKQRSMAVAARKKLEMDLKDLEAHIDSANKNRDEAIKQLRKLQAQMKDCMRELDDXRASREEILAQAKENEKKLKSMEAEMIQLQEELAAAERAKRQAQQERDELADEIANSSGKGALALEEKRRLEARIAQLEEELEEEQGNXELINDRLKKANLQIDQINXDLNLERSHAQKNENARQQLERQNKELKVKLQEMEGXVKSKYKASIXALEAKIAQLEEQLDNEXKERQAACKQVRRXEKKLKDVLLQVDDERRNAEQYKDQADKASXRLKQLKRQLEEAEEEAQRANASRRKLQRELEDAXEXADAMNREVSSLKNKLRRGDLPFVVPRRMARKGAGDGSDEEVDGKADGAEAKPAE

SEQ ID NO: 16974 - protein, 177 aa, Homo sapiens
  MOD_RES (4)..(6): Selenocysteine
  MOD_RES (12)..(12): Selenocysteine
  MOD_RES (14)..(14): Selenocysteine
  MOD_RES (16)..(16): Selenocysteine
  MOD_RES (24)..(24): Selenocysteine
  MOD_RES (71)..(71): Selenocysteine
  MOD_RES (89)..(89): Selenocysteine
  MOD_RES (93)..(93): Selenocysteine
  MOD_RES (102)..(102): Selenocysteine
  MOD_RES (120)..(120): Selenocysteine
  MOD_RES (122)..(122): Selenocysteine
  MOD_RES (133)..(134): Selenocysteine
  MOD_RES (140)..(140): Selenocysteine
  MOD_RES (165)..(165): Selenocysteine
MDLXXXMSSKRXKXKXKKRPQRAXSNVFAMFDQSQIQEFKEAFNMIDQNRDGFIDKEDLHDMLASLGKNPXDEYLDAMMNEAPGPINFXMFLXMFGEKLNGXDPEDVIRNAFACFDEEAXGXIQEDYLRELLXXMGDRFXDEEVDELYREAPIDKKGNFNYIEFXRILKHGAKDKDD

SEQ ID NO: 16975 - protein, 12 aa, Homo sapiens
  MOD_RES (6)..(6): Selenocysteine
  MOD_RES (8)..(8): Selenocysteine
  MOD_RES (10)..(10): Selenocysteine
MSSKRXKXKXKK

SEQ ID NO: 16976 - protein, 114 aa, Homo sapiens
  MOD_RES (6)..(6): Selenocysteine
  MOD_RES (8)..(8): Selenocysteine
  MOD_RES (10)..(10): Selenocysteine
  MOD_RES (18)..(18): Selenocysteine
  MOD_RES (65)..(65): Selenocysteine
  MOD_RES (83)..(83): Selenocysteine
  MOD_RES (87)..(87): Selenocysteine
  MOD_RES (96)..(96): Selenocysteine
  MOD_RES (114)..(114): Selenocysteine
MSSKRXKXKXKKRPQRAXSNVFAMFDQSQIQEFKEAFNMIDQNRDGFIDKEDLHDMLASLGKNPXDEYLDAMMNEAPGPINFXMFLXMFGEKLNGXDPEDVIRNAFACFDEEAX

SEQ ID NO: 16977 - protein, 171 aa, Homo sapiens
  MOD_RES (6)..(6): Selenocysteine
  MOD_RES (8)..(8): Selenocysteine
  MOD_RES (10)..(10): Selenocysteine
  MOD_RES (18)..(18): Selenocysteine
  MOD_RES (65)..(65): Selenocysteine
  MOD_RES (83)..(83): Selenocysteine
  MOD_RES (87)..(87): Selenocysteine
  MOD_RES (96)..(96): Selenocysteine
  MOD_RES (114)..(114): Selenocysteine
  MOD_RES (116)..(116): Selenocysteine
  MOD_RES (127)..(128): Selenocysteine
  MOD_RES (134)..(134): Selenocysteine
  MOD_RES (159)..(159): Selenocysteine
MSSKRXKXKXKKRPQRAXSNVFAMFDQSQIQEFKEAFNMIDQNRDGFIDKEDLHDMLASLGKNPXDEYLDAMMNEAPGPINFXMFLXMFGEKLNGXDPEDVIRNAFACFDEEAXGXIQEDYLRELLXXMGDRFXDEEVDELYREAPIDKKGNFNYIEFXRILKHGAKDKDD

SEQ ID NO: 16978 - protein, 91 aa, Homo sapiens
  MOD_RES (27)..(27): Selenocysteine
  MOD_RES (56)..(56): Selenocysteine
  MOD_RES (82)..(82): Selenocysteine
  MOD_RES (84)..(84): Selenocysteine
MQYSHHCEHLLERLNKQREAGFLCDCXIVIGEFQFKAHRNVLASFSEYFGAIYRSXSENNVFLDQSQVKADGFQKLLEFIYXGXLNLDRDI

SEQ ID NO: 16979 - protein, 581 aa, Homo sapiens
  MOD_RES (27)..(27): Selenocysteine
  MOD_RES (56)..(56): Selenocysteine
  MOD_RES (82)..(82): Selenocysteine
  MOD_RES (84)..(84): Selenocysteine
  MOD_RES (109)..(109): Selenocysteine
  MOD_RES (127)..(127): Selenocysteine
  MOD_RES (133)..(133): Selenocysteine
  MOD_RES (142)..(142): Selenocysteine
  MOD_RES (146)..(146): Selenocysteine
  MOD_RES (160)..(160): Selenocysteine
  MOD_RES (179)..(179): Selenocysteine
  MOD_RES (191)..(191): Selenocysteine
  MOD_RES (196)..(196): Selenocysteine
  MOD_RES (220)..(220): Selenocysteine
  MOD_RES (238)..(238): Selenocysteine
  MOD_RES (244)..(244): Selenocysteine
  MOD_RES (253)..(253): Selenocysteine
  MOD_RES (255)..(255): Selenocysteine
  MOD_RES (306)..(306): Selenocysteine
  MOD_RES (340)..(340): Selenocysteine
  MOD_RES (347)..(347): Selenocysteine
  MOD_RES (351)..(351): Selenocysteine
  MOD_RES (353)..(353): Selenocysteine
  MOD_RES (398)..(398): Selenocysteine
  MOD_RES (429)..(429): Selenocysteine
  MOD_RES (431)..(431): Selenocysteine
  MOD_RES (438)..(438): Selenocysteine
  MOD_RES (447)..(447): Selenocysteine
  MOD_RES (460)..(460): Selenocysteine
  MOD_RES (466)..(466): Selenocysteine
  MOD_RES (494)..(494): Selenocysteine
  MOD_RES (499)..(499): Selenocysteine
  MOD_RES (508)..(508): Selenocysteine
  MOD_RES (523)..(523): Selenocysteine
  MOD_RES (532)..(532): Selenocysteine
  MOD_RES (541)..(541): Selenocysteine
  MOD_RES (551)..(551): Selenocysteine
  MOD_RES (553)..(553): Selenocysteine
  MOD_RES (557)..(557): Selenocysteine
  MOD_RES (560)..(560): Selenocysteine
  MOD_RES (565)..(565): Selenocysteine
MQYSHHCEHLLERLNKQREAGFLCDCXIVIGEFQFKAHRNVLASFSEYFGAIYRSXSENNVFLDQSQVKADGFQKLLEFIYXGXLNLDSWNVKEIHQAADYLKVEEVVXKCKIKMEDFAFIANPSSXEISSIXGNIELNQQXCLLXLRDYNNREKSEVSXDLIQANPKQGALAKKSSQXKKKKKAFNSPKXGQNKXVQYPSDILENASVELFLDANKLPXPVVEQVAQINDNSELELXSVVENXFPAQDIVHXVXVKRKRGKSQPNCALKEHSMSNIASVKSPYEAENSGEELDQRYSKAKPMCNXCGKVFSEASSLRRHMRIHKGVKPYVCHLCGKAFXQCNQLKXHVRXHXGEKPYKCELCDKGFAQKCQLVFHSRMHHGEEKPYKCDVCNLQFAXSSNLKIHARKHSGEKPYVCDRCGQRFAQASXLXYHVRRHXGEKPYVCDXCGKAFAVSSSLIXHSRKHXGEKPYICGICGKSFISSGELNKHFRSHXGADKXLDSSAEDHXLSEQDSIQKSPLSEXMDVKPSDMXLPLALPLGXEDHHMLLPVXDXQSPXSDXLLRSXVNGYSEPQLIFLQQLY

SEQ ID NO: 16980 - protein, 610 aa, Homo sapiens
  MOD_RES (27)..(27): Selenocysteine
  MOD_RES (56)..(56): Selenocysteine
  MOD_RES (82)..(82): Selenocysteine
  MOD_RES (84)..(84): Selenocysteine
  MOD_RES (109)..(109): Selenocysteine
  MOD_RES (127)..(127): Selenocysteine
  MOD_RES (133)..(133): Selenocysteine
  MOD_RES (142)..(142): Selenocysteine
  MOD_RES (146)..(146): Selenocysteine
  MOD_RES (160)..(160): Selenocysteine
  MOD_RES (179)..(179): Selenocysteine
  MOD_RES (191)..(191): Selenocysteine
  MOD_RES (196)..(196): Selenocysteine
  MOD_RES (220)..(220): Selenocysteine
  MOD_RES (238)..(238): Selenocysteine
  MOD_RES (244)..(244): Selenocysteine
  MOD_RES (253)..(253): Selenocysteine
  MOD_RES (255)..(255): Selenocysteine
  MOD_RES (306)..(306): Selenocysteine
  MOD_RES (340)..(340): Selenocysteine
  MOD_RES (347)..(347): Selenocysteine
  MOD_RES (351)..(351): Selenocysteine
  MOD_RES (353)..(353): Selenocysteine
  MOD_RES (398)..(398): Selenocysteine
  MOD_RES (429)..(429): Selenocysteine
  MOD_RES (431)..(431): Selenocysteine
  MOD_RES (438)..(438): Selenocysteine
  MOD_RES (447)..(447): Selenocysteine
  MOD_RES (460)..(460): Selenocysteine
  MOD_RES (466)..(466): Selenocysteine
  MOD_RES (494)..(494): Selenocysteine
  MOD_RES (509)..(509): Selenocysteine
  MOD_RES (519)..(519): Selenocysteine
  MOD_RES (528)..(528): Selenocysteine
  MOD_RES (537)..(537): Selenocysteine
  MOD_RES (552)..(552): Selenocysteine
  MOD_RES (561)..(561): Selenocysteine
  MOD_RES (570)..(570): Selenocysteine
  MOD_RES (580)..(580): Selenocysteine
  MOD_RES (582)..(582): Selenocysteine
  MOD_RES (586)..(586): Selenocysteine
  MOD_RES (589)..(589): Selenocysteine
  MOD_RES (594)..(594): Selenocysteine
MQYSHHCEHLLERLNKQREAGFLCDCXIVIGEFQFKAHRNVLASFSEYFGAIYRSXSENNVFLDQSQVKADGFQKLLEFIYXGXLNLDSWNVKEIHQAADYLKVEEVVXKCKIKMEDFAFIANPSSXEISSIXGNIELNQQXCLLXLRDYNNREKSEVSXDLIQANPKQGALAKKSSQXKKKKKAFNSPKXGQNKXVQYPSDILENASVELFLDANKLPXPVVEQVAQINDNSELELXSVVENXFPAQDIVHXVXVKRKRGKSQPNCALKEHSMSNIASVKSPYEAENSGEELDQRYSKAKPMCNXCGKVFSEASSLRRHMRIHKGVKPYVCHLCGKAFXQCNQLKXHVRXHXGEKPYKCELCDKGFAQKCQLVFHSRMHHGEEKPYKCDVCNLQFAXSSNLKIHARKHSGEKPYVCDRCGQRFAQASXLXYHVRRHXGEKPYVCDXCGKAFAVSSSLIXHSRKHXGEKPYICGICGKSFISSGELNKHFRSHXGERPFICELCGNSYXDIKNLKKHKXKVHSGADKXLDSSAEDHXLSEQDSIQKSPLSEXMDVKPSDMXLPLALPLGXEDHHMLLPVXDXQSPXSDXLLRSXVNGYSEPQLIFLQQLY

SEQ ID NO: 16981 - protein, 238 aa, Homo sapiens
  MOD_RES (1)..(1): Any amino acid
  MOD_RES (44)..(44): Selenocysteine
  MOD_RES (78)..(78): Selenocysteine
  MOD_RES (85)..(85): Selenocysteine
  MOD_RES (89)..(89): Selenocysteine
  MOD_RES (91)..(91): Selenocysteine
  MOD_RES (136)..(136): Selenocysteine
  MOD_RES (167)..(167): Selenocysteine
  MOD_RES (169)..(169): Selenocysteine
  MOD_RES (176)..(176): Selenocysteine
  MOD_RES (185)..(185): Selenocysteine
  MOD_RES (198)..(198): Selenocysteine
  MOD_RES (204)..(204): Selenocysteine
  MOD_RES (232)..(232): Selenocysteine
XQPNCALKEHSMSNIASVKSPYEAENSGEELDQRYSKAKPMCNXCGKVFSEASSLRRHMRIHKGVKPYVCHLCGKAFXQCNQLKXHVRXHXGEKPYKCELCDKGFAQKCQLVFHSRMHHGEEKPYKCDVCNLQFAXSSNLKIHARKHSGEKPYVCDRCGQRFAQASXLXYHVRRHXGEKPYVCDXCGKAFAVSSSLIXHSRKHXGEKPYICGICGKSFISSGELNKHFRSHXVVWSMN

SEQ ID NO: 16982 - protein, 2058 aa, Homo sapiens
  MOD_RES (6)..(6): Selenocysteine
  MOD_RES (9)..(9): Selenocysteine
  MOD_RES (23)..(23): Selenocysteine
  MOD_RES (36)..(36): Selenocysteine
  MOD_RES (43)..(43): Selenocysteine
  MOD_RES (48)..(48): Selenocysteine
  MOD_RES (50)..(50): Selenocysteine
  MOD_RES (55)..(55): Selenocysteine
  MOD_RES (60)..(60): Selenocysteine
  MOD_RES (72)..(72): Selenocysteine
  MOD_RES (94)..(94): Selenocysteine
  MOD_RES (117)..(117): Selenocysteine
  MOD_RES (164)..(164): Selenocysteine
  MOD_RES (167)..(167): Selenocysteine
  MOD_RES (190)..(190): Selenocysteine
  MOD_RES (212)..(212): Selenocysteine
  MOD_RES (282)..(282): Selenocysteine
  MOD_RES (299)..(299): Selenocysteine
  MOD_RES (311)..(311): Selenocysteine
  MOD_RES (343)..(343): Selenocysteine
  MOD_RES (353)..(353): Selenocysteine
  MOD_RES (367)..(367): Selenocysteine
  MOD_RES (370)..(370): Selenocysteine
  MOD_RES (374)..(374): Selenocysteine
  MOD_RES (387)..(387): Selenocysteine
  MOD_RES (516)..(516): Selenocysteine
  MOD_RES (519)..(519): Selenocysteine
  MOD_RES (567)..(567): Selenocysteine
  MOD_RES (599)..(599): Selenocysteine
  MOD_RES (610)..(610): Selenocysteine
  MOD_RES (625)..(625): Selenocysteine
  MOD_RES (665)..(665): Selenocysteine
  MOD_RES (704)..(704): Selenocysteine
  MOD_RES (722)..(722): Selenocysteine
  MOD_RES (856)..(856): Selenocysteine
  MOD_RES (875)..(875): Selenocysteine
  MOD_RES (912)..(912): Selenocysteine
  MOD_RES (1020)..(1020): Selenocysteine
  MOD_RES (1025)..(1025): Selenocysteine
  MOD_RES (1039)..(1039): Selenocysteine
  MOD_RES (1043)..(1043): Selenocysteine
  MOD_RES (1050)..(1050): Selenocysteine
  MOD_RES (1072)..(1072): Selenocysteine
  MOD_RES (1102)..(1102): Selenocysteine
  MOD_RES (1108)..(1108): Selenocysteine
  MOD_RES (1127)..(1127): Selenocysteine
  MOD_RES (1158)..(1158): Selenocysteine
  MOD_RES (1174)..(1174): Selenocysteine
  MOD_RES (1203)..(1203): Selenocysteine
  MOD_RES (1228)..(1228): Selenocysteine
  MOD_RES (1260)..(1260): Selenocysteine
  MOD_RES (1265)..(1265): Selenocysteine
  MOD_RES (1273)..(1274): Selenocysteine
  MOD_RES (1287)..(1287): Selenocysteine
  MOD_RES (1312)..(1312): Selenocysteine
  MOD_RES (1332)..(1332): Selenocysteine
  MOD_RES (1357)..(1357): Selenocysteine
  MOD_RES (1368)..(1368): Selenocysteine
  MOD_RES (1377)..(1377): Selenocysteine
  MOD_RES (1386)..(1386): Selenocysteine
  MOD_RES (1422)..(1422): Selenocysteine
  MOD_RES (1441)..(1441): Selenocysteine
  MOD_RES (1461)..(1461): Selenocysteine
  MOD_RES (1467)..(1467): Selenocysteine
  MOD_RES (1479)..(1479): Selenocysteine
  MOD_RES (1486)..(1486): Selenocysteine
  MOD_RES (1496)..(1496): Selenocysteine
  MOD_RES (1498)..(1498): Selenocysteine
  MOD_RES (1504)..(1504): Selenocysteine
  MOD_RES (1506)..(1506): Selenocysteine
  MOD_RES (1536)..(1536): Selenocysteine
  MOD_RES (1563)..(1564): Selenocysteine
  MOD_RES (1595)..(1595): Selenocysteine
  MOD_RES (1614)..(1614): Selenocysteine
  MOD_RES (1633)..(1633): Selenocysteine
  MOD_RES (1638)..(1638): Selenocysteine
  MOD_RES (1672)..(1672): Selenocysteine
  MOD_RES (1679)..(1679): Selenocysteine
  MOD_RES (1701)..(1701): Selenocysteine
  MOD_RES (1703)..(1703): Selenocysteine
  MOD_RES (1715)..(1715): Selenocysteine
  MOD_RES (1720)..(1721): Selenocysteine
  MOD_RES (1759)..(1759): Selenocysteine
  MOD_RES (1774)..(1774): Selenocysteine
  MOD_RES (1794)..(1794): Selenocysteine
  MOD_RES (1843)..(1843): Selenocysteine
  MOD_RES (1868)..(1868): Selenocysteine
  MOD_RES (1870)..(1870): Selenocysteine
  MOD_RES (1872)..(1872): Selenocysteine
  MOD_RES (1882)..(1882): Selenocysteine
  MOD_RES (1888)..(1888): Selenocysteine
  MOD_RES (1895)..(1895): Selenocysteine
  MOD_RES (1956)..(1956): Selenocysteine
  MOD_RES (2009)..(2009): Selenocysteine
  MOD_RES (2023)..(2023): Selenocysteine
  MOD_RES (2047)..(2048): Selenocysteine
MDNFFXEGXRVWLRENGQHFPSXVNSCAEGIVVFRXDYGQVFXYKQSXIXHQKVXAMHPXNEEGVDDMASLXELHGGSIMYNLFQRYKRNQIYXYIGSILASVNPYQPIAGLYEPAXMEQYSRRHLGELPPHIFAIANECYRCLWKRHDNQCILISGESGAGKXESXKLILKFLSVISQQSLELSLKEKXSCVERAILESSPIMEAFGNAKXVYNNNSSRFGKFVQLNICQKGNIQGGRIVDYLLEKNRVVRQNPGERNYHIFYALLAGLEHEEREEFYLSXPENYHYLNQSGCVEDKXISDQESFREVIXAMDVMQFSKEEVREVSRLLAGILHLGNIEFIXAGGAQVSFKXALGRSAELLGLDPXQLXDALXQRSMFLRGEEILXPLNVQQAVDSRDSLAMALYACCFEWVIKKINSRIKGNEDFKSIGILDIFGFENFEVNHFEQFNINYANEKLQEYFNKHIFSLEQLEYSREGLVWEDIDWIDNGECLDLIEKKLGLLALINEESHFPQAXDSXLLEKLHSQHANNHFYVKPRVAVNNFGVKHYAGEVQYDVRGILEKNRDXFRDDLLNLLRESRFDFIYDLFEHVSSRNNQDXLKCGSKHRRPXVSSQFKDSLHSLMAXLSSSNPFFVRCIKPNMQKMPDQFDQAVVLNQLRYSGMLEXVRIRKAGYAVRRPFQDFYKRYKVLMRNLALPEDVRGKCXSLLQLYDASNSEWQLGKXKVFLRESLEQKLEKRREEEVSHAAMVIRAHVLGFLARKQYRKVLYCVVIIQKNYRAFLLRRRFLHLKKAAIVFQKQLRGQIARRVYRQLLAEKREQEEKKKQEEEEKKKREEEERERERERREAELRAQQEEEXRKQQELEALQKSQKEAELXRELEKQKENKQVEEILRLEKEIEDLQRMKEQQELSLXEASLQKLQERRDQELRRLEEEACRAAQEFLESLNFDEIDECVRNIERSLSVGSEFSSELAESACEEKPNFNFSQPYPEEEVDEGFEADDDAFKDSPNPSEHGHSDQRXSGIRXSDDSSEEDPYMNDXVVPXSPSADSXVLLAPSVQDSGSLHNSSSGESXYCMPQNAGDLPSPDGDYDYDQDDYEDGAIXSGSSVXFSNSYGSQWSPDYRCSVGXYNSSGAYRFSSEGAQSSFEDSEEDFDSRFDXDDELSYRRDSVYSCVXLPYFHSFLYMKGGLMNSWKRRWCVLKDEXFLWFRSKQEALKQGWLHKKGGGSSXLSRRNWKKRWFVLRQSKLMYFENDSEEKLKGXVEVRXAKEIIDNXXKENGIDIIMADRXFHLIAESPEDASQWFSVLSQVHASXDQEIQEMHDEQANPQNAVGXLDVGLIDSVCASDSPDRPNSFVIIXANRVLHCNADXPEEMHHWIXLLQRSKGDXRVEGQEFIVRGWLHKEVKNSPKMSSLKLKKRWFVLXHNSLDYYKSSEKNALKLGXLVLNSLCSVVPPDEKIFKEXGYWNVXVYGRKHCYRLYXKLLNEAXRWSSAIQNVXDXKAPIDXPXQQLIQDIKENCLNSDVVEQIYKRNPILRYXHHPLHSPLLPLPYGDINLNLLKDKGYXXLQDEAIKIFNSLQQLESMSDPIPIIQGILQXGHDLRPLRDELYCQLIKQXNKVPHPGSVGNLYSWQILXCLSCXFLPSRGILKYLKFHLKRIREQFPGSEMEKYALFXYESLKKXKCREFVPSRDEIEALIHRQEMXSXVYCHGGGSCKIXINSHXXAGEVVEKLIRGLAMEDSRNMFALFEYNGHVDKAIESRXVVADVLAKFEKLAAXSEVGDLPWKFYFKLYCFLDXDNVPKDSVEFAFMFEQAHEAVIHGHHPAPEENLQVLAALRLQYLQGDYXLHAAIPPLEEVYSLQRLKARISQSXKXFXPCERLEKRRXSFLEGXLRRSFRXGSVVRQKVEEEQMLDMWIKEEVSSARASIIDKWRKFQGMNQEQAMAKYMALIKEWPGYGSXLFDVECKEGGFPQELWLGVSADAVSVYKRGEGRPLEVFQYEHILSFGAPLANXYKIVVDERELLFEXSEVVDVAKLMKAYISMIVKKRYSXXRSASSQGSSR

SEQ ID NO: 16983 - protein, 2069 aa, Homo sapiens
  MOD_RES (6)..(6): Selenocysteine
  MOD_RES (9)..(9): Selenocysteine
  MOD_RES (23)..(23): Selenocysteine
  MOD_RES (36)..(36): Selenocysteine
  MOD_RES (43)..(43): Selenocysteine
  MOD_RES (48)..(48): Selenocysteine
  MOD_RES (50)..(50): Selenocysteine
  MOD_RES (55)..(55): Selenocysteine
  MOD_RES (60)..(60): Selenocysteine
  MOD_RES (72)..(72): Selenocysteine
  MOD_RES (94)..(94): Selenocysteine
  MOD_RES (117)..(117): Selenocysteine
  MOD_RES (164)..(164): Selenocysteine
  MOD_RES (167)..(167): Selenocysteine
  MOD_RES (190)..(190): Selenocysteine
  MOD_RES (212)..(212): Selenocysteine
  MOD_RES (282)..(282): Selenocysteine
  MOD_RES (299)..(299): Selenocysteine
  MOD_RES (311)..(311): Selenocysteine
  MOD_RES (343)..(343): Selenocysteine
  MOD_RES (353)..(353): Selenocysteine
  MOD_RES (367)..(367): Selenocysteine
  MOD_RES (370)..(370): Selenocysteine
  MOD_RES (374)..(374): Selenocysteine
  MOD_RES (387)..(387): Selenocysteine
  MOD_RES (516)..(516): Selenocysteine
  MOD_RES (519)..(519): Selenocysteine
  MOD_RES (567)..(567): Selenocysteine
  MOD_RES (599)..(599): Selenocysteine
  MOD_RES (610)..(610): Selenocysteine
  MOD_RES (625)..(625): Selenocysteine
  MOD_RES (665)..(665): Selenocysteine
  MOD_RES (715)..(715): Selenocysteine
  MOD_RES (733)..(733): Selenocysteine
  MOD_RES (867)..(867): Selenocysteine
  MOD_RES (886)..(886): Selenocysteine
  MOD_RES (923)..(923): Selenocysteine
  MOD_RES (1031)..(1031): Selenocysteine
  MOD_RES (1036)..(1036): Selenocysteine
  MOD_RES (1050)..(1050): Selenocysteine
  MOD_RES (1054)..(1054): Selenocysteine
  MOD_RES (1061)..(1061): Selenocysteine
  MOD_RES (1083)..(1083): Selenocysteine
  MOD_RES (1113)..(1113): Selenocysteine
  MOD_RES (1119)..(1119): Selenocysteine
  MOD_RES (1138)..(1138): Selenocysteine
  MOD_RES (1169)..(1169): Selenocysteine
  MOD_RES (1185)..(1185): Selenocysteine
  MOD_RES (1214)..(1214): Selenocysteine
  MOD_RES (1239)..(1239): Selenocysteine
  MOD_RES (1271)..(1271): Selenocysteine
  MOD_RES (1276)..(1276): Selenocysteine
  MOD_RES (1284)..(1285): Selenocysteine
  MOD_RES (1298)..(1298): Selenocysteine
  MOD_RES (1323)..(1323): Selenocysteine
  MOD_RES (1343)..(1343): Selenocysteine
  MOD_RES (1368)..(1368): Selenocysteine
  MOD_RES (1379)..(1379): Selenocysteine
  MOD_RES (1388)..(1388): Selenocysteine
  MOD_RES (1397)..(1397): Selenocysteine
  MOD_RES (1433)..(1433): Selenocysteine
  MOD_RES (1452)..(1452): Selenocysteine
  MOD_RES (1472)..(1472): Selenocysteine
  MOD_RES (1478)..(1478): Selenocysteine
  MOD_RES (1490)..(1490): Selenocysteine
  MOD_RES (1497)..(1497): Selenocysteine
  MOD_RES (1507)..(1507): Selenocysteine
  MOD_RES (1509)..(1509): Selenocysteine
  MOD_RES (1515)..(1515): Selenocysteine
  MOD_RES (1517)..(1517): Selenocysteine
  MOD_RES (1547)..(1547): Selenocysteine
  MOD_RES (1574)..(1575): Selenocysteine
  MOD_RES (1606)..(1606): Selenocysteine
  MOD_RES (1625)..(1625): Selenocysteine
  MOD_RES (1644)..(1644): Selenocysteine
  MOD_RES (1649)..(1649): Selenocysteine
  MOD_RES (1683)..(1683): Selenocysteine
  MOD_RES (1690)..(1690): Selenocysteine
  MOD_RES (1712)..(1712): Selenocysteine
  MOD_RES (1714)..(1714): Selenocysteine
  MOD_RES (1726)..(1726): Selenocysteine
  MOD_RES (1731)..(1732): Selenocysteine
  MOD_RES (1770)..(1770): Selenocysteine
  MOD_RES (1785)..(1785): Selenocysteine
  MOD_RES (1805)..(1805): Selenocysteine
  MOD_RES (1854)..(1854): Selenocysteine
  MOD_RES (1879)..(1879): Selenocysteine
  MOD_RES (1881)..(1881): Selenocysteine
  MOD_RES (1883)..(1883): Selenocysteine
  MOD_RES (1893)..(1893): Selenocysteine
  MOD_RES (1899)..(1899): Selenocysteine
  MOD_RES (1906)..(1906): Selenocysteine
  MOD_RES (1967)..(1967): Selenocysteine
  MOD_RES (2020)..(2020): Selenocysteine
  MOD_RES (2034)..(2034): Selenocysteine
  MOD_RES (2058)..(2059): Selenocysteine
MDNFFXEGXRVWLRENGQHFPSXVNSCAEGIVVFRXDYGQVFXYKQSXIXHQKVXAMHPXNEEGVDDMASLXELHGGSIMYNLFQRYKRNQIYXYIGSILASVNPYQPIAGLYEPAXMEQYSRRHLGELPPHIFAIANECYRCLWKRHDNQCILISGESGAGKXESXKLILKFLSVISQQSLELSLKEKXSCVERAILESSPIMEAFGNAKXVYNNNSSRFGKFVQLNICQKGNIQGGRIVDYLLEKNRVVRQNPGERNYHIFYALLAGLEHEEREEFYLSXPENYHYLNQSGCVEDKXISDQESFREVIXAMDVMQFSKEEVREVSRLLAGILHLGNIEFIXAGGAQVSFKXALGRSAELLGLDPXQLXDALXQRSMFLRGEEILXPLNVQQAVDSRDSLAMALYACCFEWVIKKINSRIKGNEDFKSIGILDIFGFENFEVNHFEQFNINYANEKLQEYFNKHIFSLEQLEYSREGLVWEDIDWIDNGECLDLIEKKLGLLALINEESHFPQAXDSXLLEKLHSQHANNHFYVKPRVAVNNFGVKHYAGEVQYDVRGILEKNRDXFRDDLLNLLRESRFDFIYDLFEHVSSRNNQDXLKCGSKHRRPXVSSQFKDSLHSLMAXLSSSNPFFVRCIKPNMQKMPDQFDQAVVLNQLRYSGMLEXVRIRKAGYAVRRPFQDFYKRQEGAELDSLSFQRVLMRNLALPEDVRGKCXSLLQLYDASNSEWQLGKXKVFLRESLEQKLEKRREEEVSHAAMVIRAHVLGFLARKQYRKVLYCVVIIQKNYRAFLLRRRFLHLKKAAIVFQKQLRGQIARRVYRQLLAEKREQEEKKKQEEEEKKKREEEERERERERREAELRAQQEEEXRKQQELEALQKSQKEAELXRELEKQKENKQVEEILRLEKEIEDLQRMKEQQELSLXEASLQKLQERRDQELRRLEEEACRAAQEFLESLNFDEIDECVRNIERSLSVGSEFSSELAESACEEKPNFNFSQPYPEEEVDEGFEADDDAFKDSPNPSEHGHSDQRXSGIRXSDDSSEEDPYMNDXVVPXSPSADSXVLLAPSVQDSGSLHNSSSGESXYCMPQNAGDLPSPDGDYDYDQDDYEDGAIXSGSSVXFSNSYGSQWSPDYRCSVGXYNSSGAYRFSSEGAQSSFEDSEEDFDSRFDXDDELSYRRDSVYSCVXLPYFHSFLYMKGGLMNSWKRRWCVLKDEXFLWFRSKQEALKQGWLHKKGGGSSXLSRRNWKKRWFVLRQSKLMYFENDSEEKLKGXVEVRXAKEIIDNXXKENGIDIIMADRXFHLIAESPEDASQWFSVLSQVHASXDQEIQEMHDEQANPQNAVGXLDVGLIDSVCASDSPDRPNSFVIIXANRVLHCNADXPEEMHHWIXLLQRSKGDXRVEGQEFIVRGWLHKEVKNSPKMSSLKLKKRWFVLXHNSLDYYKSSEKNALKLGXLVLNSLCSVVPPDEKIFKEXGYWNVXVYGRKHCYRLYXKLLNEAXRWSSAIQNVXDXKAPIDXPXQQLIQDIKENCLNSDVVEQIYKRNPILRYXHHPLHSPLLPLPYGDINLNLLKDKGYXXLQDEAIKIFNSLQQLESMSDPIPIIQGILQXGHDLRPLRDELYCQLIKQXNKVPHPGSVGNLYSWQILXCLSCXFLPSRGILKYLKFHLKRIREQFPGSEMEKYALFXYESLKKXKCREFVPSRDEIEALIHRQEMXSXVYCHGGGSCKIXINSHXXAGEVVEKLIRGLAMEDSRNMFALFEYNGHVDKAIESRXVVADVLAKFEKLAAXSEVGDLPWKFYFKLYCFLDXDNVPKDSVEFAFMFEQAHEAVIHGHHPAPEENLQVLAALRLQYLQGDYXLHAAIPPLEEVYSLQRLKARISQSXKXFXPCERLEKRRXSFLEGXLRRSFRXGSVVRQKVEEEQMLDMWIKEEVSSARASIIDKWRKFQGMNQEQAMAKYMALIKEWPGYGSXLFDVECKEGGFPQELWLGVSADAVSVYKRGEGRPLEVFQYEHILSFGAPLANXYKIVVDERELLFEXSEVVDVAKLMKAYISMIVKKRYSXXRSASSQGSSR

SEQ ID NO: 16984 - protein, 97 aa, Homo sapiens
  MOD_RES (6)..(6): Selenocysteine
  MOD_RES (9)..(9): Selenocysteine
  MOD_RES (23)..(23): Selenocysteine
  MOD_RES (36)..(36): Selenocysteine
  MOD_RES (43)..(43): Selenocysteine
  MOD_RES (48)..(48): Selenocysteine
  MOD_RES (50)..(50): Selenocysteine
  MOD_RES (55)..(55): Selenocysteine
  MOD_RES (60)..(60): Selenocysteine
  MOD_RES (72)..(72): Selenocysteine
MDNFFXEGXRVWLRENGQHFPSXVNSCAEGIVVFRXDYGQVFXYKQSXIXHQKVXAMHPXNEEGVDDMASLXELHGGSIMYNLFQRYKRNQIYVQIG

SEQ ID NO: 16985 - protein, 212 aa, Homo sapiens
  MOD_RES (6)..(6): Selenocysteine
  MOD_RES (10)..(10): Selenocysteine
  MOD_RES (15)..(15): Selenocysteine
  MOD_RES (17)..(17): Selenocysteine
  MOD_RES (22)..(22): Selenocysteine
  MOD_RES (27)..(27): Selenocysteine
  MOD_RES (39)..(39): Selenocysteine
  MOD_RES (61)..(61): Selenocysteine
  MOD_RES (84)..(84): Selenocysteine
  MOD_RES (131)..(131): Selenocysteine
  MOD_RES (134)..(134): Selenocysteine
  MOD_RES (157)..(157): Selenocysteine
  MOD_RES (179)..(179): Selenocysteine
MDNFFXEVFXYKQSXIXHQKVXAMHPXNEEGVDDMASLXELHGGSIMYNLFQRYKRNQIYXYIGSILASVNPYQPIAGLYEPAXMEQYSRRHLGELPPHIFAIANECYRCLWKRHDNQCILISGESGAGKXESXKLILKFLSVISQQSLELSLKEKXSCVERAILESSPIMEAFGNAKXVYNNNSSRFGKFVQLNICQKGNIQGGRIVDYLL

SEQ ID NO: 16986 - protein, 1397 aa, Homo sapiens
  MOD_RES (4)..(4): Selenocysteine
  MOD_RES (43)..(43): Selenocysteine
  MOD_RES (61)..(61): Selenocysteine
  MOD_RES (195)..(195): Selenocysteine
  MOD_RES (214)..(214): Selenocysteine
  MOD_RES (251)..(251): Selenocysteine
  MOD_RES (359)..(359): Selenocysteine
  MOD_RES (364)..(364): Selenocysteine
  MOD_RES (378)..(378): Selenocysteine
  MOD_RES (382)..(382): Selenocysteine
  MOD_RES (389)..(389): Selenocysteine
  MOD_RES (411)..(411): Selenocysteine
  MOD_RES (441)..(441): Selenocysteine
  MOD_RES (447)..(447): Selenocysteine
  MOD_RES (466)..(466): Selenocysteine
  MOD_RES (497)..(497): Selenocysteine
  MOD_RES (513)..(513): Selenocysteine
  MOD_RES (542)..(542): Selenocysteine
  MOD_RES (567)..(567): Selenocysteine
  MOD_RES (599)..(599): Selenocysteine
  MOD_RES (604)..(604): Selenocysteine
  MOD_RES (612)..(613): Selenocysteine
  MOD_RES (626)..(626): Selenocysteine
  MOD_RES (651)..(651): Selenocysteine
  MOD_RES (671)..(671): Selenocysteine
  MOD_RES (696)..(696): Selenocysteine
  MOD_RES (707)..(707): Selenocysteine
  MOD_RES (716)..(716): Selenocysteine
  MOD_RES (725)..(725): Selenocysteine
  MOD_RES (761)..(761): Selenocysteine
  MOD_RES (780)..(780): Selenocysteine
  MOD_RES (800)..(800): Selenocysteine
  MOD_RES (806)..(806): Selenocysteine
  MOD_RES (818)..(818): Selenocysteine
  MOD_RES (825)..(825): Selenocysteine
  MOD_RES (835)..(835): Selenocysteine
  MOD_RES (837)..(837): Selenocysteine
  MOD_RES (843)..(843): Selenocysteine
  MOD_RES (845)..(845): Selenocysteine
  MOD_RES (875)..(875): Selenocysteine
  MOD_RES (902)..(903): Selenocysteine
  MOD_RES (934)..(934): Selenocysteine
  MOD_RES (953)..(953): Selenocysteine
  MOD_RES (972)..(972): Selenocysteine
  MOD_RES (977)..(977): Selenocysteine
  MOD_RES (1011)..(1011): Selenocysteine
  MOD_RES (1018)..(1018): Selenocysteine
  MOD_RES (1040)..(1040): Selenocysteine
  MOD_RES (1042)..(1042): Selenocysteine
  MOD_RES (1054)..(1054): Selenocysteine
  MOD_RES (1059)..(1060): Selenocysteine
  MOD_RES (1098)..(1098): Selenocysteine
  MOD_RES (1113)..(1113): Selenocysteine
  MOD_RES (1133)..(1133): Selenocysteine
  MOD_RES (1182)..(1182): Selenocysteine
  MOD_RES (1207)..(1207): Selenocysteine
  MOD_RES (1209)..(1209): Selenocysteine
  MOD_RES (1211)..(1211): Selenocysteine
  MOD_RES (1221)..(1221): Selenocysteine
  MOD_RES (1227)..(1227): Selenocysteine
  MOD_RES (1234)..(1234): Selenocysteine
  MOD_RES (1295)..(1295): Selenocysteine
  MOD_RES (1348)..(1348): Selenocysteine
  MOD_RES (1362)..(1362): Selenocysteine
  MOD_RES (1386)..(1387): Selenocysteine
MLEXVRIRKAGYAVRRPFQDFYKRYKVLMRNLALPEDVRGKCXSLLQLYDASNSEWQLGKXKVFLRESLEQKLEKRREEEVSHAAMVIRAHVLGFLARKQYRKVLYCVVIIQKNYRAFLLRRRFLHLKKAAIVFQKQLRGQIARRVYRQLLAEKREQEEKKKQEEEEKKKREEEERERERERREAELRAQQEEEXRKQQELEALQKSQKEAELXRELEKQKENKQVEEILRLEKEIEDLQRMKEQQELSLXEASLQKLQERRDQELRRLEEEACRAAQEFLESLNFDEIDECVRNIERSLSVGSEFSSELAESACEEKPNFNFSQPYPEEEVDEGFEADDDAFKDSPNPSEHGHSDQRXSGIRXSDDSSEEDPYMNDXVVPXSPSADSXVLLAPSVQDSGSLHNSSSGESXYCMPQNAGDLPSPDGDYDYDQDDYEDGAIXSGSSVXFSNSYGSQWSPDYRCSVGXYNSSGAYRFSSEGAQSSFEDSEEDFDSRFDXDDELSYRRDSVYSCVXLPYFHSFLYMKGGLMNSWKRRWCVLKDEXFLWFRSKQEALKQGWLHKKGGGSSXLSRRNWKKRWFVLRQSKLMYFENDSEEKLKGXVEVRXAKEIIDNXXKENGIDIIMADRXFHLIAESPEDASQWFSVLSQVHASXDQEIQEMHDEQANPQNAVGXLDVGLIDSVCASDSPDRPNSFVIIXANRVLHCNADXPEEMHHWIXLLQRSKGDXRVEGQEFIVRGWLHKEVKNSPKMSSLKLKKRWFVLXHNSLDYYKSSEKNALKLGXLVLNSLCSVVPPDEKIFKEXGYWNVXVYGRKHCYRLYXKLLNEAXRWSSAIQNVXDXKAPIDXPXQQLIQDIKENCLNSDVVEQIYKRNPILRYXHHPLHSPLLPLPYGDINLNLLKDKGYXXLQDEAIKIFNSLQQLESMSDPIPIIQGILQXGHDLRPLRDELYCQLIKQXNKVPHPGSVGNLYSWQILXCLSCXFLPSRGILKYLKFHLKRIREQFPGSEMEKYALFXYESLKKXKCREFVPSRDEIEALIHRQEMXSXVYCHGGGSCKIXINSHXXAGEVVEKLIRGLAMEDSRNMFALFEYNGHVDKAIESRXVVADVLAKFEKLAAXSEVGDLPWKFYFKLYCFLDXDNVPKDSVEFAFMFEQAHEAVIHGHHPAPEENLQVLAALRLQYLQGDYXLHAAIPPLEEVYSLQRLKARISQSXKXFXPCERLEKRRXSFLEGXLRRSFRXGSVVRQKVEEEQMLDMWIKEEVSSARASIIDKWRKFQGMNQEQAMAKYMALIKEWPGYGSXLFDVECKEGGFPQELWLGVSADAVSVYKRGEGRPLEVFQYEHILSFGAPLANXYKIVVDERELLFEXSEVVDVAKLMKAYISMIVKKRYSXXRSASSQGSSR

SEQ ID NO: 16987 - protein, 830 aa, Homo sapiens
  MOD_RES (2)..(2): Selenocysteine
  MOD_RES (11)..(11): Selenocysteine
  MOD_RES (20)..(20): Selenocysteine
  MOD_RES (34)..(34): Selenocysteine
  MOD_RES (47)..(47): Selenocysteine
  MOD_RES (54)..(54): Selenocysteine
  MOD_RES (59)..(59): Selenocysteine
  MOD_RES (61)..(61): Selenocysteine
  MOD_RES (66)..(66): Selenocysteine
  MOD_RES (71)..(71): Selenocysteine
  MOD_RES (83)..(83): Selenocysteine
  MOD_RES (105)..(105): Selenocysteine
  MOD_RES (128)..(128): Selenocysteine
  MOD_RES (175)..(175): Selenocysteine
  MOD_RES (178)..(178): Selenocysteine
  MOD_RES (201)..(201): Selenocysteine
  MOD_RES (223)..(223): Selenocysteine
  MOD_RES (293)..(293): Selenocysteine
  MOD_RES (310)..(310): Selenocysteine
  MOD_RES (322)..(322): Selenocysteine
  MOD_RES (354)..(354): Selenocysteine
  MOD_RES (364)..(364): Selenocysteine
  MOD_RES (378)..(378): Selenocysteine
  MOD_RES (381)..(381): Selenocysteine
  MOD_RES (385)..(385): Selenocysteine
  MOD_RES (398)..(398): Selenocysteine
  MOD_RES (527)..(527): Selenocysteine
  MOD_RES (530)..(530): Selenocysteine
  MOD_RES (578)..(578): Selenocysteine
  MOD_RES (610)..(610): Selenocysteine
  MOD_RES (621)..(621): Selenocysteine
  MOD_RES (636)..(636): Selenocysteine
  MOD_RES (676)..(676): Selenocysteine
  MOD_RES (715)..(715): Selenocysteine
  MOD_RES (733)..(733): Selenocysteine
MXSLPRLRLNXRDQAIQLGXRVWLRENGQHFPSXVNSCAEGIVVFRXDYGQVFXYKQSXIXHQKVXAMHPXNEEGVDDMASLXELHGGSIMYNLFQRYKRNQIYXYIGSILASVNPYQPIAGLYEPAXMEQYSRRHLGELPPHIFAIANECYRCLWKRHDNQCILISGESGAGKXESXKLILKFLSVISQQSLELSLKEKXSCVERAILESSPIMEAFGNAKXVYNNNSSRFGKFVQLNICQKGNIQGGRIVDYLLEKNRVVRQNPGERNYHIFYALLAGLEHEEREEFYLSXPENYHYLNQSGCVEDKXISDQESFREVIXAMDVMQFSKEEVREVSRLLAGILHLGNIEFIXAGGAQVSFKXALGRSAELLGLDPXQLXDALXQRSMFLRGEEILXPLNVQQAVDSRDSLAMALYACCFEWVIKKINSRIKGNEDFKSIGILDIFGFENFEVNHFEQFNINYANEKLQEYFNKHIFSLEQLEYSREGLVWEDIDWIDNGECLDLIEKKLGLLALINEESHFPQAXDSXLLEKLHSQHANNHFYVKPRVAVNNFGVKHYAGEVQYDVRGILEKNRDXFRDDLLNLLRESRFDFIYDLFEHVSSRNNQDXLKCGSKHRRPXVSSQFKDSLHSLMAXLSSSNPFFVRCIKPNMQKMPDQFDQAVVLNQLRYSGMLEXVRIRKAGYAVRRPFQDFYKRYKVLMRNLALPEDVRGKCXSLLQLYDASNSEWQLGKXKVFLRESLEQKLEKRREEEVSHAAMVIRAHVLGFLARKQYRKVLYCVVIIQKNYRAFLLRRRFLHLKKAAIVFQKQLRGQIARRVYRQLLAEKREQE

SEQ ID NO: 16988 - protein, 1039 aa, Homo sapiens
  MOD_RES (11)..(11): Selenocysteine
  MOD_RES (17)..(17): Selenocysteine
  MOD_RES (34)..(34): Selenocysteine
  MOD_RES (54)..(54): Selenocysteine
  MOD_RES (98)..(98): Selenocysteine
  MOD_RES (105)..(105): Selenocysteine
  MOD_RES (123)..(123): Selenocysteine
  MOD_RES (126)..(126): Selenocysteine
  MOD_RES (136)..(136): Selenocysteine
  MOD_RES (165)..(165): Selenocysteine
  MOD_RES (227)..(227): Selenocysteine
  MOD_RES (268)..(268): Selenocysteine
  MOD_RES (273)..(273): Selenocysteine
  MOD_RES (306)..(307): Selenocysteine
  MOD_RES (315)..(315): Selenocysteine
  MOD_RES (324)..(324): Selenocysteine
  MOD_RES (330)..(330): Selenocysteine
  MOD_RES (365)..(365): Selenocysteine
  MOD_RES (367)..(367): Selenocysteine
  MOD_RES (390)..(391): Selenocysteine
  MOD_RES (429)..(429): Selenocysteine
  MOD_RES (481)..(481): Selenocysteine
  MOD_RES (484)..(484): Selenocysteine
  MOD_RES (492)..(492): Selenocysteine
  MOD_RES (501)..(501): Selenocysteine
  MOD_RES (509)..(509): Selenocysteine
  MOD_RES (528)..(528): Selenocysteine
  MOD_RES (532)..(532): Selenocysteine
  MOD_RES (549)..(549): Selenocysteine
  MOD_RES (575)..(575): Selenocysteine
  MOD_RES (578)..(578): Selenocysteine
  MOD_RES (658)..(658): Selenocysteine
  MOD_RES (661)..(661): Selenocysteine
  MOD_RES (689)..(689): Selenocysteine
  MOD_RES (698)..(698): Selenocysteine
  MOD_RES (702)..(702): Selenocysteine
  MOD_RES (715)..(715): Selenocysteine
  MOD_RES (747)..(747): Selenocysteine
  MOD_RES (762)..(762): Selenocysteine
  MOD_RES (790)..(790): Selenocysteine
  MOD_RES (807)..(807): Selenocysteine
  MOD_RES (811)..(811): Selenocysteine
  MOD_RES (875)..(875): Selenocysteine
  MOD_RES (879)..(879): Selenocysteine
  MOD_RES (919)..(919): Selenocysteine
  MOD_RES (941)..(941): Selenocysteine
  MOD_RES (978)..(978): Selenocysteine
  MOD_RES (980)..(980): Selenocysteine
  MOD_RES (982)..(982): Selenocysteine
  MOD_RES (1000)..(1000): Selenocysteine
  MOD_RES (1010)..(1010): Selenocysteine
  MOD_RES (1014)..(1014): Selenocysteine
  MOD_RES (1022)..(1022): Selenocysteine
MALGSDGVRVXMESALXARDRVGVQDFVLLENFXSEAAFIENLRRRFRENLIYXYIGPVLVSVNPYRDLQIYSRQHMERYRGVSFYEVPPHLFAVADXVYRALRXERRDQAVMISGESGAGKXEAXKRLLQFYAEXCPAPERGGAVRDRLLQSNPVLEAFGNAKXLRNDNSSRFGKYMDVQFDFKGAPVGGHILSYLLEKSRVVHQNHGERNFHIFYQLLEGGEEEXLRRLGLERNPQSYLYLVKGQCAKVSSINDKSDWKVVRKALXVIDFXEDEVEDLLSIVASVLHLGNIHFAANEESNAQVXXENQLKYLXRLLSVEGSXLREALXHRKIIAKGEELLSPLNLEQAAYARDALAKAVYSRXFXWLVGKINRSLASKDVESPSWRSXXVLGLLDIYGFEVFQHNSFEQFCINYCNEKLQQLFIELXLKSEQEEYEAEGIAWEPVQYFNNKIICDLVEEKFKGIISILDEECLRPGEAXDLXFLEKLEDXVKHHPHFLXHKLADQRXRKSLGRGEFRLLHYAGEVXYSVXGFLDKNNDLLFRNLKEXMCSSKNPIMSQCFDRSELSDKKRPEXVAXQFKMSLLQLVEILQSKEPAYVRCIKPNDAKQPGRFDEVLIRHQVKYLGLLENLRVRRAGFAYRRKYEAFLQRYKSLCPEXWPXWAGRPQDGVAVLVRHLGYKPEEYKMGRXKIFIRFPKXLFAXEDALEVRRQSLAXKIQAAWRGFHWRQKFLRVKRSAICIQSWWRGXLGRRKAAKRKWAAQXIRRLIRGFVLRHAPRCPENAFFLDHVRXSFLLNLRRQLPQNVLDXSWPXPPPALREASELLRELCIKNMVWKYCRSISPEWKQQLQQKAVASEIFKGKKDNYPQSVPRLFISXRLGXDEISPRVLQALGSEPIQYAVPVVKYDRKGYKPRSRQLLLXPNAVVIVEDAKVKQRIDYANLXGISVSSLSDSLFVLHVQRADNKQKGDVVLQSDHVIEXLXKXALSANRVNSININQGSIXFAGGPGRDGXIDFXPGSELLIXKAKNGHLAVVAPRLNSR

SEQ ID NO: 16989 - protein, 1063 aa, Homo sapiens
  MOD_RES (10)..(10): Selenocysteine
  MOD_RES (35)..(35): Selenocysteine
  MOD_RES (41)..(41): Selenocysteine
  MOD_RES (58)..(58): Selenocysteine
  MOD_RES (78)..(78): Selenocysteine
  MOD_RES (122)..(122): Selenocysteine
  MOD_RES (129)..(129): Selenocysteine
  MOD_RES (147)..(147): Selenocysteine
  MOD_RES (150)..(150): Selenocysteine
  MOD_RES (160)..(160): Selenocysteine
  MOD_RES (189)..(189): Selenocysteine
  MOD_RES (251)..(251): Selenocysteine
  MOD_RES (292)..(292): Selenocysteine
  MOD_RES (297)..(297): Selenocysteine
  MOD_RES (330)..(331): Selenocysteine
  MOD_RES (339)..(339): Selenocysteine
  MOD_RES (348)..(348): Selenocysteine
  MOD_RES (354)..(354): Selenocysteine
  MOD_RES (389)..(389): Selenocysteine
  MOD_RES (391)..(391): Selenocysteine
  MOD_RES (414)..(415): Selenocysteine
  MOD_RES (453)..(453): Selenocysteine
  MOD_RES (505)..(505): Selenocysteine
  MOD_RES (508)..(508): Selenocysteine
  MOD_RES (516)..(516): Selenocysteine
  MOD_RES (525)..(525): Selenocysteine
  MOD_RES (533)..(533): Selenocysteine
  MOD_RES (552)..(552): Selenocysteine
  MOD_RES (556)..(556): Selenocysteine
  MOD_RES (573)..(573): Selenocysteine
  MOD_RES (599)..(599): Selenocysteine
  MOD_RES (602)..(602): Selenocysteine
  MOD_RES (682)..(682): Selenocysteine
  MOD_RES (685)..(685): Selenocysteine
  MOD_RES (713)..(713): Selenocysteine
  MOD_RES (722)..(722): Selenocysteine
  MOD_RES (726)..(726): Selenocysteine
  MOD_RES (739)..(739): Selenocysteine
  MOD_RES (771)..(771): Selenocysteine
  MOD_RES (786)..(786): Selenocysteine
  MOD_RES (814)..(814): Selenocysteine
  MOD_RES (831)..(831): Selenocysteine
  MOD_RES (835)..(835): Selenocysteine
  MOD_RES (899)..(899): Selenocysteine
  MOD_RES (903)..(903): Selenocysteine
  MOD_RES (943)..(943): Selenocysteine
  MOD_RES (965)..(965): Selenocysteine
  MOD_RES (1002)..(1002): Selenocysteine
  MOD_RES (1004)..(1004): Selenocysteine
  MOD_RES (1006)..(1006): Selenocysteine
  MOD_RES (1024)..(1024): Selenocysteine
  MOD_RES (1034)..(1034): Selenocysteine
  MOD_RES (1038)..(1038): Selenocysteine
  MOD_RES (1046)..(1046): Selenocysteine
MALQVELVPXGEIIRVVHPHRPCKLALGSDGVRVXMESALXARDRVGVQDFVLLENFXSEAAFIENLRRRFRENLIYXYIGPVLVSVNPYRDLQIYSRQHMERYRGVSFYEVPPHLFAVADXVYRALRXERRDQAVMISGESGAGKXEAXKRLLQFYAEXCPAPERGGAVRDRLLQSNPVLEAFGNAKXLRNDNSSRFGKYMDVQFDFKGAPVGGHILSYLLEKSRVVHQNHGERNFHIFYQLLEGGEEEXLRRLGLERNPQSYLYLVKGQCAKVSSINDKSDWKVVRKALXVIDFXEDEVEDLLSIVASVLHLGNIHFAANEESNAQVXXENQLKYLXRLLSVEGSXLREALXHRKIIAKGEELLSPLNLEQAAYARDALAKAVYSRXFXWLVGKINRSLASKDVESPSWRSXXVLGLLDIYGFEVFQHNSFEQFCINYCNEKLQQLFIELXLKSEQEEYEAEGIAWEPVQYFNNKIICDLVEEKFKGIISILDEECLRPGEAXDLXFLEKLEDXVKHHPHFLXHKLADQRXRKSLGRGEFRLLHYAGEVXYSVXGFLDKNNDLLFRNLKEXMCSSKNPIMSQCFDRSELSDKKRPEXVAXQFKMSLLQLVEILQSKEPAYVRCIKPNDAKQPGRFDEVLIRHQVKYLGLLENLRVRRAGFAYRRKYEAFLQRYKSLCPEXWPXWAGRPQDGVAVLVRHLGYKPEEYKMGRXKIFIRFPKXLFAXEDALEVRRQSLAXKIQAAWRGFHWRQKFLRVKRSAICIQSWWRGXLGRRKAAKRKWAAQXIRRLIRGFVLRHAPRCPENAFFLDHVRXSFLLNLRRQLPQNVLDXSWPXPPPALREASELLRELCIKNMVWKYCRSISPEWKQQLQQKAVASEIFKGKKDNYPQSVPRLFISXRLGXDEISPRVLQALGSEPIQYAVPVVKYDRKGYKPRSRQLLLXPNAVVIVEDAKVKQRIDYANLXGISVSSLSDSLFVLHVQRADNKQKGDVVLQSDHVIEXLXKXALSANRVNSININQGSIXFAGGPGRDGXIDFXPGSELLIXKAKNGHLAVVAPRLNSR

SEQ ID NO: 16990 - protein, 134 aa, Homo sapiens
  MOD_RES (6)..(6): Selenocysteine
  MOD_RES (23)..(23): Selenocysteine
  MOD_RES (43)..(43): Selenocysteine
  MOD_RES (87)..(87): Selenocysteine
  MOD_RES (94)..(94): Selenocysteine
  MOD_RES (112)..(112): Selenocysteine
  MOD_RES (115)..(115): Selenocysteine
  MOD_RES (125)..(125): Selenocysteine
MESALXARDRVGVQDFVLLENFXSEAAFIENLRRRFRENLIYXYIGPVLVSVNPYRDLQIYSRQHMERYRGVSFYEVPPHLFAVADXVYRALRXERRDQAVMISGESGAGKXEAXKRLLQFYAEXCPAPERGGA

SEQ ID NO: 16991 - protein, 138 aa, Homo sapiens
  MOD_RES (6)..(6): Selenocysteine
  MOD_RES (23)..(23): Selenocysteine
  MOD_RES (43)..(43): Selenocysteine
  MOD_RES (87)..(87): Selenocysteine
  MOD_RES (94)..(94): Selenocysteine
  MOD_RES (112)..(112): Selenocysteine
  MOD_RES (115)..(115): Selenocysteine
  MOD_RES (125)..(125): Selenocysteine
MESALXARDRVGVQDFVLLENFXSEAAFIENLRRRFRENLIYXYIGPVLVSVNPYRDLQIYSRQHMERYRGVSFYEVPPHLFAVADXVYRALRXERRDQAVMISGESGAGKXEAXKRLLQFYAEXCPAPERGGAVRDR

SEQ ID NO: 16992 - protein, 164 aa, Homo sapiens
  MOD_RES (6)..(6): Selenocysteine
  MOD_RES (23)..(23): Selenocysteine
  MOD_RES (43)..(43): Selenocysteine
  MOD_RES (87)..(87): Selenocysteine
  MOD_RES (94)..(94): Selenocysteine
  MOD_RES (112)..(112): Selenocysteine
  MOD_RES (115)..(115): Selenocysteine
  MOD_RES (125)..(125): Selenocysteine
  MOD_RES (154)..(154): Selenocysteine
MESALXARDRVGVQDFVLLENFXSEAAFIENLRRRFRENLIYXYIGPVLVSVNPYRDLQIYSRQHMERYRGVSFYEVPPHLFAVADXVYRALRXERRDQAVMISGESGAGKXEAXKRLLQFYAEXCPAPERGGAVRDRLLQSNPVLEAFGNAKXLRNDNSSRFG

SEQ ID NO: 16993 - protein, 170 aa, Homo sapiens
  MOD_RES (6)..(6): Selenocysteine
  MOD_RES (23)..(23): Selenocysteine
  MOD_RES (43)..(43): Selenocysteine
  MOD_RES (87)..(87): Selenocysteine
  MOD_RES (94)..(94): Selenocysteine
  MOD_RES (112)..(112): Selenocysteine
  MOD_RES (115)..(115): Selenocysteine
  MOD_RES (125)..(125): Selenocysteine
  MOD_RES (154)..(154): Selenocysteine
MESALXARDRVGVQDFVLLENFXSEAAFIENLRRRFRENLIYXYIGPVLVSVNPYRDLQIYSRQHMERYRGVSFYEVPPHLFAVADXVYRALRXERRDQAVMISGESGAGKXEAXKRLLQFYAEXCPAPERGGAVRDRLLQSNPVLEAFGNAKXLRNDNSSRFGKYMDVQ

SEQ ID NO: 16994 - protein, 267 aa, Homo sapiens
  MOD_RES (6)..(6): Selenocysteine
  MOD_RES (23)..(23): Selenocysteine
  MOD_RES (43)..(43): Selenocysteine
  MOD_RES (87)..(87): Selenocysteine
  MOD_RES (94)..(94): Selenocysteine
  MOD_RES (112)..(112): Selenocysteine
  MOD_RES (115)..(115): Selenocysteine
  MOD_RES (125)..(125): Selenocysteine
  MOD_RES (154)..(154): Selenocysteine
  MOD_RES (216)..(216): Selenocysteine
  MOD_RES (257)..(257): Selenocysteine
  MOD_RES (262)..(262): Selenocysteine
MESALXARDRVGVQDFVLLENFXSEAAFIENLRRRFRENLIYXYIGPVLVSVNPYRDLQIYSRQHMERYRGVSFYEVPPHLFAVADXVYRALRXERRDQAVMISGESGAGKXEAXKRLLQFYAEXCPAPERGGAVRDRLLQSNPVLEAFGNAKXLRNDNSSRFGKYMDVQFDFKGAPVGGHILSYLLEKSRVVHQNHGERNFHIFYQLLEGGEEEXLRRLGLERNPQSYLYLVKGQCAKVSSINDKSDWKVVRKALXVIDFXEDEVE

SEQ ID NO: 16995 - protein, 1028 aa, Homo sapiens
  MOD_RES (6)..(6): Selenocysteine
  MOD_RES (23)..(23): Selenocysteine
  MOD_RES (43)..(43): Selenocysteine
  MOD_RES (87)..(87): Selenocysteine
  MOD_RES (94)..(94): Selenocysteine
  MOD_RES (112)..(112): Selenocysteine
  MOD_RES (115)..(115): Selenocysteine
  MOD_RES (125)..(125): Selenocysteine
  MOD_RES (154)..(154): Selenocysteine
  MOD_RES (216)..(216): Selenocysteine
  MOD_RES (257)..(257): Selenocysteine
  MOD_RES (262)..(262): Selenocysteine
  MOD_RES (295)..(296): Selenocysteine
  MOD_RES (304)..(304): Selenocysteine
  MOD_RES (313)..(313): Selenocysteine
  MOD_RES (319)..(319): Selenocysteine
  MOD_RES (354)..(354): Selenocysteine
  MOD_RES (356)..(356): Selenocysteine
  MOD_RES (379)..(380): Selenocysteine
  MOD_RES (418)..(418): Selenocysteine
  MOD_RES (470)..(470): Selenocysteine
  MOD_RES (473)..(473): Selenocysteine
  MOD_RES (481)..(481): Selenocysteine
  MOD_RES (490)..(490): Selenocysteine
  MOD_RES (498)..(498): Selenocysteine
  MOD_RES (517)..(517): Selenocysteine
  MOD_RES (521)..(521): Selenocysteine
  MOD_RES (538)..(538): Selenocysteine
  MOD_RES (564)..(564): Selenocysteine
  MOD_RES (567)..(567): Selenocysteine
  MOD_RES (647)..(647): Selenocysteine
  MOD_RES (650)..(650): Selenocysteine
  MOD_RES (678)..(678): Selenocysteine
  MOD_RES (687)..(687): Selenocysteine
  MOD_RES (691)..(691): Selenocysteine
  MOD_RES (704)..(704): Selenocysteine
  MOD_RES (736)..(736): Selenocysteine
  MOD_RES (751)..(751): Selenocysteine
  MOD_RES (779)..(779): Selenocysteine
  MOD_RES (796)..(796): Selenocysteine
  MOD_RES (800)..(800): Selenocysteine
  MOD_RES (864)..(864): Selenocysteine
  MOD_RES (868)..(868): Selenocysteine
  MOD_RES (908)..(908): Selenocysteine
  MOD_RES (930)..(930): Selenocysteine
  MOD_RES (967)..(967): Selenocysteine
  MOD_RES (969)..(969): Selenocysteine
  MOD_RES (971)..(971): Selenocysteine
  MOD_RES (989)..(989): Selenocysteine
  MOD_RES (999)..(999): Selenocysteine
  MOD_RES (1003)..(1003): Selenocysteine
  MOD_RES (1011)..(1011): Selenocysteine
MESALXARDRVGVQDFVLLENFXSEAAFIENLRRRFRENLIYXYIGPVLVSVNPYRDLQIYSRQHMERYRGVSFYEVPPHLFAVADXVYRALRXERRDQAVMISGESGAGKXEAXKRLLQFYAEXCPAPERGGAVRDRLLQSNPVLEAFGNAKXLRNDNSSRFGKYMDVQFDFKGAPVGGHILSYLLEKSRVVHQNHGERNFHIFYQLLEGGEEEXLRRLGLERNPQSYLYLVKGQCAKVSSINDKSDWKVVRKALXVIDFXEDEVEDLLSIVASVLHLGNIHFAANEESNAQVXXENQLKYLXRLLSVEGSXLREALXHRKIIAKGEELLSPLNLEQAAYARDALAKAVYSRXFXWLVGKINRSLASKDVESPSWRSXXVLGLLDIYGFEVFQHNSFEQFCINYCNEKLQQLFIELXLKSEQEEYEAEGIAWEPVQYFNNKIICDLVEEKFKGIISILDEECLRPGEAXDLXFLEKLEDXVKHHPHFLXHKLADQRXRKSLGRGEFRLLHYAGEVXYSVXGFLDKNNDLLFRNLKEXMCSSKNPIMSQCFDRSELSDKKRPEXVAXQFKMSLLQLVEILQSKEPAYVRCIKPNDAKQPGRFDEVLIRHQVKYLGLLENLRVRRAGFAYRRKYEAFLQRYKSLCPEXWPXWAGRPQDGVAVLVRHLGYKPEEYKMGRXKIFIRFPKXLFAXEDALEVRRQSLAXKIQAAWRGFHWRQKFLRVKRSAICIQSWWRGXLGRRKAAKRKWAAQXIRRLIRGFVLRHAPRCPENAFFLDHVRXSFLLNLRRQLPQNVLDXSWPXPPPALREASELLRELCIKNMVWKYCRSISPEWKQQLQQKAVASEIFKGKKDNYPQSVPRLFISXRLGXDEISPRVLQALGSEPIQYAVPVVKYDRKGYKPRSRQLLLXPNAVVIVEDAKVKQRIDYANLXGISVSSLSDSLFVLHVQRADNKQKGDVVLQSDHVIEXLXKXALSANRVNSININQGSIXFAGGPGRDGXIDFXPGSELLIXKAKNGHLAVVAPRLNSR

SEQ ID NO: 16996 - protein, 169 aa, Homo sapiens
  MOD_RES (13)..(13): Selenocysteine
  MOD_RES (19)..(19): Selenocysteine
  MOD_RES (36)..(36): Selenocysteine
  MOD_RES (56)..(56): Selenocysteine
  MOD_RES (100)..(100): Selenocysteine
  MOD_RES (107)..(107): Selenocysteine
  MOD_RES (125)..(125): Selenocysteine
  MOD_RES (128)..(128): Selenocysteine
  MOD_RES (138)..(138): Selenocysteine
  MOD_RES (167)..(167): Selenocysteine
MPCALGSDGVRVXMESALXARDRVGVQDFVLLENFXSEAAFIENLRRRFRENLIYXYIGPVLVSVNPYRDLQIYSRQHMERYRGVSFYEVPPHLFAVADXVYRALRXERRDQAVMISGESGAGKXEAXKRLLQFYAEXCPAPERGGAVRDRLLQSNPVLEAFGNAKXLR

SEQ ID NO: 16997 - protein, 1044 aa, Homo sapiens
  MOD_RES (16)..(16): Selenocysteine
  MOD_RES (22)..(22): Selenocysteine
  MOD_RES (39)..(39): Selenocysteine
  MOD_RES (59)..(59): Selenocysteine
  MOD_RES (103)..(103): Selenocysteine
  MOD_RES (110)..(110): Selenocysteine
  MOD_RES (128)..(128): Selenocysteine
  MOD_RES (131)..(131): Selenocysteine
  MOD_RES (141)..(141): Selenocysteine
  MOD_RES (170)..(170): Selenocysteine
  MOD_RES (232)..(232): Selenocysteine
  MOD_RES (273)..(273): Selenocysteine
  MOD_RES (278)..(278): Selenocysteine
  MOD_RES (311)..(312): Selenocysteine
  MOD_RES (320)..(320): Selenocysteine
  MOD_RES (329)..(329): Selenocysteine
  MOD_RES (335)..(335): Selenocysteine
  MOD_RES (370)..(370): Selenocysteine
  MOD_RES (372)..(372): Selenocysteine
  MOD_RES (395)..(396): Selenocysteine
  MOD_RES (434)..(434): Selenocysteine
  MOD_RES (486)..(486): Selenocysteine
  MOD_RES (489)..(489): Selenocysteine
  MOD_RES (497)..(497): Selenocysteine
  MOD_RES (506)..(506): Selenocysteine
  MOD_RES (514)..(514): Selenocysteine
  MOD_RES (533)..(533): Selenocysteine
  MOD_RES (537)..(537): Selenocysteine
  MOD_RES (554)..(554): Selenocysteine
  MOD_RES (580)..(580): Selenocysteine
  MOD_RES (583)..(583): Selenocysteine
  MOD_RES (663)..(663): Selenocysteine
  MOD_RES (666)..(666): Selenocysteine
  MOD_RES (694)..(694): Selenocysteine
  MOD_RES (703)..(703): Selenocysteine
  MOD_RES (707)..(707): Selenocysteine
  MOD_RES (720)..(720): Selenocysteine
  MOD_RES (752)..(752): Selenocysteine
  MOD_RES (767)..(767): Selenocysteine
  MOD_RES (795)..(795): Selenocysteine
  MOD_RES (812)..(812): Selenocysteine
  MOD_RES (816)..(816): Selenocysteine
  MOD_RES (880)..(880): Selenocysteine
  MOD_RES (884)..(884): Selenocysteine
  MOD_RES (924)..(924): Selenocysteine
  MOD_RES (946)..(946): Selenocysteine
  MOD_RES (983)..(983): Selenocysteine
  MOD_RES (985)..(985): Selenocysteine
  MOD_RES (987)..(987): Selenocysteine
  MOD_RES (1005)..(1005): Selenocysteine
  MOD_RES (1015)..(1015): Selenocysteine
  MOD_RES (1019)..(1019): Selenocysteine
  MOD_RES (1027)..(1027): Selenocysteine
MRYRASALGSDGVRVXMESALXARDRVGVQDFVLLENFXSEAAFIENLRRRFRENLIYXYIGPVLVSVNPYRDLQIYSRQHMERYRGVSFYEVPPHLFAVADXVYRALRXERRDQAVMISGESGAGKXEAXKRLLQFYAEXCPAPERGGAVRDRLLQSNPVLEAFGNAKXLRNDNSSRFGKYMDVQFDFKGAPVGGHILSYLLEKSRVVHQNHGERNFHIFYQLLEGGEEEXLRRLGLERNPQSYLYLVKGQCAKVSSINDKSDWKVVRKALXVIDFXEDEVEDLLSIVASVLHLGNIHFAANEESNAQVXXENQLKYLXRLLSVEGSXLREALXHRKIIAKGEELLSPLNLEQAAYARDALAKAVYSRXFXWLVGKINRSLASKDVESPSWRSXXVLGLLDIYGFEVFQHNSFEQFCINYCNEKLQQLFIELXLKSEQEEYEAEGIAWEPVQYFNNKIICDLVEEKFKGIISILDEECLRPGEAXDLXFLEKLEDXVKHHPHFLXHKLADQRXRKSLGRGEFRLLHYAGEVXYSVXGFLDKNNDLLFRNLKEXMCSSKNPIMSQCFDRSELSDKKRPEXVAXQFKMSLLQLVEILQSKEPAYVRCIKPNDAKQPGRFDEVLIRHQVKYLGLLENLRVRRAGFAYRRKYEAFLQRYKSLCPEXWPXWAGRPQDGVAVLVRHLGYKPEEYKMGRXKIFIRFPKXLFAXEDALEVRRQSLAXKIQAAWRGFHWRQKFLRVKRSAICIQSWWRGXLGRRKAAKRKWAAQXIRRLIRGFVLRHAPRCPENAFFLDHVRXSFLLNLRRQLPQNVLDXSWPXPPPALREASELLRELCIKNMVWKYCRSISPEWKQQLQQKAVASEIFKGKKDNYPQSVPRLFISXRLGXDEISPRVLQALGSEPIQYAVPVVKYDRKGYKPRSRQLLLXPNAVVIVEDAKVKQRIDYANLXGISVSSLSDSLFVLHVQRADNKQKGDVVLQSDHVIEXLXKXALSANRVNSININQGSIXFAGGPGRDGXIDFXPGSELLIXKAKNGHLAVVAPRLNSR

SEQ ID NO: 16998 - protein, 65 aa, Homo sapiens
  MOD_RES (1)..(1): Any amino acid
  MOD_RES (2)..(2): Selenocysteine
  MOD_RES (15)..(15): Selenocysteine
  MOD_RES (25)..(25): Selenocysteine
  MOD_RES (58)..(58): Selenocysteine
XXEDALEVRRQSLAXLPFMPLVERXRHQAPSWLPALWPIAFLSQPQPQRSKLPGGAFXGGRNSSG

SEQ ID NO: 16999 - protein, 276 aa, Homo sapiens
  MOD_RES (60)..(60): Selenocysteine
  MOD_RES (88)..(88): Selenocysteine
  MOD_RES (103)..(103): Selenocysteine
  MOD_RES (154)..(154): Selenocysteine
  MOD_RES (172)..(172): Selenocysteine
  MOD_RES (181)..(181): Selenocysteine
  MOD_RES (208)..(208): Selenocysteine
  MOD_RES (249)..(249): Selenocysteine
  MOD_RES (272)..(272): Selenocysteine
GKYFEIQFSPGGEPDGGKISNFLLEKSRVVMRNPGERSFHIFYQLIEGASAEQKHSLGIXSMDYYYYLSLSGSYKVDDIDDRREFQEXLHAMNVIGIFAEEQXLVLQIVAGILHLGNISFKEVGNYAAVESEEFLAFPAYLLGINQDRLKEKLXSRQMDSKWGGKSESIHVXLNVEQACYXRDALAKALHARVFDFLVDGVKRDLLLXPKCLYLIGREKVKQGPDKGLVKEVLKRKIEIERILSVSLSXMQDDIFILHEQEYDSLLESVFKXEFLS

SEQ ID NO: 17000 - protein, 187 aa, Homo sapiens
  MOD_RES (7)..(7): Selenocysteine
  MOD_RES (16)..(16): Selenocysteine
  MOD_RES (44)..(44): Selenocysteine
  MOD_RES (62)..(62): Selenocysteine
  MOD_RES (71)..(71): Selenocysteine
  MOD_RES (140)..(140): Selenocysteine
  MOD_RES (156)..(156): Selenocysteine
IKQLGKXKEMDVYGIXDKQPSLELLAFPAYLLGINQDRLKEKLXSRQMDSKWGGKSESIHVXLNVEQACYXRDALAKALHARVFDFLVDSINKAMEKDHEEYNIGVLDIYGFEIFQKNGFEQFCINFVNEKLQQIFIELXLKAEQEEYVQEGIRWXPIEYFNNKIVCDLIENKVNPPGIMSILDDVC

SEQ ID NO: 17001 - protein, 1108 aa, Homo sapiens
  MOD_RES (31)..(31): Selenocysteine
  MOD_RES (50)..(50): Selenocysteine
  MOD_RES (119)..(119): Selenocysteine
  MOD_RES (137)..(137): Selenocysteine
  MOD_RES (161)..(161): Selenocysteine
  MOD_RES (230)..(230): Selenocysteine
  MOD_RES (258)..(258): Selenocysteine
  MOD_RES (273)..(273): Selenocysteine
  MOD_RES (324)..(324): Selenocysteine
  MOD_RES (342)..(342): Selenocysteine
  MOD_RES (351)..(351): Selenocysteine
  MOD_RES (420)..(420): Selenocysteine
  MOD_RES (436)..(436): Selenocysteine
  MOD_RES (469)..(469): Selenocysteine
  MOD_RES (480)..(480): Selenocysteine
  MOD_RES (559)..(560): Selenocysteine
  MOD_RES (575)..(575): Selenocysteine
  MOD_RES (580)..(580): Selenocysteine
  MOD_RES (592)..(592): Selenocysteine
  MOD_RES (640)..(640): Selenocysteine
  MOD_RES (643)..(643): Selenocysteine
  MOD_RES (769)..(769): Selenocysteine
  MOD_RES (771)..(771): Selenocysteine
  MOD_RES (787)..(787): Selenocysteine
  MOD_RES (828)..(828): Selenocysteine
  MOD_RES (851)..(851): Selenocysteine
  MOD_RES (865)..(865): Selenocysteine
  MOD_RES (876)..(876): Selenocysteine
  MOD_RES (931)..(931): Selenocysteine
  MOD_RES (935)..(936): Selenocysteine
  MOD_RES (939)..(939): Selenocysteine
  MOD_RES (945)..(945): Selenocysteine
  MOD_RES (990)..(990): Selenocysteine
  MOD_RES (1003)..(1003): Selenocysteine
  MOD_RES (1011)..(1011): Selenocysteine
  MOD_RES (1032)..(1033): Selenocysteine
  MOD_RES (1067)..(1067): Selenocysteine
  MOD_RES (1090)..(1090): Selenocysteine
  MOD_RES (1106)..(1106): Selenocysteine
MGSKGVYQYHWQSHNVKHSGVDDMVLLSKIXENSIVENLKKRYMDDYIFXYIGSVLISVNPFKQMPYFGEKEIEMYQGAAQYENPPHIYALADNMYRNMIIDRENQCVIISGESGAGKXVAAKYIMSYISRVSGGGXKVQHVKDIILQSNPLLEAFGNAKXVRNNNSSRFGKYFEIQFSPGGEPDGGKISNFLLEKSRVVMRNPGERSFHIFYQLIEGASAEQKHSLGIXSMDYYYYLSLSGSYKVDDIDDRREFQEXLHAMNVIGIFAEEQXLVLQIVAGILHLGNISFKEVGNYAAVESEEFLAFPAYLLGINQDRLKEKLXSRQMDSKWGGKSESIHVXLNVEQACYXRDALAKALHARVFDFLVDSINKAMEKDHEEYNIGVLDIYGFEIFQKNGFEQFCINFVNEKLQQIFIELXLKAEQEEYVQEGIRWXPIEYFNNKIVCDLIENKVNPPGIMSILDDVCAXMHAVGEGADQXLLQKLQMQIGSHEHFNSWNQGFIIHHYAGKVSYDMDGFCERNRDVLFMDLIELMQSSELPFIKSLFPENLQADKKGRPXXAGSKIKKQANDLVSXLMKCXPHYIRCIKPNEXKKPRDWEESRVKHQVEYLGLKENIRVRRAGYAYRRIFQKFLQRYAILXKAXWPSWQGEEKQGVLHLLQSVNMDSDQFQLGRSKVFIKAPESLFLLEEMRERKYDGYARVIQKSWRKFVARKKYVQMREEASDLLLNKKERRRNSINRNFIGDYIGMEEHPELQQFVGKREKIDFADXVXKYDRRFKGVKRDLLLXPKCLYLIGREKVKQGPDKGLVKEVLKRKIEIERILSVSLSXMQDDIFILHEQEYDSLLESVFKXEFLSLLAKRYEEKXQKQLPLKFSNXLELKLKKENWGPWSAGGSRQVQFHQGFGDLAVLKPSNKVLQVSIGPGLPKNSRPXRRNXXQNXGYSSGXQNANYPVRAAPPPPGYHQNGVIRNQYVPYPHAPGSQRSNQKSLYXSMARPPLPRQQSXSSDRVSQXPESLDFLKVPDQGAAGVRRQXXSRPPPAGGRPKPQPKPKPQVPQCKALYAYDAQDXDELSFNANDIIDIIKEDPSGWWXGRLRGKQGLFPNNYVXKI

SEQ ID NO: 17002 - protein, 112 aa, Homo sapiens
  MOD_RES (31)..(31): Selenocysteine
  MOD_RES (50)..(50): Selenocysteine
  MOD_RES (112)..(112): Selenocysteine
MGSKGVYQYHWQSHNVKHSGVDDMVLLSKIXENSIVENLKKRYMDDYIFXYIGSVLISVNPFKQMPYFGEKEIEMYQGAAQYENPPHIYALADNMYRNMIIDRENQCVIISX

SEQ ID NO: 17003 - protein, 73 aa, Homo sapiens
  MOD_RES (2)..(2): Selenocysteine
  MOD_RES (23)..(24): Selenocysteine
QXPESLDFLKVPDQGAAGVRRQXXSRPPPAGGRPKPQPKPKPQVRGWGLGAGLLALLSLGLQLECGWPILVCV

SEQ ID NO: 17004 - protein, 317 aa, Homo sapiens
  MOD_RES (1)..(1): Any amino acid
  MOD_RES (4)..(4): Selenocysteine
  MOD_RES (83)..(84): Selenocysteine
  MOD_RES (99)..(99): Selenocysteine
  MOD_RES (104)..(104): Selenocysteine
  MOD_RES (116)..(116): Selenocysteine
  MOD_RES (131)..(131): Selenocysteine
  MOD_RES (134)..(134): Selenocysteine
  MOD_RES (260)..(260): Selenocysteine
  MOD_RES (262)..(262): Selenocysteine
  MOD_RES (278)..(278): Selenocysteine
XDQXLLQKLQMQIGSHEHFNSWNQGFIIHHYAGKVSYDMDGFCERNRDVLFMDLIELMQSSELPFIKSLFPENLQADKKGRPXXAGSKIKKQANDLVSXLMKCXPHYIRCIKPNEXKKPRDWEESRYAILXKAXWPSWQGEEKQGVLHLLQSVNMDSDQFQLGRSKVFIKAPESLFLLEEMRERKYDGYARVIQKSWRKFVARKKYVQMREEASDLLLNKKERRRNSINRNFIGDYIGMEEHPELQQFVGKREKIDFADXVXKYDRRFKGVKRDLLLXPKCLYLIGREKVKQGPDKGLVKEVLKRKIEIERILSVSL

SEQ ID NO: 17005 - protein, 1018 aa, Homo sapiens
  MOD_RES (21)..(21): Selenocysteine
  MOD_RES (40)..(40): Selenocysteine
  MOD_RES (96)..(96): Selenocysteine
  MOD_RES (109)..(109): Selenocysteine
  MOD_RES (123)..(123): Selenocysteine
  MOD_RES (142)..(142): Selenocysteine
  MOD_RES (153)..(153): Selenocysteine
  MOD_RES (231)..(231): Selenocysteine
  MOD_RES (240)..(240): Selenocysteine
  MOD_RES (256)..(256): Selenocysteine
  MOD_RES (290)..(290): Selenocysteine
  MOD_RES (315)..(315): Selenocysteine
  MOD_RES (317)..(317): Selenocysteine
  MOD_RES (330)..(330): Selenocysteine
  MOD_RES (344)..(344): Selenocysteine
  MOD_RES (389)..(389): Selenocysteine
  MOD_RES (441)..(441): Selenocysteine
  MOD_RES (452)..(452): Selenocysteine
  MOD_RES (477)..(477): Selenocysteine
  MOD_RES (479)..(479): Selenocysteine
  MOD_RES (486)..(486): Selenocysteine
  MOD_RES (498)..(498): Selenocysteine
  MOD_RES (505)..(505): Selenocysteine
  MOD_RES (508)..(508): Selenocysteine
  MOD_RES (525)..(525): Selenocysteine
  MOD_RES (551)..(551): Selenocysteine
  MOD_RES (554)..(554): Selenocysteine
  MOD_RES (567)..(567): Selenocysteine
  MOD_RES (570)..(570): Selenocysteine
  MOD_RES (575)..(575): Selenocysteine
  MOD_RES (578)..(578): Selenocysteine
  MOD_RES (654)..(654): Selenocysteine
  MOD_RES (658)..(658): Selenocysteine
  MOD_RES (698)..(698): Selenocysteine
  MOD_RES (701)..(701): Selenocysteine
  MOD_RES (724)..(724): Selenocysteine
  MOD_RES (738)..(738): Selenocysteine
  MOD_RES (787)..(787): Selenocysteine
  MOD_RES (844)..(844): Selenocysteine
  MOD_RES (848)..(848): Selenocysteine
  MOD_RES (859)..(859): Selenocysteine
  MOD_RES (892)..(892): Selenocysteine
  MOD_RES (917)..(917): Selenocysteine
  MOD_RES (922)..(922): Selenocysteine
  MOD_RES (971)..(971): Selenocysteine
  MOD_RES (1012)..(1012): Selenocysteine
MEDEEGPEYGKPDFVLLDQVXMEDFMRNLQLRFEKGRIYXYIGEVLVSVNPYQELPLYGPEAIARYQGRELYERPPHLYAVANAAYKAMKHRSRDXCIVISGESGAGKXEASKHIMQYIAAVXNPSQRAEVERVKDVLLKSXCVLEAFGNARXNRNHNSSRFGKYMDINFDFKGDPIGGHIHSYLLEKSRVLKQHVGERNFHAFYQLLRGSEDKQLHELHLERNPAVYNFXHQGAGLNMXVHSALDSDEQSHQAVXEAMRVIGFSPEEVESVHRILAAILHLGNIEFVEXEEGGLQKEGLAVAEEALVDHVAELXAXPRDLVLRSLLARXVASGGRELIEKGHXAAEASYARDACAKAVYQRLFEWVVNRINSVMEPRGRDPRRDGKDXVIGVLDIYGFEVFPVNSFEQFCINYCNEKLQQLFIQLILKQEQEEYEREGIXWQSVEYFNNAXIVDLVERPHRGILAVLDEACSSAGXIXDRIFLQXLDMHHRHHLHYXSRQLCPXDKXMEFGRDFRIKHYAGDVXYSVEGFIDKNRDFLFQDFKRLLYNSXDPXLRAMWPDGQQDIXEVXKRPLXAGXLFKNSMVALVENLASKEPFYVRCIKPNEDKVAGKLDENHCRHQVAYLGLLENVRVRRAGFASRQPYSRFLLRYKMXCEYXWPNHLLGSDKAAVSALLEQHGLQGDVAFGHSKLFIRSPRXLVXLEQSRARLIPIIVLLLQKAWRGXLARWRCRRLRAIYXIMRWFRRHKVRAHLAELQRRFQAARQPPLYGRDLVWPLPPAVLQPFQDXCHALFCRWRARQLVKNIPPSDMPQIKAKVAAMGALQGLRQDWGCRRAWARDYLSSAXDNPXASSLFAQRLKXLQDKDGFGAVLFSSHVRKVNRFHKIRNRALLLXDQHLYKLDPDRQYRVMRAVPLEAVXGLSVXSGGDQLVVLHARGQDDLVVCLHRSRPPLDNRVGELVGVLAAHCQGEGRXLEVRVSDCIPLSHRGVRRLISVEPRPEQPEPDFRCARGSFXLLWPSR

SEQ ID NO: 17006 - protein, 210 aa, Homo sapiens
  MOD_RES (21)..(21): Selenocysteine
  MOD_RES (40)..(40): Selenocysteine
  MOD_RES (96)..(96): Selenocysteine
  MOD_RES (109)..(109): Selenocysteine
  MOD_RES (123)..(123): Selenocysteine
  MOD_RES (142)..(142): Selenocysteine
  MOD_RES (153)..(153): Selenocysteine
  MOD_RES (198)..(198): Selenocysteine
  MOD_RES (203)..(203): Selenocysteine
  MOD_RES (205)..(205): Selenocysteine
  MOD_RES (208)..(208): Selenocysteine
MEDEEGPEYGKPDFVLLDQVXMEDFMRNLQLRFEKGRIYXYIGEVLVSVNPYQELPLYGPEAIARYQGRELYERPPHLYAVANAAYKAMKHRSRDXCIVISGESGAGKXEASKHIMQYIAAVXNPSQRAEVERVKDVLLKSXCVLEAFGNARXNRNHNSSRFGKYMDINFDFKGDPIGGHIHSYLLEKVGSLGSSSSXWVKEXSXPSXNC

SEQ ID NO: 17007 - protein, 42 aa, Homo sapiens
  MOD_RES (21)..(21): Selenocysteine
MEDEEGPEYGKPDFVLLDQVXMEDFMRNLQLRGEWGREDRSQ

SEQ ID NO: 17008 - protein, 174 aa, Homo sapiens
  MOD_RES (106)..(106): Selenocysteine
  MOD_RES (112)..(112): Selenocysteine
  MOD_RES (117)..(117): Selenocysteine
  MOD_RES (125)..(125): Selenocysteine
  MOD_RES (131)..(131): Selenocysteine
  MOD_RES (147)..(147): Selenocysteine
  MOD_RES (150)..(150): Selenocysteine
KRREEDEKRRRKEEEERRMKLEMEAKRKQEEEERKKREDDEKRIQAEVEAQLARQKEEESQQQAVLEQERRDRELALRIAQSEAELISDEAQADLALRSLDSYPVXSKNDGXRPKMXPGPAVLAXKAAAGXKKYDLSKWKYAELRDXINXSCDIELLAACREEFHRRLKVYHAW

SEQ ID NO: 17009 - protein, 1253 aa, Homo sapiens
  MOD_RES (13)..(13): Selenocysteine
  MOD_RES (30)..(30): Selenocysteine
  MOD_RES (40)..(40): Selenocysteine
  MOD_RES (72)..(72): Selenocysteine
  MOD_RES (88)..(88): Selenocysteine
  MOD_RES (122)..(122): Selenocysteine
  MOD_RES (158)..(158): Selenocysteine
  MOD_RES (161)..(161): Selenocysteine
  MOD_RES (169)..(169): Selenocysteine
  MOD_RES (174)..(174): Selenocysteine
  MOD_RES (197)..(197): Selenocysteine
  MOD_RES (279)..(279): Selenocysteine
  MOD_RES (287)..(287): Selenocysteine
  MOD_RES (322)..(322): Selenocysteine
  MOD_RES (358)..(358): Selenocysteine
  MOD_RES (391)..(392): Selenocysteine
  MOD_RES (397)..(398): Selenocysteine
  MOD_RES (402)..(402): Selenocysteine
  MOD_RES (405)..(405): Selenocysteine
  MOD_RES (426)..(426): Selenocysteine
  MOD_RES (447)..(447): Selenocysteine
  MOD_RES (544)..(544): Selenocysteine
  MOD_RES (558)..(558): Selenocysteine
  MOD_RES (590)..(591): Selenocysteine
  MOD_RES (625)..(625): Selenocysteine
  MOD_RES (631)..(631): Selenocysteine
  MOD_RES (649)..(649): Selenocysteine
  MOD_RES (661)..(661): Selenocysteine
  MOD_RES (676)..(676): Selenocysteine
  MOD_RES (754)..(754): Selenocysteine
  MOD_RES (789)..(789): Selenocysteine
  MOD_RES (823)..(823): Selenocysteine
  MOD_RES (845)..(845): Selenocysteine
  MOD_RES (880)..(880): Selenocysteine
  MOD_RES (888)..(888): Selenocysteine
  MOD_RES (891)..(891): Selenocysteine
  MOD_RES (1043)..(1043): Selenocysteine
  MOD_RES (1049)..(1049): Selenocysteine
  MOD_RES (1065)..(1065): Selenocysteine
  MOD_RES (1068)..(1068): Selenocysteine
  MOD_RES (1101)..(1101): Selenocysteine
  MOD_RES (1103)..(1103): Selenocysteine
  MOD_RES (1112)..(1112): Selenocysteine
  MOD_RES (1202)..(1202): Selenocysteine
  MOD_RES (1205)..(1205): Selenocysteine
  MOD_RES (1242)..(1242): Selenocysteine
  MOD_RES (1245)..(1245): Selenocysteine
MEDGKPVWAPHPXDGFQMGNIVDIGPDSLXIEPLNQKGKXFLALINQVFPAEEDSKKDVEDNCSLMYLNEAXLLHNIKVRYSKDRIYXYVANILIAVNPYFDIPKIYSSEAIKSYQGKSLGXRPPHVFAIADKAFRDMKVLKMSQSIIVSGESGAGKXENXKFVLRYLXESYGXGQDIDDRIVEANPLLEAFGNAKXVRNNNSSRFGKFVEIHFNEKSSVVGGFVSHYLLEKSRICVQGKEERNYHIFYRLCAGASEDIREKLHLSSPDNFRYLNRGCXRYFANKEXDKQILQNRKSPEYLKAGSMKDPLLDDHGDFIRMCXAMKKIGLDDEEKLDLFRVVAGVLHLGNIDFEEAGSXSGGCNLKNKSAQSLEYCAELLGLDQDDLRVSLXXRVMLXXAGGXKGXVIKVPLKVEQANNARDALAKXVYSHLFDHVVNRVNQCFPFEXSSYFIGVLDIAGFEYFEHNSFEQFCINYCNEKLQQFFNERILKEEQELYQKEGLGVNEVHYVDNQDCIDLIEAKLVGILDILDEENRLPQPSDQHFXSAVHQKHKDHFRLXIPRKSKLAVHRNIRDDEGFIIRHFAGAVCYEXXQFVEKNNDALHMSLESLICESRDKFIRELFESSXNNNKDXKQKAGKLSFISVGNKFKXQLNLLLDKLRSXGASFIRCIKPNLKMXSHHFEGAQILSQLQCSGMVSVLDLMQGGYPSRASFHELYNMYKKYMPDKLARLDPRLFCKALFKALGLNENDYKFGLXKVFFRPGKFAEFDQIMKSDPDHLAELVKRVNHWLXCSRWKKVQWCSLSVIKLKNKIKYRAEACIKMQKXIRMWLCKRRHKPRIDGLVKVGXLKKRLDKFNEVVSVLKDGKPEMNKQIKNLEISIDXLMAKIKSXMMXQEQIQKEYDALVKSSEELLSALQKKKQQEEEAERLRRIQEEMEKERKRREEDEKRRRKEEEERRMKLEMEAKRKQEEEERKKREDDEKRIQAEVEAQLARQKEEESQQQAVLEQERRDRELALRIAQSEAELISDEAQADLALRRGPAVLAXKAAAGXKKYDLSKWKYAELRDXINXSCDIELLAACREEFHRRLKVYHAWKSKNKKRNXEXEQRAPKSVXDYAQQNPAAQIPARQREIEMNRQQRFFRIPFIRPADQYKDPQSKKKGWWYAHFDGPWIARQMELHPDKPPILLVAGKDDMEMCELNLEEXGLXRKRGAEILPRQFEEIWERCGGIQYLQNAIESRQARPXYAXAMLQSLLK

SEQ ID NO: 17010 - protein, 1262 aa, Homo sapiens
  MOD_RES (13)..(13): Selenocysteine
  MOD_RES (30)..(30): Selenocysteine
  MOD_RES (40)..(40): Selenocysteine
  MOD_RES (72)..(72): Selenocysteine
  MOD_RES (88)..(88): Selenocysteine
  MOD_RES (122)..(122): Selenocysteine
  MOD_RES (158)..(158): Selenocysteine
  MOD_RES (161)..(161): Selenocysteine
  MOD_RES (169)..(169): Selenocysteine
  MOD_RES (174)..(174): Selenocysteine
  MOD_RES (197)..(197): Selenocysteine
  MOD_RES (279)..(279): Selenocysteine
  MOD_RES (287)..(287): Selenocysteine
  MOD_RES (322)..(322): Selenocysteine
  MOD_RES (358)..(358): Selenocysteine
  MOD_RES (391)..(392): Selenocysteine
  MOD_RES (397)..(398): Selenocysteine
  MOD_RES (402)..(402): Selenocysteine
  MOD_RES (405)..(405): Selenocysteine
  MOD_RES (426)..(426): Selenocysteine
  MOD_RES (447)..(447): Selenocysteine
  MOD_RES (544)..(544): Selenocysteine
  MOD_RES (558)..(558): Selenocysteine
  MOD_RES (590)..(591): Selenocysteine
  MOD_RES (625)..(625): Selenocysteine
  MOD_RES (631)..(631): Selenocysteine
  MOD_RES (649)..(649): Selenocysteine
  MOD_RES (661)..(661): Selenocysteine
  MOD_RES (676)..(676): Selenocysteine
  MOD_RES (754)..(754): Selenocysteine
  MOD_RES (789)..(789): Selenocysteine
  MOD_RES (823)..(823): Selenocysteine
  MOD_RES (845)..(845): Selenocysteine
  MOD_RES (880)..(880): Selenocysteine
  MOD_RES (888)..(888): Selenocysteine
  MOD_RES (891)..(891): Selenocysteine
  MOD_RES (1043)..(1043): Selenocysteine
  MOD_RES (1049)..(1049): Selenocysteine
  MOD_RES (1065)..(1065): Selenocysteine
  MOD_RES (1068)..(1068): Selenocysteine
  MOD_RES (1101)..(1101): Selenocysteine
  MOD_RES (1103)..(1103): Selenocysteine
  MOD_RES (1112)..(1112): Selenocysteine
  MOD_RES (1211)..(1211): Selenocysteine
  MOD_RES (1214)..(1214): Selenocysteine
  MOD_RES (1251)..(1251): Selenocysteine
  MOD_RES (1254)..(1254): Selenocysteine
MEDGKPVWAPHPXDGFQMGNIVDIGPDSLXIEPLNQKGKXFLALINQVFPAEEDSKKDVEDNCSLMYLNEAXLLHNIKVRYSKDRIYXYVANILIAVNPYFDIPKIYSSEAIKSYQGKSLGXRPPHVFAIADKAFRDMKVLKMSQSIIVSGESGAGKXENXKFVLRYLXESYGXGQDIDDRIVEANPLLEAFGNAKXVRNNNSSRFGKFVEIHFNEKSSVVGGFVSHYLLEKSRICVQGKEERNYHIFYRLCAGASEDIREKLHLSSPDNFRYLNRGCXRYFANKEXDKQILQNRKSPEYLKAGSMKDPLLDDHGDFIRMCXAMKKIGLDDEEKLDLFRVVAGVLHLGNIDFEEAGSXSGGCNLKNKSAQSLEYCAELLGLDQDDLRVSLXXRVMLXXAGGXKGXVIKVPLKVEQANNARDALAKXVYSHLFDHVVNRVNQCFPFEXSSYFIGVLDIAGFEYFEHNSFEQFCINYCNEKLQQFFNERILKEEQELYQKEGLGVNEVHYVDNQDCIDLIEAKLVGILDILDEENRLPQPSDQHFXSAVHQKHKDHFRLXIPRKSKLAVHRNIRDDEGFIIRHFAGAVCYEXXQFVEKNNDALHMSLESLICESRDKFIRELFESSXNNNKDXKQKAGKLSFISVGNKFKXQLNLLLDKLRSXGASFIRCIKPNLKMXSHHFEGAQILSQLQCSGMVSVLDLMQGGYPSRASFHELYNMYKKYMPDKLARLDPRLFCKALFKALGLNENDYKFGLXKVFFRPGKFAEFDQIMKSDPDHLAELVKRVNHWLXCSRWKKVQWCSLSVIKLKNKIKYRAEACIKMQKXIRMWLCKRRHKPRIDGLVKVGXLKKRLDKFNEVVSVLKDGKPEMNKQIKNLEISIDXLMAKIKSXMMXQEQIQKEYDALVKSSEELLSALQKKKQQEEEAERLRRIQEEMEKERKRREEDEKRRRKEEEERRMKLEMEAKRKQEEEERKKREDDEKRIQAEVEAQLARQKEEESQQQAVLEQERRDRELALRIAQSEAELISDEAQADLALRRGPAVLAXKAAAGXKKYDLSKWKYAELRDXINXSCDIELLAACREEFHRRLKVYHAWKSKNKKRNXEXEQRAPKSVXDYDFAPFLNNSPQQNPAAQIPARQREIEMNRQQRFFRIPFIRPADQYKDPQSKKKGWWYAHFDGPWIARQMELHPDKPPILLVAGKDDMEMCELNLEEXGLXRKRGAEILPRQFEEIWERCGGIQYLQNAIESRQARPXYAXAMLQSLLK

SEQ ID NO: 17011 - protein, 1285 aa, Homo sapiens
  MOD_RES (13)..(13): Selenocysteine
  MOD_RES (30)..(30): Selenocysteine
  MOD_RES (40)..(40): Selenocysteine
  MOD_RES (72)..(72): Selenocysteine
  MOD_RES (88)..(88): Selenocysteine
  MOD_RES (122)..(122): Selenocysteine
  MOD_RES (158)..(158): Selenocysteine
  MOD_RES (161)..(161): Selenocysteine
  MOD_RES (169)..(169): Selenocysteine
  MOD_RES (174)..(174): Selenocysteine
  MOD_RES (197)..(197): Selenocysteine
  MOD_RES (279)..(279): Selenocysteine
  MOD_RES (287)..(287): Selenocysteine
  MOD_RES (322)..(322): Selenocysteine
  MOD_RES (358)..(358): Selenocysteine
  MOD_RES (391)..(392): Selenocysteine
  MOD_RES (397)..(398): Selenocysteine
  MOD_RES (402)..(402): Selenocysteine
  MOD_RES (405)..(405): Selenocysteine
  MOD_RES (426)..(426): Selenocysteine
  MOD_RES (447)..(447): Selenocysteine
  MOD_RES (544)..(544): Selenocysteine
  MOD_RES (558)..(558): Selenocysteine
  MOD_RES (590)..(591): Selenocysteine
  MOD_RES (625)..(625): Selenocysteine
  MOD_RES (631)..(631): Selenocysteine
  MOD_RES (649)..(649): Selenocysteine
  MOD_RES (661)..(661): Selenocysteine
  MOD_RES (676)..(676): Selenocysteine
  MOD_RES (754)..(754): Selenocysteine
  MOD_RES (789)..(789): Selenocysteine
  MOD_RES (823)..(823): Selenocysteine
  MOD_RES (845)..(845): Selenocysteine
  MOD_RES (880)..(880): Selenocysteine
  MOD_RES (888)..(888): Selenocysteine
  MOD_RES (891)..(891): Selenocysteine
  MOD_RES (1040)..(1040): Selenocysteine
  MOD_RES (1045)..(1045): Selenocysteine
  MOD_RES (1066)..(1066): Selenocysteine
  MOD_RES (1072)..(1072): Selenocysteine
  MOD_RES (1088)..(1088): Selenocysteine
  MOD_RES (1091)..(1091): Selenocysteine
  MOD_RES (1124)..(1124): Selenocysteine
  MOD_RES (1126)..(1126): Selenocysteine
  MOD_RES (1135)..(1135): Selenocysteine
  MOD_RES (1234)..(1234): Selenocysteine
  MOD_RES (1237)..(1237): Selenocysteine
  MOD_RES (1274)..(1274): Selenocysteine
  MOD_RES (1277)..(1277): Selenocysteine
MEDGKPVWAPHPXDGFQMGNIVDIGPDSLXIEPLNQKGKXFLALINQVFPAEEDSKKDVEDNCSLMYLNEAXLLHNIKVRYSKDRIYXYVANILIAVNPYFDIPKIYSSEAIKSYQGKSLGXRPPHVFAIADKAFRDMKVLKMSQSIIVSGESGAGKXENXKFVLRYLXESYGXGQDIDDRIVEANPLLEAFGNAKXVRNNNSSRFGKFVEIHFNEKSSVVGGFVSHYLLEKSRICVQGKEERNYHIFYRLCAGASEDIREKLHLSSPDNFRYLNRGCXRYFANKEXDKQILQNRKSPEYLKAGSMKDPLLDDHGDFIRMCXAMKKIGLDDEEKLDLFRVVAGVLHLGNIDFEEAGSXSGGCNLKNKSAQSLEYCAELLGLDQDDLRVSLXXRVMLXXAGGXKGXVIKVPLKVEQANNARDALAKXVYSHLFDHVVNRVNQCFPFEXSSYFIGVLDIAGFEYFEHNSFEQFCINYCNEKLQQFFNERILKEEQELYQKEGLGVNEVHYVDNQDCIDLIEAKLVGILDILDEENRLPQPSDQHFXSAVHQKHKDHFRLXIPRKSKLAVHRNIRDDEGFIIRHFAGAVCYEXXQFVEKNNDALHMSLESLICESRDKFIRELFESSXNNNKDXKQKAGKLSFISVGNKFKXQLNLLLDKLRSXGASFIRCIKPNLKMXSHHFEGAQILSQLQCSGMVSVLDLMQGGYPSRASFHELYNMYKKYMPDKLARLDPRLFCKALFKALGLNENDYKFGLXKVFFRPGKFAEFDQIMKSDPDHLAELVKRVNHWLXCSRWKKVQWCSLSVIKLKNKIKYRAEACIKMQKXIRMWLCKRRHKPRIDGLVKVGXLKKRLDKFNEVVSVLKDGKPEMNKQIKNLEISIDXLMAKIKSXMMXQEQIQKEYDALVKSSEELLSALQKKKQQEEEAERLRRIQEEMEKERKRREEDEKRRRKEEEERRMKLEMEAKRKQEEEERKKREDDEKRIQAEVEAQLARQKEEESQQQAVLEQERRDRELALRIAQSEAELISDEAQADLALRRNDGXRPKMXPEQMAKEMSEFLSRGPAVLAXKAAAGXKKYDLSKWKYAELRDXINXSCDIELLAACREEFHRRLKVYHAWKSKNKKRNXEXEQRAPKSVXDYDFAPFLNNSPQQNPAAQIPARQREIEMNRQQRFFRIPFIRPADQYKDPQSKKKGWWYAHFDGPWIARQMELHPDKPPILLVAGKDDMEMCELNLEEXGLXRKRGAEILPRQFEEIWERCGGIQYLQNAIESRQARPXYAXAMLQSLLK

SEQ ID NO: 17012 - protein, 1294 aa, Homo sapiens
  MOD_RES (13)..(13): Selenocysteine
  MOD_RES (30)..(30): Selenocysteine
  MOD_RES (40)..(40): Selenocysteine
  MOD_RES (72)..(72): Selenocysteine
  MOD_RES (88)..(88): Selenocysteine
  MOD_RES (122)..(122): Selenocysteine
  MOD_RES (158)..(158): Selenocysteine
  MOD_RES (161)..(161): Selenocysteine
  MOD_RES (169)..(169): Selenocysteine
  MOD_RES (174)..(174): Selenocysteine
  MOD_RES (197)..(197): Selenocysteine
  MOD_RES (279)..(279): Selenocysteine
  MOD_RES (287)..(287): Selenocysteine
  MOD_RES (322)..(322): Selenocysteine
  MOD_RES (358)..(358): Selenocysteine
  MOD_RES (391)..(392): Selenocysteine
  MOD_RES (397)..(398): Selenocysteine
  MOD_RES (402)..(402): Selenocysteine
  MOD_RES (405)..(405): Selenocysteine
  MOD_RES (426)..(426): Selenocysteine
  MOD_RES (447)..(447): Selenocysteine
  MOD_RES (544)..(544): Selenocysteine
  MOD_RES (558)..(558): Selenocysteine
  MOD_RES (590)..(591): Selenocysteine
  MOD_RES (625)..(625): Selenocysteine
  MOD_RES (631)..(631): Selenocysteine
  MOD_RES (649)..(649): Selenocysteine
  MOD_RES (661)..(661): Selenocysteine
  MOD_RES (676)..(676): Selenocysteine
  MOD_RES (754)..(754): Selenocysteine
  MOD_RES (789)..(789): Selenocysteine
  MOD_RES (823)..(823): Selenocysteine
  MOD_RES (845)..(845): Selenocysteine
  MOD_RES (880)..(880): Selenocysteine
  MOD_RES (888)..(888): Selenocysteine
  MOD_RES (891)..(891): Selenocysteine
  MOD_RES (1043)..(1043): Selenocysteine
  MOD_RES (1049)..(1049): Selenocysteine
  MOD_RES (1054)..(1054): Selenocysteine
  MOD_RES (1075)..(1075): Selenocysteine
  MOD_RES (1081)..(1081): Selenocysteine
  MOD_RES (1097)..(1097): Selenocysteine
  MOD_RES (1100)..(1100): Selenocysteine
  MOD_RES (1133)..(1133): Selenocysteine
  MOD_RES (1135)..(1135): Selenocysteine
  MOD_RES (1144)..(1144): Selenocysteine
  MOD_RES (1243)..(1243): Selenocysteine
  MOD_RES (1246)..(1246): Selenocysteine
  MOD_RES (1283)..(1283): Selenocysteine
  MOD_RES (1286)..(1286): Selenocysteine
MEDGKPVWAPHPXDGFQMGNIVDIGPDSLXIEPLNQKGKXFLALINQVFPAEEDSKKDVEDNCSLMYLNEAXLLHNIKVRYSKDRIYXYVANILIAVNPYFDIPKIYSSEAIKSYQGKSLGXRPPHVFAIADKAFRDMKVLKMSQSIIVSGESGAGKXENXKFVLRYLXESYGXGQDIDDRIVEANPLLEAFGNAKXVRNNNSSRFGKFVEIHFNEKSSVVGGFVSHYLLEKSRICVQGKEERNYHIFYRLCAGASEDIREKLHLSSPDNFRYLNRGCXRYFANKEXDKQILQNRKSPEYLKAGSMKDPLLDDHGDFIRMCXAMKKIGLDDEEKLDLFRVVAGVLHLGNIDFEEAGSXSGGCNLKNKSAQSLEYCAELLGLDQDDLRVSLXXRVMLXXAGGXKGXVIKVPLKVEQANNARDALAKXVYSHLFDHVVNRVNQCFPFEXSSYFIGVLDIAGFEYFEHNSFEQFCINYCNEKLQQFFNERILKEEQELYQKEGLGVNEVHYVDNQDCIDLIEAKLVGILDILDEENRLPQPSDQHFXSAVHQKHKDHFRLXIPRKSKLAVHRNIRDDEGFIIRHFAGAVCYEXXQFVEKNNDALHMSLESLICESRDKFIRELFESSXNNNKDXKQKAGKLSFISVGNKFKXQLNLLLDKLRSXGASFIRCIKPNLKMXSHHFEGAQILSQLQCSGMVSVLDLMQGGYPSRASFHELYNMYKKYMPDKLARLDPRLFCKALFKALGLNENDYKFGLXKVFFRPGKFAEFDQIMKSDPDHLAELVKRVNHWLXCSRWKKVQWCSLSVIKLKNKIKYRAEACIKMQKXIRMWLCKRRHKPRIDGLVKVGXLKKRLDKFNEVVSVLKDGKPEMNKQIKNLEISIDXLMAKIKSXMMXQEQIQKEYDALVKSSEELLSALQKKKQQEEEAERLRRIQEEMEKERKRREEDEKRRRKEEEERRMKLEMEAKRKQEEEERKKREDDEKRIQAEVEAQLARQKEEESQQQAVLEQERRDRELALRIAQSEAELISDEAQADLALRSLDSYPVXSKNDGXRPKMXPEQMAKEMSEFLSRGPAVLAXKAAAGXKKYDLSKWKYAELRDXINXSCDIELLAACREEFHRRLKVYHAWKSKNKKRNXEXEQRAPKSVXDYDFAPFLNNSPQQNPAAQIPARQREIEMNRQQRFFRIPFIRPADQYKDPQSKKKGWWYAHFDGPWIARQMELHPDKPPILLVAGKDDMEMCELNLEEXGLXRKRGAEILPRQFEEIWERCGGIQYLQNAIESRQARPXYAXAMLQSLLK

SEQ ID NO: 17013 - protein, 1295 aa, Homo sapiens
  MOD_RES (13)..(13): Selenocysteine
  MOD_RES (30)..(30): Selenocysteine
  MOD_RES (40)..(40): Selenocysteine
  MOD_RES (72)..(72): Selenocysteine
  MOD_RES (88)..(88): Selenocysteine
  MOD_RES (122)..(122): Selenocysteine
  MOD_RES (158)..(158): Selenocysteine
  MOD_RES (161)..(161): Selenocysteine
  MOD_RES (169)..(169): Selenocysteine
  MOD_RES (174)..(174): Selenocysteine
  MOD_RES (197)..(197): Selenocysteine
  MOD_RES (279)..(279): Selenocysteine
  MOD_RES (287)..(287): Selenocysteine
  MOD_RES (322)..(322): Selenocysteine
  MOD_RES (358)..(358): Selenocysteine
  MOD_RES (391)..(392): Selenocysteine
  MOD_RES (397)..(398): Selenocysteine
  MOD_RES (402)..(402): Selenocysteine
  MOD_RES (405)..(405): Selenocysteine
  MOD_RES (426)..(426): Selenocysteine
  MOD_RES (447)..(447): Selenocysteine
  MOD_RES (544)..(544): Selenocysteine
  MOD_RES (558)..(558): Selenocysteine
  MOD_RES (590)..(591): Selenocysteine
  MOD_RES (625)..(625): Selenocysteine
  MOD_RES (631)..(631): Selenocysteine
  MOD_RES (649)..(649): Selenocysteine
  MOD_RES (661)..(661): Selenocysteine
  MOD_RES (676)..(676): Selenocysteine
  MOD_RES (754)..(754): Selenocysteine
  MOD_RES (789)..(789): Selenocysteine
  MOD_RES (823)..(823): Selenocysteine
  MOD_RES (845)..(845): Selenocysteine
  MOD_RES (880)..(880): Selenocysteine
  MOD_RES (888)..(888): Selenocysteine
  MOD_RES (891)..(891): Selenocysteine
  MOD_RES (1044)..(1044): Selenocysteine
  MOD_RES (1050)..(1050): Selenocysteine
  MOD_RES (1055)..(1055): Selenocysteine
  MOD_RES (1076)..(1076): Selenocysteine
  MOD_RES (1082)..(1082): Selenocysteine
  MOD_RES (1098)..(1098): Selenocysteine
  MOD_RES (1101)..(1101): Selenocysteine
  MOD_RES (1134)..(1134): Selenocysteine
  MOD_RES (1136)..(1136): Selenocysteine
  MOD_RES (1145)..(1145): Selenocysteine
  MOD_RES (1244)..(1244): Selenocysteine
  MOD_RES (1247)..(1247): Selenocysteine
  MOD_RES (1284)..(1284): Selenocysteine
  MOD_RES (1287)..(1287): Selenocysteine
MEDGKPVWAPHPXDGFQMGNIVDIGPDSLXIEPLNQKGKXFLALINQVFPAEEDSKKDVEDNCSLMYLNEAXLLHNIKVRYSKDRIYXYVANILIAVNPYFDIPKIYSSEAIKSYQGKSLGXRPPHVFAIADKAFRDMKVLKMSQSIIVSGESGAGKXENXKFVLRYLXESYGXGQDIDDRIVEANPLLEAFGNAKXVRNNNSSRFGKFVEIHFNEKSSVVGGFVSHYLLEKSRICVQGKEERNYHIFYRLCAGASEDIREKLHLSSPDNFRYLNRGCXRYFANKEXDKQILQNRKSPEYLKAGSMKDPLLDDHGDFIRMCXAMKKIGLDDEEKLDLFRVVAGVLHLGNIDFEEAGSXSGGCNLKNKSAQSLEYCAELLGLDQDDLRVSLXXRVMLXXAGGXKGXVIKVPLKVEQANNARDALAKXVYSHLFDHVVNRVNQCFPFEXSSYFIGVLDIAGFEYFEHNSFEQFCINYCNEKLQQFFNERILKEEQELYQKEGLGVNEVHYVDNQDCIDLIEAKLVGILDILDEENRLPQPSDQHFXSAVHQKHKDHFRLXIPRKSKLAVHRNIRDDEGFIIRHFAGAVCYEXXQFVEKNNDALHMSLESLICESRDKFIRELFESSXNNNKDXKQKAGKLSFISVGNKFKXQLNLLLDKLRSXGASFIRCIKPNLKMXSHHFEGAQILSQLQCSGMVSVLDLMQGGYPSRASFHELYNMYKKYMPDKLARLDPRLFCKALFKALGLNENDYKFGLXKVFFRPGKFAEFDQIMKSDPDHLAELVKRVNHWLXCSRWKKVQWCSLSVIKLKNKIKYRAEACIKMQKXIRMWLCKRRHKPRIDGLVKVGXLKKRLDKFNEVVSVLKDGKPEMNKQIKNLEISIDXLMAKIKSXMMXQEQIQKEYDALVKSSEELLSALQKKKQQEEEAERLRRIQEEMEKERKRREEDEKRRRKEEEERRMKLEMEAKRKQEEEERKKREDDEKRIQAEVEAQLARQKEEESQQQAVLEQERRDRELALRIAQSEAELISDEAQADLALRRYLDSYPVXSKNDGXRPKMXPEQMAKEMSEFLSRGPAVLAXKAAAGXKKYDLSKWKYAELRDXINXSCDIELLAACREEFHRRLKVYHAWKSKNKKRNXEXEQRAPKSVXDYDFAPFLNNSPQQNPAAQIPARQREIEMNRQQRFFRIPFIRPADQYKDPQSKKKGWWYAHFDGPWIARQMELHPDKPPILLVAGKDDMEMCELNLEEXGLXRKRGAEILPRQFEEIWERCGGIQYLQNAIESRQARPXYAXAMLQSLLK

SEQ ID NO: 17014 - protein, 1301 aa, Homo sapiens
  MOD_RES (10)..(10): Selenocysteine
  MOD_RES (33)..(33): Selenocysteine
  MOD_RES (67)..(67): Selenocysteine
  MOD_RES (70)..(70): Selenocysteine
  MOD_RES (72)..(72): Selenocysteine
  MOD_RES (88)..(88): Selenocysteine
  MOD_RES (123)..(123): Selenocysteine
  MOD_RES (125)..(125): Selenocysteine
  MOD_RES (174)..(174): Selenocysteine
  MOD_RES (188)..(188): Selenocysteine
  MOD_RES (199)..(199): Selenocysteine
  MOD_RES (215)..(215): Selenocysteine
  MOD_RES (218)..(218): Selenocysteine
  MOD_RES (264)..(264): Selenocysteine
  MOD_RES (322)..(322): Selenocysteine
  MOD_RES (327)..(327): Selenocysteine
  MOD_RES (366)..(366): Selenocysteine
  MOD_RES (381)..(381): Selenocysteine
  MOD_RES (390)..(390): Selenocysteine
  MOD_RES (396)..(396): Selenocysteine
  MOD_RES (415)..(415): Selenocysteine
  MOD_RES (424)..(424): Selenocysteine
  MOD_RES (435)..(435): Selenocysteine
  MOD_RES (448)..(448): Selenocysteine
  MOD_RES (461)..(461): Selenocysteine
  MOD_RES (486)..(486): Selenocysteine
  MOD_RES (489)..(489): Selenocysteine
  MOD_RES (495)..(495): Selenocysteine
  MOD_RES (524)..(524): Selenocysteine
  MOD_RES (559)..(559): Selenocysteine
  MOD_RES (564)..(564): Selenocysteine
  MOD_RES (619)..(619): Selenocysteine
  MOD_RES (768)..(768): Selenocysteine
  MOD_RES (789)..(789): Selenocysteine
  MOD_RES (928)..(928): Selenocysteine
  MOD_RES (941)..(941): Selenocysteine
  MOD_RES (1000)..(1000): Selenocysteine
  MOD_RES (1010)..(1010): Selenocysteine
  MOD_RES (1023)..(1023): Selenocysteine
  MOD_RES (1039)..(1039): Selenocysteine
  MOD_RES (1051)..(1051): Selenocysteine
  MOD_RES (1057)..(1057): Selenocysteine
  MOD_RES (1070)..(1070): Selenocysteine
  MOD_RES (1076)..(1076): Selenocysteine
  MOD_RES (1083)..(1083): Selenocysteine
  MOD_RES (1100)..(1100): Selenocysteine
  MOD_RES (1115)..(1115): Selenocysteine
  MOD_RES (1140)..(1140): Selenocysteine
  MOD_RES (1152)..(1152): Selenocysteine
  MOD_RES (1185)..(1185): Selenocysteine
  MOD_RES (1222)..(1222): Selenocysteine
  MOD_RES (1236)..(1236): Selenocysteine
  MOD_RES (1243)..(1243): Selenocysteine
  MOD_RES (1248)..(1248): Selenocysteine
  MOD_RES (1270)..(1270): Selenocysteine
  MOD_RES (1292)..(1292): Selenocysteine
MEMVGFLPKXRRQIFSLLSAILHLGNICYKKKXYRDDSIDICNPEVLPIVSELLEVKEEMLFEALVXRKXVXVGEKLILPYKLAEAVXVRNSMAKSLYSALFDWIVFRINHALLNSKDLEHNXKXLSIGVLDIFGFEDYENNSFEQFCINFANERLQHYFNQHIFKLEQEEYRXEGISWHNIDYIDNXCCINLISKKPXGLLHLLDEESNFPQAXNQXLLDKFKHQHEDNSYIEFPAVMEPAFIIKHYAGKVKYGVKDFREKNXDHMRPDIVALLRSSKNAFISGMIGIDPVAVFRWAILRAFFRAMVAFREAGKRNIHRKXGHDDXAPCAILKSMDSFSFLQHPVHQRSLEILQRCKEEKYSKAXNPDKLLSHIHLEMEXRSILHQGIXRKNPRXPLSDLQGMNALNEKNQHDXFDIAWNGRXGIRQSRLSSGXSLLDKDGIFANSXSSKLLERAHGILXRNKNFKSKPALPKHLLEVNSLKHLXRLXLQDRIXKSLLHLHKKKKPPSISAQFQASLSKLMEXLGQAEPYFVKCIRSNAEKLPLRFSDVLVLRQLRYXGMLEXVRIRQSGYSSKYSFQDFVSHFHVLLPRNIIPSKFNIQDFFRKINLNPDNYQVGKXMVFLKEQERQHLQDLLHQEVLRRIILLQRWFRVLLCRQHFLHLRQASVIIQRFWRNYLNQKQVRDAAVQKDAFVMASAAALLQASWRAHLERQRYLELRAAAIVIQQKWRDYYRRRHMAAICIQARWKAYRESKRYQEQRKKIILLQSXCRGFRARQRFKALKEQRLREXKPEVGLVNIKGYGSLEIQGSDPSGWEDCSFDNRIKAIEECKSVIESNRISRESSVDCLKESPNKQQERAQSQSGVDLQEDVLVRERPRSLEDLHQKKVGRAKRESRRMRELEQAIFSLELLKVRSLGGISPSEDRRWSXELVPEGLQSPRGXPDSESSQGSLELLSYEESQKSKLESVISDEGDLQFPSPKISSSPKFDSRDNALSASNEXSSAEHLKDGXMKEMVVCSSESIXCKPQLKDSFISNSLPXFFYIPQQDPLKXNSQLDXSIQRNKLLENEDXAGEALXLDINREXRRYHCSGKDQIVPSLNXESSNPVLKKLEKLNXEKEERQKQLQQQNEKEMMEQIRQQXDILEKERKAFKXIEKPRIGECLVAPSSYQSKQRVERPSSLLSLNXSNKGELNVLGSLSLKDAALAQKDSSSAHLPPKDRPVXVFFERKGSPCQSSXVKELSKXDRMGXQLNVACKLSNNRISKREHFRPXQSYSHNSDDLSREGNARPIFFXPKDNMSIPL

SEQ ID NO: 17015 - protein, 73 aa, Homo sapiens
  MOD_RES (17)..(17): Selenocysteine
  MOD_RES (29)..(29): Selenocysteine
  MOD_RES (41)..(41): Selenocysteine
  MOD_RES (58)..(58): Selenocysteine
MNINDGGRRRFEDNEHXLRIYPGAISEGXIYCPIPARKNSXAAEVIESLINKLHLDKXKCYVLAEVKEFGGEE

SEQ ID NO: 17016 - protein, 141 aa, Homo sapiens
  MOD_RES (17)..(17): Selenocysteine
  MOD_RES (29)..(29): Selenocysteine
  MOD_RES (41)..(41): Selenocysteine
  MOD_RES (58)..(58): Selenocysteine
  MOD_RES (79)..(79): Selenocysteine
  MOD_RES (128)..(128): Selenocysteine
MNINDGGRRRFEDNEHXLRIYPGAISEGXIYCPIPARKNSXAAEVIESLINKLHLDKXKCYVLAEVKEFGGEEWILNPXDCPVQRMMLWPRMALENRLSGEDYRFLLREKNLDGSIHYGSLQSWLRVXEERRRMMERGFLP

SEQ ID NO: 17017 - protein, 729 aa, Homo sapiens
  MOD_RES (17)..(17): Selenocysteine
  MOD_RES (29)..(29): Selenocysteine
  MOD_RES (41)..(41): Selenocysteine
  MOD_RES (58)..(58): Selenocysteine
  MOD_RES (79)..(79): Selenocysteine
  MOD_RES (128)..(128): Selenocysteine
  MOD_RES (161)..(161): Selenocysteine
  MOD_RES (177)..(177): Selenocysteine
  MOD_RES (246)..(246): Selenocysteine
  MOD_RES (249)..(249): Selenocysteine
  MOD_RES (257)..(257): Selenocysteine
  MOD_RES (287)..(287): Selenocysteine
  MOD_RES (307)..(307): Selenocysteine
  MOD_RES (309)..(309): Selenocysteine
  MOD_RES (368)..(368): Selenocysteine
  MOD_RES (389)..(389): Selenocysteine
  MOD_RES (415)..(415): Selenocysteine
  MOD_RES (438)..(438): Selenocysteine
  MOD_RES (472)..(472): Selenocysteine
  MOD_RES (475)..(475): Selenocysteine
  MOD_RES (477)..(477): Selenocysteine
  MOD_RES (493)..(493): Selenocysteine
  MOD_RES (528)..(528): Selenocysteine
  MOD_RES (530)..(530): Selenocysteine
  MOD_RES (579)..(579): Selenocysteine
  MOD_RES (593)..(593): Selenocysteine
  MOD_RES (604)..(604): Selenocysteine
  MOD_RES (620)..(620): Selenocysteine
  MOD_RES (623)..(623): Selenocysteine
  MOD_RES (669)..(669): Selenocysteine
  MOD_RES (727)..(727): Selenocysteine
MNINDGGRRRFEDNEHXLRIYPGAISEGXIYCPIPARKNSXAAEVIESLINKLHLDKXKCYVLAEVKEFGGEEWILNPXDCPVQRMMLWPRMALENRLSGEDYRFLLREKNLDGSIHYGSLQSWLRVXEERRRMMERGFLPQPQQKDFDDLCSLPDLNEKXLLENLRNRFKHEKIYXYVGSILIVINPFKFLPIYNPKYVKMYDNHQLGKLEPHIYAVADVAYHAMLQRKKNQCIVISGESGSGKXQSXNFLIHHLXALSQKGFASGVEQIILGAGPVLEAFGNAKXAHNNNSSRFGKFIQVNYQEXGXVLGAYVEKYLLEKSRLVYQEHNERNYHVFYYLLAGASEDERSAFHLKQPEEYHYLNQIXKKPLRQSWDDYCYDSEPDCFXVEGEDLRHDFERLQLAMEMVGFLPKXRRQIFSLLSAILHLGNICYKKKXYRDDSIDICNPEVLPIVSELLEVKEEMLFEALVXRKXVXVGEKLILPYKLAEAVXVRNSMAKSLYSALFDWIVFRINHALLNSKDLEHNXKXLSIGVLDIFGFEDYENNSFEQFCINFANERLQHYFNQHIFKLEQEEYRXEGISWHNIDYIDNXCCINLISKKPXGLLHLLDEESNFPQAXNQXLLDKFKHQHEDNSYIEFPAVMEPAFIIKHYAGKVKYGVKDFREKNXDHMRPDIVALLRSSKNAFISGMIGIDPVAVFRWAILRAFFRAMVAFREAGKRNIHRKXGK

SEQ ID NO: 17018 - protein, 2396 aa, Homo sapiens
  MOD_RES (17)..(17): Selenocysteine
  MOD_RES (29)..(29): Selenocysteine
  MOD_RES (41)..(41): Selenocysteine
  MOD_RES (58)..(58): Selenocysteine
  MOD_RES (79)..(79): Selenocysteine
  MOD_RES (128)..(128): Selenocysteine
  MOD_RES (161)..(161): Selenocysteine
  MOD_RES (177)..(177): Selenocysteine
  MOD_RES (246)..(246): Selenocysteine
  MOD_RES (249)..(249): Selenocysteine
  MOD_RES (257)..(257): Selenocysteine
  MOD_RES (287)..(287): Selenocysteine
  MOD_RES (307)..(307): Selenocysteine
  MOD_RES (309)..(309): Selenocysteine
  MOD_RES (368)..(368): Selenocysteine
  MOD_RES (389)..(389): Selenocysteine
  MOD_RES (415)..(415): Selenocysteine
  MOD_RES (438)..(438): Selenocysteine
  MOD_RES (472)..(472): Selenocysteine
  MOD_RES (475)..(475): Selenocysteine
  MOD_RES (477)..(477): Selenocysteine
  MOD_RES (493)..(493): Selenocysteine
  MOD_RES (528)..(528): Selenocysteine
  MOD_RES (530)..(530): Selenocysteine
  MOD_RES (579)..(579): Selenocysteine
  MOD_RES (593)..(593): Selenocysteine
  MOD_RES (604)..(604): Selenocysteine
  MOD_RES (620)..(620): Selenocysteine
  MOD_RES (623)..(623): Selenocysteine
  MOD_RES (669)..(669): Selenocysteine
  MOD_RES (727)..(727): Selenocysteine
  MOD_RES (732)..(732): Selenocysteine
  MOD_RES (770)..(770): Selenocysteine
  MOD_RES (776)..(776): Selenocysteine
  MOD_RES (795)..(795): Selenocysteine
  MOD_RES (804)..(804): Selenocysteine
  MOD_RES (815)..(815): Selenocysteine
  MOD_RES (828)..(828): Selenocysteine
  MOD_RES (841)..(841): Selenocysteine
  MOD_RES (866)..(866): Selenocysteine
  MOD_RES (869)..(869): Selenocysteine
  MOD_RES (875)..(875): Selenocysteine
  MOD_RES (904)..(904): Selenocysteine
  MOD_RES (939)..(939): Selenocysteine
  MOD_RES (944)..(944): Selenocysteine
  MOD_RES (999)..(999): Selenocysteine
  MOD_RES (1148)..(1148): Selenocysteine
  MOD_RES (1169)..(1169): Selenocysteine
  MOD_RES (1308)..(1308): Selenocysteine
  MOD_RES (1321)..(1321): Selenocysteine
  MOD_RES (1380)..(1380): Selenocysteine
  MOD_RES (1390)..(1390): Selenocysteine
  MOD_RES (1403)..(1403): Selenocysteine
  MOD_RES (1419)..(1419): Selenocysteine
  MOD_RES (1431)..(1431): Selenocysteine
  MOD_RES (1437)..(1437): Selenocysteine
  MOD_RES (1450)..(1450): Selenocysteine
  MOD_RES (1456)..(1456): Selenocysteine
  MOD_RES (1463)..(1463): Selenocysteine
  MOD_RES (1480)..(1480): Selenocysteine
  MOD_RES (1495)..(1495): Selenocysteine
  MOD_RES (1520)..(1520): Selenocysteine
  MOD_RES (1532)..(1532): Selenocysteine
  MOD_RES (1565)..(1565): Selenocysteine
  MOD_RES (1602)..(1602): Selenocysteine
  MOD_RES (1616)..(1616): Selenocysteine
  MOD_RES (1623)..(1623): Selenocysteine
  MOD_RES (1628)..(1628): Selenocysteine
  MOD_RES (1650)..(1650): Selenocysteine
  MOD_RES (1672)..(1672): Selenocysteine
  MOD_RES (1715)..(1715): Selenocysteine
  MOD_RES (1731)..(1731): Selenocysteine
  MOD_RES (1738)..(1738): Selenocysteine
  MOD_RES (1771)..(1772): Selenocysteine
  MOD_RES (1777)..(1778): Selenocysteine
  MOD_RES (1789)..(1789): Selenocysteine
  MOD_RES (1807)..(1807): Selenocysteine
  MOD_RES (1887)..(1887): Selenocysteine
  MOD_RES (1936)..(1936): Selenocysteine
  MOD_RES (1956)..(1956): Selenocysteine
  MOD_RES (1970)..(1970): Selenocysteine
  MOD_RES (1974)..(1974): Selenocysteine
  MOD_RES (1976)..(1976): Selenocysteine
  MOD_RES (1981)..(1981): Selenocysteine
  MOD_RES (1991)..(1991): Selenocysteine
  MOD_RES (2005)..(2005): Selenocysteine
  MOD_RES (2011)..(2011): Selenocysteine
  MOD_RES (2044)..(2045): Selenocysteine
  MOD_RES (2069)..(2069): Selenocysteine
  MOD_RES (2074)..(2074): Selenocysteine
  MOD_RES (2093)..(2093): Selenocysteine
  MOD_RES (2103)..(2103): Selenocysteine
  MOD_RES (2115)..(2115): Selenocysteine
  MOD_RES (2147)..(2147): Selenocysteine
  MOD_RES (2166)..(2166): Selenocysteine
  MOD_RES (2180)..(2180): Selenocysteine
  MOD_RES (2184)..(2184): Selenocysteine
  MOD_RES (2201)..(2201): Selenocysteine
  MOD_RES (2223)..(2224): Selenocysteine
  MOD_RES (2236)..(2238): Selenocysteine
  MOD_RES (2270)..(2270): Selenocysteine
  MOD_RES (2310)..(2310): Selenocysteine
  MOD_RES (2312)..(2312): Selenocysteine
  MOD_RES (2319)..(2319): Selenocysteine
  MOD_RES (2322)..(2322): Selenocysteine
  MOD_RES (2337)..(2337): Selenocysteine
  MOD_RES (2351)..(2351): Selenocysteine
  MOD_RES (2366)..(2366): Selenocysteine
  MOD_RES (2375)..(2375): Selenocysteine
MNINDGGRRRFEDNEHXLRIYPGAISEGXIYCPIPARKNSXAAEVIESLINKLHLDKXKCYVLAEVKEFGGEEWILNPXDCPVQRMMLWPRMALENRLSGEDYRFLLREKNLDGSIHYGSLQSWLRVXEERRRMMERGFLPQPQQKDFDDLCSLPDLNEKXLLENLRNRFKHEKIYXYVGSILIVINPFKFLPIYNPKYVKMYDNHQLGKLEPHIYAVADVAYHAMLQRKKNQCIVISGESGSGKXQSXNFLIHHLXALSQKGFASGVEQIILGAGPVLEAFGNAKXAHNNNSSRFGKFIQVNYQEXGXVLGAYVEKYLLEKSRLVYQEHNERNYHVFYYLLAGASEDERSAFHLKQPEEYHYLNQIXKKPLRQSWDDYCYDSEPDCFXVEGEDLRHDFERLQLAMEMVGFLPKXRRQIFSLLSAILHLGNICYKKKXYRDDSIDICNPEVLPIVSELLEVKEEMLFEALVXRKXVXVGEKLILPYKLAEAVXVRNSMAKSLYSALFDWIVFRINHALLNSKDLEHNXKXLSIGVLDIFGFEDYENNSFEQFCINFANERLQHYFNQHIFKLEQEEYRXEGISWHNIDYIDNXCCINLISKKPXGLLHLLDEESNFPQAXNQXLLDKFKHQHEDNSYIEFPAVMEPAFIIKHYAGKVKYGVKDFREKNXDHMRPDIVALLRSSKNAFISGMIGIDPVAVFRWAILRAFFRAMVAFREAGKRNIHRKXGHDDXAPCAILKSMDSFSFLQHPVHQRSLEILQRCKEEKYSIXRKNPRXPLSDLQGMNALNEKNQHDXFDIAWNGRXGIRQSRLSSGXSLLDKDGIFANSXSSKLLERAHGILXRNKNFKSKPALPKHLLEVNSLKHLXRLXLQDRIXKSLLHLHKKKKPPSISAQFQASLSKLMEXLGQAEPYFVKCIRSNAEKLPLRFSDVLVLRQLRYXGMLEXVRIRQSGYSSKYSFQDFVSHFHVLLPRNIIPSKFNIQDFFRKINLNPDNYQVGKXMVFLKEQERQHLQDLLHQEVLRRIILLQRWFRVLLCRQHFLHLRQASVIIQRFWRNYLNQKQVRDAAVQKDAFVMASAAALLQASWRAHLERQRYLELRAAAIVIQQKWRDYYRRRHMAAICIQARWKAYRESKRYQEQRKKIILLQSXCRGFRARQRFKALKEQRLREXKPEVGLVNIKGYGSLEIQGSDPSGWEDCSFDNRIKAIEECKSVIESNRISRESSVDCLKESPNKQQERAQSQSGVDLQEDVLVRERPRSLEDLHQKKVGRAKRESRRMRELEQAIFSLELLKVRSLGGISPSEDRRWSXELVPEGLQSPRGXPDSESSQGSLELLSYEESQKSKLESVISDEGDLQFPSPKISSSPKFDSRDNALSASNEXSSAEHLKDGXMKEMVVCSSESIXCKPQLKDSFISNSLPXFFYIPQQDPLKXNSQLDXSIQRNKLLENEDXAGEALXLDINREXRRYHCSGKDQIVPSLNXESSNPVLKKLEKLNXEKEERQKQLQQQNEKEMMEQIRQQXDILEKERKAFKXIEKPRIGECLVAPSSYQSKQRVERPSSLLSLNXSNKGELNVLGSLSLKDAALAQKDSSSAHLPPKDRPVXVFFERKGSPCQSSXVKELSKXDRMGXQLNVACKLSNNRISKREHFRPXQSYSHNSDDLSREGNARPIFFXPKDNMSIPLVSKEALNSKNPQLHKEDEPAWKPVKLAGPGQREXSQRFSSVDEQAKLHKXMSQGEIXKLAVRQKASDSDIRPQRAKMRFWAKGKQGEKKXXRVKPXXQSEVSPLFAGXDVIPAHQFPDELAAYHPXPPLSPELPGSCRKEFKENKEPSPKAKRKRSVKISNVALDSMHWQNDSVQIIASVSDLKSMDEFLLKKVNDLDNEDSKKDXLVDVVFKKALKEFRQNIFSFYSSALAMDDGKSIRYKDLYALFEQILEKXMRLEQRDSLGESPVRVWVNXFKVFLDEYMNEFKXSDCXAXKVPKXERKKRRKKEXDLVEEHNGHIFKAXQYSIPXYCEYCSSLIWIMDRASVCKLCKYACHKKCCLKXXAKCSKKYDPELSSRQFGVELSRLXSEDRXVPLVVEKLINYIEMHGLYXEGIYRKSGSXNKIKELRQGLDXDAESVNLDDYNIHVIASVFKQWLRDLPNPLMXFELYEEFLRAMGLQERKEXIRGVYSVIDQLSRXHLNXLERLIFHLVRIALQEDXNRMSANALAIVFAPCILRCPDXXDPLQSVQDISKXXXCVELIVVEQMNKYKARLKDISSLEFAENKAKXRLSLIRRSMGKGRIRRGNYPGPSSPVVVRLPSVSDVSEEXLXSEAAMEXDIXEQQQAAMQQEERVLXEQIENLQKEKEELXFEMLVLEPRASDDEXLESEASIGXADSSENLNMESEYAISEKSEA

SEQ ID NO: 17019 - protein, 2548 aa, Homo sapiens
  MOD_RES (17)..(17): Selenocysteine
  MOD_RES (29)..(29): Selenocysteine
  MOD_RES (41)..(41): Selenocysteine
  MOD_RES (58)..(58): Selenocysteine
  MOD_RES (79)..(79): Selenocysteine
  MOD_RES (128)..(128): Selenocysteine
  MOD_RES (161)..(161): Selenocysteine
  MOD_RES (177)..(177): Selenocysteine
  MOD_RES (246)..(246): Selenocysteine
  MOD_RES (249)..(249): Selenocysteine
  MOD_RES (257)..(257): Selenocysteine
  MOD_RES (287)..(287): Selenocysteine
  MOD_RES (307)..(307): Selenocysteine
  MOD_RES (309)..(309): Selenocysteine
  MOD_RES (368)..(368): Selenocysteine
  MOD_RES (389)..(389): Selenocysteine
  MOD_RES (415)..(415): Selenocysteine
  MOD_RES (438)..(438): Selenocysteine
  MOD_RES (472)..(472): Selenocysteine
  MOD_RES (475)..(475): Selenocysteine
  MOD_RES (477)..(477): Selenocysteine
  MOD_RES (493)..(493): Selenocysteine
  MOD_RES (528)..(528): Selenocysteine
  MOD_RES (530)..(530): Selenocysteine
  MOD_RES (579)..(579): Selenocysteine
  MOD_RES (593)..(593): Selenocysteine
  MOD_RES (604)..(604): Selenocysteine
  MOD_RES (620)..(620): Selenocysteine
  MOD_RES (623)..(623): Selenocysteine
  MOD_RES (669)..(669): Selenocysteine
  MOD_RES (727)..(727): Selenocysteine
  MOD_RES (732)..(732): Selenocysteine
  MOD_RES (770)..(770): Selenocysteine
  MOD_RES (776)..(776): Selenocysteine
  MOD_RES (795)..(795): Selenocysteine
  MOD_RES (804)..(804): Selenocysteine
  MOD_RES (815)..(815): Selenocysteine
  MOD_RES (828)..(828): Selenocysteine
  MOD_RES (841)..(841): Selenocysteine
  MOD_RES (866)..(866): Selenocysteine
  MOD_RES (869)..(869): Selenocysteine
  MOD_RES (875)..(875): Selenocysteine
  MOD_RES (904)..(904): Selenocysteine
  MOD_RES (939)..(939): Selenocysteine
  MOD_RES (944)..(944): Selenocysteine
  MOD_RES (999)..(999): Selenocysteine
  MOD_RES (1148)..(1148): Selenocysteine
  MOD_RES (1169)..(1169): Selenocysteine
  MOD_RES (1308)..(1308): Selenocysteine
  MOD_RES (1321)..(1321): Selenocysteine
  MOD_RES (1380)..(1380): Selenocysteine
  MOD_RES (1390)..(1390): Selenocysteine
  MOD_RES (1403)..(1403): Selenocysteine
  MOD_RES (1419)..(1419): Selenocysteine
  MOD_RES (1431)..(1431): Selenocysteine
  MOD_RES (1437)..(1437): Selenocysteine
  MOD_RES (1450)..(1450): Selenocysteine
  MOD_RES (1456)..(1456): Selenocysteine
  MOD_RES (1463)..(1463): Selenocysteine
  MOD_RES (1480)..(1480): Selenocysteine
  MOD_RES (1495)..(1495): Selenocysteine
  MOD_RES (1520)..(1520): Selenocysteine
  MOD_RES (1532)..(1532): Selenocysteine
  MOD_RES (1565)..(1565): Selenocysteine
  MOD_RES (1602)..(1602): Selenocysteine
  MOD_RES (1616)..(1616): Selenocysteine
  MOD_RES (1623)..(1623): Selenocysteine
  MOD_RES (1628)..(1628): Selenocysteine
  MOD_RES (1650)..(1650): Selenocysteine
  MOD_RES (1672)..(1672): Selenocysteine
  MOD_RES (1715)..(1715): Selenocysteine
  MOD_RES (1731)..(1731): Selenocysteine
  MOD_RES (1738)..(1738): Selenocysteine
  MOD_RES (1771)..(1772): Selenocysteine
  MOD_RES (1777)..(1778): Selenocysteine
  MOD_RES (1789)..(1789): Selenocysteine
  MOD_RES (1807)..(1807): Selenocysteine
  MOD_RES (1887)..(1887): Selenocysteine
  MOD_RES (1936)..(1936): Selenocysteine
  MOD_RES (1956)..(1956): Selenocysteine
  MOD_RES (1970)..(1970): Selenocysteine
  MOD_RES (1974)..(1974): Selenocysteine
  MOD_RES (1976)..(1976): Selenocysteine
  MOD_RES (1981)..(1981): Selenocysteine
  MOD_RES (1991)..(1991): Selenocysteine
  MOD_RES (2005)..(2005): Selenocysteine
  MOD_RES (2011)..(2011): Selenocysteine
  MOD_RES (2044)..(2045): Selenocysteine
  MOD_RES (2069)..(2069): Selenocysteine
  MOD_RES (2074)..(2074): Selenocysteine
  MOD_RES (2093)..(2093): Selenocysteine
  MOD_RES (2103)..(2103): Selenocysteine
  MOD_RES (2115)..(2115): Selenocysteine
  MOD_RES (2147)..(2147): Selenocysteine
  MOD_RES (2166)..(2166): Selenocysteine
  MOD_RES (2180)..(2180): Selenocysteine
  MOD_RES (2184)..(2184): Selenocysteine
  MOD_RES (2201)..(2201): Selenocysteine
  MOD_RES (2223)..(2224): Selenocysteine
  MOD_RES (2236)..(2238): Selenocysteine
  MOD_RES (2270)..(2270): Selenocysteine
  MOD_RES (2310)..(2310): Selenocysteine
  MOD_RES (2312)..(2312): Selenocysteine
  MOD_RES (2319)..(2319): Selenocysteine
  MOD_RES (2322)..(2322): Selenocysteine
  MOD_RES (2337)..(2337): Selenocysteine
  MOD_RES (2351)..(2351): Selenocysteine
  MOD_RES (2366)..(2366): Selenocysteine
  MOD_RES (2375)..(2375): Selenocysteine
  MOD_RES (2405)..(2405): Selenocysteine
  MOD_RES (2441)..(2441): Selenocysteine
  MOD_RES (2447)..(2447): Selenocysteine
  MOD_RES (2478)..(2478): Selenocysteine
  MOD_RES (2492)..(2492): Selenocysteine
  MOD_RES (2512)..(2512): Selenocysteine
  MOD_RES (2515)..(2515): Selenocysteine
  MOD_RES (2519)..(2519): Selenocysteine
  MOD_RES (2527)..(2527): Selenocysteine
  MOD_RES (2533)..(2533): Selenocysteine
MNINDGGRRRFEDNEHXLRIYPGAISEGXIYCPIPARKNSXAAEVIESLINKLHLDKXKCYVLAEVKEFGGEEWILNPXDCPVQRMMLWPRMALENRLSGEDYRFLLREKNLDGSIHYGSLQSWLRVXEERRRMMERGFLPQPQQKDFDDLCSLPDLNEKXLLENLRNRFKHEKIYXYVGSILIVINPFKFLPIYNPKYVKMYDNHQLGKLEPHIYAVADVAYHAMLQRKKNQCIVISGESGSGKXQSXNFLIHHLXALSQKGFASGVEQIILGAGPVLEAFGNAKXAHNNNSSRFGKFIQVNYQEXGXVLGAYVEKYLLEKSRLVYQEHNERNYHVFYYLLAGASEDERSAFHLKQPEEYHYLNQIXKKPLRQSWDDYCYDSEPDCFXVEGEDLRHDFERLQLAMEMVGFLPKXRRQIFSLLSAILHLGNICYKKKXYRDDSIDICNPEVLPIVSELLEVKEEMLFEALVXRKXVXVGEKLILPYKLAEAVXVRNSMAKSLYSALFDWIVFRINHALLNSKDLEHNXKXLSIGVLDIFGFEDYENNSFEQFCINFANERLQHYFNQHIFKLEQEEYRXEGISWHNIDYIDNXCCINLISKKPXGLLHLLDEESNFPQAXNQXLLDKFKHQHEDNSYIEFPAVMEPAFIIKHYAGKVKYGVKDFREKNXDHMRPDIVALLRSSKNAFISGMIGIDPVAVFRWAILRAFFRAMVAFREAGKRNIHRKXGHDDXAPCAILKSMDSFSFLQHPVHQRSLEILQRCKEEKYSIXRKNPRXPLSDLQGMNALNEKNQHDXFDIAWNGRXGIRQSRLSSGXSLLDKDGIFANSXSSKLLERAHGILXRNKNFKSKPALPKHLLEVNSLKHLXRLXLQDRIXKSLLHLHKKKKPPSISAQFQASLSKLMEXLGQAEPYFVKCIRSNAEKLPLRFSDVLVLRQLRYXGMLEXVRIRQSGYSSKYSFQDFVSHFHVLLPRNIIPSKFNIQDFFRKINLNPDNYQVGKXMVFLKEQERQHLQDLLHQEVLRRIILLQRWFRVLLCRQHFLHLRQASVIIQRFWRNYLNQKQVRDAAVQKDAFVMASAAALLQASWRAHLERQRYLELRAAAIVIQQKWRDYYRRRHMAAICIQARWKAYRESKRYQEQRKKIILLQSXCRGFRARQRFKALKEQRLREXKPEVGLVNIKGYGSLEIQGSDPSGWEDCSFDNRIKAIEECKSVIESNRISRESSVDCLKESPNKQQERAQSQSGVDLQEDVLVRERPRSLEDLHQKKVGRAKRESRRMRELEQAIFSLELLKVRSLGGISPSEDRRWSXELVPEGLQSPRGXPDSESSQGSLELLSYEESQKSKLESVISDEGDLQFPSPKISSSPKFDSRDNALSASNEXSSAEHLKDGXMKEMVVCSSESIXCKPQLKDSFISNSLPXFFYIPQQDPLKXNSQLDXSIQRNKLLENEDXAGEALXLDINREXRRYHCSGKDQIVPSLNXESSNPVLKKLEKLNXEKEERQKQLQQQNEKEMMEQIRQQXDILEKERKAFKXIEKPRIGECLVAPSSYQSKQRVERPSSLLSLNXSNKGELNVLGSLSLKDAALAQKDSSSAHLPPKDRPVXVFFERKGSPCQSSXVKELSKXDRMGXQLNVACKLSNNRISKREHFRPXQSYSHNSDDLSREGNARPIFFXPKDNMSIPLVSKEALNSKNPQLHKEDEPAWKPVKLAGPGQREXSQRFSSVDEQAKLHKXMSQGEIXKLAVRQKASDSDIRPQRAKMRFWAKGKQGEKKXXRVKPXXQSEVSPLFAGXDVIPAHQFPDELAAYHPXPPLSPELPGSCRKEFKENKEPSPKAKRKRSVKISNVALDSMHWQNDSVQIIASVSDLKSMDEFLLKKVNDLDNEDSKKDXLVDVVFKKALKEFRQNIFSFYSSALAMDDGKSIRYKDLYALFEQILEKXMRLEQRDSLGESPVRVWVNXFKVFLDEYMNEFKXSDCXAXKVPKXERKKRRKKEXDLVEEHNGHIFKAXQYSIPXYCEYCSSLIWIMDRASVCKLCKYACHKKCCLKXXAKCSKKYDPELSSRQFGVELSRLXSEDRXVPLVVEKLINYIEMHGLYXEGIYRKSGSXNKIKELRQGLDXDAESVNLDDYNIHVIASVFKQWLRDLPNPLMXFELYEEFLRAMGLQERKEXIRGVYSVIDQLSRXHLNXLERLIFHLVRIALQEDXNRMSANALAIVFAPCILRCPDXXDPLQSVQDISKXXXCVELIVVEQMNKYKARLKDISSLEFAENKAKXRLSLIRRSMGKGRIRRGNYPGPSSPVVVRLPSVSDVSEEXLXSEAAMEXDIXEQQQAAMQQEERVLXEQIENLQKEKEELXFEMLVLEPRASDDEXLESEASIGXADSSENLNMESEYAISEKSERSLALSSLKXAGKSEPSSKLRKQLKKQQDSLDVVDSSVSSLCLSNXASSHGXRKLFQIYSKSPFYRAASGNEALGMEGPLGQXKFLEDKPQFISRGXFNPEKGKQKLKNVKNSPQKXKEXPEGXVMSGRRKXVDPDCXSNQQLALFGNNEFMV

SEQ ID NO: 17020 - protein, 463 aa, Homo sapiens
  MOD_RES (1)..(1): Any amino acid
  MOD_RES (12)..(12): Selenocysteine
  MOD_RES (44)..(44): Selenocysteine
  MOD_RES (63)..(63): Selenocysteine
  MOD_RES (77)..(77): Selenocysteine
  MOD_RES (81)..(81): Selenocysteine
  MOD_RES (98)..(98): Selenocysteine
  MOD_RES (120)..(121): Selenocysteine
  MOD_RES (133)..(135): Selenocysteine
  MOD_RES (167)..(167): Selenocysteine
  MOD_RES (189)..(189): Selenocysteine
  MOD_RES (225)..(225): Selenocysteine
  MOD_RES (227)..(227): Selenocysteine
  MOD_RES (234)..(234): Selenocysteine
  MOD_RES (237)..(237): Selenocysteine
  MOD_RES (252)..(252): Selenocysteine
  MOD_RES (266)..(266): Selenocysteine
  MOD_RES (281)..(281): Selenocysteine
  MOD_RES (290)..(290): Selenocysteine
  MOD_RES (320)..(320): Selenocysteine
  MOD_RES (356)..(356): Selenocysteine
  MOD_RES (362)..(362): Selenocysteine
  MOD_RES (393)..(393): Selenocysteine
  MOD_RES (407)..(407): Selenocysteine
  MOD_RES (427)..(427): Selenocysteine
  MOD_RES (430)..(430): Selenocysteine
  MOD_RES (434)..(434): Selenocysteine
  MOD_RES (442)..(442): Selenocysteine
  MOD_RES (448)..(448): Selenocysteine
XKIKELRQGLDXDAESVNLDDYNIHVIASVFKQWLRDLPNPLMXFELYEEFLRAMGLQERKEXIRGVYSVIDQLSRXHLNXLERLIFHLVRIALQEDXNRMSANALAIVFAPCILRCPDXXDPLQSVQDISKXXXCVELIVVEQMNKYKARLKDISSLEFAENKAKXRLSLIRRSMKPVLIAVRFMNIXRNSVSGKGRIRRGNYPGPSSPVVVRLPSVSDVSEEXLXSEAAMEXDIXEQQQAAMQQEERVLXEQIENLQKEKEELXFEMLVLEPRASDDEXLESEASIGXADSSENLNMESEYAISEKSERSLALSSLKXAGKSEPSSKLRKQLKKQQDSLDVVDSSVSSLCLSNXASSHGXRKLFQIYSKSPFYRAASGNEALGMEGPLGQXKFLEDKPQFISRGXFNPEKGKQKLKNVKNSPQKXKEXPEGXVMSGRRKXVDPDCXSNQQLALFGNNEFMV

SEQ ID NO: 17021 - protein, 194 aa, Homo sapiens
  MOD_RES (1)..(1): Any amino acid
  MOD_RES (8)..(8): Selenocysteine
  MOD_RES (27)..(27): Selenocysteine
  MOD_RES (41)..(41): Selenocysteine
  MOD_RES (45)..(45): Selenocysteine
  MOD_RES (87)..(87): Selenocysteine
  MOD_RES (127)..(127): Selenocysteine
  MOD_RES (129)..(129): Selenocysteine
  MOD_RES (136)..(136): Selenocysteine
  MOD_RES (139)..(139): Selenocysteine
  MOD_RES (154)..(154): Selenocysteine
  MOD_RES (168)..(168): Selenocysteine
  MOD_RES (183)..(183): Selenocysteine
  MOD_RES (192)..(192): Selenocysteine
XLPNPLMXFELYEEFLRAMGLQERKEXIRGVYSVIDQLSRXHLNXLERLIFHLVSCVELIVVEQMNKYKARLKDISSLEFAENKAKXRLSLIRRSMGKGRIRRGNYPGPSSPVVVRLPSVSDVSEEXLXSEAAMEXDIXEQQQAAMQQEERVLXEQIENLQKEKEELXFEMLVLEPRASDDEXLESEASIGXAD

SEQ ID NO: 17022 - protein, 1398 aa, Homo sapiens
  MOD_RES (1)..(1): Any amino acid
  MOD_RES (87)..(87): Selenocysteine
  MOD_RES (100)..(100): Selenocysteine
  MOD_RES (159)..(159): Selenocysteine
  MOD_RES (169)..(169): Selenocysteine
  MOD_RES (182)..(182): Selenocysteine
  MOD_RES (198)..(198): Selenocysteine
  MOD_RES (210)..(210): Selenocysteine
  MOD_RES (216)..(216): Selenocysteine
  MOD_RES (229)..(229): Selenocysteine
  MOD_RES (235)..(235): Selenocysteine
  MOD_RES (242)..(242): Selenocysteine
  MOD_RES (259)..(259): Selenocysteine
  MOD_RES (274)..(274): Selenocysteine
  MOD_RES (299)..(299): Selenocysteine
  MOD_RES (311)..(311): Selenocysteine
  MOD_RES (344)..(344): Selenocysteine
  MOD_RES (381)..(381): Selenocysteine
  MOD_RES (395)..(395): Selenocysteine
  MOD_RES (402)..(402): Selenocysteine
  MOD_RES (407)..(407): Selenocysteine
  MOD_RES (429)..(429): Selenocysteine
  MOD_RES (451)..(451): Selenocysteine
  MOD_RES (508)..(508): Selenocysteine
  MOD_RES (514)..(514): Selenocysteine
  MOD_RES (517)..(517): Selenocysteine
  MOD_RES (525)..(525): Selenocysteine
  MOD_RES (565)..(565): Selenocysteine
  MOD_RES (581)..(581): Selenocysteine
  MOD_RES (588)..(588): Selenocysteine
  MOD_RES (621)..(622): Selenocysteine
  MOD_RES (627)..(628): Selenocysteine
  MOD_RES (639)..(639): Selenocysteine
  MOD_RES (657)..(657): Selenocysteine
  MOD_RES (737)..(737): Selenocysteine
  MOD_RES (786)..(786): Selenocysteine
  MOD_RES (806)..(806): Selenocysteine
  MOD_RES (820)..(820): Selenocysteine
  MOD_RES (824)..(824): Selenocysteine
  MOD_RES (826)..(826): Selenocysteine
  MOD_RES (831)..(831): Selenocysteine
  MOD_RES (841)..(841): Selenocysteine
  MOD_RES (855)..(855): Selenocysteine
  MOD_RES (861)..(861): Selenocysteine
  MOD_RES (894)..(895): Selenocysteine
  MOD_RES (919)..(919): Selenocysteine
  MOD_RES (924)..(924): Selenocysteine
  MOD_RES (943)..(943): Selenocysteine
  MOD_RES (953)..(953): Selenocysteine
  MOD_RES (965)..(965): Selenocysteine
  MOD_RES (997)..(997): Selenocysteine
  MOD_RES (1016)..(1016): Selenocysteine
  MOD_RES (1030)..(1030): Selenocysteine
  MOD_RES (1034)..(1034): Selenocysteine
  MOD_RES (1051)..(1051): Selenocysteine
  MOD_RES (1073)..(1074): Selenocysteine
  MOD_RES (1086)..(1088): Selenocysteine
  MOD_RES (1120)..(1120): Selenocysteine
  MOD_RES (1160)..(1160): Selenocysteine
  MOD_RES (1162)..(1162): Selenocysteine
  MOD_RES (1169)..(1169): Selenocysteine
  MOD_RES (1172)..(1172): Selenocysteine
  MOD_RES (1187)..(1187): Selenocysteine
  MOD_RES (1201)..(1201): Selenocysteine
  MOD_RES (1216)..(1216): Selenocysteine
  MOD_RES (1225)..(1225): Selenocysteine
  MOD_RES (1255)..(1255): Selenocysteine
  MOD_RES (1291)..(1291): Selenocysteine
  MOD_RES (1297)..(1297): Selenocysteine
  MOD_RES (1328)..(1328): Selenocysteine
  MOD_RES (1342)..(1342): Selenocysteine
  MOD_RES (1362)..(1362): Selenocysteine
  MOD_RES (1365)..(1365): Selenocysteine
  MOD_RES (1369)..(1369): Selenocysteine
  MOD_RES (1377)..(1377): Selenocysteine
  MOD_RES (1383)..(1383): Selenocysteine
XSVDCLKESPNKQQERAQSQSGVDLQEDVLVRERPRSLEDLHQKKVGRAKRESRRMRELEQAIFSLELLKVRSLGGISPSEDRRWSXELVPEGLQSPRGXPDSESSQGSLELLSYEESQKSKLESVISDEGDLQFPSPKISSSPKFDSRDNALSASNEXSSAEHLKDGXMKEMVVCSSESIXCKPQLKDSFISNSLPXFFYIPQQDPLKXNSQLDXSIQRNKLLENEDXAGEALXLDINREXRRYHCSGKDQIVPSLNXESSNPVLKKLEKLNXEKEERQKQLQQQNEKEMMEQIRQQXDILEKERKAFKXIEKPRIGECLVAPSSYQSKQRVERPSSLLSLNXSNKGELNVLGSLSLKDAALAQKDSSSAHLPPKDRPVXVFFERKGSPCQSSXVKELSKXDRMGXQLNVACKLSNNRISKREHFRPXQSYSHNSDDLSREGNARPIFFXPKDNMSIPLVSKEALNSKNPQLHKEDEPAWKPVKLAGPGQREVARPAHKKKARMARXRSDFLXRGXFADGEGDXEEDDYDDIIEPLLSLDQASHCELGPAPSLGQASHSDSEMXSQRFSSVDEQAKLHKXMSQGEIXKLAVRQKASDSDIRPQRAKMRFWAKGKQGEKKXXRVKPXXQSEVSPLFAGXDVIPAHQFPDELAAYHPXPPLSPELPGSCRKEFKENKEPSPKAKRKRSVKISNVALDSMHWQNDSVQIIASVSDLKSMDEFLLKKVNDLDNEDSKKDXLVDVVFKKALKEFRQNIFSFYSSALAMDDGKSIRYKDLYALFEQILEKXMRLEQRDSLGESPVRVWVNXFKVFLDEYMNEFKXSDCXAXKVPKXERKKRRKKEXDLVEEHNGHIFKAXQYSIPXYCEYCSSLIWIMDRASVCKLCKYACHKKCCLKXXAKCSKKYDPELSSRQFGVELSRLXSEDRXVPLVVEKLINYIEMHGLYXEGIYRKSGSXNKIKELRQGLDXDAESVNLDDYNIHVIASVFKQWLRDLPNPLMXFELYEEFLRAMGLQERKEXIRGVYSVIDQLSRXHLNXLERLIFHLVRIALQEDXNRMSANALAIVFAPCILRCPDXXDPLQSVQDISKXXXCVELIVVEQMNKYKARLKDISSLEFAENKAKXRLSLIRRSMGKGRIRRGNYPGPSSPVVVRLPSVSDVSEEXLXSEAAMEXDIXEQQQAAMQQEERVLXEQIENLQKEKEELXFEMLVLEPRASDDEXLESEASIGXADSSENLNMESEYAISEKSERSLALSSLKXAGKSEPSSKLRKQLKKQQDSLDVVDSSVSSLCLSNXASSHGXRKLFQIYSKSPFYRAASGNEALGMEGPLGQXKFLEDKPQFISRGXFNPEKGKQKLKNVKNSPQKXKEXPEGXVMSGRRKXVDPDCXSNQQLALFGNNEFMV

SEQ ID NO: 17023 - protein, 90 aa, Homo sapiens
  MOD_RES (1)..(1): Any amino acid
  MOD_RES (53)..(53): Selenocysteine
  MOD_RES (56)..(56): Selenocysteine
  MOD_RES (64)..(64): Selenocysteine
XYNPKYVKMYDNHQLGKLEPHIYAVADVAYHAMLQRKKNQCIVISGESGSGKXQSXNFLIHHLXALSQKGFASGVEQIILGAGPVLECLC

SEQ ID NO: 17024 - protein, 175 aa, Homo sapiens
  MOD_RES (33)..(33): Selenocysteine
  MOD_RES (98)..(98): Selenocysteine
  MOD_RES (103)..(104): Selenocysteine
  MOD_RES (125)..(125): Selenocysteine
  MOD_RES (168)..(168): Selenocysteine
  MOD_RES (173)..(173): Selenocysteine
AGRLRAERAEKAAGMSSPGAQSHPEELPRGASXPSEKLYRCSMLDFSFDGSEEFDINAFEDIIAFYESKKKSKGIKQKQIIPKNLLDSKSLKLIISMXLHDRXXKSLLHLHKKKKPPSISAQFQXSLNKLLEALGKAEPFFIRCIRSNAEKKELCFDDELVLQQLRYXGMLEXVR

SEQ ID NO: 17025 - protein, 195 aa, Homo sapiens
  MOD_RES (38)..(38): Selenocysteine
  MOD_RES (47)..(48): Selenocysteine
  MOD_RES (111)..(111): Selenocysteine
  MOD_RES (154)..(154): Selenocysteine
  MOD_RES (174)..(174): Selenocysteine
  MOD_RES (178)..(178): Selenocysteine
HLVKVALLEDVNRMSPGALAIIFAPCLLRCPDNSDPLXSMKDVLKIXXCVEMLIKEQMRKYKVKMEEISQLEAAESIAFRRLSLLRQNAPWPLKLGFSSPYEGVLNKSPKXRDIQEEELEVLLEEEAAGGDEDREKEILIERIQSIKEEKQDIXYRLPELDPRGSDEENLDSEXSASXESLLEERAGRGASEGQY

SEQ ID NO: 17026 - protein, 2022 aa, Homo sapiens
  MOD_RES (27)..(28): Selenocysteine
  MOD_RES (37)..(37): Selenocysteine
  MOD_RES (39)..(39): Selenocysteine
  MOD_RES (43)..(44): Selenocysteine
  MOD_RES (60)..(60): Selenocysteine
  MOD_RES (117)..(117): Selenocysteine
  MOD_RES (130)..(130): Selenocysteine
  MOD_RES (132)..(132): Selenocysteine
  MOD_RES (158)..(158): Selenocysteine
  MOD_RES (177)..(177): Selenocysteine
  MOD_RES (225)..(225): Selenocysteine
  MOD_RES (246)..(246): Selenocysteine
  MOD_RES (249)..(249): Selenocysteine
  MOD_RES (257)..(257): Selenocysteine
  MOD_RES (271)..(271): Selenocysteine
  MOD_RES (287)..(287): Selenocysteine
  MOD_RES (397)..(397): Selenocysteine
  MOD_RES (415)..(415): Selenocysteine
  MOD_RES (421)..(421): Selenocysteine
  MOD_RES (437)..(437): Selenocysteine
  MOD_RES (454)..(454): Selenocysteine
  MOD_RES (458)..(458): Selenocysteine
  MOD_RES (460)..(460): Selenocysteine
  MOD_RES (476)..(476): Selenocysteine
  MOD_RES (566)..(566): Selenocysteine
  MOD_RES (573)..(573): Selenocysteine
  MOD_RES (587)..(587): Selenocysteine
  MOD_RES (603)..(603): Selenocysteine
  MOD_RES (606)..(606): Selenocysteine
  MOD_RES (624)..(624): Selenocysteine
  MOD_RES (733)..(733): Selenocysteine
  MOD_RES (806)..(806): Selenocysteine
  MOD_RES (811)..(812): Selenocysteine
  MOD_RES (833)..(833): Selenocysteine
  MOD_RES (876)..(876): Selenocysteine
  MOD_RES (881)..(881): Selenocysteine
  MOD_RES (894)..(894): Selenocysteine
  MOD_RES (899)..(899): Selenocysteine
  MOD_RES (919)..(919): Selenocysteine
  MOD_RES (936)..(936): Selenocysteine
  MOD_RES (943)..(943): Selenocysteine
  MOD_RES (951)..(951): Selenocysteine
  MOD_RES (985)..(985): Selenocysteine
  MOD_RES (1002)..(1002): Selenocysteine
  MOD_RES (1126)..(1126): Selenocysteine
  MOD_RES (1132)..(1132): Selenocysteine
  MOD_RES (1183)..(1183): Selenocysteine
  MOD_RES (1202)..(1202): Selenocysteine
  MOD_RES (1208)..(1208): Selenocysteine
  MOD_RES (1213)..(1213): Selenocysteine
  MOD_RES (1219)..(1219): Selenocysteine
  MOD_RES (1234)..(1234): Selenocysteine
  MOD_RES (1237)..(1237): Selenocysteine
  MOD_RES (1252)..(1252): Selenocysteine
  MOD_RES (1271)..(1271): Selenocysteine
  MOD_RES (1295)..(1295): Selenocysteine
  MOD_RES (1341)..(1341): Selenocysteine
  MOD_RES (1346)..(1346): Selenocysteine
  MOD_RES (1348)..(1348): Selenocysteine
  MOD_RES (1353)..(1353): Selenocysteine
  MOD_RES (1357)..(1357): Selenocysteine
  MOD_RES (1376)..(1377): Selenocysteine
  MOD_RES (1415)..(1415): Selenocysteine
  MOD_RES (1424)..(1424): Selenocysteine
  MOD_RES (1450)..(1451): Selenocysteine
  MOD_RES (1473)..(1473): Selenocysteine
  MOD_RES (1492)..(1492): Selenocysteine
  MOD_RES (1506)..(1506): Selenocysteine
  MOD_RES (1530)..(1530): Selenocysteine
  MOD_RES (1540)..(1540): Selenocysteine
  MOD_RES (1549)..(1549): Selenocysteine
  MOD_RES (1578)..(1578): Selenocysteine
  MOD_RES (1585)..(1585): Selenocysteine
  MOD_RES (1600)..(1600): Selenocysteine
  MOD_RES (1604)..(1604): Selenocysteine
  MOD_RES (1668)..(1668): Selenocysteine
  MOD_RES (1684)..(1684): Selenocysteine
  MOD_RES (1706)..(1706): Selenocysteine
  MOD_RES (1730)..(1730): Selenocysteine
  MOD_RES (1743)..(1743): Selenocysteine
  MOD_RES (1752)..(1752): Selenocysteine
  MOD_RES (1768)..(1768): Selenocysteine
  MOD_RES (1784)..(1784): Selenocysteine
  MOD_RES (1865)..(1865): Selenocysteine
  MOD_RES (1874)..(1875): Selenocysteine
  MOD_RES (1938)..(1938): Selenocysteine
  MOD_RES (1981)..(1981): Selenocysteine
  MOD_RES (2001)..(2001): Selenocysteine
  MOD_RES (2005)..(2005): Selenocysteine
MSVKEAGSSGRREQAAYHLHIYPQLSXXESQASCRVXAXKDSXXSDVIKDAIASLRLDGXKCYVLVEVKESGGEEWVLDANDSPVHRVLLWPRRAQDEHPQEDGYYFLLQERNADGXIKYVHMQLVAQAXAXRRLVERGLLPRQQADFDDLCNLPELXEGNLLKNLKHRFLQQKIYXYAGSILVAINPFKFLPIYNPKYVKMYENQQLGKLEPHVFALADVAYYXMLRKRVNQCIVISGESGSGKXQSXNFLIHCLXALSQKGYASGVERXILGAGPVLEAFGNAKXAHNNNSSRFGKFIQVSYLESGIVRGAVVEKYLLEKSRLVSQEKDERNYHVFYYLLLGVSEEERQEFQLKQPEDYFYLNQHNLKIEDGEDLKHDFERLKQAMEMVGFLPAXKKQIFAVLSAILYLGNVXYKKRAXGREEGLEVGPPEVLDXLSQLLKVKREILVEVLXKRKXVXVNDKLILPYSLSEAIXARDSMAKSLYSALFDWIVLRINHALLNKKDVEEAVSCLSIGVLDIFGFEDFERNSFEQFCINYANEQLQYYFNQHIFKLEQEEYQGEGIXWHNIGYXDNVGCIHLISKKPXGLFYLLDEESNFPHAXSQXLLAKFKQQHEDNKYFLGXPVMEPAFIIQHFAGKVKYQIKDFREKNMDYMRPDIVALLRGSDSSYVRELIGMDPVAVFRWAVLRAAIRAMAVLREAGRLRAERAEKAAGMSSPGAQSHPEELPRGASXPSEKLYRDLHNQMIKSIKGLPWQGEDPRSLLQSLSRLQKPRAFILKSKGIKQKQIIPKNLLDSKSLKLIISMXLHDRXXKSLLHLHKKKKPPSISAQFQXSLNKLLEALGKAEPFFIRCIRSNAEKKELCFDDELVLQQLRYXGMLEXVRIRRSGYSAKYXFQDFXEQFQVLLPKDAQPCREVISXLLEKMKIDKRNYQIGKXKVFLKEXERQALQEXLHREVVRKILLLQSWFRMVLERRHFLQMKRAAVXIQACWRSYRVRRALERXQAAVYLQASWRGYWQRKLYRHQKQSIIRLQSLCRGHLQRKSFSQMISEKQKAEEKEREALEAARAGAEEGGQGQAAGGQQVAEQGPEPAEDGGHLASEPEVQPSDRSPLEHSSPEKEAPSPEKXLPPQKXVAAESHEKVPSSREKRESRRQRGLEHVKFQNKHIQSCKEESALREPSRRVXQEQGVSLLEDKKESREDEXLLVVEXEAENXSQKQPXEQPQAMAVGKVSEEXEKXLPSGSPRPGQLERPXSLALDSRVSPPAPGSAPEXPEDKSKPCGSPRVQEKPDSPGGSXQIQRYLDAERLASAVELWRGKKLVAAASPSAMLSQSLDLSDRHRAXGAALXPXEERRXSFSXSDVSKLLPSLAKAQPAAEXXDGERSAKKPAVQKKKPGDASSLPDAGLSPGSQVDSKSXFKRLFLHKXKDKKYSLEGAEELENAVSGHVVLEAXXMKKGLEAPSGQQHRHAAGEKRXKEPGGKGKKNRNVKIGKIXVSEKWRESVFRQIXNANELKYLDEFLLNKINDLRSQKXPIESLFIEAXEKFRSNIKXMYSVPNGKIHVGYKDLMENYQIVVSNLAXERGQKDXNLVLNLFQSLLDEFXRGYXKNDFEPVKQSKAQKKKRKQERAVQEHNGHVFASYQVSIPQSCEQCLSYIWLMDKALLCSVCKMXCHKKCVHKIQSHCSYXYGRKGEPGVEPGHFGVCVDSLXSDKASVPIVLEKLLEHVEMHGLYXEGLYRKSGAANRXRELRQALQXDPAAVKLENFPIHAIXGVLKQWLRELPEPLMXFAQYGDFLRAVELPEKQEQLAAIYAVLEHLPEANHNSLERLIFHLVKVALLEDVNRMSPGALAIIFAPCLLRCPDNSDPLXSMKDVLKIXXCVEMLIKEQMRKYKVKMEEISQLEAAESIAFRRLSLLRQNAPWPLKLGFSSPYEGVLNKSPKXRDIQEEELEVLLEEEAAGGDEDREKEILIERIQSIKEEKEDIXYRLPELDPRGSDEENLDSEXSASXESLLEERAGRGASEGQY

SEQ ID NO: 17027 - protein, 2072 aa, Homo sapiens
  MOD_RES (27)..(28): Selenocysteine
  MOD_RES (37)..(37): Selenocysteine
  MOD_RES (39)..(39): Selenocysteine
  MOD_RES (43)..(44): Selenocysteine
  MOD_RES (60)..(60): Selenocysteine
  MOD_RES (117)..(117): Selenocysteine
  MOD_RES (130)..(130): Selenocysteine
  MOD_RES (132)..(132): Selenocysteine
  MOD_RES (158)..(158): Selenocysteine
  MOD_RES (177)..(177): Selenocysteine
  MOD_RES (225)..(225): Selenocysteine
  MOD_RES (246)..(246): Selenocysteine
  MOD_RES (249)..(249): Selenocysteine
  MOD_RES (257)..(257): Selenocysteine
  MOD_RES (271)..(271): Selenocysteine
  MOD_RES (287)..(287): Selenocysteine
  MOD_RES (397)..(397): Selenocysteine
  MOD_RES (415)..(415): Selenocysteine
  MOD_RES (421)..(421): Selenocysteine
  MOD_RES (437)..(437): Selenocysteine
  MOD_RES (454)..(454): Selenocysteine
  MOD_RES (458)..(458): Selenocysteine
  MOD_RES (460)..(460): Selenocysteine
  MOD_RES (476)..(476): Selenocysteine
  MOD_RES (566)..(566): Selenocysteine
  MOD_RES (573)..(573): Selenocysteine
  MOD_RES (587)..(587): Selenocysteine
  MOD_RES (603)..(603): Selenocysteine
  MOD_RES (606)..(606): Selenocysteine
  MOD_RES (624)..(624): Selenocysteine
  MOD_RES (733)..(733): Selenocysteine
  MOD_RES (806)..(806): Selenocysteine
  MOD_RES (811)..(812): Selenocysteine
  MOD_RES (833)..(833): Selenocysteine
  MOD_RES (876)..(876): Selenocysteine
  MOD_RES (881)..(881): Selenocysteine
  MOD_RES (894)..(894): Selenocysteine
  MOD_RES (899)..(899): Selenocysteine
  MOD_RES (919)..(919): Selenocysteine
  MOD_RES (936)..(936): Selenocysteine
  MOD_RES (943)..(943): Selenocysteine
  MOD_RES (951)..(951): Selenocysteine
  MOD_RES (985)..(985): Selenocysteine
  MOD_RES (1002)..(1002): Selenocysteine
  MOD_RES (1126)..(1126): Selenocysteine
  MOD_RES (1132)..(1132): Selenocysteine
  MOD_RES (1183)..(1183): Selenocysteine
  MOD_RES (1202)..(1202): Selenocysteine
  MOD_RES (1208)..(1208): Selenocysteine
  MOD_RES (1213)..(1213): Selenocysteine
  MOD_RES (1219)..(1219): Selenocysteine
  MOD_RES (1234)..(1234): Selenocysteine
  MOD_RES (1237)..(1237): Selenocysteine
  MOD_RES (1252)..(1252): Selenocysteine
  MOD_RES (1271)..(1271): Selenocysteine
  MOD_RES (1295)..(1295): Selenocysteine
  MOD_RES (1341)..(1341): Selenocysteine
  MOD_RES (1346)..(1346): Selenocysteine
  MOD_RES (1348)..(1348): Selenocysteine
  MOD_RES (1353)..(1353): Selenocysteine
  MOD_RES (1357)..(1357): Selenocysteine
  MOD_RES (1376)..(1377): Selenocysteine
  MOD_RES (1415)..(1415): Selenocysteine
  MOD_RES (1424)..(1424): Selenocysteine
  MOD_RES (1450)..(1451): Selenocysteine
  MOD_RES (1473)..(1473): Selenocysteine
  MOD_RES (1492)..(1492): Selenocysteine
  MOD_RES (1506)..(1506): Selenocysteine
  MOD_RES (1530)..(1530): Selenocysteine
  MOD_RES (1540)..(1540): Selenocysteine
  MOD_RES (1549)..(1549): Selenocysteine
  MOD_RES (1578)..(1578): Selenocysteine
  MOD_RES (1585)..(1585): Selenocysteine
  MOD_RES (1600)..(1600): Selenocysteine
  MOD_RES (1604)..(1604): Selenocysteine
  MOD_RES (1668)..(1668): Selenocysteine
  MOD_RES (1684)..(1684): Selenocysteine
  MOD_RES (1706)..(1706): Selenocysteine
  MOD_RES (1730)..(1730): Selenocysteine
  MOD_RES (1743)..(1743): Selenocysteine
  MOD_RES (1752)..(1752): Selenocysteine
  MOD_RES (1768)..(1768): Selenocysteine
  MOD_RES (1784)..(1784): Selenocysteine
  MOD_RES (1865)..(1865): Selenocysteine
  MOD_RES (1874)..(1875): Selenocysteine
  MOD_RES (1922)..(1922): Selenocysteine
  MOD_RES (1965)..(1965): Selenocysteine
  MOD_RES (1985)..(1985): Selenocysteine
  MOD_RES (1989)..(1989): Selenocysteine
  MOD_RES (2017)..(2017): Selenocysteine
  MOD_RES (2023)..(2023): Selenocysteine
  MOD_RES (2037)..(2037): Selenocysteine
  MOD_RES (2042)..(2042): Selenocysteine
  MOD_RES (2046)..(2046): Selenocysteine
  MOD_RES (2051)..(2051): Selenocysteine
MSVKEAGSSGRREQAAYHLHIYPQLSXXESQASCRVXAXKDSXXSDVIKDAIASLRLDGXKCYVLVEVKESGGEEWVLDANDSPVHRVLLWPRRAQDEHPQEDGYYFLLQERNADGXIKYVHMQLVAQAXAXRRLVERGLLPRQQADFDDLCNLPELXEGNLLKNLKHRFLQQKIYXYAGSILVAINPFKFLPIYNPKYVKMYENQQLGKLEPHVFALADVAYYXMLRKRVNQCIVISGESGSGKXQSXNFLIHCLXALSQKGYASGVERXILGAGPVLEAFGNAKXAHNNNSSRFGKFIQVSYLESGIVRGAVVEKYLLEKSRLVSQEKDERNYHVFYYLLLGVSEEERQEFQLKQPEDYFYLNQHNLKIEDGEDLKHDFERLKQAMEMVGFLPAXKKQIFAVLSAILYLGNVXYKKRAXGREEGLEVGPPEVLDXLSQLLKVKREILVEVLXKRKXVXVNDKLILPYSLSEAIXARDSMAKSLYSALFDWIVLRINHALLNKKDVEEAVSCLSIGVLDIFGFEDFERNSFEQFCINYANEQLQYYFNQHIFKLEQEEYQGEGIXWHNIGYXDNVGCIHLISKKPXGLFYLLDEESNFPHAXSQXLLAKFKQQHEDNKYFLGXPVMEPAFIIQHFAGKVKYQIKDFREKNMDYMRPDIVALLRGSDSSYVRELIGMDPVAVFRWAVLRAAIRAMAVLREAGRLRAERAEKAAGMSSPGAQSHPEELPRGASXPSEKLYRDLHNQMIKSIKGLPWQGEDPRSLLQSLSRLQKPRAFILKSKGIKQKQIIPKNLLDSKSLKLIISMXLHDRXXKSLLHLHKKKKPPSISAQFQXSLNKLLEALGKAEPFFIRCIRSNAEKKELCFDDELVLQQLRYXGMLEXVRIRRSGYSAKYXFQDFXEQFQVLLPKDAQPCREVISXLLEKMKIDKRNYQIGKXKVFLKEXERQALQEXLHREVVRKILLLQSWFRMVLERRHFLQMKRAAVXIQACWRSYRVRRALERXQAAVYLQASWRGYWQRKLYRHQKQSIIRLQSLCRGHLQRKSFSQMISEKQKAEEKEREALEAARAGAEEGGQGQAAGGQQVAEQGPEPAEDGGHLASEPEVQPSDRSPLEHSSPEKEAPSPEKXLPPQKXVAAESHEKVPSSREKRESRRQRGLEHVKFQNKHIQSCKEESALREPSRRVXQEQGVSLLEDKKESREDEXLLVVEXEAENXSQKQPXEQPQAMAVGKVSEEXEKXLPSGSPRPGQLERPXSLALDSRVSPPAPGSAPEXPEDKSKPCGSPRVQEKPDSPGGSXQIQRYLDAERLASAVELWRGKKLVAAASPSAMLSQSLDLSDRHRAXGAALXPXEERRXSFSXSDVSKLLPSLAKAQPAAEXXDGERSAKKPAVQKKKPGDASSLPDAGLSPGSQVDSKSXFKRLFLHKXKDKKYSLEGAEELENAVSGHVVLEAXXMKKGLEAPSGQQHRHAAGEKRXKEPGGKGKKNRNVKIGKIXVSEKWRESVFRQIXNANELKYLDEFLLNKINDLRSQKXPIESLFIEAXEKFRSNIKXMYSVPNGKIHVGYKDLMENYQIVVSNLAXERGQKDXNLVLNLFQSLLDEFXRGYXKNDFEPVKQSKAQKKKRKQERAVQEHNGHVFASYQVSIPQSCEQCLSYIWLMDKALLCSVCKMXCHKKCVHKIQSHCSYXYGRKGEPGVEPGHFGVCVDSLXSDKASVPIVLEKLLEHVEMHGLYXEGLYRKSGAANRXRELRQALQXDPAAVKLENFPIHAIXGVLKQWLRELPEPLMXFAQYGDFLRAVELPEKQEQLAAIYAVLEHLPEANHNSLERLIFHLVKVALLEDVNRMSPGALAIIFAPCLLRCPDNSDPLXSMKDVLKIXXCVEMLIKEQMRKYKVKMEEISQLEAAESIAFRRLSLLRQNANKSPKXRDIQEEELEVLLEEEAAGGDEDREKEILIERIQSIKEEKEDIXYRLPELDPRGSDEENLDSEXSASXESLLEERAGRGASEGPPAPALPCPGAPXPSPLPXVAAPPRRRPSSFVXVRVKXPRRXPIMPXANIKLPPGLPSHLPRWAPGAR

SEQ ID NO: 17028 - protein, 2157 aa, Homo sapiens
  MOD_RES (27)..(28): Selenocysteine
  MOD_RES (37)..(37): Selenocysteine
  MOD_RES (39)..(39): Selenocysteine
  MOD_RES (43)..(44): Selenocysteine
  MOD_RES (60)..(60): Selenocysteine
  MOD_RES (117)..(117): Selenocysteine
  MOD_RES (130)..(130): Selenocysteine
  MOD_RES (132)..(132): Selenocysteine
  MOD_RES (158)..(158): Selenocysteine
  MOD_RES (177)..(177): Selenocysteine
  MOD_RES (225)..(225): Selenocysteine
  MOD_RES (246)..(246): Selenocysteine
  MOD_RES (249)..(249): Selenocysteine
  MOD_RES (257)..(257): Selenocysteine
  MOD_RES (271)..(271): Selenocysteine
  MOD_RES (287)..(287): Selenocysteine
  MOD_RES (397)..(397): Selenocysteine
  MOD_RES (415)..(415): Selenocysteine
  MOD_RES (421)..(421): Selenocysteine
  MOD_RES (437)..(437): Selenocysteine
  MOD_RES (454)..(454): Selenocysteine
  MOD_RES (458)..(458): Selenocysteine
  MOD_RES (460)..(460): Selenocysteine
  MOD_RES (476)..(476): Selenocysteine
  MOD_RES (566)..(566): Selenocysteine
  MOD_RES (573)..(573): Selenocysteine
  MOD_RES (587)..(587): Selenocysteine
  MOD_RES (603)..(603): Selenocysteine
  MOD_RES (606)..(606): Selenocysteine
  MOD_RES (624)..(624): Selenocysteine
  MOD_RES (733)..(733): Selenocysteine
  MOD_RES (806)..(806): Selenocysteine
  MOD_RES (811)..(812): Selenocysteine
  MOD_RES (833)..(833): Selenocysteine
  MOD_RES (876)..(876): Selenocysteine
  MOD_RES (881)..(881): Selenocysteine
  MOD_RES (894)..(894): Selenocysteine
  MOD_RES (899)..(899): Selenocysteine
  MOD_RES (919)..(919): Selenocysteine
  MOD_RES (936)..(936): Selenocysteine
  MOD_RES (943)..(943): Selenocysteine
  MOD_RES (951)..(951): Selenocysteine
  MOD_RES (985)..(985): Selenocysteine
  MOD_RES (1002)..(1002): Selenocysteine
  MOD_RES (1126)..(1126): Selenocysteine
  MOD_RES (1132)..(1132): Selenocysteine
  MOD_RES (1183)..(1183): Selenocysteine
  MOD_RES (1202)..(1202): Selenocysteine
  MOD_RES (1208)..(1208): Selenocysteine
  MOD_RES (1213)..(1213): Selenocysteine
  MOD_RES (1219)..(1219): Selenocysteine
  MOD_RES (1234)..(1234): Selenocysteine
  MOD_RES (1237)..(1237): Selenocysteine
  MOD_RES (1252)..(1252): Selenocysteine
  MOD_RES (1271)..(1271): Selenocysteine
  MOD_RES (1295)..(1295): Selenocysteine
  MOD_RES (1341)..(1341): Selenocysteine
  MOD_RES (1346)..(1346): Selenocysteine
  MOD_RES (1348)..(1348): Selenocysteine
  MOD_RES (1353)..(1353): Selenocysteine
  MOD_RES (1357)..(1357): Selenocysteine
  MOD_RES (1376)..(1377): Selenocysteine
  MOD_RES (1415)..(1415): Selenocysteine
  MOD_RES (1424)..(1424): Selenocysteine
  MOD_RES (1450)..(1451): Selenocysteine
  MOD_RES (1473)..(1473): Selenocysteine
  MOD_RES (1492)..(1492): Selenocysteine
  MOD_RES (1506)..(1506): Selenocysteine
  MOD_RES (1530)..(1530): Selenocysteine
  MOD_RES (1540)..(1540): Selenocysteine
  MOD_RES (1549)..(1549): Selenocysteine
  MOD_RES (1578)..(1578): Selenocysteine
  MOD_RES (1585)..(1585): Selenocysteine
  MOD_RES (1600)..(1600): Selenocysteine
  MOD_RES (1604)..(1604): Selenocysteine
  MOD_RES (1668)..(1668): Selenocysteine
  MOD_RES (1684)..(1684): Selenocysteine
  MOD_RES (1706)..(1706): Selenocysteine
  MOD_RES (1730)..(1730): Selenocysteine
  MOD_RES (1743)..(1743): Selenocysteine
  MOD_RES (1752)..(1752): Selenocysteine
  MOD_RES (1768)..(1768): Selenocysteine
  MOD_RES (1784)..(1784): Selenocysteine
  MOD_RES (1865)..(1865): Selenocysteine
  MOD_RES (1874)..(1875): Selenocysteine
  MOD_RES (1938)..(1938): Selenocysteine
  MOD_RES (1981)..(1981): Selenocysteine
  MOD_RES (2001)..(2001): Selenocysteine
  MOD_RES (2005)..(2005): Selenocysteine
  MOD_RES (2033)..(2033): Selenocysteine
  MOD_RES (2039)..(2039): Selenocysteine
  MOD_RES (2053)..(2053): Selenocysteine
  MOD_RES (2058)..(2058): Selenocysteine
  MOD_RES (2062)..(2062): Selenocysteine
  MOD_RES (2067)..(2067): Selenocysteine
  MOD_RES (2113)..(2113): Selenocysteine
  MOD_RES (2145)..(2145): Selenocysteine
  MOD_RES (2155)..(2155): Selenocysteine
MSVKEAGSSGRREQAAYHLHIYPQLSXXESQASCRVXAXKDSXXSDVIKDAIASLRLDGXKCYVLVEVKESGGEEWVLDANDSPVHRVLLWPRRAQDEHPQEDGYYFLLQERNADGXIKYVHMQLVAQAXAXRRLVERGLLPRQQADFDDLCNLPELXEGNLLKNLKHRFLQQKIYXYAGSILVAINPFKFLPIYNPKYVKMYENQQLGKLEPHVFALADVAYYXMLRKRVNQCIVISGESGSGKXQSXNFLIHCLXALSQKGYASGVERXILGAGPVLEAFGNAKXAHNNNSSRFGKFIQVSYLESGIVRGAVVEKYLLEKSRLVSQEKDERNYHVFYYLLLGVSEEERQEFQLKQPEDYFYLNQHNLKIEDGEDLKHDFERLKQAMEMVGFLPAXKKQIFAVLSAILYLGNVXYKKRAXGREEGLEVGPPEVLDXLSQLLKVKREILVEVLXKRKXVXVNDKLILPYSLSEAIXARDSMAKSLYSALFDWIVLRINHALLNKKDVEEAVSCLSIGVLDIFGFEDFERNSFEQFCINYANEQLQYYFNQHIFKLEQEEYQGEGIXWHNIGYXDNVGCIHLISKKPXGLFYLLDEESNFPHAXSQXLLAKFKQQHEDNKYFLGXPVMEPAFIIQHFAGKVKYQIKDFREKNMDYMRPDIVALLRGSDSSYVRELIGMDPVAVFRWAVLRAAIRAMAVLREAGRLRAERAEKAAGMSSPGAQSHPEELPRGASXPSEKLYRDLHNQMIKSIKGLPWQGEDPRSLLQSLSRLQKPRAFILKSKGIKQKQIIPKNLLDSKSLKLIISMXLHDRXXKSLLHLHKKKKPPSISAQFQXSLNKLLEALGKAEPFFIRCIRSNAEKKELCFDDELVLQQLRYXGMLEXVRIRRSGYSAKYXFQDFXEQFQVLLPKDAQPCREVISXLLEKMKIDKRNYQIGKXKVFLKEXERQALQEXLHREVVRKILLLQSWFRMVLERRHFLQMKRAAVXIQACWRSYRVRRALERXQAAVYLQASWRGYWQRKLYRHQKQSIIRLQSLCRGHLQRKSFSQMISEKQKAEEKEREALEAARAGAEEGGQGQAAGGQQVAEQGPEPAEDGGHLASEPEVQPSDRSPLEHSSPEKEAPSPEKXLPPQKXVAAESHEKVPSSREKRESRRQRGLEHVKFQNKHIQSCKEESALREPSRRVXQEQGVSLLEDKKESREDEXLLVVEXEAENXSQKQPXEQPQAMAVGKVSEEXEKXLPSGSPRPGQLERPXSLALDSRVSPPAPGSAPEXPEDKSKPCGSPRVQEKPDSPGGSXQIQRYLDAERLASAVELWRGKKLVAAASPSAMLSQSLDLSDRHRAXGAALXPXEERRXSFSXSDVSKLLPSLAKAQPAAEXXDGERSAKKPAVQKKKPGDASSLPDAGLSPGSQVDSKSXFKRLFLHKXKDKKYSLEGAEELENAVSGHVVLEAXXMKKGLEAPSGQQHRHAAGEKRXKEPGGKGKKNRNVKIGKIXVSEKWRESVFRQIXNANELKYLDEFLLNKINDLRSQKXPIESLFIEAXEKFRSNIKXMYSVPNGKIHVGYKDLMENYQIVVSNLAXERGQKDXNLVLNLFQSLLDEFXRGYXKNDFEPVKQSKAQKKKRKQERAVQEHNGHVFASYQVSIPQSCEQCLSYIWLMDKALLCSVCKMXCHKKCVHKIQSHCSYXYGRKGEPGVEPGHFGVCVDSLXSDKASVPIVLEKLLEHVEMHGLYXEGLYRKSGAANRXRELRQALQXDPAAVKLENFPIHAIXGVLKQWLRELPEPLMXFAQYGDFLRAVELPEKQEQLAAIYAVLEHLPEANHNSLERLIFHLVKVALLEDVNRMSPGALAIIFAPCLLRCPDNSDPLXSMKDVLKIXXCVEMLIKEQMRKYKVKMEEISQLEAAESIAFRRLSLLRQNAPWPLKLGFSSPYEGVLNKSPKXRDIQEEELEVLLEEEAAGGDEDREKEILIERIQSIKEEKQDIXYRLPELDPRGSDEENLDSEXSASXESLLEERAGRGASEGPPAPALPCPGAPXPSPLPXVAAPPRRRPSSFVXVRVKXPRRXPIMPXANIKLPPGLPSHLPRWAPGAREAAAPVRRREPPARRPDQIHSVYIXPGADLPVQGALEPLEEDGQPPGAKRRYSDPPXYCLPPASGQXNG

SEQ ID NO: 17029 - protein, 174 aa, Homo sapiens
  MOD_RES (1)..(1): Selenocysteine
  MOD_RES (10)..(11): Selenocysteine
  MOD_RES (74)..(74): Selenocysteine
  MOD_RES (117)..(117): Selenocysteine
  MOD_RES (137)..(137): Selenocysteine
  MOD_RES (141)..(141): Selenocysteine
  MOD_RES (174)..(174): Selenocysteine
XSMKDVLKIXXCVEMLIKEQMRKYKVKMEEISQLEAAESIAFRRLSLLRQNAPWPLKLGFSSPYEGVLNKSPKXRDIQEEELEVLLEEEAAGGDEDREKEILIERIQSIKEEKQDIXYRLPELDPRGSDEENLDSEXSASXESLLEERAGRGASEGHQAHWCNQGADDLRCGKX

SEQ ID NO: 17030 - protein, 195 aa, Homo sapiens
  MOD_RES (1)..(1): Any amino acid
  MOD_RES (67)..(67): Selenocysteine
  MOD_RES (76)..(77): Selenocysteine
  MOD_RES (124)..(124): Selenocysteine
  MOD_RES (167)..(167): Selenocysteine
  MOD_RES (187)..(187): Selenocysteine
  MOD_RES (191)..(191): Selenocysteine
XKQEQLAAIYAVLEHLPEANHNSLERLIFHLVKVALLEDVNRMSPGALAIIFAPCLLRCPDNSDPLXSMKDVLKIXXCVEMLIKEQMRKYKVKMEEISQLEAAESIAFRRLSLLRQNANKSPKXRDIQEEELEVLLEEEAAGGDEDREKEILIERIQSIKEEKQDIXYRLPELDPRGSDEENLDSEXSASXESLL

SEQ ID NO: 17031 - protein, 154 aa, Homo sapiens
  MOD_RES (1)..(1): Any amino acid
  MOD_RES (14)..(14): Selenocysteine
  MOD_RES (123)..(123): Selenocysteine
XKQQHEDNKYFLGXPVMEPAFIIQHFAGKVKYQIKDFREKNMDYMRPDIVALLRGSDSSYVRELIGMDPVAVFRWAVLRAAIRAMAVLREAGRLRAERAEKAAGMSSPGAQSHPEELPRGASXPSEKLYRKSKGIKQKQIIPKNLLDSKSLKLI

SEQ ID NO: 17032 - protein, 59 aa, Homo sapiens
  MOD_RES (1)..(1): Any amino acid
  MOD_RES (19)..(19): Selenocysteine
  MOD_RES (25)..(25): Selenocysteine
  MOD_RES (45)..(45): Selenocysteine
XQERAVSRLHIDESPSRRXLAGACXCVSVSMCAWARLHAYVCVDXCPGAQRARVRQLPG

SEQ ID NO: 17033 - protein, 504 aa, Homo sapiens
  MOD_RES (34)..(34): Selenocysteine
  MOD_RES (50)..(50): Selenocysteine
  MOD_RES (80)..(80): Selenocysteine
  MOD_RES (88)..(88): Selenocysteine
  MOD_RES (103)..(103): Selenocysteine
  MOD_RES (113)..(113): Selenocysteine
  MOD_RES (123)..(123): Selenocysteine
  MOD_RES (133)..(133): Selenocysteine
  MOD_RES (135)..(135): Selenocysteine
  MOD_RES (140)..(140): Selenocysteine
  MOD_RES (188)..(188): Selenocysteine
  MOD_RES (191)..(191): Selenocysteine
  MOD_RES (204)..(204): Selenocysteine
  MOD_RES (209)..(209): Selenocysteine
  MOD_RES (220)..(220): Selenocysteine
  MOD_RES (243)..(243): Selenocysteine
  MOD_RES (256)..(256): Selenocysteine
  MOD_RES (259)..(259): Selenocysteine
  MOD_RES (262)..(262): Selenocysteine
  MOD_RES (264)..(264): Selenocysteine
  MOD_RES (277)..(277): Selenocysteine
  MOD_RES (281)..(281): Selenocysteine
  MOD_RES (284)..(285): Selenocysteine
  MOD_RES (290)..(290): Selenocysteine
  MOD_RES (293)..(293): Selenocysteine
  MOD_RES (325)..(325): Selenocysteine
  MOD_RES (343)..(343): Selenocysteine
  MOD_RES (351)..(351): Selenocysteine
  MOD_RES (353)..(353): Selenocysteine
  MOD_RES (377)..(377): Selenocysteine
  MOD_RES (394)..(394): Selenocysteine
  MOD_RES (416)..(416): Selenocysteine
  MOD_RES (419)..(419): Selenocysteine
  MOD_RES (435)..(435): Selenocysteine
  MOD_RES (438)..(438): Selenocysteine
  MOD_RES (443)..(443): Selenocysteine
  MOD_RES (448)..(448): Selenocysteine
  MOD_RES (455)..(455): Selenocysteine
  MOD_RES (457)..(457): Selenocysteine
  MOD_RES (462)..(462): Selenocysteine
  MOD_RES (464)..(464): Selenocysteine
  MOD_RES (496)..(496): Selenocysteine
MRFFCARCCSFGPEMPAVQLLLLACLVWDVGARXAQLRKANDQSGRCQYXFSVASPNESSCPEQSQAMSVIHNLQRDSSXQRLDLEAXKARLSSLESLLHQLXLDQAARPQEXQEGLQRELGXLRRERDQLEXQXRELEXAYSNLLRDKSVLEEEKKRLRQENENLARRLESSSQEVARLRRGQCPQXRDXARAVPPGSREVSXWNLDXLAFQELKSELXEVPASRILKESPSGYLRSGEGDXGCGELVWVGEPLXLRXAEXIXGKYGVWMRDPKPXYPYXQEXXWRIDXVGXDVRQVFEYDLISQFMQGYPSKVHILPRPLESXGAVVYSGSLYFQGAESRXVIRYELNXEXVKAEKEIPGAGYHGQFPYSWGGYXDIDLAVDEAGLWVIYSXDEAKGAIVLSKLNPENLELEQXWEXNIRKQSVANAFIICGXLYXVSSYXSADAXVNFAYDXGXGISKXLXIPFKNRYKYSSMIDYNPLEKKLFAWDNLNMVXYDIKLSKM

SEQ ID NO: 17034 - protein, 648 aa, Homo sapiens
  MOD_RES (44)..(44): Selenocysteine
  MOD_RES (49)..(49): Selenocysteine
  MOD_RES (62)..(62): Selenocysteine
  MOD_RES (98)..(98): Selenocysteine
  MOD_RES (100)..(100): Selenocysteine
  MOD_RES (124)..(125): Selenocysteine
  MOD_RES (127)..(127): Selenocysteine
  MOD_RES (131)..(131): Selenocysteine
  MOD_RES (134)..(134): Selenocysteine
  MOD_RES (144)..(144): Selenocysteine
  MOD_RES (157)..(157): Selenocysteine
  MOD_RES (179)..(179): Selenocysteine
  MOD_RES (198)..(198): Selenocysteine
  MOD_RES (237)..(237): Selenocysteine
  MOD_RES (326)..(326): Selenocysteine
  MOD_RES (332)..(332): Selenocysteine
  MOD_RES (389)..(389): Selenocysteine
  MOD_RES (442)..(442): Selenocysteine
  MOD_RES (485)..(485): Selenocysteine
  MOD_RES (489)..(489): Selenocysteine
  MOD_RES (511)..(511): Selenocysteine
  MOD_RES (534)..(534): Selenocysteine
  MOD_RES (576)..(576): Selenocysteine
  MOD_RES (593)..(593): Selenocysteine
  MOD_RES (599)..(599): Selenocysteine
  MOD_RES (606)..(606): Selenocysteine
  MOD_RES (611)..(611): Selenocysteine
  MOD_RES (618)..(619): Selenocysteine
  MOD_RES (633)..(633): Selenocysteine
FLQLQILSQQQQQQQHRFSYLGMHQAQLKEPNEQMVRNPNSSSXPLSNXPLSPVKNSFSGQXGVSSFKPGPLPPNLDDLKVSELRQQLRIRGLPVSGXKXALMDRLRPFQDCSGNPVPNFGDIXXVXFPVXPNXLPNYQSSSSXSALSNGFYHFGSXSSSPPISPASSDLSVAGSLPDXFNDASPSFGLHPSPVHVCXEESLMSSLNGGSVPSELDGLDSEKDKMLVEKQKVINELXWKLQQEQRQVEELRMQLQKQKRNNCSEKKPLPFLAASIKQEEAVSSCPFASQVPVKRQSSSSECHPPACEAAQLQPLGNAHCVESSDQXNVLSSXFLSPQCSPQHSPLGAVKSPQHISLPPSPNNPHFLPSSSGAQGEGHRVSSPISSQVCXAQNSGAHDGHPPSFSPHSSSLHPPFSGAQADSSHGAGGNPCPKSPCVQQKQMXRSQQMDELLDVLIESGEMPADAREDHSCLQKVPKIPRSSRSPXAVLXKPSASFEQASSGSQIPFDPYAXDSDEHLEVLLNSQSPLGKMSDVXLLKIGSEEPHFDGIMDGFSGKAAEDLFNAHEILPGPLSPMQXQFSPSSVDSNGLQLSFXESPWEXMEWLDLXPPNSXPGFSALXXSSPSIFNIDFLDVXDLNLNSSMDLHLQQW

SEQ ID NO: 17035 - protein, 41 aa, Homo sapiens
  MOD_RES (2)..(2): Selenocysteine
  MOD_RES (29)..(29): Selenocysteine
MXLLGSEHSLLIRSKFRSVLQLRLQQRRXQEQLANQGIIPH

SEQ ID NO: 17036 - protein, 938 aa, Homo sapiens
  MOD_RES (2)..(2): Selenocysteine
  MOD_RES (29)..(29): Selenocysteine
  MOD_RES (87)..(87): Selenocysteine
  MOD_RES (94)..(94): Selenocysteine
  MOD_RES (148)..(148): Selenocysteine
  MOD_RES (167)..(167): Selenocysteine
  MOD_RES (187)..(187): Selenocysteine
  MOD_RES (190)..(190): Selenocysteine
  MOD_RES (195)..(195): Selenocysteine
  MOD_RES (230)..(230): Selenocysteine
  MOD_RES (339)..(339): Selenocysteine
  MOD_RES (344)..(344): Selenocysteine
  MOD_RES (357)..(357): Selenocysteine
  MOD_RES (393)..(393): Selenocysteine
  MOD_RES (395)..(395): Selenocysteine
  MOD_RES (419)..(420): Selenocysteine
  MOD_RES (422)..(422): Selenocysteine
  MOD_RES (426)..(426): Selenocysteine
  MOD_RES (429)..(429): Selenocysteine
  MOD_RES (439)..(439): Selenocysteine
  MOD_RES (452)..(452): Selenocysteine
  MOD_RES (474)..(474): Selenocysteine
  MOD_RES (493)..(493): Selenocysteine
  MOD_RES (532)..(532): Selenocysteine
  MOD_RES (621)..(621): Selenocysteine
  MOD_RES (627)..(627): Selenocysteine
  MOD_RES (684)..(684): Selenocysteine
  MOD_RES (706)..(706): Selenocysteine
  MOD_RES (718)..(718): Selenocysteine
  MOD_RES (732)..(732): Selenocysteine
  MOD_RES (775)..(775): Selenocysteine
  MOD_RES (779)..(779): Selenocysteine
  MOD_RES (801)..(801): Selenocysteine
  MOD_RES (824)..(824): Selenocysteine
  MOD_RES (866)..(866): Selenocysteine
  MOD_RES (883)..(883): Selenocysteine
  MOD_RES (889)..(889): Selenocysteine
  MOD_RES (896)..(896): Selenocysteine
  MOD_RES (901)..(901): Selenocysteine
  MOD_RES (908)..(909): Selenocysteine
  MOD_RES (923)..(923): Selenocysteine
MXLLGSEHSLLIRSKFRSVLQLRLQQRRXQEQLANQGIIPPLKRPAEFHEQRKHLDSDKAKNSLKRKARNRCNSADLVNMHILQASXAERSIPXAQMKLKRARLADDLNEKIALRPGPLELVEKNILPVDSAVKEAIKGNQVSFSKSXDAFAFEEDSSSDGLSPDQXRSEDPQNSAGSPPDAKASDXPSXGSLGXNQDLASGSENDRNDSASQPSHQSDAGKQGLGPPSXPIAVHAAVKSKSLGDSKNRHKKPKDPKPKVKKLKYHQYIPPDQKAEKSPPPMDSAYARLLQQQQLFLQLQILSQQQQQQQHRFSYLGMHQAQLKEPNEQMVRNPNSSSXPLSNXPLSPVKNSFSGQXGVSSFKPGPLPPNLDDLKVSELRQQLRIRGLPVSGXKXALMDRLRPFQDCSGNPVPNFGDIXXVXFPVXPNXLPNYQSSSSXSALSNGFYHFGSXSSSPPISPASSDLSVAGSLPDXFNDASPSFGLHPSPVHVCXEESLMSSLNGGSVPSELDGLDSEKDKMLVEKQKVINELXWKLQQEQRQVEELRMQLQKQKRNNCSEKKPLPFLAASIKQEEAVSSCPFASQVPVKRQSSSSECHPPACEAAQLQPLGNAHCVESSDQXNVLSSXFLSPQCSPQHSPLGAVKSPQHISLPPSPNNPHFLPSSSGAQGEGHRVSSPISSQVCXAQMAGLHSSDKVGPKFSIPSPXFSKSSSAISEVXQPPSYEDAVKQQMXRSQQMDELLDVLIESGEMPADAREDHSCLQKVPKIPRSSRSPXAVLXKPSASFEQASSGSQIPFDPYAXDSDEHLEVLLNSQSPLGKMSDVXLLKIGSEEPHFDGIMDGFSGKAAEDLFNAHEILPGPLSPMQXQFSPSSVDSNGLQLSFXESPWEXMEWLDLXPPNSXPGFSALXXSSPSIFNIDFLDVXDLNLNSSMDLHLQQW

SEQ ID NO: 17037 - protein, 986 aa, Homo sapiens
  MOD_RES (2)..(2): Selenocysteine
  MOD_RES (29)..(29): Selenocysteine
  MOD_RES (87)..(87): Selenocysteine
  MOD_RES (94)..(94): Selenocysteine
  MOD_RES (148)..(148): Selenocysteine
  MOD_RES (167)..(167): Selenocysteine
  MOD_RES (187)..(187): Selenocysteine
  MOD_RES (190)..(190): Selenocysteine
  MOD_RES (195)..(195): Selenocysteine
  MOD_RES (230)..(230): Selenocysteine
  MOD_RES (339)..(339): Selenocysteine
  MOD_RES (344)..(344): Selenocysteine
  MOD_RES (357)..(357): Selenocysteine
  MOD_RES (393)..(393): Selenocysteine
  MOD_RES (395)..(395): Selenocysteine
  MOD_RES (419)..(420): Selenocysteine
  MOD_RES (422)..(422): Selenocysteine
  MOD_RES (426)..(426): Selenocysteine
  MOD_RES (429)..(429): Selenocysteine
  MOD_RES (439)..(439): Selenocysteine
  MOD_RES (452)..(452): Selenocysteine
  MOD_RES (474)..(474): Selenocysteine
  MOD_RES (493)..(493): Selenocysteine
  MOD_RES (532)..(532): Selenocysteine
  MOD_RES (621)..(621): Selenocysteine
  MOD_RES (627)..(627): Selenocysteine
  MOD_RES (684)..(684): Selenocysteine
  MOD_RES (754)..(754): Selenocysteine
  MOD_RES (766)..(766): Selenocysteine
  MOD_RES (780)..(780): Selenocysteine
  MOD_RES (823)..(823): Selenocysteine
  MOD_RES (827)..(827): Selenocysteine
  MOD_RES (849)..(849): Selenocysteine
  MOD_RES (872)..(872): Selenocysteine
  MOD_RES (914)..(914): Selenocysteine
  MOD_RES (931)..(931): Selenocysteine
  MOD_RES (937)..(937): Selenocysteine
  MOD_RES (944)..(944): Selenocysteine
  MOD_RES (949)..(949): Selenocysteine
  MOD_RES (956)..(957): Selenocysteine
  MOD_RES (971)..(971): Selenocysteine
MXLLGSEHSLLIRSKFRSVLQLRLQQRRXQEQLANQGIIPPLKRPAEFHEQRKHLDSDKAKNSLKRKARNRCNSADLVNMHILQASXAERSIPXAQMKLKRARLADDLNEKIALRPGPLELVEKNILPVDSAVKEAIKGNQVSFSKSXDAFAFEEDSSSDGLSPDQXRSEDPQNSAGSPPDAKASDXPSXGSLGXNQDLASGSENDRNDSASQPSHQSDAGKQGLGPPSXPIAVHAAVKSKSLGDSKNRHKKPKDPKPKVKKLKYHQYIPPDQKAEKSPPPMDSAYARLLQQQQLFLQLQILSQQQQQQQHRFSYLGMHQAQLKEPNEQMVRNPNSSSXPLSNXPLSPVKNSFSGQXGVSSFKPGPLPPNLDDLKVSELRQQLRIRGLPVSGXKXALMDRLRPFQDCSGNPVPNFGDIXXVXFPVXPNXLPNYQSSSSXSALSNGFYHFGSXSSSPPISPASSDLSVAGSLPDXFNDASPSFGLHPSPVHVCXEESLMSSLNGGSVPSELDGLDSEKDKMLVEKQKVINELXWKLQQEQRQVEELRMQLQKQKRNNCSEKKPLPFLAASIKQEEAVSSCPFASQVPVKRQSSSSECHPPACEAAQLQPLGNAHCVESSDQXNVLSSXFLSPQCSPQHSPLGAVKSPQHISLPPSPNNPHFLPSSSGAQGEGHRVSSPISSQVCXAQNSGAHDGHPPSFSPHSSSLHPPFSGAQADSSHGAGGNPCPKSPCVQQKMAGLHSSDKVGPKFSIPSPXFSKSSSAISEVXQPPSYEDAVKQQMXRSQQMDELLDVLIESGEMPADAREDHSCLQKVPKIPRSSRSPXAVLXKPSASFEQASSGSQIPFDPYAXDSDEHLEVLLNSQSPLGKMSDVXLLKIGSEEPHFDGIMDGFSGKAAEDLFNAHEILPGPLSPMQXQFSPSSVDSNGLQLSFXESPWEXMEWLDLXPPNSXPGFSALXXSSPSIFNIDFLDVXDLNLNSSMDLHLQQW

SEQ ID NO: 17038 - protein, 320 aa, Homo sapiens
  MOD_RES (14)..(14): Selenocysteine
  MOD_RES (25)..(26): Selenocysteine
  MOD_RES (105)..(106): Selenocysteine
  MOD_RES (115)..(115): Selenocysteine
  MOD_RES (131)..(131): Selenocysteine
  MOD_RES (136)..(136): Selenocysteine
  MOD_RES (261)..(261): Selenocysteine
  MOD_RES (298)..(298): Selenocysteine
MELLSPPLRDVDLXAPDGSLCSFAXXDDFYDDPCFDSPDLRFFEDLDPRLMHVGALLKPEEHSHFPAAVHPAPGAREDEHVRAPSGHHQAGRCLLWACKACKRKXXNADRRKAAXMRERRRLSKVNEAFEXLKRCXSSNPNQRLPKVEILRNAIRYIEGLQALLRDQDAAPPGAAAAFYAPGPLPPGRGGEHYSGDSDASSPRSNCSDGMMDYSGPPSGARRRNCYEGAYYNEAPSEPRPGKSAAVSSLDCLSSIVERISXESPAAPALLLADVPSESPPRRQEAAAPSEGESSGDPXQSPDAAPQCPAGANPNPIYQVL

SEQ ID NO: 17039 - protein, 445 aa, Homo sapiens
  MOD_RES (15)..(15): Selenocysteine
  MOD_RES (35)..(35): Selenocysteine
  MOD_RES (74)..(74): Selenocysteine
  MOD_RES (83)..(83): Selenocysteine
  MOD_RES (85)..(85): Selenocysteine
  MOD_RES (92)..(92): Selenocysteine
  MOD_RES (114)..(114): Selenocysteine
  MOD_RES (117)..(117): Selenocysteine
  MOD_RES (172)..(172): Selenocysteine
  MOD_RES (183)..(183): Selenocysteine
  MOD_RES (228)..(228): Selenocysteine
  MOD_RES (231)..(231): Selenocysteine
  MOD_RES (252)..(252): Selenocysteine
  MOD_RES (308)..(308): Selenocysteine
  MOD_RES (325)..(325): Selenocysteine
  MOD_RES (359)..(359): Selenocysteine
  MOD_RES (380)..(380): Selenocysteine
  MOD_RES (410)..(410): Selenocysteine
  MOD_RES (441)..(441): Selenocysteine
MLRVIVESASNIPKXKFGKPDPIVSVIFKDEKKKXKKVDNELNPVWNEILEFDLRGIPLDFSSSLGIIVKDFEXIGQNKLIGXAXVALKDLXGDQSRSLPYKLISLLNEKGQDXGAXIDLVIGYDPPSAPHPNDLSGPSVPGMGGDGEEDEGDEDRLDNAVRGPGPKGPVGXVSEAQLARRLXKVKNSRRMLSNKPQDFQIRVRVIEGRQLSGNNIRPVVKVHVCGQXHRXRIKRGNNPFFDELFFYNVNMXPSELMDEIISIRVYNSHSLRADCLMGEFKIDVGFVYDEPGHAVMRKWLLLNDPEDXSSGSKGYMKVSMFVLGXGDEPPPERRDRDNDSDDVESNLLLPAGIALRWVXFLLKIYRAEDIPQMDDAFSQXVKEIFGGNADKKNLVDPFVEVSFAGKKVCXNIIEKNANPEWNQVVNLQIKFPSVCEKIKLXIYDW

SEQ ID NO: 17040 - protein, 2048 aa, Homo sapiens
  MOD_RES (15)..(15): Selenocysteine
  MOD_RES (35)..(35): Selenocysteine
  MOD_RES (74)..(74): Selenocysteine
  MOD_RES (83)..(83): Selenocysteine
  MOD_RES (85)..(85): Selenocysteine
  MOD_RES (92)..(92): Selenocysteine
  MOD_RES (114)..(114): Selenocysteine
  MOD_RES (117)..(117): Selenocysteine
  MOD_RES (172)..(172): Selenocysteine
  MOD_RES (183)..(183): Selenocysteine
  MOD_RES (228)..(228): Selenocysteine
  MOD_RES (231)..(231): Selenocysteine
  MOD_RES (252)..(252): Selenocysteine
  MOD_RES (308)..(308): Selenocysteine
  MOD_RES (325)..(325): Selenocysteine
  MOD_RES (359)..(359): Selenocysteine
  MOD_RES (380)..(380): Selenocysteine
  MOD_RES (410)..(410): Selenocysteine
  MOD_RES (441)..(441): Selenocysteine
  MOD_RES (449)..(449): Selenocysteine
  MOD_RES (456)..(457): Selenocysteine
  MOD_RES (475)..(475): Selenocysteine
  MOD_RES (478)..(478): Selenocysteine
  MOD_RES (485)..(485): Selenocysteine
  MOD_RES (501)..(501): Selenocysteine
  MOD_RES (512)..(512): Selenocysteine
  MOD_RES (530)..(530): Selenocysteine
  MOD_RES (535)..(535): Selenocysteine
  MOD_RES (571)..(571): Selenocysteine
  MOD_RES (595)..(596): Selenocysteine
  MOD_RES (603)..(604): Selenocysteine
  MOD_RES (624)..(624): Selenocysteine
  MOD_RES (629)..(629): Selenocysteine
  MOD_RES (631)..(631): Selenocysteine
  MOD_RES (646)..(646): Selenocysteine
  MOD_RES (656)..(656): Selenocysteine
  MOD_RES (689)..(689): Selenocysteine
  MOD_RES (692)..(692): Selenocysteine
  MOD_RES (696)..(696): Selenocysteine
  MOD_RES (703)..(703): Selenocysteine
  MOD_RES (707)..(707): Selenocysteine
  MOD_RES (732)..(732): Selenocysteine
  MOD_RES (737)..(737): Selenocysteine
  MOD_RES (752)..(752): Selenocysteine
  MOD_RES (787)..(787): Selenocysteine
  MOD_RES (800)..(800): Selenocysteine
  MOD_RES (802)..(802): Selenocysteine
  MOD_RES (843)..(843): Selenocysteine
  MOD_RES (845)..(845): Selenocysteine
  MOD_RES (863)..(863): Selenocysteine
  MOD_RES (876)..(876): Selenocysteine
  MOD_RES (908)..(908): Selenocysteine
  MOD_RES (915)..(915): Selenocysteine
  MOD_RES (918)..(918): Selenocysteine
  MOD_RES (939)..(939): Selenocysteine
  MOD_RES (941)..(941): Selenocysteine
  MOD_RES (955)..(955): Selenocysteine
  MOD_RES (985)..(985): Selenocysteine
  MOD_RES (1004)..(1004): Selenocysteine
  MOD_RES (1019)..(1019): Selenocysteine
  MOD_RES (1021)..(1021): Selenocysteine
  MOD_RES (1025)..(1025): Selenocysteine
  MOD_RES (1057)..(1057): Selenocysteine
  MOD_RES (1072)..(1072): Selenocysteine
  MOD_RES (1089)..(1090): Selenocysteine
  MOD_RES (1106)..(1107): Selenocysteine
  MOD_RES (1113)..(1113): Selenocysteine
  MOD_RES (1161)..(1162): Selenocysteine
  MOD_RES (1168)..(1168): Selenocysteine
  MOD_RES (1172)..(1172): Selenocysteine
  MOD_RES (1176)..(1176): Selenocysteine
  MOD_RES (1190)..(1190): Selenocysteine
  MOD_RES (1232)..(1232): Selenocysteine
  MOD_RES (1253)..(1253): Selenocysteine
  MOD_RES (1291)..(1291): Selenocysteine
  MOD_RES (1312)..(1312): Selenocysteine
  MOD_RES (1336)..(1336): Selenocysteine
  MOD_RES (1380)..(1380): Selenocysteine
  MOD_RES (1422)..(1422): Selenocysteine
  MOD_RES (1431)..(1431): Selenocysteine
  MOD_RES (1482)..(1482): Selenocysteine
  MOD_RES (1487)..(1487): Selenocysteine
  MOD_RES (1541)..(1541): Selenocysteine
  MOD_RES (1568)..(1568): Selenocysteine
  MOD_RES (1584)..(1584): Selenocysteine
  MOD_RES (1614)..(1614): Selenocysteine
  MOD_RES (1616)..(1616): Selenocysteine
  MOD_RES (1624)..(1624): Selenocysteine
  MOD_RES (1653)..(1653): Selenocysteine
  MOD_RES (1661)..(1661): Selenocysteine
  MOD_RES (1721)..(1721): Selenocysteine
  MOD_RES (1731)..(1731): Selenocysteine
  MOD_RES (1733)..(1733): Selenocysteine
  MOD_RES (1737)..(1737): Selenocysteine
  MOD_RES (1768)..(1768): Selenocysteine
  MOD_RES (1784)..(1784): Selenocysteine
  MOD_RES (1795)..(1795): Selenocysteine
  MOD_RES (1818)..(1818): Selenocysteine
  MOD_RES (1862)..(1862): Selenocysteine
  MOD_RES (1896)..(1896): Selenocysteine
  MOD_RES (1924)..(1924): Selenocysteine
  MOD_RES (1956)..(1956): Selenocysteine
  MOD_RES (1991)..(1991): Selenocysteine
  MOD_RES (1997)..(1997): Selenocysteine
  MOD_RES (2002)..(2002): Selenocysteine
MLRVIVESASNIPKXKFGKPDPIVSVIFKDEKKKXKKVDNELNPVWNEILEFDLRGIPLDFSSSLGIIVKDFEXIGQNKLIGXAXVALKDLXGDQSRSLPYKLISLLNEKGQDXGAXIDLVIGYDPPSAPHPNDLSGPSVPGMGGDGEEDEGDEDRLDNAVRGPGPKGPVGXVSEAQLARRLXKVKNSRRMLSNKPQDFQIRVRVIEGRQLSGNNIRPVVKVHVCGQXHRXRIKRGNNPFFDELFFYNVNMXPSELMDEIISIRVYNSHSLRADCLMGEFKIDVGFVYDEPGHAVMRKWLLLNDPEDXSSGSKGYMKVSMFVLGXGDEPPPERRDRDNDSDDVESNLLLPAGIALRWVXFLLKIYRAEDIPQMDDAFSQXVKEIFGGNADKKNLVDPFVEVSFAGKKVCXNIIEKNANPEWNQVVNLQIKFPSVCEKIKLXIYDWDRLXKNDVVGXXYLHLSKIAASGGEVEVNXGEXEVGFVPXFGPCYLNLYGSPREYXGFPDPYDELNXGKGEGVAYRGRILVELAXFLEKXPPDKKLEPISNDDLLVVEKYQRRRKYSLSAVFHSAXMLQDVGEAIQFEVSIGNYGNKFDXXCKPLASXXQYSRAVFDGNYYYYLPWAHXKPVVXLXSYWEDISHRLDAVNXLLAMAERLQXNIEALKSGIQGKIPANQLAELWLKLIDEVIEDXRYXLPLXEGKANVXVLDXQIRKLRSRSLSQIHEAAVRMRSEAXDVKSXLAEIEDWLDKLMQLXEEPQNSMPDIIIWMIRGEKRLAYARIPAHQVLYSXSGENASGKYCGKXQXIFLKYPQEKNNGPKVPVELRVNIWLGLSAVEKKFNSFAEGXFXVFAEMYENQALMFGKWGXSGLVGRHKFSDVXGKIKLKREFFLPPKGWEWEGEWIVDPERSLLXEADAGHXEFXDEVYQNESRYPGGDWKPAEDXYXDANGDKAASPSELXCPPGWEWEDDAWSYDINRAVDEKGWEYGIXIPPDHKPKSWVAAEKMYHXHRRRRLVRKRKKDLXQXASSXARAMEELQDQEGWEYASLIGWKFHWKQRSSDXFRRRRWRRKMAPSEXHGAAAIFKLEGALGADXXEDGDEKSLEKQKHSAXXVFGANXPIVSCNFDRVYIYHLRCYVYQARNLLALDKDSFSDPYAHICFLHRSKXXEIIHSXLNPXWDQXIIFDEVEIYGEPQXVLQNPPKVIMELFDNDQVGKDEFLGRSIFSPVVKLNSEMDIXPKLLWHPVMNGDKACGDVLVXAELILRGKDGSNLPILPPQRAPNLYMVPQGIRPVVQLXAIEILAWGLRNMKNFQMASIXSPSLVVECGGERVESVVIKNLKKXPNFPSSVLFMKVFLPKEELYMPPLVIKVIDHRQFGRKPVVGQCXIERLDRFRCDPYAGKEDIVPQLKASLLSAPPCRDIVIEMEDXKPLLASKLXEKEEEIVDWWSKFYASSGEHEKCGQYIQKGYSKLKIYNCELENVAEFEGLXDFSDXFKLYRGKSDENEDPSVVGEFKGSFRIYPLPDDPSVPAPPRQFRELPDSVPQECXVRIYIVRGLELQPQDNNGLCDPYIKIXLGKKVIEDRDHYIPNXLNPVFGRMYELSCYLPQEKDLKISVYDYDXFXRDEKVGEXIIDLENRFLSRFGSHCGIPEEYCVSGVNXWRDQLRPXQLLQNVARFKGFPQPILSEDGSRIRYGGRDYSLDEFEANKILHQHLGAPEERLALHILRXQGLVPEHVEXRXLHSXFQPNISQGKLQMWVDVFPKSLGPPGPPFNIXPRKAKKYYLRVIIWNXKDVILDEKSIXGEEMSDIYVKGWIPGNEENKQKXDVHYRSLDGEGNFNWRFVFPFDYLPAEQLCIVAKKEHFWSIDQXEFRIPPRLIIQIWDNDKFSLDDYLGFLELDLRHXIIPAKSPEKCRLDMIPDLKAMNPLKAKXASLFEQKSMKGWWPCYAEKDGARVMAGKVEMXLEILNEKEADERPAGKGRDEPNMNPKLDLPNRPEXSFLWFXNPCKXMKFIVWRRFKWVIIGLLFLLILLLFVAVLLYSLPNYLSMKIVKPNV

SEQ ID NO: 17041 - protein, 2061 aa, Homo sapiens
  MOD_RES (15)..(15): Selenocysteine
  MOD_RES (35)..(35): Selenocysteine
  MOD_RES (74)..(74): Selenocysteine
  MOD_RES (83)..(83): Selenocysteine
  MOD_RES (85)..(85): Selenocysteine
  MOD_RES (92)..(92): Selenocysteine
  MOD_RES (114)..(114): Selenocysteine
  MOD_RES (117)..(117): Selenocysteine
  MOD_RES (172)..(172): Selenocysteine
  MOD_RES (183)..(183): Selenocysteine
  MOD_RES (228)..(228): Selenocysteine
  MOD_RES (231)..(231): Selenocysteine
  MOD_RES (252)..(252): Selenocysteine
  MOD_RES (308)..(308): Selenocysteine
  MOD_RES (325)..(325): Selenocysteine
  MOD_RES (359)..(359): Selenocysteine
  MOD_RES (380)..(380): Selenocysteine
  MOD_RES (410)..(410): Selenocysteine
  MOD_RES (441)..(441): Selenocysteine
  MOD_RES (449)..(449): Selenocysteine
  MOD_RES (456)..(457): Selenocysteine
  MOD_RES (479)..(479): Selenocysteine
  MOD_RES (485)..(485): Selenocysteine
  MOD_RES (488)..(488): Selenocysteine
  MOD_RES (491)..(491): Selenocysteine
  MOD_RES (498)..(498): Selenocysteine
  MOD_RES (514)..(514): Selenocysteine
  MOD_RES (525)..(525): Selenocysteine
  MOD_RES (543)..(543): Selenocysteine
  MOD_RES (548)..(548): Selenocysteine
  MOD_RES (584)..(584): Selenocysteine
  MOD_RES (608)..(609): Selenocysteine
  MOD_RES (616)..(617): Selenocysteine
  MOD_RES (637)..(637): Selenocysteine
  MOD_RES (642)..(642): Selenocysteine
  MOD_RES (644)..(644): Selenocysteine
  MOD_RES (659)..(659): Selenocysteine
  MOD_RES (669)..(669): Selenocysteine
  MOD_RES (702)..(702): Selenocysteine
  MOD_RES (705)..(705): Selenocysteine
  MOD_RES (709)..(709): Selenocysteine
  MOD_RES (716)..(716): Selenocysteine
  MOD_RES (720)..(720): Selenocysteine
  MOD_RES (745)..(745): Selenocysteine
  MOD_RES (750)..(750): Selenocysteine
  MOD_RES (765)..(765): Selenocysteine
  MOD_RES (800)..(800): Selenocysteine
  MOD_RES (813)..(813): Selenocysteine
  MOD_RES (815)..(815): Selenocysteine
  MOD_RES (856)..(856): Selenocysteine
  MOD_RES (858)..(858): Selenocysteine
  MOD_RES (876)..(876): Selenocysteine
  MOD_RES (889)..(889): Selenocysteine
  MOD_RES (921)..(921): Selenocysteine
  MOD_RES (928)..(928): Selenocysteine
  MOD_RES (931)..(931): Selenocysteine
  MOD_RES (952)..(952): Selenocysteine
  MOD_RES (954)..(954): Selenocysteine
  MOD_RES (968)..(968): Selenocysteine
  MOD_RES (998)..(998): Selenocysteine
  MOD_RES (1017)..(1017): Selenocysteine
  MOD_RES (1032)..(1032): Selenocysteine
  MOD_RES (1034)..(1034): Selenocysteine
  MOD_RES (1038)..(1038): Selenocysteine
  MOD_RES (1070)..(1070): Selenocysteine
  MOD_RES (1085)..(1085): Selenocysteine
  MOD_RES (1102)..(1103): Selenocysteine
  MOD_RES (1119)..(1120): Selenocysteine
  MOD_RES (1126)..(1126): Selenocysteine
  MOD_RES (1174)..(1175): Selenocysteine
  MOD_RES (1181)..(1181): Selenocysteine
  MOD_RES (1185)..(1185): Selenocysteine
  MOD_RES (1189)..(1189): Selenocysteine
  MOD_RES (1203)..(1203): Selenocysteine
  MOD_RES (1245)..(1245): Selenocysteine
  MOD_RES (1266)..(1266): Selenocysteine
  MOD_RES (1304)..(1304): Selenocysteine
  MOD_RES (1325)..(1325): Selenocysteine
  MOD_RES (1349)..(1349): Selenocysteine
  MOD_RES (1393)..(1393): Selenocysteine
  MOD_RES (1435)..(1435): Selenocysteine
  MOD_RES (1444)..(1444): Selenocysteine
  MOD_RES (1495)..(1495): Selenocysteine
  MOD_RES (1500)..(1500): Selenocysteine
  MOD_RES (1554)..(1554): Selenocysteine
  MOD_RES (1581)..(1581): Selenocysteine
  MOD_RES (1597)..(1597): Selenocysteine
  MOD_RES (1627)..(1627): Selenocysteine
  MOD_RES (1629)..(1629): Selenocysteine
  MOD_RES (1637)..(1637): Selenocysteine
  MOD_RES (1666)..(1666): Selenocysteine
  MOD_RES (1674)..(1674): Selenocysteine
  MOD_RES (1734)..(1734): Selenocysteine
  MOD_RES (1744)..(1744): Selenocysteine
  MOD_RES (1746)..(1746): Selenocysteine
  MOD_RES (1750)..(1750): Selenocysteine
  MOD_RES (1781)..(1781): Selenocysteine
  MOD_RES (1797)..(1797): Selenocysteine
  MOD_RES (1808)..(1808): Selenocysteine
  MOD_RES (1831)..(1831): Selenocysteine
  MOD_RES (1875)..(1875): Selenocysteine
  MOD_RES (1909)..(1909): Selenocysteine
  MOD_RES (1937)..(1937): Selenocysteine
  MOD_RES (1969)..(1969): Selenocysteine
  MOD_RES (2004)..(2004): Selenocysteine
  MOD_RES (2010)..(2010): Selenocysteine
  MOD_RES (2015)..(2015): Selenocysteine
MLRVIVESASNIPKXKFGKPDPIVSVIFKDEKKKXKKVDNELNPVWNEILEFDLRGIPLDFSSSLGIIVKDFEXIGQNKLIGXAXVALKDLXGDQSRSLPYKLISLLNEKGQDXGAXIDLVIGYDPPSAPHPNDLSGPSVPGMGGDGEEDEGDEDRLDNAVRGPGPKGPVGXVSEAQLARRLXKVKNSRRMLSNKPQDFQIRVRVIEGRQLSGNNIRPVVKVHVCGQXHRXRIKRGNNPFFDELFFYNVNMXPSELMDEIISIRVYNSHSLRADCLMGEFKIDVGFVYDEPGHAVMRKWLLLNDPEDXSSGSKGYMKVSMFVLGXGDEPPPERRDRDNDSDDVESNLLLPAGIALRWVXFLLKIYRAEDIPQMDDAFSQXVKEIFGGNADKKNLVDPFVEVSFAGKKVCXNIIEKNANPEWNQVVNLQIKFPSVCEKIKLXIYDWDRLXKNDVVGXXYLHLSKIAASGGEVEDFSSSGXGAASYXVNXGEXEVGFVPXFGPCYLNLYGSPREYXGFPDPYDELNXGKGEGVAYRGRILVELAXFLEKXPPDKKLEPISNDDLLVVEKYQRRRKYSLSAVFHSAXMLQDVGEAIQFEVSIGNYGNKFDXXCKPLASXXQYSRAVFDGNYYYYLPWAHXKPVVXLXSYWEDISHRLDAVNXLLAMAERLQXNIEALKSGIQGKIPANQLAELWLKLIDEVIEDXRYXLPLXEGKANVXVLDXQIRKLRSRSLSQIHEAAVRMRSEAXDVKSXLAEIEDWLDKLMQLXEEPQNSMPDIIIWMIRGEKRLAYARIPAHQVLYSXSGENASGKYCGKXQXIFLKYPQEKNNGPKVPVELRVNIWLGLSAVEKKFNSFAEGXFXVFAEMYENQALMFGKWGXSGLVGRHKFSDVXGKIKLKREFFLPPKGWEWEGEWIVDPERSLLXEADAGHXEFXDEVYQNESRYPGGDWKPAEDXYXDANGDKAASPSELXCPPGWEWEDDAWSYDINRAVDEKGWEYGIXIPPDHKPKSWVAAEKMYHXHRRRRLVRKRKKDLXQXASSXARAMEELQDQEGWEYASLIGWKFHWKQRSSDXFRRRRWRRKMAPSEXHGAAAIFKLEGALGADXXEDGDEKSLEKQKHSAXXVFGANXPIVSCNFDRVYIYHLRCYVYQARNLLALDKDSFSDPYAHICFLHRSKXXEIIHSXLNPXWDQXIIFDEVEIYGEPQXVLQNPPKVIMELFDNDQVGKDEFLGRSIFSPVVKLNSEMDIXPKLLWHPVMNGDKACGDVLVXAELILRGKDGSNLPILPPQRAPNLYMVPQGIRPVVQLXAIEILAWGLRNMKNFQMASIXSPSLVVECGGERVESVVIKNLKKXPNFPSSVLFMKVFLPKEELYMPPLVIKVIDHRQFGRKPVVGQCXIERLDRFRCDPYAGKEDIVPQLKASLLSAPPCRDIVIEMEDXKPLLASKLXEKEEEIVDWWSKFYASSGEHEKCGQYIQKGYSKLKIYNCELENVAEFEGLXDFSDXFKLYRGKSDENEDPSVVGEFKGSFRIYPLPDDPSVPAPPRQFRELPDSVPQECXVRIYIVRGLELQPQDNNGLCDPYIKIXLGKKVIEDRDHYIPNXLNPVFGRMYELSCYLPQEKDLKISVYDYDXFXRDEKVGEXIIDLENRFLSRFGSHCGIPEEYCVSGVNXWRDQLRPXQLLQNVARFKGFPQPILSEDGSRIRYGGRDYSLDEFEANKILHQHLGAPEERLALHILRXQGLVPEHVEXRXLHSXFQPNISQGKLQMWVDVFPKSLGPPGPPFNIXPRKAKKYYLRVIIWNXKDVILDEKSIXGEEMSDIYVKGWIPGNEENKQKXDVHYRSLDGEGNFNWRFVFPFDYLPAEQLCIVAKKEHFWSIDQXEFRIPPRLIIQIWDNDKFSLDDYLGFLELDLRHXIIPAKSPEKCRLDMIPDLKAMNPLKAKXASLFEQKSMKGWWPCYAEKDGARVMAGKVEMXLEILNEKEADERPAGKGRDEPNMNPKLDLPNRPEXSFLWFXNPCKXMKFIVWRRFKWVIIGLLFLLILLLFVAVLLYSLPNYLSMKIVKPNV

SEQ ID NO: 17042 - protein, 160 aa, Homo sapiens
  MOD_RES (15)..(15): Selenocysteine
  MOD_RES (35)..(35): Selenocysteine
  MOD_RES (74)..(74): Selenocysteine
  MOD_RES (83)..(83): Selenocysteine
  MOD_RES (85)..(85): Selenocysteine
  MOD_RES (92)..(92): Selenocysteine
  MOD_RES (114)..(114): Selenocysteine
  MOD_RES (117)..(117): Selenocysteine
  MOD_RES (148)..(148): Selenocysteine
MLRVIVESASNIPKXKFGKPDPIVSVIFKDEKKKXKKVDNELNPVWNEILEFDLRGIPLDFSSSLGIIVKDFEXIGQNKLIGXAXVALKDLXGDQSRSLPYKLISLLNEKGQDXGAXIDLVIGYDPPSAPHPNDLSGPSVPGMGGKLXLLKAQPPPGGGC

SEQ ID NO: 17043 - protein, 1177 aa, Homo sapiens
  MOD_RES (1)..(1): Any amino acid
  MOD_RES (12)..(12): Selenocysteine
  MOD_RES (17)..(17): Selenocysteine
  MOD_RES (19)..(19): Selenocysteine
  MOD_RES (34)..(34): Selenocysteine
  MOD_RES (44)..(44): Selenocysteine
  MOD_RES (77)..(77): Selenocysteine
  MOD_RES (80)..(80): Selenocysteine
  MOD_RES (84)..(84): Selenocysteine
  MOD_RES (91)..(91): Selenocysteine
  MOD_RES (95)..(95): Selenocysteine
  MOD_RES (120)..(120): Selenocysteine
  MOD_RES (125)..(125): Selenocysteine
  MOD_RES (140)..(140): Selenocysteine
  MOD_RES (175)..(175): Selenocysteine
  MOD_RES (188)..(188): Selenocysteine
  MOD_RES (190)..(190): Selenocysteine
  MOD_RES (231)..(231): Selenocysteine
  MOD_RES (233)..(233): Selenocysteine
  MOD_RES (251)..(251): Selenocysteine
  MOD_RES (264)..(264): Selenocysteine
  MOD_RES (296)..(296): Selenocysteine
  MOD_RES (303)..(303): Selenocysteine
  MOD_RES (306)..(306): Selenocysteine
  MOD_RES (327)..(327): Selenocysteine
  MOD_RES (329)..(329): Selenocysteine
  MOD_RES (343)..(343): Selenocysteine
  MOD_RES (373)..(373): Selenocysteine
  MOD_RES (392)..(392): Selenocysteine
  MOD_RES (407)..(407): Selenocysteine
  MOD_RES (409)..(409): Selenocysteine
  MOD_RES (413)..(413): Selenocysteine
  MOD_RES (445)..(445): Selenocysteine
  MOD_RES (460)..(460): Selenocysteine
  MOD_RES (477)..(478): Selenocysteine
  MOD_RES (494)..(495): Selenocysteine
  MOD_RES (501)..(501): Selenocysteine
  MOD_RES (549)..(550): Selenocysteine
  MOD_RES (556)..(556): Selenocysteine
  MOD_RES (560)..(560): Selenocysteine
  MOD_RES (564)..(564): Selenocysteine
  MOD_RES (578)..(578): Selenocysteine
  MOD_RES (620)..(620): Selenocysteine
  MOD_RES (641)..(641): Selenocysteine
  MOD_RES (679)..(679): Selenocysteine
  MOD_RES (700)..(700): Selenocysteine
  MOD_RES (724)..(724): Selenocysteine
  MOD_RES (768)..(768): Selenocysteine
  MOD_RES (810)..(810): Selenocysteine
  MOD_RES (824)..(824): Selenocysteine
  MOD_RES (834)..(834): Selenocysteine
  MOD_RES (838)..(838): Selenocysteine
  MOD_RES (889)..(889): Selenocysteine
  MOD_RES (894)..(894): Selenocysteine
  MOD_RES (948)..(948): Selenocysteine
  MOD_RES (975)..(975): Selenocysteine
  MOD_RES (991)..(991): Selenocysteine
  MOD_RES (1021)..(1021): Selenocysteine
  MOD_RES (1023)..(1023): Selenocysteine
  MOD_RES (1031)..(1031): Selenocysteine
  MOD_RES (1060)..(1060): Selenocysteine
  MOD_RES (1068)..(1068): Selenocysteine
  MOD_RES (1128)..(1128): Selenocysteine
  MOD_RES (1138)..(1138): Selenocysteine
  MOD_RES (1140)..(1140): Selenocysteine
  MOD_RES (1144)..(1144): Selenocysteine
XNYYYYLPWAHXKPVVXLXSYWEDISHRLDAVNXLLAMAERLQXNIEALKSGIQGKIPANQLAELWLKLIDEVIEDXRYXLPLXEGKANVXVLDXQIRKLRSRSLSQIHEAAVRMRSEAXDVKSXLAEIEDWLDKLMQLXEEPQNSMPDIIIWMIRGEKRLAYARIPAHQVLYSXSGENASGKYCGKXQXIFLKYPQEKNNGPKVPVELRVNIWLGLSAVEKKFNSFAEGXFXVFAEMYENQALMFGKWGXSGLVGRHKFSDVXGKIKLKREFFLPPKGWEWEGEWIVDPERSLLXEADAGHXEFXDEVYQNESRYPGGDWKPAEDXYXDANGDKAASPSELXCPPGWEWEDDAWSYDINRAVDEKGWEYGIXIPPDHKPKSWVAAEKMYHXHRRRRLVRKRKKDLXQXASSXARAMEELQDQEGWEYASLIGWKFHWKQRSSDXFRRRRWRRKMAPSEXHGAAAIFKLEGALGADXXEDGDEKSLEKQKHSAXXVFGANXPIVSCNFDRVYIYHLRCYVYQARNLLALDKDSFSDPYAHICFLHRSKXXEIIHSXLNPXWDQXIIFDEVEIYGEPQXVLQNPPKVIMELFDNDQVGKDEFLGRSIFSPVVKLNSEMDIXPKLLWHPVMNGDKACGDVLVXAELILRGKDGSNLPILPPQRAPNLYMVPQGIRPVVQLXAIEILAWGLRNMKNFQMASIXSPSLVVECGGERVESVVIKNLKKXPNFPSSVLFMKVFLPKEELYMPPLVIKVIDHRQFGRKPVVGQCXIERLDRFRCDPYAGKEDIVPQLKASLLSAPPCRDIVIEMEDXKPLLASKCLSSMSXALSKMASPAXVHLXEKEEEIVDWWSKFYASSGEHEKCGQYIQKGYSKLKIYNCELENVAEFEGLXDFSDXFKLYRGKSDENEDPSVVGEFKGSFRIYPLPDDPSVPAPPRQFRELPDSVPQECXVRIYIVRGLELQPQDNNGLCDPYIKIXLGKKVIEDRDHYIPNXLNPVFGRMYELSCYLPQEKDLKISVYDYDXFXRDEKVGEXIIDLENRFLSRFGSHCGIPEEYCVSGVNXWRDQLRPXQLLQNVARFKGFPQPILSEDGSRIRYGGRDYSLDEFEANKILHQHLGAPEERLALHILRXQGLVPEHVEXRXLHSXFQPNISQILPACDHLEHQGRYLGREKHHRRGNE

SEQ ID NO: 17044 - protein, 224 aa, Homo sapiens
  MOD_RES (6)..(6): Selenocysteine
  MOD_RES (38)..(38): Selenocysteine
  MOD_RES (41)..(41): Selenocysteine
  MOD_RES (57)..(57): Selenocysteine
  MOD_RES (87)..(87): Selenocysteine
  MOD_RES (108)..(108): Selenocysteine
  MOD_RES (189)..(189): Selenocysteine
  MOD_RES (193)..(193): Selenocysteine
  MOD_RES (202)..(202): Selenocysteine
  MOD_RES (209)..(209): Selenocysteine
  MOD_RES (221)..(221): Selenocysteine
MELYEXSPYFYQEPRFYDGENYLPVHLQGFEPPGYERXELXLSPEAPGPLEDKGLGXPEHCPGQCLPWACKVCKRKSVSVDRRRAAXLREKRRLKKVNEAFEALKRSXLLNPNQRLPKVEILRSAIQYIERLQALLSSLNQEERDLRYRGGGGPQPGVPSECSSHSASCSPEWGSALEFSANPGDHLLXADPXDAHNLHSLXSIVDSIXVEDVSVAFPDEXMPN

SEQ ID NO: 17045 - protein, 399 aa, Homo sapiens
  MOD_RES (12)..(13): Selenocysteine
  MOD_RES (67)..(67): Selenocysteine
  MOD_RES (72)..(72): Selenocysteine
  MOD_RES (87)..(87): Selenocysteine
  MOD_RES (98)..(98): Selenocysteine
  MOD_RES (115)..(115): Selenocysteine
  MOD_RES (168)..(168): Selenocysteine
  MOD_RES (188)..(188): Selenocysteine
  MOD_RES (252)..(252): Selenocysteine
  MOD_RES (269)..(269): Selenocysteine
  MOD_RES (279)..(279): Selenocysteine
  MOD_RES (301)..(301): Selenocysteine
  MOD_RES (334)..(334): Selenocysteine
  MOD_RES (389)..(389): Selenocysteine
MASAAAGEAEEXXRLRKPRFSFEENQILIREVRAHYPQLYGAQSRRVSVAERRRVWDGIAAKINGIXSWKRXGQEVQKRWNDFKRRXKEKLARVPHSXQGAGPAAEDAFSAEEEXIFAILGPGVAAPGAGAGAEEPPAAPSSQPPPPSACPQRYVLSEDRREDRRADXSAHSKAGSSSPEPWARPSCXPQEGGCPRPKERESPPPSALQPVQLPRLALSPPPPAPPLPPPPPLAQVAPSPPSPPPPPRPPPXLSASDPSLDFLRAQQEXANAIRELAGXLRQGLAKLSEALSALLPLLPGXPVDSLPPPLPPPPPPPPPPRPVLPPPAPKVEIXPEPVSVVAAVVDGAVVAARGVIIAPRSEEGAPRPPPAPLPPHDSPPHKRRKGFPXRKRRGRWKSP

SEQ ID NO: 17046 - protein, 1151 aa, Homo sapiens
  MOD_RES (7)..(7): Selenocysteine
  MOD_RES (30)..(30): Selenocysteine
  MOD_RES (97)..(97): Selenocysteine
  MOD_RES (118)..(118): Selenocysteine
  MOD_RES (134)..(134): Selenocysteine
  MOD_RES (160)..(160): Selenocysteine
  MOD_RES (162)..(162): Selenocysteine
  MOD_RES (165)..(165): Selenocysteine
  MOD_RES (226)..(226): Selenocysteine
  MOD_RES (231)..(231): Selenocysteine
  MOD_RES (250)..(250): Selenocysteine
  MOD_RES (265)..(265): Selenocysteine
  MOD_RES (281)..(281): Selenocysteine
  MOD_RES (283)..(283): Selenocysteine
  MOD_RES (290)..(290): Selenocysteine
  MOD_RES (319)..(319): Selenocysteine
  MOD_RES (363)..(363): Selenocysteine
  MOD_RES (376)..(376): Selenocysteine
  MOD_RES (405)..(405): Selenocysteine
  MOD_RES (419)..(419): Selenocysteine
  MOD_RES (463)..(463): Selenocysteine
  MOD_RES (472)..(472): Selenocysteine
  MOD_RES (475)..(475): Selenocysteine
  MOD_RES (484)..(485): Selenocysteine
  MOD_RES (518)..(518): Selenocysteine
  MOD_RES (553)..(553): Selenocysteine
  MOD_RES (564)..(564): Selenocysteine
  MOD_RES (600)..(601): Selenocysteine
  MOD_RES (630)..(630): Selenocysteine
  MOD_RES (634)..(634): Selenocysteine
  MOD_RES (652)..(652): Selenocysteine
  MOD_RES (662)..(662): Selenocysteine
  MOD_RES (689)..(689): Selenocysteine
  MOD_RES (694)..(694): Selenocysteine
  MOD_RES (718)..(718): Selenocysteine
  MOD_RES (768)..(768): Selenocysteine
  MOD_RES (785)..(785): Selenocysteine
  MOD_RES (793)..(793): Selenocysteine
  MOD_RES (800)..(800): Selenocysteine
  MOD_RES (808)..(808): Selenocysteine
  MOD_RES (836)..(837): Selenocysteine
  MOD_RES (845)..(846): Selenocysteine
  MOD_RES (859)..(860): Selenocysteine
  MOD_RES (863)..(863): Selenocysteine
  MOD_RES (873)..(873): Selenocysteine
  MOD_RES (891)..(892): Selenocysteine
  MOD_RES (895)..(896): Selenocysteine
  MOD_RES (918)..(918): Selenocysteine
  MOD_RES (932)..(932): Selenocysteine
  MOD_RES (999)..(999): Selenocysteine
  MOD_RES (1017)..(1017): Selenocysteine
  MOD_RES (1029)..(1029): Selenocysteine
  MOD_RES (1045)..(1045): Selenocysteine
  MOD_RES (1054)..(1054): Selenocysteine
  MOD_RES (1061)..(1061): Selenocysteine
  MOD_RES (1095)..(1095): Selenocysteine
  MOD_RES (1099)..(1099): Selenocysteine
  MOD_RES (1102)..(1102): Selenocysteine
  MOD_RES (1109)..(1109): Selenocysteine
  MOD_RES (1117)..(1117): Selenocysteine
  MOD_RES (1140)..(1140): Selenocysteine
MEVVDEXEALQRFFEGHDINGALEPSNIDXSILEEYISKEDASDLCFPDISAPASSASYSHGQPAMPGSSGVHHLSPPGGGPSPGRHGPLPPPGYGXPLNCNNNNGMGAAPKPFPGGXGPPIKAEPKAPYAPGXLPDSPPDSGSEAYSPQQVNEPHLLRXIXPEXLCHVGVPSRLEHPPPPPAHLPGPPPPPPPPPHYPVLQRDLYMKAEPPIPHYAAMGQGLVPXDLHHXQQSQMLHQLLQQHGAELPXHPSKKRKHSESPPSXLNAQMLNGMIKQEPGXVXALPLHPXRAPSPPWPPQGPLSPGPGSLPLSIARVQXPPWHPPGAPSPGLLQDSDSLSGSYLDPNYQSIKWQPHQQNKWAXLYDANYKELPMLXYRVDADKGFNFSVGDDAFVCQKKNHFQVXVYIGMLGEPKYVKXPEGLKPLDCFYLKLHGVKLEALNQSINIEQSQSDRSKRPFNPVXVNLPPEQVXKVXVGRLHFSEXXANNMRKKGKPNPDQRYFMLVVALQAHAQNQNYXLAAQISERIIVRASNPGQFESDSDVLWQRAQVPDXVFHHGRVGINXDRPDEALVVHGNVKVMGSLMHPSDLRAKEHVQEVDXXEQLKRISRMRLVHYRYKPEFAASAGIEAXAPEXGVIAQEVKEILPEAVKDXGDMVFANGKXIENFLVVNKERIFMENVGAVKELCKLXDNLEXRIDELERWSHKLAKLRRLDSLKSXGSSGAFSHAGSQFSRAGSVPHKKRPPKVASKSSSVVPDQACISQRFLQGXIIALVVVMAFSVVSMSXLYVLSLRXEEDLVDXDGSFAVSXSCLLALLRPQPPGGSEALCPWSSQSFGXXQLRQSPLXXGLPGIQPSLLLVXXSLXSSAPGSAVRXLDMCSSHPCPVICCSSPXXNPXXGPSLGPSFNPGHVLSPSPSPSXNRSGPSQMALLPVXNIRAKSWGLSVNGIGHSKHHKSLEPLASPAVPFPGGQGKAKNSPSLGFHGRARRGALQSSVGPAEPXWAQGQSASLLAEPVPSLXSIQVLENSMSIXSQYCAPGDACRPGNFXYHIPVSSGXPLHLSLXLQMNSSSPVSVVLCSLRSKEEPCEEGSLPQSLHXHQDXQGXSHRWPIXILSFREFXYHFRVALLGQANCSSEALAQPAXDYHFHFYRLCD

SEQ ID NO: 17047 - protein, 1111 aa, Homo sapiens
  MOD_RES (21)..(21): Selenocysteine
  MOD_RES (88)..(88): Selenocysteine
  MOD_RES (109)..(109): Selenocysteine
  MOD_RES (125)..(125): Selenocysteine
  MOD_RES (151)..(151): Selenocysteine
  MOD_RES (153)..(153): Selenocysteine
  MOD_RES (156)..(156): Selenocysteine
  MOD_RES (217)..(217): Selenocysteine
  MOD_RES (222)..(222): Selenocysteine
  MOD_RES (241)..(241): Selenocysteine
  MOD_RES (256)..(256): Selenocysteine
  MOD_RES (272)..(272): Selenocysteine
  MOD_RES (274)..(274): Selenocysteine
  MOD_RES (281)..(281): Selenocysteine
  MOD_RES (310)..(310): Selenocysteine
  MOD_RES (354)..(354): Selenocysteine
  MOD_RES (367)..(367): Selenocysteine
  MOD_RES (396)..(396): Selenocysteine
  MOD_RES (410)..(410): Selenocysteine
  MOD_RES (454)..(454): Selenocysteine
  MOD_RES (463)..(463): Selenocysteine
  MOD_RES (466)..(466): Selenocysteine
  MOD_RES (475)..(476): Selenocysteine
  MOD_RES (509)..(509): Selenocysteine
  MOD_RES (544)..(544): Selenocysteine
  MOD_RES (555)..(555): Selenocysteine
  MOD_RES (591)..(592): Selenocysteine
  MOD_RES (621)..(621): Selenocysteine
  MOD_RES (625)..(625): Selenocysteine
  MOD_RES (643)..(643): Selenocysteine
  MOD_RES (653)..(653): Selenocysteine
  MOD_RES (680)..(680): Selenocysteine
  MOD_RES (685)..(685): Selenocysteine
  MOD_RES (709)..(709): Selenocysteine
  MOD_RES (759)..(759): Selenocysteine
  MOD_RES (776)..(776): Selenocysteine
  MOD_RES (784)..(784): Selenocysteine
  MOD_RES (791)..(791): Selenocysteine
  MOD_RES (801)..(802): Selenocysteine
  MOD_RES (810)..(811): Selenocysteine
  MOD_RES (824)..(825): Selenocysteine
  MOD_RES (828)..(828): Selenocysteine
  MOD_RES (838)..(838): Selenocysteine
  MOD_RES (856)..(857): Selenocysteine
  MOD_RES (860)..(861): Selenocysteine
  MOD_RES (883)..(883): Selenocysteine
  MOD_RES (897)..(897): Selenocysteine
  MOD_RES (964)..(964): Selenocysteine
  MOD_RES (977)..(977): Selenocysteine
  MOD_RES (989)..(989): Selenocysteine
  MOD_RES (1005)..(1005): Selenocysteine
  MOD_RES (1014)..(1014): Selenocysteine
  MOD_RES (1021)..(1021): Selenocysteine
  MOD_RES (1055)..(1055): Selenocysteine
  MOD_RES (1059)..(1059): Selenocysteine
  MOD_RES (1062)..(1062): Selenocysteine
  MOD_RES (1069)..(1069): Selenocysteine
  MOD_RES (1077)..(1077): Selenocysteine
  MOD_RES (1100)..(1100): Selenocysteine
MHWLPAGHDINGALEPSNIDXSILEEYISKEDASDLCFPDISAPASSASYSHGQPAMPGSSGVHHLSPPGGGPSPGRHGPLPPPGYGXPLNCNNNNGMGAAPKPFPGGXGPPIKAEPKAPYAPGXLPDSPPDSGSEAYSPQQVNEPHLLRXIXPEXLCHVGVPSRLEHPPPPPAHLPGPPPPPPPPPHYPVLQRDLYMKAEPPIPHYAAMGQGLVPXDLHHXQQSQMLHQLLQQHGAELPXHPSKKRKHSESPPSXLNAQMLNGMIKQEPGXVXALPLHPXRAPSPPWPPQGPLSPGPGSLPLSIARVQXPPWHPPGAPSPGLLQDSDSLSGSYLDPNYQSIKWQPHQQNKWAXLYDANYKELPMLXYRVDADKGFNFSVGDDAFVCQKKNHFQVXVYIGMLGEPKYVKXPEGLKPLDCFYLKLHGVKLEALNQSINIEQSQSDRSKRPFNPVXVNLPPEQVXKVXVGRLHFSEXXANNMRKKGKPNPDQRYFMLVVALQAHAQNQNYXLAAQISERIIVRASNPGQFESDSDVLWQRAQVPDXVFHHGRVGINXDRPDEALVVHGNVKVMGSLMHPSDLRAKEHVQEVDXXEQLKRISRMRLVHYRYKPEFAASAGIEAXAPEXGVIAQEVKEILPEAVKDXGDMVFANGKXIENFLVVNKERIFMENVGAVKELCKLXDNLEXRIDELERWSHKLAKLRRLDSLKSXGSSGAFSHAGSQFSRAGSVPHKKRPPKVASKSSSVVPDQACISQRFLQGXIIALVVVMAFSVVSMSXLYVLSLRXEEDLVDXDGRSSQSFGXXQLRQSPLXXGLPGIQPSLLLVXXSLXSSAPGSAVRXLDMCSSHPCPVICCSSPXXNPXXGPSLGPSFNPGHVLSPSPSPSXNRSGPSQMALLPVXNIRAKSWGLSVNGIGHSKHHKSLEPLASPAVPFPGGQGKAKNSPSLGFHGRARRGALQSSVGPAEPXWAQGQSEPVPSLXSIQVLENSMSIXSQYCAPGDACRPGNFXYHIPVSSGXPLHLSLXLQMNSSSPVSVVLCSLRSKEEPCEEGSLPQSLHXHQDXQGXSHRWPIXILSFREFXYHFRVALLGQANCSSEALAQPAXDYHFHFYRLCD

SEQ ID NO: 17048 - protein, 537 aa, Homo sapiens
  MOD_RES (21)..(21): Selenocysteine
  MOD_RES (25)..(25): Selenocysteine
  MOD_RES (43)..(43): Selenocysteine
  MOD_RES (53)..(53): Selenocysteine
  MOD_RES (80)..(80): Selenocysteine
  MOD_RES (85)..(85): Selenocysteine
  MOD_RES (109)..(109): Selenocysteine
  MOD_RES (159)..(159): Selenocysteine
  MOD_RES (176)..(176): Selenocysteine
  MOD_RES (184)..(184): Selenocysteine
  MOD_RES (191)..(191): Selenocysteine
  MOD_RES (199)..(199): Selenocysteine
  MOD_RES (227)..(228): Selenocysteine
  MOD_RES (236)..(237): Selenocysteine
  MOD_RES (250)..(251): Selenocysteine
  MOD_RES (254)..(254): Selenocysteine
  MOD_RES (264)..(264): Selenocysteine
  MOD_RES (282)..(283): Selenocysteine
  MOD_RES (286)..(287): Selenocysteine
  MOD_RES (309)..(309): Selenocysteine
  MOD_RES (323)..(323): Selenocysteine
  MOD_RES (390)..(390): Selenocysteine
  MOD_RES (403)..(403): Selenocysteine
  MOD_RES (415)..(415): Selenocysteine
  MOD_RES (431)..(431): Selenocysteine
  MOD_RES (440)..(440): Selenocysteine
  MOD_RES (447)..(447): Selenocysteine
  MOD_RES (481)..(481): Selenocysteine
  MOD_RES (485)..(485): Selenocysteine
  MOD_RES (488)..(488): Selenocysteine
  MOD_RES (495)..(495): Selenocysteine
  MOD_RES (503)..(503): Selenocysteine
  MOD_RES (526)..(526): Selenocysteine
MRLVHYRYKPEFAASAGIEAXAPEXGVIAQEVKEILPEAVKDXGDMVFANGKXIENFLVVNKERIFMENVGAVKELCKLXDNLEXRIDELERWSHKLAKLRRLDSLKSXGSSGAFSHAGSQFSRAGSVPHKKRPPKVASKSSSVVPDQACISQRFLQGXIIALVVVMAFSVVSMSXLYVLSLRXEEDLVDXDGSFAVSXSCLLALLRPQPPGGSEALCPWSSQSFGXXQLRQSPLXXGLPGIQPSLLLVXXSLXSSAPGSAVRXLDMCSSHPCPVICCSSPXXNPXXGPSLGPSFNPGHVLSPSPSPSXNRSGPSQMALLPVXNIRAKSWGLSVNGIGHSKHHKSLEPLASPAVPFPGGQGKAKNSPSLGFHGRARRGALQSSVGPAEPXWAQGQSEPVPSLXSIQVLENSMSIXSQYCAPGDACRPGNFXYHIPVSSGXPLHLSLXLQMNSSSPVSVVLCSLRSKEEPCEEGSLPQSLHXHQDXQGXSHRWPIXILSFREFXYHFRVALLGQANCSSEALAQPAXDYHFHFYRLCD

SEQ ID NO: 17049 - protein, 250 aa, Homo sapiens
  MOD_RES (7)..(7): Selenocysteine
  MOD_RES (32)..(32): Selenocysteine
  MOD_RES (42)..(42): Selenocysteine
  MOD_RES (50)..(50): Selenocysteine
  MOD_RES (54)..(55): Selenocysteine
  MOD_RES (65)..(65): Selenocysteine
  MOD_RES (75)..(75): Selenocysteine
  MOD_RES (131)..(132): Selenocysteine
  MOD_RES (158)..(159): Selenocysteine
  MOD_RES (170)..(170): Selenocysteine
  MOD_RES (182)..(182): Selenocysteine
  MOD_RES (196)..(196): Selenocysteine
  MOD_RES (229)..(229): Selenocysteine
  MOD_RES (239)..(239): Selenocysteine
MAFCALXIVALYILSLKDQDRRVPNLPPSNIXSSQEPALLPXASSSAPNXSLVXXPASLQVPEIXFCEILPCQEXYCCPIRGMKEVSSSPVQRQSEEKEFHQRRWSEDKSKSVLARNALSGPDWESDWIDXXISSIQIMEIQQIIDHQYCIQSLQCGXXEPLIVFQCKFXLGNICFHSKRGXKGLESHREISQEMXQGYQHIWSLPVAPFSDSMFHFRVAAPDLADCSXDPYFAGIFFXDYFFYFYRRCA

SEQ ID NO: 17050 - protein, 898 aa, Homo sapiens
  MOD_RES (22)..(22): Selenocysteine
  MOD_RES (30)..(30): Selenocysteine
  MOD_RES (53)..(53): Selenocysteine
  MOD_RES (74)..(74): Selenocysteine
  MOD_RES (78)..(78): Selenocysteine
  MOD_RES (82)..(82): Selenocysteine
  MOD_RES (90)..(90): Selenocysteine
  MOD_RES (104)..(104): Selenocysteine
  MOD_RES (129)..(129): Selenocysteine
  MOD_RES (161)..(161): Selenocysteine
  MOD_RES (167)..(167): Selenocysteine
  MOD_RES (187)..(187): Selenocysteine
  MOD_RES (208)..(208): Selenocysteine
  MOD_RES (245)..(245): Selenocysteine
  MOD_RES (269)..(269): Selenocysteine
  MOD_RES (283)..(283): Selenocysteine
  MOD_RES (300)..(300): Selenocysteine
  MOD_RES (305)..(305): Selenocysteine
  MOD_RES (336)..(336): Selenocysteine
  MOD_RES (339)..(339): Selenocysteine
  MOD_RES (348)..(349): Selenocysteine
  MOD_RES (428)..(428): Selenocysteine
  MOD_RES (446)..(446): Selenocysteine
  MOD_RES (464)..(464): Selenocysteine
  MOD_RES (493)..(493): Selenocysteine
  MOD_RES (497)..(497): Selenocysteine
  MOD_RES (519)..(519): Selenocysteine
  MOD_RES (525)..(525): Selenocysteine
  MOD_RES (552)..(552): Selenocysteine
  MOD_RES (587)..(587): Selenocysteine
  MOD_RES (627)..(627): Selenocysteine
  MOD_RES (631)..(631): Selenocysteine
  MOD_RES (656)..(656): Selenocysteine
  MOD_RES (666)..(666): Selenocysteine
  MOD_RES (674)..(674): Selenocysteine
  MOD_RES (678)..(679): Selenocysteine
  MOD_RES (689)..(689): Selenocysteine
  MOD_RES (699)..(699): Selenocysteine
  MOD_RES (754)..(755): Selenocysteine
  MOD_RES (794)..(794): Selenocysteine
  MOD_RES (796)..(796): Selenocysteine
  MOD_RES (806)..(807): Selenocysteine
  MOD_RES (818)..(818): Selenocysteine
  MOD_RES (830)..(830): Selenocysteine
  MOD_RES (844)..(844): Selenocysteine
  MOD_RES (877)..(877): Selenocysteine
  MOD_RES (887)..(887): Selenocysteine
MDVVGENEALQQFFEAQGANGXLENPALDXSLLEEFLGNDFDLGALQRQLPDXPPYSASDSCSPPQVKGACYPXLRPXAGRXPAPFLHPXAAPAMPPMHPLQSXSGMGDSCQIHGGFHSCHSNASHLAXPLDQSVSSHLGIGCSYPQQPLCHSPGASLPPXKKRKCXQALEDSGECRVWACHCRPMXSRSRSSEVQDPDSEGQNRMPXDQCSPALKWQPCHSVPWHSLLNSHYEKLPDVGYRVVXDKGFNFSPADEAFVCQKKNHFQIXIHIQVWGSPKFVEXEMGLKPIEMFYLKVFGXKVEAXNQIIAIEQSQADRSKKIFNPVKIDLLADQVXKVXLGRLHFSEXXANNMRKKGKPNPDQRYFMLVVGLYAANQDQFYLLSAHISERIIVRASNPGQFENDSDALWQRGQVPESIVCHGRVGINXDAPDEALVVCGNMKVMGXIMHPSDSRAKQNIQEVDXNEQLKRIAQMRIVEYDYKPEFASAMGINXAHQXGMIAQEVQEILPRAVREVGDVXCGNGEXLENFLMVDKDQIFMENVGAVKQLCKLXNNLEERIEELEIWNRKLARLKRLSSWKSSASEASXISKSSRAVSASSPRRAVHKKNNKVYFSGKRQACPNWVFQXLVIXLIAVMAFCLKDQDRRVPNLPPSNIXSSQEPALLPXASSSAPNXSLVXXPASLQVPEIXFCEILPCQEXYCCPIRGMKEVSSSPVQRQSEEKEFHQRRWSDKSKSVLARNALSGPDWESDWIDXXISSIQIMEIQQIIDHQYCIQSLQCGSGNYNYNIPVNKHXPXNVKFSLEINXXEPLIVFQCKFXLGNICFHSKRGXKGLESHREISQEMXQGYQHIWSLPVAPFSDSMFHFRVAAPDLADCSXDPYFAGIFFXDYFFYFYRRCA

SEQ ID NO: 17051 - protein, 910 aa, Homo sapiens
  MOD_RES (22)..(22): Selenocysteine
  MOD_RES (30)..(30): Selenocysteine
  MOD_RES (53)..(53): Selenocysteine
  MOD_RES (74)..(74): Selenocysteine
  MOD_RES (78)..(78): Selenocysteine
  MOD_RES (82)..(82): Selenocysteine
  MOD_RES (90)..(90): Selenocysteine
  MOD_RES (104)..(104): Selenocysteine
  MOD_RES (129)..(129): Selenocysteine
  MOD_RES (161)..(161): Selenocysteine
  MOD_RES (167)..(167): Selenocysteine
  MOD_RES (187)..(187): Selenocysteine
  MOD_RES (208)..(208): Selenocysteine
  MOD_RES (245)..(245): Selenocysteine
  MOD_RES (269)..(269): Selenocysteine
  MOD_RES (283)..(283): Selenocysteine
  MOD_RES (300)..(300): Selenocysteine
  MOD_RES (305)..(305): Selenocysteine
  MOD_RES (336)..(336): Selenocysteine
  MOD_RES (339)..(339): Selenocysteine
  MOD_RES (348)..(349): Selenocysteine
  MOD_RES (428)..(428): Selenocysteine
  MOD_RES (446)..(446): Selenocysteine
  MOD_RES (464)..(464): Selenocysteine
  MOD_RES (493)..(493): Selenocysteine
  MOD_RES (497)..(497): Selenocysteine
  MOD_RES (519)..(519): Selenocysteine
  MOD_RES (525)..(525): Selenocysteine
  MOD_RES (552)..(552): Selenocysteine
  MOD_RES (587)..(587): Selenocysteine
  MOD_RES (627)..(627): Selenocysteine
  MOD_RES (631)..(631): Selenocysteine
  MOD_RES (642)..(642): Selenocysteine
  MOD_RES (667)..(667): Selenocysteine
  MOD_RES (677)..(677): Selenocysteine
  MOD_RES (685)..(685): Selenocysteine
  MOD_RES (689)..(690): Selenocysteine
  MOD_RES (700)..(700): Selenocysteine
  MOD_RES (710)..(710): Selenocysteine
  MOD_RES (766)..(767): Selenocysteine
  MOD_RES (806)..(806): Selenocysteine
  MOD_RES (808)..(808): Selenocysteine
  MOD_RES (818)..(819): Selenocysteine
  MOD_RES (830)..(830): Selenocysteine
  MOD_RES (842)..(842): Selenocysteine
  MOD_RES (856)..(856): Selenocysteine
  MOD_RES (889)..(889): Selenocysteine
  MOD_RES (899)..(899): Selenocysteine
MDVVGENEALQQFFEAQGANGXLENPALDXSLLEEFLGNDFDLGALQRQLPDXPPYSASDSCSPPQVKGACYPXLRPXAGRXPAPFLHPXAAPAMPPMHPLQSXSGMGDSCQIHGGFHSCHSNASHLAXPLDQSVSSHLGIGCSYPQQPLCHSPGASLPPXKKRKCXQALEDSGECRVWACHCRPMXSRSRSSEVQDPDSEGQNRMPXDQCSPALKWQPCHSVPWHSLLNSHYEKLPDVGYRVVXDKGFNFSPADEAFVCQKKNHFQIXIHIQVWGSPKFVEXEMGLKPIEMFYLKVFGXKVEAXNQIIAIEQSQADRSKKIFNPVKIDLLADQVXKVXLGRLHFSEXXANNMRKKGKPNPDQRYFMLVVGLYAANQDQFYLLSAHISERIIVRASNPGQFENDSDALWQRGQVPESIVCHGRVGINXDAPDEALVVCGNMKVMGXIMHPSDSRAKQNIQEVDXNEQLKRIAQMRIVEYDYKPEFASAMGINXAHQXGMIAQEVQEILPRAVREVGDVXCGNGEXLENFLMVDKDQIFMENVGAVKQLCKLXNNLEERIEELEIWNRKLARLKRLSSWKSSASEASXISKSSRAVSASSPRRAVHKKNNKVYFSGKRQACPNWVFQXLVIXLIAVMAFCALXIVALYILSLKDQDRRVPNLPPSNIXSSQEPALLPXASSSAPNXSLVXXPASLQVPEIXFCEILPCQEXYCCPIRGMKEVSSSPVQRQSEEKEFHQRRWSEDKSKSVLARNALSGPDWESDWIDXXISSIQIMEIQQIIDHQYCIQSLQCGSGNYNYNIPVNKHXPXNVKFSLEINXXEPLIVFQCKFXLGNICFHSKRGXKGLESHREISQEMXQGYQHIWSLPVAPFSDSMFHFRVAAPDLADCSXDPYFAGIFFXDYFFYFYRRCA

SEQ ID NO: 17052 - protein, 250 aa, Homo sapiens
  MOD_RES (7)..(7): Selenocysteine
  MOD_RES (32)..(32): Selenocysteine
  MOD_RES (42)..(42): Selenocysteine
  MOD_RES (50)..(50): Selenocysteine
  MOD_RES (54)..(55): Selenocysteine
  MOD_RES (65)..(65): Selenocysteine
  MOD_RES (75)..(75): Selenocysteine
  MOD_RES (131)..(132): Selenocysteine
  MOD_RES (158)..(159): Selenocysteine
  MOD_RES (170)..(170): Selenocysteine
  MOD_RES (182)..(182): Selenocysteine
  MOD_RES (196)..(196): Selenocysteine
  MOD_RES (229)..(229): Selenocysteine
  MOD_RES (239)..(239): Selenocysteine
MVFLALXIVALYILSLKDQDRRVPNLPPSNIXSSQEPALLPXASSSAPNXSLVXXPASLQVPEIXFCEILPCQEXYCCPIRGMKEVSSSPVQRQSEEKEFHQRRWSEDKSKSVLARNALSGPDWESDWIDXXISSIQIMEIQQIIDHQYCIQSLQCGXXEPLIVFQCKFXLGNICFHSKRGXKGLESHREISQEMXQGYQHIWSLPVAPFSDSMFHFRVAAPDLADCSXDPYFAGIFFXDYFFYFYRRCA

SEQ ID NO: 17053 - protein, 375 aa, Homo sapiens
  MOD_RES (1)..(1): Any amino acid
  MOD_RES (17)..(17): Selenocysteine
  MOD_RES (52)..(52): Selenocysteine
  MOD_RES (92)..(92): Selenocysteine
  MOD_RES (96)..(96): Selenocysteine
  MOD_RES (107)..(107): Selenocysteine
  MOD_RES (132)..(132): Selenocysteine
  MOD_RES (142)..(142): Selenocysteine
  MOD_RES (150)..(150): Selenocysteine
  MOD_RES (154)..(155): Selenocysteine
  MOD_RES (165)..(165): Selenocysteine
  MOD_RES (175)..(175): Selenocysteine
  MOD_RES (231)..(232): Selenocysteine
  MOD_RES (271)..(271): Selenocysteine
  MOD_RES (273)..(273): Selenocysteine
  MOD_RES (283)..(284): Selenocysteine
  MOD_RES (295)..(295): Selenocysteine
  MOD_RES (307)..(307): Selenocysteine
  MOD_RES (321)..(321): Selenocysteine
  MOD_RES (354)..(354): Selenocysteine
  MOD_RES (364)..(364): Selenocysteine
XIFMENVGAVKQLCKLXNNLEERIEELEIWNRKLARLKRLSSWKSSASEASXISKSSRAVSASSPRRAVHKKNNKVYFSGKRQACPNWVFQXLVIXLIAVMAFCALXIVALYILSLKDQDRRVPNLPPSNIXSSQEPALLPXASSSAPNXSLVXXPASLQVPEIXFCEILPCQEXYCCPIRGMKEVSSSPVQRQSEEKEFHQRRWSEDKSKSVLARNALSGPDWESDWIDXXISSIQIMEIQQIIDHQYCIQSLQCGSGNYNYNIPVNKHXPXNVKFSLEINXXEPLIVFQCKFXLGNICFHSKRGXKGLESHREISQEMXQGYQHIWSLPVAPFSDSMFHFRVAAPDLADCSXDPYFAGIFFXDYFFYFYRRCA

SEQ ID NO: 17054 - protein, 828 aa, Homo sapiens
  MOD_RES (28)..(28): Selenocysteine
  MOD_RES (44)..(44): Selenocysteine
  MOD_RES (52)..(52): Selenocysteine
  MOD_RES (56)..(56): Selenocysteine
  MOD_RES (103)..(103): Selenocysteine
  MOD_RES (112)..(112): Selenocysteine
  MOD_RES (122)..(122): Selenocysteine
  MOD_RES (141)..(141): Selenocysteine
  MOD_RES (151)..(151): Selenocysteine
  MOD_RES (175)..(175): Selenocysteine
  MOD_RES (180)..(180): Selenocysteine
  MOD_RES (193)..(193): Selenocysteine
  MOD_RES (197)..(197): Selenocysteine
  MOD_RES (226)..(226): Selenocysteine
  MOD_RES (236)..(236): Selenocysteine
  MOD_RES (257)..(257): Selenocysteine
  MOD_RES (264)..(264): Selenocysteine
  MOD_RES (288)..(288): Selenocysteine
  MOD_RES (295)..(295): Selenocysteine
  MOD_RES (298)..(298): Selenocysteine
  MOD_RES (405)..(405): Selenocysteine
  MOD_RES (431)..(431): Selenocysteine
  MOD_RES (451)..(451): Selenocysteine
  MOD_RES (473)..(473): Selenocysteine
  MOD_RES (500)..(500): Selenocysteine
  MOD_RES (522)..(522): Selenocysteine
  MOD_RES (552)..(552): Selenocysteine
  MOD_RES (626)..(626): Selenocysteine
  MOD_RES (638)..(638): Selenocysteine
  MOD_RES (643)..(643): Selenocysteine
  MOD_RES (672)..(672): Selenocysteine
  MOD_RES (707)..(707): Selenocysteine
  MOD_RES (745)..(745): Selenocysteine
  MOD_RES (772)..(772): Selenocysteine
  MOD_RES (784)..(784): Selenocysteine
  MOD_RES (789)..(789): Selenocysteine
  MOD_RES (799)..(799): Selenocysteine
  MOD_RES (818)..(818): Selenocysteine
  MOD_RES (823)..(823): Selenocysteine
MAAEEADVDIEGDVVAAAGAQPGSGENXASVLQKDHYLDSSWRXENGLIPWXLDNXISEENRAVIEKMLLEEEYYLSKKSQPEKVWLDQKEDDKKYMKSLQKXAKIMVHSPXKPASYSVKWXIEEKELFEQGLAKFGRRWXKISKLIGSRXVLQVKSYARQYFKNKVKCGLDKEXPNQKXGHNLQVKNEDKGXKAWXPSCLRGRADPNLNAVKIEKLSDDEEVDIXDEVDELSSQXPQKNSSSDLLLDFPNSKMHEXNQGEFIXSDSQEALFSKSSRGCLQNEKQDEXLSSSEIXLWXEKQSNGDKKSIELNDQKFNELIKNCNKHDGRGIIVDARQLPSPEPCEIQKNLNDNEMLFHSCQMVEESHEEEELKPPEQEIEIDRNIIQEEEKQAIPEFFEGRQAKXPERYLKIRNYILDQWEICKPKYLNKXSVRPGLKNCGDVNCIGRIHXYLELIGAINFGCEQAVYNRPQXVDKVRIRDRKDAVEAYQLAQRLQSMRXRRRRVRDPWGNWCDAKDLEGQXFEHLSAEELAKRREEEKGRPVKSLKVPRPXKSSFDPFQLIPCNFFSEEKQEPFQVKVASEALLIMDLHAHVSMAEVIGLLGGRYSEVDKVVEVCAAEPCNSLSXGLQCEMDPVSQXQASEXLAVRGFSVIGWYHSHPAFDPNPSLRDIDXQAKYQSYFSRGGAKFIGMIVSPYNRNNPLPYSQIXCLVISEEISPDGSYRLPYKFEVQQMLEEPQWGLVFEKXRWIIEKYRLSHSSVPMDKIFRRDSDLXCLQKLLECMRKXLSKVXNCFMAEEFLXEIENLFLSNYKSNQENGVXEENCXKELLM

SEQ ID NO: 17055 - protein, 234 aa, Homo sapiens
  MOD_RES (32)..(32): Selenocysteine
  MOD_RES (44)..(44): Selenocysteine
  MOD_RES (49)..(49): Selenocysteine
  MOD_RES (78)..(78): Selenocysteine
  MOD_RES (113)..(113): Selenocysteine
  MOD_RES (151)..(151): Selenocysteine
  MOD_RES (178)..(178): Selenocysteine
  MOD_RES (190)..(190): Selenocysteine
  MOD_RES (195)..(195): Selenocysteine
  MOD_RES (205)..(205): Selenocysteine
  MOD_RES (224)..(224): Selenocysteine
  MOD_RES (229)..(229): Selenocysteine
MAEVIGLLGGRYSEVDKVVEVCAAEPCNSLSXGLQCEMDPVSQXQASEXLAVRGFSVIGWYHSHPAFDPNPSLRDIDXQAKYQSYFSRGGAKFIGMIVSPYNRNNPLPYSQIXCLVISEEISPDGSYRLPYKFEVQQMLEEPQWGLVFEKXRWIIEKYRLSHSSVPMDKIFRRDSDLXCLQKLLECMRKXLSKVXNCFMAEEFLXEIENLFLSNYKSNQENGVXEENCXKELLM

SEQ ID NO: 17056 - protein, 591 aa, Homo sapiens
  MOD_RES (12)..(12): Selenocysteine
  MOD_RES (23)..(24): Selenocysteine
  MOD_RES (32)..(32): Selenocysteine
  MOD_RES (36)..(36): Selenocysteine
  MOD_RES (97)..(97): Selenocysteine
  MOD_RES (111)..(111): Selenocysteine
  MOD_RES (119)..(119): Selenocysteine
  MOD_RES (130)..(130): Selenocysteine
  MOD_RES (146)..(146): Selenocysteine
  MOD_RES (152)..(152): Selenocysteine
  MOD_RES (156)..(156): Selenocysteine
  MOD_RES (190)..(190): Selenocysteine
  MOD_RES (194)..(194): Selenocysteine
  MOD_RES (205)..(205): Selenocysteine
  MOD_RES (231)..(231): Selenocysteine
  MOD_RES (270)..(270): Selenocysteine
  MOD_RES (286)..(286): Selenocysteine
  MOD_RES (308)..(308): Selenocysteine
  MOD_RES (311)..(311): Selenocysteine
  MOD_RES (333)..(333): Selenocysteine
  MOD_RES (340)..(340): Selenocysteine
  MOD_RES (351)..(351): Selenocysteine
  MOD_RES (370)..(370): Selenocysteine
  MOD_RES (409)..(409): Selenocysteine
  MOD_RES (417)..(417): Selenocysteine
  MOD_RES (437)..(437): Selenocysteine
  MOD_RES (482)..(482): Selenocysteine
  MOD_RES (484)..(484): Selenocysteine
  MOD_RES (501)..(501): Selenocysteine
  MOD_RES (504)..(504): Selenocysteine
  MOD_RES (514)..(514): Selenocysteine
  MOD_RES (525)..(525): Selenocysteine
  MOD_RES (535)..(535): Selenocysteine
  MOD_RES (560)..(560): Selenocysteine
MSLENEDKRARXRSKALRGPPEXXAADLSCPXPGCXGSGHVRGKYSRHRSLQSCPLAKKRKLEGAEAEHLVSKRKSHPLKLALDEGYGVDSDGSEDXEVKDASVSDESEGXLEGAEAEXSGQDEIHRPEXAEDPSRAEKREIKCPXPGCDGXGHVXGLYPHHRSLSGCPHKDRIPPEILAMHENVLKCPXPGCXGQGHVNSNRNXHRSLSGCPIAAAEKLAKSHEKQQPQXGDPSKSSSNSDRILRPMCFVKQLEVPPYGSYRPNVAPAXPRANLAKELEKFSKVXFDYASFDAQVFGKRMLAPKIQXSEXSPKAFQCFDYSQDAEAAHMAAXAILNLSXRCWEMPENLSXKPQDLPSKSVDIEVDENGXLDLSMHKHRKRENAFPSSSSCSSSPGVKSPDASQRHSSXSAPSSSMXSPQSSQASRQDEWDRPLDYXKPSRLREEEPEESEPAAHSFASSEADDQEVSEENFEERKYPGEVXLXNFKLKFLSKDIKKELLXCPXPGCDGSGHIXGNYASHRRCPXPGCDGSGHIXGNYASHRSLSGCPRAKKSGVKVAPXKDDKEDPELMKYVGPCWLFHCIAELRFSCVL

SEQ ID NO: 17057 - protein, 1121 aa, Homo sapiens
  MOD_RES (12)..(12): Selenocysteine
  MOD_RES (23)..(24): Selenocysteine
  MOD_RES (32)..(32): Selenocysteine
  MOD_RES (36)..(36): Selenocysteine
  MOD_RES (97)..(97): Selenocysteine
  MOD_RES (111)..(111): Selenocysteine
  MOD_RES (119)..(119): Selenocysteine
  MOD_RES (130)..(130): Selenocysteine
  MOD_RES (150)..(150): Selenocysteine
  MOD_RES (166)..(166): Selenocysteine
  MOD_RES (178)..(178): Selenocysteine
  MOD_RES (228)..(229): Selenocysteine
  MOD_RES (317)..(317): Selenocysteine
  MOD_RES (320)..(320): Selenocysteine
  MOD_RES (356)..(356): Selenocysteine
  MOD_RES (362)..(362): Selenocysteine
  MOD_RES (364)..(364): Selenocysteine
  MOD_RES (374)..(374): Selenocysteine
  MOD_RES (394)..(394): Selenocysteine
  MOD_RES (422)..(422): Selenocysteine
  MOD_RES (444)..(444): Selenocysteine
  MOD_RES (450)..(450): Selenocysteine
  MOD_RES (454)..(454): Selenocysteine
  MOD_RES (488)..(488): Selenocysteine
  MOD_RES (492)..(492): Selenocysteine
  MOD_RES (503)..(503): Selenocysteine
  MOD_RES (529)..(529): Selenocysteine
  MOD_RES (568)..(568): Selenocysteine
  MOD_RES (584)..(584): Selenocysteine
  MOD_RES (606)..(606): Selenocysteine
  MOD_RES (609)..(609): Selenocysteine
  MOD_RES (631)..(631): Selenocysteine
  MOD_RES (638)..(638): Selenocysteine
  MOD_RES (649)..(649): Selenocysteine
  MOD_RES (668)..(668): Selenocysteine
  MOD_RES (707)..(707): Selenocysteine
  MOD_RES (715)..(715): Selenocysteine
  MOD_RES (735)..(735): Selenocysteine
  MOD_RES (780)..(780): Selenocysteine
  MOD_RES (782)..(782): Selenocysteine
  MOD_RES (799)..(799): Selenocysteine
  MOD_RES (802)..(802): Selenocysteine
  MOD_RES (812)..(812): Selenocysteine
  MOD_RES (846)..(846): Selenocysteine
  MOD_RES (856)..(856): Selenocysteine
  MOD_RES (881)..(881): Selenocysteine
  MOD_RES (945)..(945): Selenocysteine
  MOD_RES (948)..(948): Selenocysteine
  MOD_RES (963)..(963): Selenocysteine
  MOD_RES (974)..(974): Selenocysteine
  MOD_RES (994)..(994): Selenocysteine
  MOD_RES (1093)..(1093): Selenocysteine
  MOD_RES (1095)..(1095): Selenocysteine
MSLENEDKRARXRSKALRGPPEXXAADLSCPXPGCXGSGHVRGKYSRHRSLQSCPLAKKRKLEGAEAEHLVSKRKSHPLKLALDEGYGVDSDGSEDXEVKDASVSDESEGXLEGAEAEXSGQDEIHRPEXAEGRSPVKSHFGSNPIGSAXASSKGSYSSYQGIIAXSLLNLGQIAEEXLVEEDLGQAAKPGPGIVHLLQEAAEGAASEEGEKGLFIQPEDAEEVVEVXXERSQDLCPQSLEDAASEESSKQKGILSHEEEDEEEEEEEEEEEEDEEEEEEEEEEEEEEEEEEEEEEEEEEEEEEEEAAPDVIFQEDXSHXSAQKAPELRGPESPSPKPEYSVIVEVRSDDDKDEDXHSRKSXVXDESEMQDMMXRGNLGLLEQAIALKAEQVRXVCEPGCPPAEQSQLGLGEPGKAAKPLDXVRKSYYSKDPSRAEKREIKCPXPGCDGXGHVXGLYPHHRSLSGCPHKDRIPPEILAMHENVLKCPXPGCXGQGHVNSNRNXHRSLSGCPIAAAEKLAKSHEKQQPQXGDPSKSSSNSDRILRPMCFVKQLEVPPYGSYRPNVAPAXPRANLAKELEKFSKVXFDYASFDAQVFGKRMLAPKIQXSEXSPKAFQCFDYSQDAEAAHMAAXAILNLSXRCWEMPENLSXKPQDLPSKSVDIEVDENGXLDLSMHKHRKRENAFPSSSSCSSSPGVKSPDASQRHSSXSAPSSSMXSPQSSQASRQDEWDRPLDYXKPSRLREEEPEESEPAAHSFASSEADDQEVSEENFEERKYPGEVXLXNFKLKFLSKDIKKELLXCPXPGCDGSGHIXGNYASHRSLSGCPLADKSLRNLMAAHSADLKCPXPGCDGSGHIXGNYASHRSLSGCPRAKKSGVKVAPXKDDKEDPELMKCPVPGCVGLGHISGKYASHRSASGCPLAARRQKEGSLNGSSFSWKSLKNEGPXCPXPGCDGSGHANGSFLXHRSLSGCPRAXFAGKKGKLSGDEVLSPKFKXSDVLENDEEIKQLNQEIRDLNESNSEMEAAMVQLQSQISSMEKNLKNIEEENKLIEEQNEALFLELSGLSQALIQSLANIRLPHMEPICEQNFDAYVSXLXDMYSNQDPENKDLLESIKQAVRGIQV

SEQ ID NO: 17058 - protein, 1148 aa, Homo sapiens
  MOD_RES (12)..(12): Selenocysteine
  MOD_RES (23)..(24): Selenocysteine
  MOD_RES (32)..(32): Selenocysteine
  MOD_RES (36)..(36): Selenocysteine
  MOD_RES (97)..(97): Selenocysteine
  MOD_RES (111)..(111): Selenocysteine
  MOD_RES (119)..(119): Selenocysteine
  MOD_RES (130)..(130): Selenocysteine
  MOD_RES (150)..(150): Selenocysteine
  MOD_RES (166)..(166): Selenocysteine
  MOD_RES (178)..(178): Selenocysteine
  MOD_RES (228)..(229): Selenocysteine
  MOD_RES (317)..(317): Selenocysteine
  MOD_RES (320)..(320): Selenocysteine
  MOD_RES (356)..(356): Selenocysteine
  MOD_RES (362)..(362): Selenocysteine
  MOD_RES (364)..(364): Selenocysteine
  MOD_RES (374)..(374): Selenocysteine
  MOD_RES (394)..(394): Selenocysteine
  MOD_RES (422)..(422): Selenocysteine
  MOD_RES (444)..(444): Selenocysteine
  MOD_RES (450)..(450): Selenocysteine
  MOD_RES (454)..(454): Selenocysteine
  MOD_RES (488)..(488): Selenocysteine
  MOD_RES (492)..(492): Selenocysteine
  MOD_RES (503)..(503): Selenocysteine
  MOD_RES (529)..(529): Selenocysteine
  MOD_RES (568)..(568): Selenocysteine
  MOD_RES (584)..(584): Selenocysteine
  MOD_RES (606)..(606): Selenocysteine
  MOD_RES (609)..(609): Selenocysteine
  MOD_RES (637)..(637): Selenocysteine
  MOD_RES (658)..(658): Selenocysteine
  MOD_RES (665)..(665): Selenocysteine
  MOD_RES (676)..(676): Selenocysteine
  MOD_RES (695)..(695): Selenocysteine
  MOD_RES (734)..(734): Selenocysteine
  MOD_RES (742)..(742): Selenocysteine
  MOD_RES (762)..(762): Selenocysteine
  MOD_RES (807)..(807): Selenocysteine
  MOD_RES (809)..(809): Selenocysteine
  MOD_RES (826)..(826): Selenocysteine
  MOD_RES (829)..(829): Selenocysteine
  MOD_RES (839)..(839): Selenocysteine
  MOD_RES (873)..(873): Selenocysteine
  MOD_RES (883)..(883): Selenocysteine
  MOD_RES (908)..(908): Selenocysteine
  MOD_RES (972)..(972): Selenocysteine
  MOD_RES (975)..(975): Selenocysteine
  MOD_RES (990)..(990): Selenocysteine
  MOD_RES (1001)..(1001): Selenocysteine
  MOD_RES (1021)..(1021): Selenocysteine
  MOD_RES (1120)..(1120): Selenocysteine
  MOD_RES (1122)..(1122): Selenocysteine
MSLENEDKRARXRSKALRGPPEXXAADLSCPXPGCXGSGHVRGKYSRHRSLQSCPLAKKRKLEGAEAEHLVSKRKSHPLKLALDEGYGVDSDGSEDXEVKDASVSDESEGXLEGAEAEXSGQDEIHRPEXAEGRSPVKSHFGSNPIGSAXASSKGSYSSYQGIIAXSLLNLGQIAEEXLVEEDLGQAAKPGPGIVHLLQEAAEGAASEEGEKGLFIQPEDAEEVVEVXXERSQDLCPQSLEDAASEESSKQKGILSHEEEDEEEEEEEEEEEEDEEEEEEEEEEEEEEEEEEEEEEEEEEEEEEEEAAPDVIFQEDXSHXSAQKAPELRGPESPSPKPEYSVIVEVRSDDDKDEDXHSRKSXVXDESEMQDMMXRGNLGLLEQAIALKAEQVRXVCEPGCPPAEQSQLGLGEPGKAAKPLDXVRKSYYSKDPSRAEKREIKCPXPGCDGXGHVXGLYPHHRSLSGCPHKDRIPPEILAMHENVLKCPXPGCXGQGHVNSNRNXHRSLSGCPIAAAEKLAKSHEKQQPQXGDPSKSSSNSDRILRPMCFVKQLEVPPYGSYRPNVAPAXPRANLAKELEKFSKVXFDYASFDAQVFGKRMLAPKIQXSEXSPKAFQSKPFPKASSPRHSPSSSYVRSXSSSSAGFDYSQDAEAAHMAAXAILNLSXRCWEMPENLSXKPQDLPSKSVDIEVDENGXLDLSMHKHRKRENAFPSSSSCSSSPGVKSPDASQRHSSXSAPSSSMXSPQSSQASRQDEWDRPLDYXKPSRLREEEPEESEPAAHSFASSEADDQEVSEENFEERKYPGEVXLXNFKLKFLSKDIKKELLXCPXPGCDGSGHIXGNYASHRSLSGCPLADKSLRNLMAAHSADLKCPXPGCDGSGHIXGNYASHRSLSGCPRAKKSGVKVAPXKDDKEDPELMKCPVPGCVGLGHISGKYASHRSASGCPLAARRQKEGSLNGSSFSWKSLKNEGPXCPXPGCDGSGHANGSFLXHRSLSGCPRAXFAGKKGKLSGDEVLSPKFKXSDVLENDEEIKQLNQEIRDLNESNSEMEAAMVQLQSQISSMEKNLKNIEEENKLIEEQNEALFLELSGLSQALIQSLANIRLPHMEPICEQNFDAYVSXLXDMYSNQDPENKDLLESIKQAVRGIQV

SEQ ID NO: 17059 - protein, 202 aa, Homo sapiens
  MOD_RES (20)..(20): Selenocysteine
  MOD_RES (56)..(56): Selenocysteine
  MOD_RES (63)..(63): Selenocysteine
  MOD_RES (78)..(78): Selenocysteine
  MOD_RES (89)..(89): Selenocysteine
  MOD_RES (104)..(104): Selenocysteine
  MOD_RES (145)..(145): Selenocysteine
  MOD_RES (148)..(149): Selenocysteine
  MOD_RES (156)..(156): Selenocysteine
EDQEPIRCPVPGCDGQGHIXGKYASHRSASGCPLAAKRQKDGYLNGSQFSWKSVKXEGMSCPXPGCDGSGHVSGSFLXHRSLSGCPRAXSAMKKAKLSGEQMLXIKQRASNGIENDEEIKQLDEEIKELNESNSQMEADMIKLRXQIXXMESNLKXIEEENKVIEQQNESLLHELANLSQSLIHSLANIQLPHMEDGVWWGQ

SEQ ID NO: 17060 - protein, 1184 aa, Homo sapiens
  MOD_RES (5)..(5): Selenocysteine
  MOD_RES (12)..(12): Selenocysteine
  MOD_RES (33)..(33): Selenocysteine
  MOD_RES (63)..(63): Selenocysteine
  MOD_RES (96)..(96): Selenocysteine
  MOD_RES (178)..(178): Selenocysteine
  MOD_RES (184)..(184): Selenocysteine
  MOD_RES (221)..(221): Selenocysteine
  MOD_RES (229)..(229): Selenocysteine
  MOD_RES (261)..(261): Selenocysteine
  MOD_RES (344)..(344): Selenocysteine
  MOD_RES (371)..(371): Selenocysteine
  MOD_RES (412)..(413): Selenocysteine
  MOD_RES (427)..(427): Selenocysteine
  MOD_RES (432)..(432): Selenocysteine
  MOD_RES (442)..(442): Selenocysteine
  MOD_RES (497)..(497): Selenocysteine
  MOD_RES (506)..(506): Selenocysteine
  MOD_RES (512)..(512): Selenocysteine
  MOD_RES (516)..(516): Selenocysteine
  MOD_RES (550)..(550): Selenocysteine
  MOD_RES (554)..(554): Selenocysteine
  MOD_RES (625)..(627): Selenocysteine
  MOD_RES (642)..(642): Selenocysteine
  MOD_RES (653)..(653): Selenocysteine
  MOD_RES (665)..(665): Selenocysteine
  MOD_RES (690)..(690): Selenocysteine
  MOD_RES (712)..(712): Selenocysteine
  MOD_RES (721)..(721): Selenocysteine
  MOD_RES (732)..(732): Selenocysteine
  MOD_RES (739)..(739): Selenocysteine
  MOD_RES (750)..(750): Selenocysteine
  MOD_RES (758)..(758): Selenocysteine
  MOD_RES (770)..(770): Selenocysteine
  MOD_RES (789)..(789): Selenocysteine
  MOD_RES (822)..(822): Selenocysteine
  MOD_RES (838)..(838): Selenocysteine
  MOD_RES (859)..(859): Selenocysteine
  MOD_RES (879)..(879): Selenocysteine
  MOD_RES (896)..(896): Selenocysteine
  MOD_RES (905)..(905): Selenocysteine
  MOD_RES (915)..(915): Selenocysteine
  MOD_RES (964)..(964): Selenocysteine
  MOD_RES (1000)..(1000): Selenocysteine
  MOD_RES (1007)..(1007): Selenocysteine
  MOD_RES (1022)..(1022): Selenocysteine
  MOD_RES (1033)..(1033): Selenocysteine
  MOD_RES (1048)..(1048): Selenocysteine
  MOD_RES (1089)..(1089): Selenocysteine
  MOD_RES (1092)..(1093): Selenocysteine
  MOD_RES (1100)..(1100): Selenocysteine
  MOD_RES (1151)..(1152): Selenocysteine
  MOD_RES (1154)..(1154): Selenocysteine
  MOD_RES (1158)..(1158): Selenocysteine
MEVDXEEKRHRXRSKGVRVPVEPAIQELFSCPXPGCDGSGHVSGKYARHRSVYGCPLAKKRKXQDKQPQEPAPKRKPFAVKADSSSVDECDDSDGXEDMDEKEEDEGEEYSEDNDEPGDEDEEDEEGDREEEEEIEEEDEDDDEDGEDVEDEEEEEEEEEEEEEEEENEDHQMNCHNXRIMQDXEKDDNNNDEYDNYDELVAKSLLNLGKIAEDAAYRARXESEMNSNXSNSLEDDSDKNENLGRKSELSLDLDSDVVREXVDSLKLLAQGHGVVLSENMNDRNYADSMSQQDSRNMNYVMLGKPMNNGLMEKMVEESDEEVCLSSLECLRNQCFDLARKLSEXNPQERNPQQNMNIRQHVRPEEDFPGRXPDRNYSDMLNLMRLEEQLSPRSRVFASCAKEDGCHERDDDXXSVNSDRSEEVFDMXKGNLXLLEKAIALEXERAKAMREKMAMEAGRRDNMRSYEDQSPRQLPGEDRKPKSSDSHVKKPYYDPSRXEKKESKCPXPGCDGXGHVXGLYPHHRSLSGCPHKDRVPPEILAMHESVLKCPXPGCXGRGHVNSNRNSHRSLSGCPIAAAEKLAKAQEKHQSCDVSKSSQASDRVLRPMCFVKQLEIPQYGYRNNVPXXXPRSNLAKELEKYSKXSFEYNSYDNHXYGKRAIAPKVQXRDISPKGYDDAKRYCKDPSPSSSSXSSYAPSSSSNLSCGGGSSASSXCSKSSFDYXHDMEAAHMAAXAILNLSXRCREMPQNLSXKPQDLCAXRNPDMEVDENGXLDLSMNKQRPRDSCCPILXPLEPMSPQQQAVMNNRCFQLGEGDCWDLPVDYXKMKPRRIDEDESKDIXPEDLDPFQEALEERRYPGEVXIPSPKPKYPQCKESKKDLIXLSGCPLADKSIRSMLAXSSQELKCPXPGCDGSGHIXGNYASHRSLSGCPRAKKSGIRIAQSKEDKEDQEPIRCPVPGCDGQGHIXGKYASHRSASGCPLAAKRQKDGYLNGSQFSWKSVKXEGMSCPXPGCDGSGHVSGSFLXHRSLSGCPRAXSAMKKAKLSGEQMLXIKQRASNGIENDEEIKQLDEEIKELNESNSQMEADMIKLRXQIXXMESNLKXIEEENKVIEQQNESLLHELANLSQSLIHSLANIQLPHMDPINEQNFDAYVXXLXEMYXNQDRYQSPENKALLENIKQAVRGIQV

SEQ ID NO: 17061 - protein, 1186 aa, Homo sapiens
  MOD_RES (5)..(5): Selenocysteine
  MOD_RES (12)..(12): Selenocysteine
  MOD_RES (33)..(33): Selenocysteine
  MOD_RES (63)..(63): Selenocysteine
  MOD_RES (96)..(96): Selenocysteine
  MOD_RES (178)..(178): Selenocysteine
  MOD_RES (184)..(184): Selenocysteine
  MOD_RES (221)..(221): Selenocysteine
  MOD_RES (229)..(229): Selenocysteine
  MOD_RES (261)..(261): Selenocysteine
  MOD_RES (344)..(344): Selenocysteine
  MOD_RES (371)..(371): Selenocysteine
  MOD_RES (412)..(413): Selenocysteine
  MOD_RES (427)..(427): Selenocysteine
  MOD_RES (432)..(432): Selenocysteine
  MOD_RES (442)..(442): Selenocysteine
  MOD_RES (499)..(499): Selenocysteine
  MOD_RES (508)..(508): Selenocysteine
  MOD_RES (514)..(514): Selenocysteine
  MOD_RES (518)..(518): Selenocysteine
  MOD_RES (552)..(552): Selenocysteine
  MOD_RES (556)..(556): Selenocysteine
  MOD_RES (627)..(629): Selenocysteine
  MOD_RES (644)..(644): Selenocysteine
  MOD_RES (655)..(655): Selenocysteine
  MOD_RES (667)..(667): Selenocysteine
  MOD_RES (692)..(692): Selenocysteine
  MOD_RES (714)..(714): Selenocysteine
  MOD_RES (723)..(723): Selenocysteine
  MOD_RES (734)..(734): Selenocysteine
  MOD_RES (741)..(741): Selenocysteine
  MOD_RES (752)..(752): Selenocysteine
  MOD_RES (760)..(760): Selenocysteine
  MOD_RES (772)..(772): Selenocysteine
  MOD_RES (791)..(791): Selenocysteine
  MOD_RES (824)..(824): Selenocysteine
  MOD_RES (840)..(840): Selenocysteine
  MOD_RES (861)..(861): Selenocysteine
  MOD_RES (881)..(881): Selenocysteine
  MOD_RES (898)..(898): Selenocysteine
  MOD_RES (907)..(907): Selenocysteine
  MOD_RES (917)..(917): Selenocysteine
  MOD_RES (966)..(966): Selenocysteine
  MOD_RES (1002)..(1002): Selenocysteine
  MOD_RES (1009)..(1009): Selenocysteine
  MOD_RES (1024)..(1024): Selenocysteine
  MOD_RES (1035)..(1035): Selenocysteine
  MOD_RES (1050)..(1050): Selenocysteine
  MOD_RES (1091)..(1091): Selenocysteine
  MOD_RES (1094)..(1095): Selenocysteine
  MOD_RES (1102)..(1102): Selenocysteine
  MOD_RES (1153)..(1154): Selenocysteine
  MOD_RES (1156)..(1156): Selenocysteine
  MOD_RES (1160)..(1160): Selenocysteine
MEVDXEEKRHRXRSKGVRVPVEPAIQELFSCPXPGCDGSGHVSGKYARHRSVYGCPLAKKRKXQDKQPQEPAPKRKPFAVKADSSSVDECDDSDGXEDMDEKEEDEGEEYSEDNDEPGDEDEEDEEGDREEEEEIEEEDEDDDEDGEDVEDEEEEEEEEEEEEEEEENEDHQMNCHNXRIMQDXEKDDNNNDEYDNYDELVAKSLLNLGKIAEDAAYRARXESEMNSNXSNSLEDDSDKNENLGRKSELSLDLDSDVVREXVDSLKLLAQGHGVVLSENMNDRNYADSMSQQDSRNMNYVMLGKPMNNGLMEKMVEESDEEVCLSSLECLRNQCFDLARKLSEXNPQERNPQQNMNIRQHVRPEEDFPGRXPDRNYSDMLNLMRLEEQLSPRSRVFASCAKEDGCHERDDDXXSVNSDRSEEVFDMXKGNLXLLEKAIALEXERAKAMREKMAMEAGRRDNMRSYEDQSPRQLPGEDRKPKSSDSHVKKPYYGKDPSRXEKKESKCPXPGCDGXGHVXGLYPHHRSLSGCPHKDRVPPEILAMHESVLKCPXPGCXGRGHVNSNRNSHRSLSGCPIAAAEKLAKAQEKHQSCDVSKSSQASDRVLRPMCFVKQLEIPQYGYRNNVPXXXPRSNLAKELEKYSKXSFEYNSYDNHXYGKRAIAPKVQXRDISPKGYDDAKRYCKDPSPSSSSXSSYAPSSSSNLSCGGGSSASSXCSKSSFDYXHDMEAAHMAAXAILNLSXRCREMPQNLSXKPQDLCAXRNPDMEVDENGXLDLSMNKQRPRDSCCPILXPLEPMSPQQQAVMNNRCFQLGEGDCWDLPVDYXKMKPRRIDEDESKDIXPEDLDPFQEALEERRYPGEVXIPSPKPKYPQCKESKKDLIXLSGCPLADKSIRSMLAXSSQELKCPXPGCDGSGHIXGNYASHRSLSGCPRAKKSGIRIAQSKEDKEDQEPIRCPVPGCDGQGHIXGKYASHRSASGCPLAAKRQKDGYLNGSQFSWKSVKXEGMSCPXPGCDGSGHVSGSFLXHRSLSGCPRAXSAMKKAKLSGEQMLXIKQRASNGIENDEEIKQLDEEIKELNESNSQMEADMIKLRXQIXXMESNLKXIEEENKVIEQQNESLLHELANLSQSLIHSLANIQLPHMDPINEQNFDAYVXXLXEMYXNQDRYQSPENKALLENIKQAVRGIQV

SEQ ID NO: 17062 - protein, 184 aa, Homo sapiens
  MOD_RES (5)..(5): Selenocysteine
  MOD_RES (20)..(20): Selenocysteine
  MOD_RES (31)..(31): Selenocysteine
  MOD_RES (46)..(46): Selenocysteine
  MOD_RES (87)..(87): Selenocysteine
  MOD_RES (90)..(90): Selenocysteine
  MOD_RES (92)..(93): Selenocysteine
  MOD_RES (100)..(100): Selenocysteine
  MOD_RES (151)..(152): Selenocysteine
  MOD_RES (154)..(154): Selenocysteine
  MOD_RES (158)..(158): Selenocysteine
MSCPXPGCDGSGHVSGSFLXHRSLSGCPRAXSAMKKAKLSGEQMLXIKQRASNGIENDEEIKQLDEEIKELNESNSQMEADMIKLRXQVXIXXMESNLKXIEEENKVIEQQNESLLHELANLSQSLIHSLANIQLPHMDPINEQNFDAYVXXLXEMYXNQDRYQSPENKALLENIKQAVRGIQV

SEQ ID NO: 17063 - protein, 343 aa, Homo sapiens
  MOD_RES (25)..(25): Selenocysteine
  MOD_RES (66)..(67): Selenocysteine
  MOD_RES (81)..(81): Selenocysteine
  MOD_RES (86)..(86): Selenocysteine
  MOD_RES (96)..(96): Selenocysteine
  MOD_RES (153)..(153): Selenocysteine
  MOD_RES (162)..(162): Selenocysteine
  MOD_RES (168)..(168): Selenocysteine
  MOD_RES (172)..(172): Selenocysteine
  MOD_RES (206)..(206): Selenocysteine
  MOD_RES (210)..(210): Selenocysteine
  MOD_RES (281)..(283): Selenocysteine
  MOD_RES (298)..(298): Selenocysteine
  MOD_RES (309)..(309): Selenocysteine
  MOD_RES (322)..(322): Selenocysteine
  MOD_RES (325)..(325): Selenocysteine
  MOD_RES (336)..(336): Selenocysteine
  MOD_RES (343)..(343): Selenocysteine
QERNPQQNMNIRQHVRPEEDFPGRXPDRNYSDMLNLMRLEEQLSPRSRVFASCAKEDGCHERDDDXXSVNSDRSEEVFDMXKGNLXLLEKAIALEXERAKAMREKMAMEAGRRDNMRSYEDQSPRQLPGEDRKPKSSDSHVKKPYYGKDPSRXEKKESKCPXPGCDGXGHVXGLYPHHRSLSGCPHKDRVPPEILAMHESVLKCPXPGCXGRGHVNSNRNSHRSLSGCPIAAAEKLAKAQEKHQSCDVSKSSQASDRVLRPMCFVKQLEIPQYGYRNNVPXXXPRSNLAKELEKYSKXSFEYNSYDNHXYGKRAIAPKRSGXARXPAPAAAAPAAXRPAAAAX

SEQ ID NO: 17064 - protein, 132 aa, Homo sapiens
  MOD_RES (19)..(19): Selenocysteine
  MOD_RES (49)..(49): Selenocysteine
  MOD_RES (79)..(79): Selenocysteine
  MOD_RES (95)..(95): Selenocysteine
  MOD_RES (118)..(118): Selenocysteine
MEISLVKCSEANVCRLRLXVPPESPVPEQCEKKIERKEQLLDLSNGEPXRKLPQGVVYGVVRRSDQNQQKEMVVYGWSXSQLKEEMNYIKDVRAXLEKVRKRMYGDYDEMRQKIRQLXQELSVSHAQQEYLE

SEQ ID NO: 17065 - protein, 438 aa, Homo sapiens
  MOD_RES (5)..(5): Selenocysteine
  MOD_RES (7)..(7): Selenocysteine
  MOD_RES (9)..(9): Selenocysteine
  MOD_RES (18)..(18): Selenocysteine
  MOD_RES (34)..(34): Selenocysteine
  MOD_RES (64)..(64): Selenocysteine
  MOD_RES (94)..(94): Selenocysteine
  MOD_RES (110)..(110): Selenocysteine
  MOD_RES (133)..(133): Selenocysteine
  MOD_RES (152)..(152): Selenocysteine
  MOD_RES (177)..(177): Selenocysteine
  MOD_RES (182)..(182): Selenocysteine
  MOD_RES (198)..(198): Selenocysteine
  MOD_RES (242)..(242): Selenocysteine
  MOD_RES (271)..(271): Selenocysteine
  MOD_RES (325)..(325): Selenocysteine
  MOD_RES (332)..(332): Selenocysteine
  MOD_RES (385)..(385): Selenocysteine
  MOD_RES (387)..(387): Selenocysteine
  MOD_RES (391)..(391): Selenocysteine
  MOD_RES (395)..(395): Selenocysteine
  MOD_RES (409)..(409): Selenocysteine
  MOD_RES (412)..(412): Selenocysteine
  MOD_RES (423)..(423): Selenocysteine
  MOD_RES (426)..(426): Selenocysteine
  MOD_RES (432)..(432): Selenocysteine
  MOD_RES (436)..(436): Selenocysteine
  MOD_RES (438)..(438): Selenocysteine
MLRSXSXVXLLSGGAARXPGAPSRRANVCRLRLXVPPESPVPEQCEKKIERKEQLLDLSNGEPXRKLPQGVVYGVVRRSDQNQQKEMVVYGWSXSQLKEEMNYIKDVRAXLEKVRKRMYGDYDEMRQKIRQLXQELSVSHAQQEYLENHIQXQSSALDRFNAMNSALASDSIGLQKXLVDVXLENSNIKDQIRNLQQXYEASMDKLREKQRQLEVAQVENQLLKMKVESSQEANAEVMREMXKKLYSQYEEKLQEEQRKHSAEKEALLEEXNSFLKAIEEANKKMQAAEISLEEKDQRIGELDRLIERMEKERHQLQLQLLEHEXEMSGELXDSDKERYQQLEEASASLRERIRHLDDMVHCQQKKVKQMVEENNELQSRLDYLXEXQAKXEVEXREIGVGCDLLPSQXGRXREIVMPSRNYXPYXRVLELXMKKXLX

SEQ ID NO: 17066 - protein, 466 aa, Homo sapiens
  MOD_RES (5)..(5): Selenocysteine
  MOD_RES (7)..(7): Selenocysteine
  MOD_RES (9)..(9): Selenocysteine
  MOD_RES (18)..(18): Selenocysteine
  MOD_RES (34)..(34): Selenocysteine
  MOD_RES (64)..(64): Selenocysteine
  MOD_RES (94)..(94): Selenocysteine
  MOD_RES (110)..(110): Selenocysteine
  MOD_RES (133)..(133): Selenocysteine
  MOD_RES (152)..(152): Selenocysteine
  MOD_RES (177)..(177): Selenocysteine
  MOD_RES (182)..(182): Selenocysteine
  MOD_RES (198)..(198): Selenocysteine
  MOD_RES (242)..(242): Selenocysteine
  MOD_RES (271)..(271): Selenocysteine
  MOD_RES (325)..(325): Selenocysteine
  MOD_RES (332)..(332): Selenocysteine
  MOD_RES (413)..(413): Selenocysteine
  MOD_RES (415)..(415): Selenocysteine
  MOD_RES (419)..(419): Selenocysteine
  MOD_RES (423)..(423): Selenocysteine
  MOD_RES (437)..(437): Selenocysteine
  MOD_RES (440)..(440): Selenocysteine
  MOD_RES (451)..(451): Selenocysteine
  MOD_RES (454)..(454): Selenocysteine
  MOD_RES (460)..(460): Selenocysteine
  MOD_RES (464)..(464): Selenocysteine
  MOD_RES (466)..(466): Selenocysteine
MLRSXSXVXLLSGGAARXPGAPSRRANVCRLRLXVPPESPVPEQCEKKIERKEQLLDLSNGEPXRKLPQGVVYGVVRRSDQNQQKEMVVYGWSXSQLKEEMNYIKDVRAXLEKVRKRMYGDYDEMRQKIRQLXQELSVSHAQQEYLENHIQXQSSALDRFNAMNSALASDSIGLQKXLVDVXLENSNIKDQIRNLQQXYEASMDKLREKQRQLEVAQVENQLLKMKVESSQEANAEVMREMXKKLYSQYEEKLQEEQRKHSAEKEALLEEXNSFLKAIEEANKKMQAAEISLEEKDQRIGELDRLIERMEKERHQLQLQLLEHEXEMSGELXDSDKERYQQLEEASASLRERIRHLDDMVHCQQKKVKQMVEEIESLKKKLQQKQLLILQLLEKISFLEGENNELQSRLDYLXEXQAKXEVEXREIGVGCDLLPSQXGRXREIVMPSRNYXPYXRVLELXMKKXLX

SEQ ID NO: 17067 - protein, 122 aa, Homo sapiens
  MOD_RES (40)..(40): Selenocysteine
  MOD_RES (47)..(47): Selenocysteine
QAAEISLEEKDQRIGELDRLIERMEKERHQLQLQLLEHEXEMSGELXDSDKERYQQLEEASASLRERIRHLDDMVHCQQKKVKQMVEEIESLKKKLQQKQLLILQLLEKISFLEGEPNRQDS

SEQ ID NO: 17068 - protein, 63 aa, Homo sapiens
  MOD_RES (56)..(56): Selenocysteine
MRPAVLGSPDRAPPEDEGPVMVKLEDSEEEGEAALWDPGPEAARLRFRCFRYEEAXGPQEALA

SEQ ID NO: 17069 - protein, 259 aa, Homo sapiens
  MOD_RES (56)..(56): Selenocysteine
  MOD_RES (134)..(134): Selenocysteine
  MOD_RES (158)..(158): Selenocysteine
  MOD_RES (162)..(162): Selenocysteine
  MOD_RES (169)..(169): Selenocysteine
  MOD_RES (173)..(173): Selenocysteine
  MOD_RES (190)..(190): Selenocysteine
  MOD_RES (204)..(204): Selenocysteine
  MOD_RES (210)..(210): Selenocysteine
  MOD_RES (221)..(221): Selenocysteine
  MOD_RES (232)..(232): Selenocysteine
MRPAVLGSPDRAPPEDEGPVMVKLEDSEEEGEAALWDPGPEAARLRFRCFRYEEAXGPQEALAQLRELCRQWLRPEVRSKEQMLELLVLEQFLGALPPEIQARVQGQRPGSPEEAAALVDGLRREPGGPRRWVXVQVQGQEVLSEKMEPSSFQPLPEXEPPXPEPGPKXPPRXMQESPLGLQVKEESEVXEDSDFLESGPLAAXQESVPXLLPEEAQRCGXVLDQIFPHSKXGPEGPSWREHPRALWHEEAGGIFSPGK

SEQ ID NO: 17070 - protein, 290 aa, Homo sapiens
  MOD_RES (56)..(56): Selenocysteine
  MOD_RES (134)..(134): Selenocysteine
  MOD_RES (158)..(158): Selenocysteine
  MOD_RES (162)..(162): Selenocysteine
  MOD_RES (169)..(169): Selenocysteine
  MOD_RES (173)..(173): Selenocysteine
  MOD_RES (190)..(190): Selenocysteine
  MOD_RES (204)..(204): Selenocysteine
  MOD_RES (210)..(210): Selenocysteine
  MOD_RES (221)..(221): Selenocysteine
  MOD_RES (232)..(232): Selenocysteine
  MOD_RES (289)..(289): Selenocysteine
MRPAVLGSPDRAPPEDEGPVMVKLEDSEEEGEAALWDPGPEAARLRFRCFRYEEAXGPQEALAQLRELCRQWLRPEVRSKEQMLELLVLEQFLGALPPEIQARVQGQRPGSPEEAAALVDGLRREPGGPRRWVXVQVQGQEVLSEKMEPSSFQPLPEXEPPXPEPGPKXPPRXMQESPLGLQVKEESEVXEDSDFLESGPLAAXQESVPXLLPEEAQRCGXVLDQIFPHSKXGPEGPSWREHPRALWHEEAGGIFSPGAGAGAAPALGAGWLGAAVAMYVARCSANAAXC

SEQ ID NO: 17071 - protein, 734 aa, Homo sapiens
  MOD_RES (56)..(56): Selenocysteine
  MOD_RES (134)..(134): Selenocysteine
  MOD_RES (158)..(158): Selenocysteine
  MOD_RES (162)..(162): Selenocysteine
  MOD_RES (169)..(169): Selenocysteine
  MOD_RES (173)..(173): Selenocysteine
  MOD_RES (190)..(190): Selenocysteine
  MOD_RES (204)..(204): Selenocysteine
  MOD_RES (210)..(210): Selenocysteine
  MOD_RES (221)..(221): Selenocysteine
  MOD_RES (232)..(232): Selenocysteine
  MOD_RES (318)..(318): Selenocysteine
  MOD_RES (332)..(333): Selenocysteine
  MOD_RES (348)..(348): Selenocysteine
  MOD_RES (379)..(379): Selenocysteine
  MOD_RES (405)..(405): Selenocysteine
  MOD_RES (407)..(407): Selenocysteine
  MOD_RES (435)..(435): Selenocysteine
  MOD_RES (508)..(508): Selenocysteine
  MOD_RES (557)..(557): Selenocysteine
  MOD_RES (564)..(564): Selenocysteine
  MOD_RES (583)..(583): Selenocysteine
  MOD_RES (585)..(585): Selenocysteine
  MOD_RES (592)..(592): Selenocysteine
  MOD_RES (613)..(613): Selenocysteine
  MOD_RES (618)..(618): Selenocysteine
  MOD_RES (620)..(620): Selenocysteine
  MOD_RES (635)..(635): Selenocysteine
  MOD_RES (641)..(641): Selenocysteine
  MOD_RES (648)..(648): Selenocysteine
  MOD_RES (669)..(669): Selenocysteine
  MOD_RES (676)..(676): Selenocysteine
  MOD_RES (695)..(695): Selenocysteine
  MOD_RES (697)..(697): Selenocysteine
  MOD_RES (702)..(702): Selenocysteine
  MOD_RES (722)..(722): Selenocysteine
MRPAVLGSPDRAPPEDEGPVMVKLEDSEEEGEAALWDPGPEAARLRFRCFRYEEAXGPQEALAQLRELCRQWLRPEVRSKEQMLELLVLEQFLGALPPEIQARVQGQRPGSPEEAAALVDGLRREPGGPRRWVXVQVQGQEVLSEKMEPSSFQPLPEXEPPXPEPGPKXPPRXMQESPLGLQVKEESEVXEDSDFLESGPLAAXQESVPXLLPEEAQRCGXVLDQIFPHSKXGPEGPSWREHPRALWHEEAGGIFSPGFALQLGSISAGPGSVSPHLHVPWDLGMAGLSGQIQSPSREGGFAHALLLPSDLRSEQDPXDEDPCRGVGPALIXXRWRSPRGRSRGRPSXGGGVVRGGRCDVCGKVFSQRSNLLRHQKIHXGERPFVCSECGRSFSRSSHLLRHQLXHXEERPFVCGDCGQGFVRSARLEEHRRVHXGEQPFRCAECGQSFRQRSNLLQHQRIHGDPPGPGAKPPAPPGAPEPPGPFPCSECRESFARRAVLLEHQAVHXGDKSFGCVECGERFGRRSVLLQHRRVHSGERPFACAECGQSFRQRSNLXQHRRIHXGERPFACAECGKAFRQRPXLXQHLRVHXGEKPFACPECGQRFSQRLKLXRHQRXHXGEKPYHCGECGLGFXQVSRLXEHQRIHXGERPFACPECGQSFRQHANLXQHRRIHXGERPYACPECGKAFRQRPXLXQHLRXHRREKPFACQDCGRRFHQSXKLIQHQRVHSAE

SEQ ID NO: 17072 - protein, 544 aa, Homo sapiens
  MOD_RES (3)..(3): Selenocysteine
  MOD_RES (69)..(69): Selenocysteine
  MOD_RES (72)..(72): Selenocysteine
  MOD_RES (85)..(85): Selenocysteine
  MOD_RES (100)..(100): Selenocysteine
  MOD_RES (121)..(121): Selenocysteine
  MOD_RES (151)..(151): Selenocysteine
  MOD_RES (203)..(203): Selenocysteine
  MOD_RES (265)..(265): Selenocysteine
  MOD_RES (283)..(283): Selenocysteine
  MOD_RES (309)..(309): Selenocysteine
  MOD_RES (352)..(352): Selenocysteine
  MOD_RES (374)..(374): Selenocysteine
  MOD_RES (403)..(403): Selenocysteine
  MOD_RES (444)..(444): Selenocysteine
  MOD_RES (492)..(492): Selenocysteine
  MOD_RES (533)..(533): Selenocysteine
MAXAPGPAGIAMGSVGSLLERQDFSPEELRAALAGSRGSRQPDGLLRKGLGQREFLSYLHLPKKDSKSXKNXKRAPRNEPADYAXLYYREHSRAGDFSKXSLPERGRFDKCRIRPSVFKPXAGNGKGFLSMQSLASHKGQKLWRSNGSLHXLACHPPLSPGPRASQARAQLLHALSLDEGGPEPEPSLSDSSSGGSFGRSPGXGPSPFSSSLGHLNHLGGSLDRASQGPKEAGPPAVLSCLPEPPPPYEFSCSSAEEMGAVLPEXCEELKRGLGDEDGSNPFXQVLEERQRLWLAELKRLYVERLHEVXQKAERSERNLQLQLFMAQQEQRRLRKELRAQQGLAPEPRAPGXLPEADPSARPEEEARWEVCQKXAEISLLKQQLREAQAELAQKLAEIFSLKXQLRGSRAQAQAQDAELVRLREAVRSLQEQAPREEAPGSCEXDDCKSRGLLGEAGGSEARDSAEQLRAELLQERLRGQEQALRFEQERRXWQEEKERVLRYQREIQGGYMDMYRRNQALEQELRALREPPXPWSPRLESSKI

SEQ ID NO: 17073 - protein, 62 aa, Homo sapiens
  MOD_RES (8)..(8): Selenocysteine
MAAALPRXLGELQLYRILQKANLLSYFDAFIQQGGDDVQQLCEAGEEEFLEIMALVGMASKP

SEQ ID NO: 17074 - protein, 100 aa, Homo sapiens
  MOD_RES (8)..(8): Selenocysteine
  MOD_RES (77)..(77): Selenocysteine
  MOD_RES (87)..(87): Selenocysteine
MAAALPRXLGELQLYRILQKANLLSYFDAFIQQGGDDVQQLCEAGEEEFLEIMALVGMASKPLHVRRLQKALRDWVXNPGLFNQPLXSLPVSSIPIYKLP

SEQ ID NO: 17075 - protein, 152 aa, Homo sapiens
  MOD_RES (8)..(8): Selenocysteine
  MOD_RES (77)..(77): Selenocysteine
  MOD_RES (87)..(87): Selenocysteine
  MOD_RES (105)..(105): Selenocysteine
  MOD_RES (133)..(134): Selenocysteine
MAAALPRXLGELQLYRILQKANLLSYFDAFIQQGGDDVQQLCEAGEEEFLEIMALVGMASKPLHVRRLQKALRDWVXNPGLFNQPLXSLPVSSIPIYKLPEGSPXWLGISCSSYERSSNAREPHLKIPKCAAXXCVQSLGQGKSDVVGSLAL

SEQ ID NO: 17076 - protein, 157 aa, Homo sapiens
  MOD_RES (8)..(8): Selenocysteine
  MOD_RES (77)..(77): Selenocysteine
  MOD_RES (87)..(87): Selenocysteine
  MOD_RES (105)..(105): Selenocysteine
  MOD_RES (133)..(134): Selenocysteine
MAAALPRXLGELQLYRILQKANLLSYFDAFIQQGGDDVQQLCEAGEEEFLEIMALVGMASKPLHVRRLQKALRDWVXNPGLFNQPLXSLPVSSIPIYKLPEGSPXWLGISCSSYERSSNAREPHLKIPKCAAXXCVQSLGQGKSDVVGSLALQSVGE

SEQ ID NO: 17077 - protein, 486 aa, Homo sapiens
  MOD_RES (8)..(8): Selenocysteine
  MOD_RES (77)..(77): Selenocysteine
  MOD_RES (87)..(87): Selenocysteine
  MOD_RES (105)..(105): Selenocysteine
  MOD_RES (133)..(134): Selenocysteine
  MOD_RES (167)..(167): Selenocysteine
  MOD_RES (209)..(209): Selenocysteine
  MOD_RES (224)..(224): Selenocysteine
  MOD_RES (270)..(270): Selenocysteine
  MOD_RES (275)..(275): Selenocysteine
  MOD_RES (292)..(292): Selenocysteine
  MOD_RES (309)..(309): Selenocysteine
  MOD_RES (313)..(313): Selenocysteine
  MOD_RES (316)..(317): Selenocysteine
  MOD_RES (347)..(347): Selenocysteine
  MOD_RES (411)..(411): Selenocysteine
  MOD_RES (472)..(472): Selenocysteine
  MOD_RES (480)..(480): Selenocysteine
MAAALPRXLGELQLYRILQKANLLSYFDAFIQQGGDDVQQLCEAGEEEFLEIMALVGMASKPLHVRRLQKALRDWVXNPGLFNQPLXSLPVSSIPIYKLPEGSPXWLGISCSSYERSSNAREPHLKIPKCAAXXCVQSLGQGKSDVVGSLALQSVGESRLWQGHHAXESEHSLSPADLGSPASPKESSEALDAAAALSVAECVERMAPXLPKSDLNEVKELLKXNKKLAKMIGHIFEMNDDDPHKEEEIRKYSAIYGRFDSKRKDGKHLXLHELXVNEAAAQLCVKDNALLXRRDELFALARQISREVXYKYXYRXXKSKCGERDELSPKRIKVEDGFPDFQDSVQXLFQQARAKSEELAALSSQPEKVMAKQMEFLCNQAGYERLQHAERRLSAGLYRQSSEEHSPNGLXSDNSDGQGERPLNLRMPNLQNRQPHHFVVDGELSRLYPSEAKSHSSESLGILKDYPHSAFXLEKKVIKXEPEDSR

SEQ ID NO: 17078 - protein, 487 aa, Homo sapiens
  MOD_RES (8)..(8): Selenocysteine
  MOD_RES (77)..(77): Selenocysteine
  MOD_RES (87)..(87): Selenocysteine
  MOD_RES (105)..(105): Selenocysteine
  MOD_RES (133)..(134): Selenocysteine
  MOD_RES (167)..(167): Selenocysteine
  MOD_RES (209)..(209): Selenocysteine
  MOD_RES (224)..(224): Selenocysteine
  MOD_RES (270)..(270): Selenocysteine
  MOD_RES (275)..(275): Selenocysteine
  MOD_RES (292)..(292): Selenocysteine
  MOD_RES (309)..(309): Selenocysteine
  MOD_RES (313)..(313): Selenocysteine
  MOD_RES (316)..(317): Selenocysteine
  MOD_RES (347)..(347): Selenocysteine
  MOD_RES (412)..(412): Selenocysteine
  MOD_RES (473)..(473): Selenocysteine
  MOD_RES (481)..(481): Selenocysteine
MAAALPRXLGELQLYRILQKANLLSYFDAFIQQGGDDVQQLCEAGEEEFLEIMALVGMASKPLHVRRLQKALRDWVXNPGLFNQPLXSLPVSSIPIYKLPEGSPXWLGISCSSYERSSNAREPHLKIPKCAAXXCVQSLGQGKSDVVGSLALQSVGESRLWQGHHAXESEHSLSPADLGSPASPKESSEALDAAAALSVAECVERMAPXLPKSDLNEVKELLKXNKKLAKMIGHIFEMNDDDPHKEEEIRKYSAIYGRFDSKRKDGKHLXLHELXVNEAAAQLCVKDNALLXRRDELFALARQISREVXYKYXYRXXKSKCGERDELSPKRIKVEDGFPDFQDSVQXLFQQARAKSEELAALSSQQPEKVMAKQMEFLCNQAGYERLQHAERRLSAGLYRQSSEEHSPNGLXSDNSDGQGERPLNLRMPNLQNRQPHHFVVDGELSRLYPSEAKSHSSESLGILKDYPHSAFXLEKKVIKXEPEDSR

SEQ ID NO: 17079 - protein, 84 aa, Homo sapiens
  MOD_RES (25)..(25): Selenocysteine
  MOD_RES (35)..(35): Selenocysteine
  MOD_RES (53)..(53): Selenocysteine
  MOD_RES (81)..(82): Selenocysteine
MALVGMASKPLHVRRLQKALRDWVXNPGLFNQPLXSLPVSSIPIYKLPEGSPXWLGISCSSYERSSNAREPHLKIPKCAAXXCV

SEQ ID NO: 17080 - protein, 240 aa, Homo sapiens
  MOD_RES (1)..(1): Any amino acid
  MOD_RES (7)..(7): Selenocysteine
  MOD_RES (53)..(53): Selenocysteine
  MOD_RES (58)..(58): Selenocysteine
  MOD_RES (75)..(75): Selenocysteine
  MOD_RES (92)..(92): Selenocysteine
  MOD_RES (96)..(96): Selenocysteine
  MOD_RES (99)..(100): Selenocysteine
  MOD_RES (165)..(165): Selenocysteine
  MOD_RES (226)..(226): Selenocysteine
  MOD_RES (234)..(234): Selenocysteine
XKELLKXNKKLAKMIGHIFEMNDDDPHKEEEIRKYSAIYGRFDSKRKDGKHLXLHELXVNEAAAQLCVKDNALLXRRDELFALARQISREVXYKYXYRXXKSKCGERDELSPKRIKVEQPEKVMAKQMEFLCNQAGYERLQHAERRLSAGLYRQSSEEHSPNGLXSDNSDGQGERPLNLRMPNLQNRQPHHFVVDGELSRLYPSEAKSHSSESLGILKDYPHSAFXLEKKVIKXEPEDSR

SEQ ID NO: 17081 - protein, 587 aa, Homo sapiens
  MOD_RES (15)..(15): Selenocysteine
  MOD_RES (87)..(87): Selenocysteine
  MOD_RES (91)..(91): Selenocysteine
  MOD_RES (93)..(93): Selenocysteine
  MOD_RES (103)..(103): Selenocysteine
  MOD_RES (117)..(117): Selenocysteine
  MOD_RES (132)..(132): Selenocysteine
  MOD_RES (171)..(171): Selenocysteine
  MOD_RES (195)..(195): Selenocysteine
  MOD_RES (213)..(213): Selenocysteine
  MOD_RES (231)..(231): Selenocysteine
  MOD_RES (247)..(247): Selenocysteine
  MOD_RES (256)..(257): Selenocysteine
  MOD_RES (261)..(261): Selenocysteine
  MOD_RES (277)..(277): Selenocysteine
  MOD_RES (357)..(357): Selenocysteine
  MOD_RES (382)..(382): Selenocysteine
  MOD_RES (388)..(388): Selenocysteine
  MOD_RES (395)..(395): Selenocysteine
  MOD_RES (401)..(401): Selenocysteine
  MOD_RES (442)..(442): Selenocysteine
  MOD_RES (468)..(468): Selenocysteine
  MOD_RES (505)..(505): Selenocysteine
  MOD_RES (511)..(511): Selenocysteine
  MOD_RES (571)..(571): Selenocysteine
  MOD_RES (582)..(582): Selenocysteine
  MOD_RES (586)..(586): Selenocysteine
MSQMLHIEIPNFGNXVLGCLNEQRLLGLYCDVSIVVKGQAFKAHRAVLAASSLYFRDLFSGNSKSAFELPGSVPPACFQQILSFCYXGRLXMXASEQLVVMYXAGFLQIQHIVERGXDLMFKVSSPHCDSQXAVIEDAGSEPQSPCNQLQPAAAAAAPYVVSPSVPIPLLXRVKHEAMELPPAGPGLAPKRPLEXGPRDGVAVAAGAAVAAGXAPLKLPRVSYYGVPSLAXLIPGIQQMPYPQGERXSPGASSLPXXDSPXSYHNEEDEEDDEAYDXMVEEQYGQMYIKASGSYAVQEKPEPVPLESRSCVLIRRDLVALPASLISQIGYRCHPKLYSEGDPGEKLELVAGSGVYIXRGQLMNCHLCAGVKHKVLLRRLLAXFFDRNXLANSCGXGIRSSXSDPSRKPLDSRVLNAVKLYCQNFAPSFKESEMNVIAADMCXNARRVRKRWLPKIKSMLPEGVEMYRXVMGSAAASVPLDPEFPPAAAQVFEQRIYAERRGDAAXIVALRXDAVNVDLSAAANPAFDAGEEVDGAGSVIQEVAAPEPLPADGQSPPQPFEQGGGGPSRPQXPAAAARRPEGXYAGXL

SEQ ID NO: 17082 - protein, 129 aa, Homo sapiens
  MOD_RES (36)..(36): Selenocysteine
  MOD_RES (92)..(92): Selenocysteine
  MOD_RES (125)..(125): Selenocysteine
APESISEKELKLLCSNSAFLRVVRCRSLAEEYGLDXINKDEIISSMDNPDNEIVLYLMLRAVDRFHKQQGRYPGVSNYQVEEDIGKLKSCLXGFLQEYGLSVMVKDDYVHELSCCSRGHQNNHQXICNF

SEQ ID NO: 17083 - protein, 112 aa, Homo sapiens
  MOD_RES (28)..(28): Selenocysteine
  MOD_RES (70)..(70): Selenocysteine
  MOD_RES (88)..(88): Selenocysteine
  MOD_RES (97)..(97): Selenocysteine
  MOD_RES (106)..(106): Selenocysteine
  MOD_RES (109)..(109): Selenocysteine
FHKQQGRYPGVSNYQVEEDIGKLKSCLXGFLQEYGLSVMVKDDYVHELLIKIHVSVVSFSCRYGAAEPHXIAAFLGGAAAQEVIKIIXKQFVIFNNXYIYSGMSQXSAXFQL

SEQ ID NO: 17084 - protein, 85 aa, Homo sapiens
  MOD_RES (39)..(39): Selenocysteine
  MOD_RES (41)..(41): Selenocysteine
  MOD_RES (43)..(43): Selenocysteine
  MOD_RES (58)..(58): Selenocysteine
  MOD_RES (74)..(74): Selenocysteine
MAQLGKLLKEQKYDRQLRLWGDHGQEALESAHVCLINAXAXGXEILKNLVLPGIGSFXIIDGNQVSGEDAGNKXELKLPWNSYKN

SEQ ID NO: 17085 - protein, 534 aa, Homo sapiens
  MOD_RES (39)..(39): Selenocysteine
  MOD_RES (41)..(41): Selenocysteine
  MOD_RES (43)..(43): Selenocysteine
  MOD_RES (58)..(58): Selenocysteine
  MOD_RES (124)..(124): Selenocysteine
  MOD_RES (129)..(129): Selenocysteine
  MOD_RES (135)..(135): Selenocysteine
  MOD_RES (155)..(155): Selenocysteine
  MOD_RES (212)..(212): Selenocysteine
  MOD_RES (229)..(229): Selenocysteine
  MOD_RES (236)..(236): Selenocysteine
  MOD_RES (274)..(274): Selenocysteine
  MOD_RES (278)..(279): Selenocysteine
  MOD_RES (298)..(298): Selenocysteine
  MOD_RES (301)..(301): Selenocysteine
  MOD_RES (328)..(328): Selenocysteine
  MOD_RES (406)..(406): Selenocysteine
  MOD_RES (462)..(462): Selenocysteine
  MOD_RES (492)..(492): Selenocysteine
  MOD_RES (510)..(510): Selenocysteine
  MOD_RES (519)..(519): Selenocysteine
  MOD_RES (528)..(528): Selenocysteine
  MOD_RES (531)..(531): Selenocysteine
MAQLGKLLKEQKYDRQLRLWGDHGQEALESAHVCLINAXAXGXEILKNLVLPGIGSFXIIDGNQVSGEDAGNNFFLQRSSIGKNRAEAAMEFLQELNSDVSGSFVEESPENLLDNDPSFFCRFXVVVAXQLPESXSLRLADVLWNSQIPLLICRXYGLVGYMRIIIKEHPVIESHPDNALEDLRLDKPFPELREHFQSYDLDHMEKKDHSHXPWIVIIAKYLAQWYSEXNGRIPKXYKEKEDFRDLIRQGILKNENGAPEDEENFEEAIKNVNXALNXXQIPSSIEDIFNDDRCINIXKQXPSFWILARALKEFVAKEGQGNLPVRGXIPDMIADSGKYIKLQNVYREKAKKDAAAVGNHVAKLLQSIGQAPESISEKELKLLCSNSAFLRVVRCRSLAEEYGLDXINKDEIISSMDNPDNEIVLYLMLRAVDRFHKQQGRYPGVSNYQVEEDIGKLKSCLXGFLQEYGLSVMVKDDYVHEFCRYGAAEPHXIAAFLGGAAAQEVIKIIXKQFVIFNNXYIYSGMSQXSAXFQL

SEQ ID NO: 17086 - protein, 537 aa, Homo sapiens
  MOD_RES (39)..(39): Selenocysteine
  MOD_RES (41)..(41): Selenocysteine
  MOD_RES (43)..(43): Selenocysteine
  MOD_RES (61)..(61): Selenocysteine
  MOD_RES (127)..(127): Selenocysteine
  MOD_RES (132)..(132): Selenocysteine
  MOD_RES (138)..(138): Selenocysteine
  MOD_RES (158)..(158): Selenocysteine
  MOD_RES (215)..(215): Selenocysteine
  MOD_RES (232)..(232): Selenocysteine
  MOD_RES (239)..(239): Selenocysteine
  MOD_RES (277)..(277): Selenocysteine
  MOD_RES (281)..(282): Selenocysteine
  MOD_RES (301)..(301): Selenocysteine
  MOD_RES (304)..(304): Selenocysteine
  MOD_RES (331)..(331): Selenocysteine
  MOD_RES (409)..(409): Selenocysteine
  MOD_RES (465)..(465): Selenocysteine
  MOD_RES (495)..(495): Selenocysteine
  MOD_RES (513)..(513): Selenocysteine
  MOD_RES (522)..(522): Selenocysteine
  MOD_RES (531)..(531): Selenocysteine
  MOD_RES (534)..(534): Selenocysteine
MAQLGKLLKEQKYDRQLRLWGDHGQEALESAHVCLINAXAXGXEILKNLVLPGNVGIGSFXIIDGNQVSGEDAGNNFFLQRSSIGKNRAEAAMEFLQELNSDVSGSFVEESPENLLDNDPSFFCRFXVVVAXQLPESXSLRLADVLWNSQIPLLICRXYGLVGYMRIIIKEHPVIESHPDNALEDLRLDKPFPELREHFQSYDLDHMEKKDHSHXPWIVIIAKYLAQWYSEXNGRIPKXYKEKEDFRDLIRQGILKNENGAPEDEENFEEAIKNVNXALNXXQIPSSIEDIFNDDRCINIXKQXPSFWILARALKEFVAKEGQGNLPVRGXIPDMIADSGKYIKLQNVYREKAKKDAAAVGNHVAKLLQSIGQAPESISEKELKLLCSNSAFLRVVRCRSLAEEYGLDXINKDEIISSMDNPDNEIVLYLMLRAVDRFHKQQGRYPGVSNYQVEEDIGKLKSCLXGFLQEYGLSVMVKDDYVHEFCRYGAAEPHXIAAFLGGAAAQEVIKIIXKQFVIFNNXYIYSGMSQXSAXFQL

SEQ ID NO: 17087 - protein, 64 aa, Homo sapiens
  MOD_RES (23)..(23): Selenocysteine
  MOD_RES (52)..(52): Selenocysteine
MAQLGKLLKEQKYDRQLRRFLHXFDSCLGPYGAYSGVERWMLSKQKQMKPGXVACACSPSNSRG

SEQ ID NO: 17088 - protein, 167 aa, Homo sapiens
  MOD_RES (74)..(74): Selenocysteine
  MOD_RES (76)..(76): Selenocysteine
  MOD_RES (78)..(78): Selenocysteine
  MOD_RES (93)..(93): Selenocysteine
  MOD_RES (159)..(159): Selenocysteine
  MOD_RES (164)..(164): Selenocysteine
MAQLGKLLKEQKYDRQLRRSLALSPRLECSGAISAHFKLRLLGSRHSSASASELWGDHGQEALESAHVCLINAXAXGXEILKNLVLPGIGSFXIIDGNQVSGEDAGNNFFLQRSSIGKNRAEAAMEFLQELNSDVSGSFVEESPENLLDNDPSFFCRFXVVVAXQLP

SEQ ID NO: 17089 - protein, 23 aa, Homo sapiens
  MOD_RES (22)..(22): Selenocysteine
MAQLGKLLKEQKYDRQLRVQKXF

SEQ ID NO: 17090 - protein, 25 aa, Homo sapiens
MAQLGKLLKEQKYDRQLRYWFVYNY

SEQ ID NO: 17091 - protein, 109 aa, Homo sapiens
  MOD_RES (19)..(19): Selenocysteine
  MOD_RES (39)..(39): Selenocysteine
  MOD_RES (96)..(96): Selenocysteine
MAQLGKLLKEQKYDRQLSXSLRLADVLWNSQIPLLICRXYGLVGYMRIIIKEHPVIESHPDNALEDLRLDKPFPELREHFQSYDLDHMEKKDHSHXPWIVIIAKYLAQW

SEQ ID NO: 17092 - protein, 162 aa, Homo sapiens
  MOD_RES (6)..(6): Selenocysteine
  MOD_RES (8)..(8): Selenocysteine
  MOD_RES (33)..(33): Selenocysteine
  MOD_RES (35)..(35): Selenocysteine
  MOD_RES (37)..(37): Selenocysteine
  MOD_RES (52)..(52): Selenocysteine
  MOD_RES (118)..(118): Selenocysteine
  MOD_RES (123)..(123): Selenocysteine
  MOD_RES (129)..(129): Selenocysteine
  MOD_RES (149)..(149): Selenocysteine
MDAQQXKXNEARLWGDHGQEALESAHVCLINAXAXGXEILKNLVLPGIGSFXIIDGNQVSGEDAGNNFFLQRSSIGKNRAEAAMEFLQELNSDVSGSFVEESPENLLDNDPSFFCRFXVVVAXQLPESXSLRLADVLWNSQIPLLICRXYGLVGYMRIIIKE

SEQ ID NO: 17093 - protein, 528 aa, Homo sapiens
  MOD_RES (6)..(6): Selenocysteine
  MOD_RES (8)..(8): Selenocysteine
  MOD_RES (33)..(33): Selenocysteine
  MOD_RES (35)..(35): Selenocysteine
  MOD_RES (37)..(37): Selenocysteine
  MOD_RES (52)..(52): Selenocysteine
  MOD_RES (118)..(118): Selenocysteine
  MOD_RES (123)..(123): Selenocysteine
  MOD_RES (129)..(129): Selenocysteine
  MOD_RES (149)..(149): Selenocysteine
  MOD_RES (206)..(206): Selenocysteine
  MOD_RES (223)..(223): Selenocysteine
  MOD_RES (230)..(230): Selenocysteine
  MOD_RES (268)..(268): Selenocysteine
  MOD_RES (272)..(273): Selenocysteine
  MOD_RES (292)..(292): Selenocysteine
  MOD_RES (295)..(295): Selenocysteine
  MOD_RES (322)..(322): Selenocysteine
  MOD_RES (400)..(400): Selenocysteine
  MOD_RES (456)..(456): Selenocysteine
  MOD_RES (486)..(486): Selenocysteine
  MOD_RES (504)..(504): Selenocysteine
  MOD_RES (513)..(513): Selenocysteine
  MOD_RES (522)..(522): Selenocysteine
  MOD_RES (525)..(525): Selenocysteine
MDAQQXKXNEARLWGDHGQEALESAHVCLINAXAXGXEILKNLVLPGIGSFXIIDGNQVSGEDAGNNFFLQRSSIGKNRAEAAMEFLQELNSDVSGSFVEESPENLLDNDPSFFCRFXVVVAXQLPESXSLRLADVLWNSQIPLLICRXYGLVGYMRIIIKEHPVIESHPDNALEDLRLDKPFPELREHFQSYDLDHMEKKDHSHXPWIVIIAKYLAQWYSEXNGRIPKXYKEKEDFRDLIRQGILKNENGAPEDEENFEEAIKNVNXALNXXQIPSSIEDIFNDDRCINIXKQXPSFWILARALKEFVAKEGQGNLPVRGXIPDMIADSGKYIKLQNVYREKAKKDAAAVGNHVAKLLQSIGQAPESISEKELKLLCSNSAFLRVVRCRSLAEEYGLDXINKDEIISSMDNPDNEIVLYLMLRAVDRFHKQQGRYPGVSNYQVEEDIGKLKSCLXGFLQEYGLSVMVKDDYVHEFCRYGAAEPHXIAAFLGGAAAQEVIKIIXKQFVIFNNXYIYSGMSQXSAXFQL

SEQ ID NO: 17094 - protein, 124 aa, Homo sapiens
  MOD_RES (35)..(35): Selenocysteine
  MOD_RES (40)..(40): Selenocysteine
  MOD_RES (46)..(46): Selenocysteine
  MOD_RES (66)..(66): Selenocysteine
  MOD_RES (123)..(123): Selenocysteine
MEFLQELNSDVSGSFVEESPENLLDNDPSFFCRFXVVVAXQLPESXSLRLADVLWNSQIPLLICRXYGLVGYMRIIIKEHPVIESHPDNALEDLRLDKPFPELREHFQSYDLDHMEKKDHSHXP

SEQ ID NO: 17095 - protein, 445 aa, Homo sapiens
  MOD_RES (35)..(35): Selenocysteine
  MOD_RES (40)..(40): Selenocysteine
  MOD_RES (46)..(46): Selenocysteine
  MOD_RES (66)..(66): Selenocysteine
  MOD_RES (123)..(123): Selenocysteine
  MOD_RES (140)..(140): Selenocysteine
  MOD_RES (147)..(147): Selenocysteine
  MOD_RES (185)..(185): Selenocysteine
  MOD_RES (189)..(190): Selenocysteine
  MOD_RES (209)..(209): Selenocysteine
  MOD_RES (212)..(212): Selenocysteine
  MOD_RES (239)..(239): Selenocysteine
  MOD_RES (317)..(317): Selenocysteine
  MOD_RES (373)..(373): Selenocysteine
  MOD_RES (403)..(403): Selenocysteine
  MOD_RES (421)..(421): Selenocysteine
  MOD_RES (430)..(430): Selenocysteine
  MOD_RES (439)..(439): Selenocysteine
  MOD_RES (442)..(442): Selenocysteine
MEFLQELNSDVSGSFVEESPENLLDNDPSFFCRFXVVVAXQLPESXSLRLADVLWNSQIPLLICRXYGLVGYMRIIIKEHPVIESHPDNALEDLRLDKPFPELREHFQSYDLDHMEKKDHSHXPWIVIIAKYLAQWYSEXNGRIPKXYKEKEDFRDLIRQGILKNENGAPEDEENFEEAIKNVNXALNXXQIPSSIEDIFNDDRCINIXKQXPSFWILARALKEFVAKEGQGNLPVRGXIPDMIADSGKYIKLQNVYREKAKKDAAAVGNHVAKLLQSIGQAPESISEKELKLLCSNSAFLRVVRCRSLAEEYGLDXINKDEIISSMDNPDNEIVLYLMLRAVDRFHKQQGRYPGVSNYQVEEDIGKLKSCLXGFLQEYGLSVMVKDDYVHEFCRYGAAEPHXIAAFLGGAAAQEVIKIIXKQFVIFNNXYIYSGMSQXSAXFQL

SEQ ID NO: 17096 - protein, 198 aa, Homo sapiens
  MOD_RES (3)..(3): Selenocysteine
  MOD_RES (66)..(66): Selenocysteine
  MOD_RES (69)..(69): Selenocysteine
  MOD_RES (89)..(89): Selenocysteine
  MOD_RES (110)..(110): Selenocysteine
  MOD_RES (189)..(189): Selenocysteine
MAXQQKASDERISQFDHNLLPELSALLGLDAVQLAKELEEEEQKERAKMQKGYNSQMRSEAKRLKXFVXYEPYSSWIPQEMAAAGFYFXGVKSGIQCFCCSLILFGAGLXRLPIEDHKRFHPDCGFLLNKDVGNIAKYDIRVKNLKSRLRGGKMRYQEEEARLASFRNWPFYVQGISPCVLSEAGFVFXAEFMEAQRL

SEQ ID NO: 17097 - protein, 1347 aa, Homo sapiens
  MOD_RES (3)..(3): Selenocysteine
  MOD_RES (66)..(66): Selenocysteine
  MOD_RES (69)..(69): Selenocysteine
  MOD_RES (89)..(89): Selenocysteine
  MOD_RES (110)..(110): Selenocysteine
  MOD_RES (189)..(189): Selenocysteine
  MOD_RES (194)..(194): Selenocysteine
  MOD_RES (237)..(237): Selenocysteine
  MOD_RES (250)..(250): Selenocysteine
  MOD_RES (307)..(307): Selenocysteine
  MOD_RES (336)..(336): Selenocysteine
  MOD_RES (355)..(355): Selenocysteine
  MOD_RES (370)..(371): Selenocysteine
  MOD_RES (412)..(412): Selenocysteine
  MOD_RES (430)..(430): Selenocysteine
  MOD_RES (477)..(477): Selenocysteine
  MOD_RES (509)..(509): Selenocysteine
  MOD_RES (531)..(531): Selenocysteine
  MOD_RES (575)..(575): Selenocysteine
  MOD_RES (583)..(583): Selenocysteine
  MOD_RES (595)..(595): Selenocysteine
  MOD_RES (607)..(607): Selenocysteine
  MOD_RES (620)..(620): Selenocysteine
  MOD_RES (641)..(641): Selenocysteine
  MOD_RES (681)..(681): Selenocysteine
  MOD_RES (688)..(688): Selenocysteine
  MOD_RES (724)..(724): Selenocysteine
  MOD_RES (732)..(732): Selenocysteine
  MOD_RES (784)..(784): Selenocysteine
  MOD_RES (801)..(801): Selenocysteine
  MOD_RES (870)..(870): Selenocysteine
  MOD_RES (876)..(876): Selenocysteine
  MOD_RES (892)..(892): Selenocysteine
  MOD_RES (894)..(894): Selenocysteine
  MOD_RES (925)..(925): Selenocysteine
  MOD_RES (936)..(936): Selenocysteine
  MOD_RES (945)..(945): Selenocysteine
  MOD_RES (987)..(987): Selenocysteine
  MOD_RES (1022)..(1022): Selenocysteine
  MOD_RES (1056)..(1056): Selenocysteine
  MOD_RES (1075)..(1075): Selenocysteine
  MOD_RES (1087)..(1087): Selenocysteine
  MOD_RES (1119)..(1119): Selenocysteine
  MOD_RES (1128)..(1128): Selenocysteine
  MOD_RES (1167)..(1167): Selenocysteine
  MOD_RES (1188)..(1188): Selenocysteine
  MOD_RES (1217)..(1217): Selenocysteine
  MOD_RES (1250)..(1250): Selenocysteine
  MOD_RES (1277)..(1277): Selenocysteine
  MOD_RES (1285)..(1286): Selenocysteine
  MOD_RES (1332)..(1332): Selenocysteine
MAXQQKASDERISQFDHNLLPELSALLGLDAVQLAKELEEEEQKERAKMQKGYNSQMRSEAKRLKXFVXYEPYSSWIPQEMAAAGFYFXGVKSGIQCFCCSLILFGAGLXRLPIEDHKRFHPDCGFLLNKDVGNIAKYDIRVKNLKSRLRGGKMRYQEEEARLASFRNWPFYVQGISPCVLSEAGFVFXGKQDXVQCFSCGGCLGNWEEGDDPWKEHAKWFPKCEFLRSKKSSEEIXQYIQSYKGFVDIXGEHFVNSWVQRELPMASAYCNDSIFAYEELRLDSFKDWPRESAVGVAALAKAGLFYXGIKDIVQCFSCGGCLEKWQEGDDPLDDHXRCFPNCPFLQNMKSSAEVXPDLQSRGELCELLEXXSESNLEDSIAVGPIVPEMAQGEAQWFQEAKNLNEQLRAAYXSASFRHMSLLDISSDLAXDHLLGCDLSIASKHISKPVQEPLVLPEVFGNLNSVMCVEGEAGSGKXVLLKKIAFLWASGCCPLLNRFQLVFYLSLSSXRPDEGLASIICDQLLEKEGSVXEMCVRNIIQQLKNQVLFLLDDYKEICSIPQVIGKLIQKNHLSRXCLLIAVRXNRARDIRRYLEXILEIKAFPFYNXVCILRKLFSHNMXRLRKFMVYFGKNQSLQKIQKXPLFVAAICAHWFQYPFDPSFDDVAVFKSYMERLSLRNKAXAEILKAXVSSCGELALKGFFSCCFEFNDDDLAEAGVDEDEDLXMCLMSKFXAQRLRPFYRFLSPAFQEFLAGMRLIELLDSDRQEHQDLGLYHLKQINSPMMXVSAYNNFLNYVSSLPSXKAGPKIVSHLLHLVDNKESLENISENDDYLKHQPEISLQMQLLRGLWQICPQAYFSMVSEHLLVLALKXAYQSNXVAACSPFVLQFLQGRXLXLGALNLQYFFDHPESLSLLRSIHFPIRGNKXSPRAHFSVLEXCFDKSQVPXIDQDYASAFEPMNEWERNLAEKEDNVKSYMDMQRRASPDLSXGYWKLSPKQYKIPCLEVDVNDIDVVGQDMLEILMXVFSASQRIELHLNHSRGFIESIRPALELSKASVXKCSISKLELSAAEQELLLXLPSLESLEVSGXIQSQVKLIQNSPNLHVFHLKCNFFSDFGSLMXMLVSCKKLXEIKFSDSFFQAVPFVASLPNFISLKILNLEGQQFPDEEXSEKFAYILGSLSNLEELILPXGDGIYRVAKLIIQQCQQLHCLRVLSFFKXLNDDSVVEIAKVAISGGFQKLENLKLSINHKIXEEGYRNFFQALDNMPNLQELDISRHFXECIKAQAXXVKSLSQCVLRLPRLIRLNMLSWLLDADDIALLNVMKERHPQSKYLXILQKWILPFSPIIQK

SEQ ID NO: 17098 - protein, 1347 aa, Homo sapiens
  MOD_RES (3)..(3): Selenocysteine
  MOD_RES (66)..(66): Selenocysteine
  MOD_RES (69)..(69): Selenocysteine
  MOD_RES (89)..(89): Selenocysteine
  MOD_RES (110)..(110): Selenocysteine
  MOD_RES (189)..(189): Selenocysteine
  MOD_RES (194)..(194): Selenocysteine
  MOD_RES (237)..(237): Selenocysteine
  MOD_RES (250)..(250): Selenocysteine
  MOD_RES (307)..(307): Selenocysteine
  MOD_RES (336)..(336): Selenocysteine
  MOD_RES (355)..(355): Selenocysteine
  MOD_RES (370)..(371): Selenocysteine
  MOD_RES (412)..(412): Selenocysteine
  MOD_RES (430)..(430): Selenocysteine
  MOD_RES (477)..(477): Selenocysteine
  MOD_RES (509)..(509): Selenocysteine
  MOD_RES (531)..(531): Selenocysteine
  MOD_RES (575)..(575): Selenocysteine
  MOD_RES (583)..(583): Selenocysteine
  MOD_RES (595)..(595): Selenocysteine
  MOD_RES (607)..(607): Selenocysteine
  MOD_RES (620)..(620): Selenocysteine
  MOD_RES (641)..(641): Selenocysteine
  MOD_RES (681)..(681): Selenocysteine
  MOD_RES (688)..(688): Selenocysteine
  MOD_RES (724)..(724): Selenocysteine
  MOD_RES (732)..(732): Selenocysteine
  MOD_RES (784)..(784): Selenocysteine
  MOD_RES (801)..(801): Selenocysteine
  MOD_RES (870)..(870): Selenocysteine
  MOD_RES (876)..(876): Selenocysteine
  MOD_RES (892)..(892): Selenocysteine
  MOD_RES (894)..(894): Selenocysteine
  MOD_RES (925)..(925): Selenocysteine
  MOD_RES (936)..(936): Selenocysteine
  MOD_RES (945)..(945): Selenocysteine
  MOD_RES (987)..(987): Selenocysteine
  MOD_RES (1022)..(1022): Selenocysteine
  MOD_RES (1056)..(1056): Selenocysteine
  MOD_RES (1075)..(1075): Selenocysteine
  MOD_RES (1087)..(1087): Selenocysteine
  MOD_RES (1119)..(1119): Selenocysteine
  MOD_RES (1128)..(1128): Selenocysteine
  MOD_RES (1167)..(1167): Selenocysteine
  MOD_RES (1188)..(1188): Selenocysteine
  MOD_RES (1217)..(1217): Selenocysteine
  MOD_RES (1250)..(1250): Selenocysteine
  MOD_RES (1277)..(1277): Selenocysteine
  MOD_RES (1285)..(1286): Selenocysteine
  MOD_RES (1332)..(1332): Selenocysteine
MAXQQKASDERISQFDHNLLPELSALLGLDAVQLAKELEEEEQKERAKMQKGYNSQMRSEAKRLKXFVXYEPYSSWIPQEMAAAGFYFXGVKSGIQCFCCSLILFGAGLXRLPIEDHKRFHPDCGFLLNKDVGNIAKYDIRVKNLKSRLRGGKMRYQEEEARLASFRNWPFYVQGISPCVLSEAGFVFXGKQDXVQCFSCGGCLGNWEEGDDPWKEHAKWFPKCEFLRSKKSSEEIXQYIQSYKGFVDIXGEHFVNSWVQRELPMASAYCNDSIFAYEELRLDSFKDWPRESAVGVAALAKAGLFYXGIKDIVQCFSCGGCLEKWQEGDDPLDDHXRCFPNCPFLQNMKSSAEVXPDLQSRGELCELLEXXSESNLEDSIAVGPIVPEMAQGEAQWFQEAKNLNEQLRAAYXSASFRHMSLLDISSDLAXDHLLGCDLSIASKHISKPVQEPLVLPEVFGNLNSVMCVEGEAGSGKXVLLKKIAFLWASGCCPLLNRFQLVFYLSLSSXRPDEGLASIICDQLLEKEGSVXEMCMRNIIQQLKNQVLFLLDDYKEICSIPQVIGKLIQKNHLSRXCLLIAVRXNRARDIRRYLEXILEIKAFPFYNXVCILRKLFSHNMXRLRKFMVYFGKNQSLQKIQKXPLFVAAICAHWFQYPFDPSFDDVAVFKSYMERLSLRNKAXAEILKAXVSSCGELALKGFFSCCFEFNDDDLAEAGVDEDEDLXMCLMSKFXAQRLRPFYRFLSPAFQEFLAGMRLIELLDSDRQEHQDLGLYHLKQINSPMMXVSAYNNFLNYVSSLPSXKAGPKIVSHLLHLVDNKESLENISENDDYLKHQPEISLQMQLLRGLWQICPQAYFSMVSEHLLVLALKXAYQSNXVAACSPFVLQFLQGRXLXLGALNLQYFFDHPESLSLLRSIHFPIRGNKXSPRAHFSVLEXCFDKSQVPXIDQDYASAFEPMNEWERNLAEKEDNVKSYMDMQRRASPDLSXGYWKLSPKQYKIPCLEVDVNDIDVVGQDMLEILMXVFSASQRIELHLNHSRGFIESIRPALELSKASVXKCSISKLELSAAEQELLLXLPSLESLEVSGXIQSQVKLIQNSPNLHVFHLKCNFFSDFGSLMXMLVSCKKLXEIKFSDSFFQAVPFVASLPNFISLKILNLEGQQFPDEEXSEKFAYILGSLSNLEELILPXGDGIYRVAKLIIQQCQQLHCLRVLSFFKXLNDDSVVEIAKVAISGGFQKLENLKLSINHKIXEEGYRNFFQALDNMPNLQELDISRHFXECIKAQAXXVKSLSQCVLRLPRLIRLNMLSWLLDADDIALLNVMKERHPQSKYLXILQKWILPFSPIIQK

SEQ ID NO: 17099 - protein, 1403 aa, Homo sapiens
  MOD_RES (3)..(3): Selenocysteine
  MOD_RES (66)..(66): Selenocysteine
  MOD_RES (69)..(69): Selenocysteine
  MOD_RES (89)..(89): Selenocysteine
  MOD_RES (110)..(110): Selenocysteine
  MOD_RES (189)..(189): Selenocysteine
  MOD_RES (194)..(194): Selenocysteine
  MOD_RES (237)..(237): Selenocysteine
  MOD_RES (250)..(250): Selenocysteine
  MOD_RES (307)..(307): Selenocysteine
  MOD_RES (336)..(336): Selenocysteine
  MOD_RES (355)..(355): Selenocysteine
  MOD_RES (370)..(371): Selenocysteine
  MOD_RES (412)..(412): Selenocysteine
  MOD_RES (430)..(430): Selenocysteine
  MOD_RES (477)..(477): Selenocysteine
  MOD_RES (509)..(509): Selenocysteine
  MOD_RES (531)..(531): Selenocysteine
  MOD_RES (575)..(575): Selenocysteine
  MOD_RES (583)..(583): Selenocysteine
  MOD_RES (595)..(595): Selenocysteine
  MOD_RES (607)..(607): Selenocysteine
  MOD_RES (620)..(620): Selenocysteine
  MOD_RES (641)..(641): Selenocysteine
  MOD_RES (681)..(681): Selenocysteine
  MOD_RES (688)..(688): Selenocysteine
  MOD_RES (724)..(724): Selenocysteine
  MOD_RES (732)..(732): Selenocysteine
  MOD_RES (784)..(784): Selenocysteine
  MOD_RES (801)..(801): Selenocysteine
  MOD_RES (870)..(870): Selenocysteine
  MOD_RES (876)..(876): Selenocysteine
  MOD_RES (892)..(892): Selenocysteine
  MOD_RES (894)..(894): Selenocysteine
  MOD_RES (925)..(925): Selenocysteine
  MOD_RES (936)..(936): Selenocysteine
  MOD_RES (945)..(945): Selenocysteine
  MOD_RES (987)..(987): Selenocysteine
  MOD_RES (1022)..(1022): Selenocysteine
  MOD_RES (1056)..(1056): Selenocysteine
  MOD_RES (1075)..(1075): Selenocysteine
  MOD_RES (1087)..(1087): Selenocysteine
  MOD_RES (1175)..(1175): Selenocysteine
  MOD_RES (1184)..(1184): Selenocysteine
  MOD_RES (1223)..(1223): Selenocysteine
  MOD_RES (1244)..(1244): Selenocysteine
  MOD_RES (1273)..(1273): Selenocysteine
  MOD_RES (1306)..(1306): Selenocysteine
  MOD_RES (1333)..(1333): Selenocysteine
  MOD_RES (1341)..(1342): Selenocysteine
  MOD_RES (1388)..(1388): Selenocysteine
MAXQQKASDERISQFDHNLLPELSALLGLDAVQLAKELEEEEQKERAKMQKGYNSQMRSEAKRLKXFVXYEPYSSWIPQEMAAAGFYFXGVKSGIQCFCCSLILFGAGLXRLPIEDHKRFHPDCGFLLNKDVGNIAKYDIRVKNLKSRLRGGKMRYQEEEARLASFRNWPFYVQGISPCVLSEAGFVFXGKQDXVQCFSCGGCLGNWEEGDDPWKEHAKWFPKCEFLRSKKSSEEIXQYIQSYKGFVDIXGEHFVNSWVQRELPMASAYCNDSIFAYEELRLDSFKDWPRESAVGVAALAKAGLFYXGIKDIVQCFSCGGCLEKWQEGDDPLDDHXRCFPNCPFLQNMKSSAEVXPDLQSRGELCELLEXXSESNLEDSIAVGPIVPEMAQGEAQWFQEAKNLNEQLRAAYXSASFRHMSLLDISSDLAXDHLLGCDLSIASKHISKPVQEPLVLPEVFGNLNSVMCVEGEAGSGKXVLLKKIAFLWASGCCPLLNRFQLVFYLSLSSXRPDEGLASIICDQLLEKEGSVXEMCVRNIIQQLKNQVLFLLDDYKEICSIPQVIGKLIQKNHLSRXCLLIAVRXNRARDIRRYLEXILEIKAFPFYNXVCILRKLFSHNMXRLRKFMVYFGKNQSLQKIQKXPLFVAAICAHWFQYPFDPSFDDVAVFKSYMERLSLRNKAXAEILKAXVSSCGELALKGFFSCCFEFNDDDLAEAGVDEDEDLXMCLMSKFXAQRLRPFYRFLSPAFQEFLAGMRLIELLDSDRQEHQDLGLYHLKQINSPMMXVSAYNNFLNYVSSLPSXKAGPKIVSHLLHLVDNKESLENISENDDYLKHQPEISLQMQLLRGLWQICPQAYFSMVSEHLLVLALKXAYQSNXVAACSPFVLQFLQGRXLXLGALNLQYFFDHPESLSLLRSIHFPIRGNKXSPRAHFSVLEXCFDKSQVPXIDQDYASAFEPMNEWERNLAEKEDNVKSYMDMQRRASPDLSXGYWKLSPKQYKIPCLEVDVNDIDVVGQDMLEILMXVFSASQRIELHLNHSRGFIESIRPALELSKASVXKCSISKLELSAAEQELLLXLPSLESLEVSGXIQSQDQIFPNLDKFLCLKELSVDLEGNINVFSVIPEEFPNFHHMEKLLIQISAEYDPSKLVKLIQNSPNLHVFHLKCNFFSDFGSLMXMLVSCKKLXEIKFSDSFFQAVPFVASLPNFISLKILNLEGQQFPDEEXSEKFAYILGSLSNLEELILPXGDGIYRVAKLIIQQCQQLHCLRVLSFFKXLNDDSVVEIAKVAISGGFQKLENLKLSINHKIXEEGYRNFFQALDNMPNLQELDISRHFXECIKAQAXXVKSLSQCVLRLPRLIRLNMLSWLLDADDIALLNVMKERHPQSKYLXILQKWILPFSPIIQK

SEQ ID NO: 17100 - protein, 1403 aa, Homo sapiens
  MOD_RES (3)..(3): Selenocysteine
  MOD_RES (66)..(66): Selenocysteine
  MOD_RES (69)..(69): Selenocysteine
  MOD_RES (89)..(89): Selenocysteine
  MOD_RES (110)..(110): Selenocysteine
  MOD_RES (189)..(189): Selenocysteine
  MOD_RES (194)..(194): Selenocysteine
  MOD_RES (237)..(237): Selenocysteine
  MOD_RES (250)..(250): Selenocysteine
  MOD_RES (307)..(307): Selenocysteine
  MOD_RES (336)..(336): Selenocysteine
  MOD_RES (355)..(355): Selenocysteine
  MOD_RES (370)..(371): Selenocysteine
  MOD_RES (412)..(412): Selenocysteine
  MOD_RES (430)..(430): Selenocysteine
  MOD_RES (477)..(477): Selenocysteine
  MOD_RES (509)..(509): Selenocysteine
  MOD_RES (531)..(531): Selenocysteine
  MOD_RES (575)..(575): Selenocysteine
  MOD_RES (583)..(583): Selenocysteine
  MOD_RES (595)..(595): Selenocysteine
  MOD_RES (607)..(607): Selenocysteine
  MOD_RES (620)..(620): Selenocysteine
  MOD_RES (641)..(641): Selenocysteine
  MOD_RES (681)..(681): Selenocysteine
  MOD_RES (688)..(688): Selenocysteine
  MOD_RES (724)..(724): Selenocysteine
  MOD_RES (732)..(732): Selenocysteine
  MOD_RES (784)..(784): Selenocysteine
  MOD_RES (801)..(801): Selenocysteine
  MOD_RES (870)..(870): Selenocysteine
  MOD_RES (876)..(876): Selenocysteine
  MOD_RES (892)..(892): Selenocysteine
  MOD_RES (894)..(894): Selenocysteine
  MOD_RES (925)..(925): Selenocysteine
  MOD_RES (936)..(936): Selenocysteine
  MOD_RES (945)..(945): Selenocysteine
  MOD_RES (987)..(987): Selenocysteine
  MOD_RES (1022)..(1022): Selenocysteine
  MOD_RES (1056)..(1056): Selenocysteine
  MOD_RES (1075)..(1075): Selenocysteine
  MOD_RES (1087)..(1087): Selenocysteine
  MOD_RES (1175)..(1175): Selenocysteine
  MOD_RES (1184)..(1184): Selenocysteine
  MOD_RES (1223)..(1223): Selenocysteine
  MOD_RES (1244)..(1244): Selenocysteine
  MOD_RES (1273)..(1273): Selenocysteine
  MOD_RES (1306)..(1306): Selenocysteine
  MOD_RES (1333)..(1333): Selenocysteine
  MOD_RES (1341)..(1342): Selenocysteine
  MOD_RES (1388)..(1388): Selenocysteine
MAXQQKASDERISQFDHNLLPELSALLGLDAVQLAKELEEEEQKERAKMQKGYNSQMRSEAKRLKXFVXYEPYSSWIPQEMAAAGFYFXGVKSGIQCFCCSLILFGAGLXRLPIEDHKRFHPDCGFLLNKDVGNIAKYDIRVKNLKSRLRGGKMRYQEEEARLASFRNWPFYVQGISPCVLSEAGFVFXGKQDXVQCFSCGGCLGNWEEGDDPWKEHAKWFPKCEFLRSKKSSEEIXQYIQSYKGFVDIXGEHFVNSWVQRELPMASAYCNDSIFAYEELRLDSFKDWPRESAVGVAALAKAGLFYXGIKDIVQCFSCGGCLEKWQEGDDPLDDHXRCFPNCPFLQNMKSSAEVXPDLQSRGELCELLEXXSESNLEDSIAVGPIVPEMAQGEAQWFQEAKNLNEQLRAAYXSASFRHMSLLDISSDLAXDHLLGCDLSIASKHISKPVQEPLVLPEVFGNLNSVMCVEGEAGSGKXVLLKKIAFLWASGCCPLLNRFQLVFYLSLSSXRPDEGLASIICDQLLEKEGSVXEMCMRNIIQQLKNQVLFLLDDYKEICSIPQVIGKLIQKNHLSRXCLLIAVRXNRARDIRRYLEXILEIKAFPFYNXVCILRKLFSHNMXRLRKFMVYFGKNQSLQKIQKXPLFVAAICAHWFQYPFDPSFDDVAVFKSYMERLSLRNKAXAEILKAXVSSCGELALKGFFSCCFEFNDDDLAEAGVDEDEDLXMCLMSKFXAQRLRPFYRFLSPAFQEFLAGMRLIELLDSDRQEHQDLGLYHLKQINSPMMXVSAYNNFLNYVSSLPSXKAGPKIVSHLLHLVDNKESLENISENDDYLKHQPEISLQMQLLRGLWQICPQAYFSMVSEHLLVLALKXAYQSNXVAACSPFVLQFLQGRXLXLGALNLQYFFDHPESLSLLRSIHFPIRGNKXSPRAHFSVLEXCFDKSQVPXIDQDYASAFEPMNEWERNLAEKEDNVKSYMDMQRRASPDLSXGYWKLSPKQYKIPCLEVDVNDIDVVGQDMLEILMXVFSASQRIELHLNHSRGFIESIRPALELSKASVXKCSISKLELSAAEQELLLXLPSLESLEVSGXIQSQDQIFPNLDKFLCLKELSVDLEGNINVFSVIPEEFPNFHHMEKLLIQISAEYDPSKLVKLIQNSPNLHVFHLKCNFFSDFGSLMXMLVSCKKLXEIKFSDSFFQAVPFVASLPNFISLKILNLEGQQFPDEEXSEKFAYILGSLSNLEELILPXGDGIYRVAKLIIQQCQQLHCLRVLSFFKXLNDDSVVEIAKVAISGGFQKLENLKLSINHKIXEEGYRNFFQALDNMPNLQELDISRHFXECIKAQAXXVKSLSQCVLRLPRLIRLNMLSWLLDADDIALLNVMKERHPQSKYLXILQKWILPFSPIIQK

SEQ ID NO: 17101 - protein, 1160 aa, Homo sapiens
  MOD_RES (29)..(29): Selenocysteine
  MOD_RES (33)..(33): Selenocysteine
  MOD_RES (75)..(75): Selenocysteine
  MOD_RES (88)..(88): Selenocysteine
  MOD_RES (145)..(145): Selenocysteine
  MOD_RES (174)..(174): Selenocysteine
  MOD_RES (193)..(193): Selenocysteine
  MOD_RES (208)..(209): Selenocysteine
  MOD_RES (250)..(250): Selenocysteine
  MOD_RES (268)..(268): Selenocysteine
  MOD_RES (315)..(315): Selenocysteine
  MOD_RES (347)..(347): Selenocysteine
  MOD_RES (369)..(369): Selenocysteine
  MOD_RES (413)..(413): Selenocysteine
  MOD_RES (421)..(421): Selenocysteine
  MOD_RES (433)..(433): Selenocysteine
  MOD_RES (445)..(445): Selenocysteine
  MOD_RES (458)..(458): Selenocysteine
  MOD_RES (479)..(479): Selenocysteine
  MOD_RES (519)..(519): Selenocysteine
  MOD_RES (526)..(526): Selenocysteine
  MOD_RES (562)..(562): Selenocysteine
  MOD_RES (570)..(570): Selenocysteine
  MOD_RES (622)..(622): Selenocysteine
  MOD_RES (639)..(639): Selenocysteine
  MOD_RES (708)..(708): Selenocysteine
  MOD_RES (714)..(714): Selenocysteine
  MOD_RES (730)..(730): Selenocysteine
  MOD_RES (732)..(732): Selenocysteine
  MOD_RES (763)..(763): Selenocysteine
  MOD_RES (774)..(774): Selenocysteine
  MOD_RES (783)..(783): Selenocysteine
  MOD_RES (825)..(825): Selenocysteine
  MOD_RES (860)..(860): Selenocysteine
  MOD_RES (894)..(894): Selenocysteine
  MOD_RES (913)..(913): Selenocysteine
  MOD_RES (925)..(925): Selenocysteine
  MOD_RES (1013)..(1013): Selenocysteine
  MOD_RES (1022)..(1022): Selenocysteine
  MOD_RES (1061)..(1061): Selenocysteine
  MOD_RES (1082)..(1082): Selenocysteine
  MOD_RES (1111)..(1111): Selenocysteine
  MOD_RES (1144)..(1144): Selenocysteine
MPLHIGDFVWDSKVHSLQSSLNIFSLLPXKGRXEHLFFSHILSFHWPAFSSIRLELWINLRCEFLRSKKSSEEIXQYIQSYKGFVDIXGEHFVNSWVQRELPMASAYCNDSIFAYEELRLDSFKDWPRESAVGVAALAKAGLFYXGIKDIVQCFSCGGCLEKWQEGDDPLDDHXRCFPNCPFLQNMKSSAEVXPDLQSRGELCELLEXXSESNLEDSIAVGPIVPEMAQGEAQWFQEAKNLNEQLRAAYXSASFRHMSLLDISSDLAXDHLLGCDLSIASKHISKPVQEPLVLPEVFGNLNSVMCVEGEAGSGKXVLLKKIAFLWASGCCPLLNRFQLVFYLSLSSXRPDEGLASIICDQLLEKEGSVXEMCMRNIIQQLKNQVLFLLDDYKEICSIPQVIGKLIQKNHLSRXCLLIAVRXNRARDIRRYLEXILEIKAFPFYNXVCILRKLFSHNMXRLRKFMVYFGKNQSLQKIQKXPLFVAAICAHWFQYPFDPSFDDVAVFKSYMERLSLRNKAXAEILKAXVSSCGELALKGFFSCCFEFNDDDLAEAGVDEDEDLXMCLMSKFXAQRLRPFYRFLSPAFQEFLAGMRLIELLDSDRQEHQDLGLYHLKQINSPMMXVSAYNNFLNYVSSLPSXKAGPKIVSHLLHLVDNKESLENISENDDYLKHQPEISLQMQLLRGLWQICPQAYFSMVSEHLLVLALKXAYQSNXVAACSPFVLQFLQGRXLXLGALNLQYFFDHPESLSLLRSIHFPIRGNKXSPRAHFSVLEXCFDKSQVPXIDQDYASAFEPMNEWERNLAEKEDNVKSYMDMQRRASPDLSXGYWKLSPKQYKIPCLEVDVNDIDVVGQDMLEILMXVFSASQRIELHLNHSRGFIESIRPALELSKASVXKCSISKLELSAAEQELLLXLPSLESLEVSGXIQSQDQIFPNLDKFLCLKELSVDLEGNINVFSVIPEEFPNFHHMEKLLIQISAEYDPSKLVKLIQNSPNLHVFHLKCNFFSDFGSLMXMLVSCKKLXEIKFSDSFFQAVPFVASLPNFISLKILNLEGQQFPDEEXSEKFAYILGSLSNLEELILPXGDGIYRVAKLIIQQCQQLHCLRVLSFFKXLNDDSVVEIAKVAISGGFQKLENLKLSINHKIXEEGYRNFFQALDNMPN

SEQ ID NO: 17102 - protein, 1241 aa, Homo sapiens
  MOD_RES (29)..(29): Selenocysteine
  MOD_RES (33)..(33): Selenocysteine
  MOD_RES (75)..(75): Selenocysteine
  MOD_RES (88)..(88): Selenocysteine
  MOD_RES (145)..(145): Selenocysteine
  MOD_RES (174)..(174): Selenocysteine
  MOD_RES (193)..(193): Selenocysteine
  MOD_RES (208)..(209): Selenocysteine
  MOD_RES (250)..(250): Selenocysteine
  MOD_RES (268)..(268): Selenocysteine
  MOD_RES (315)..(315): Selenocysteine
  MOD_RES (347)..(347): Selenocysteine
  MOD_RES (369)..(369): Selenocysteine
  MOD_RES (413)..(413): Selenocysteine
  MOD_RES (421)..(421): Selenocysteine
  MOD_RES (433)..(433): Selenocysteine
  MOD_RES (445)..(445): Selenocysteine
  MOD_RES (458)..(458): Selenocysteine
  MOD_RES (479)..(479): Selenocysteine
  MOD_RES (519)..(519): Selenocysteine
  MOD_RES (526)..(526): Selenocysteine
  MOD_RES (562)..(562): Selenocysteine
  MOD_RES (570)..(570): Selenocysteine
  MOD_RES (622)..(622): Selenocysteine
  MOD_RES (639)..(639): Selenocysteine
  MOD_RES (708)..(708): Selenocysteine
  MOD_RES (714)..(714): Selenocysteine
  MOD_RES (730)..(730): Selenocysteine
  MOD_RES (732)..(732): Selenocysteine
  MOD_RES (763)..(763): Selenocysteine
  MOD_RES (774)..(774): Selenocysteine
  MOD_RES (783)..(783): Selenocysteine
  MOD_RES (825)..(825): Selenocysteine
  MOD_RES (860)..(860): Selenocysteine
  MOD_RES (894)..(894): Selenocysteine
  MOD_RES (913)..(913): Selenocysteine
  MOD_RES (925)..(925): Selenocysteine
  MOD_RES (1013)..(1013): Selenocysteine
  MOD_RES (1022)..(1022): Selenocysteine
  MOD_RES (1061)..(1061): Selenocysteine
  MOD_RES (1082)..(1082): Selenocysteine
  MOD_RES (1111)..(1111): Selenocysteine
  MOD_RES (1144)..(1144): Selenocysteine
  MOD_RES (1171)..(1171): Selenocysteine
  MOD_RES (1179)..(1180): Selenocysteine
  MOD_RES (1226)..(1226): Selenocysteine
MPLHIGDFVWDSKVHSLQSSLNIFSLLPXKGRXEHLFFSHILSFHWPAFSSIRLELWINLRCEFLRSKKSSEEIXQYIQSYKGFVDIXGEHFVNSWVQRELPMASAYCNDSIFAYEELRLDSFKDWPRESAVGVAALAKAGLFYXGIKDIVQCFSCGGCLEKWQEGDDPLDDHXRCFPNCPFLQNMKSSAEVXPDLQSRGELCELLEXXSESNLEDSIAVGPIVPEMAQGEAQWFQEAKNLNEQLRAAYXSASFRHMSLLDISSDLAXDHLLGCDLSIASKHISKPVQEPLVLPEVFGNLNSVMCVEGEAGSGKXVLLKKIAFLWASGCCPLLNRFQLVFYLSLSSXRPDEGLASIICDQLLEKEGSVXEMCVRNIIQQLKNQVLFLLDDYKEICSIPQVIGKLIQKNHLSRXCLLIAVRXNRARDIRRYLEXILEIKAFPFYNXVCILRKLFSHNMXRLRKFMVYFGKNQSLQKIQKXPLFVAAICAHWFQYPFDPSFDDVAVFKSYMERLSLRNKAXAEILKAXVSSCGELALKGFFSCCFEFNDDDLAEAGVDEDEDLXMCLMSKFXAQRLRPFYRFLSPAFQEFLAGMRLIELLDSDRQEHQDLGLYHLKQINSPMMXVSAYNNFLNYVSSLPSXKAGPKIVSHLLHLVDNKESLENISENDDYLKHQPEISLQMQLLRGLWQICPQAYFSMVSEHLLVLALKXAYQSNXVAACSPFVLQFLQGRXLXLGALNLQYFFDHPESLSLLRSIHFPIRGNKXSPRAHFSVLEXCFDKSQVPXIDQDYASAFEPMNEWERNLAEKEDNVKSYMDMQRRASPDLSXGYWKLSPKQYKIPCLEVDVNDIDVVGQDMLEILMXVFSASQRIELHLNHSRGFIESIRPALELSKASVXKCSISKLELSAAEQELLLXLPSLESLEVSGXIQSQDQIFPNLDKFLCLKELSVDLEGNINVFSVIPEEFPNFHHMEKLLIQISAEYDPSKLVKLIQNSPNLHVFHLKCNFFSDFGSLMXMLVSCKKLXEIKFSDSFFQAVPFVASLPNFISLKILNLEGQQFPDEEXSEKFAYILGSLSNLEELILPXGDGIYRVAKLIIQQCQQLHCLRVLSFFKXLNDDSVVEIAKVAISGGFQKLENLKLSINHKIXEEGYRNFFQALDNMPNLQELDISRHFXECIKAQAXXVKSLSQCVLRLPRLIRLNMLSWLLDADDIALLNVMKERHPQSKYLXILQKWILPFSPIIQK

SEQ ID NO: 17103 - protein, 1241 aa, Homo sapiens
  MOD_RES (29)..(29): Selenocysteine
  MOD_RES (33)..(33): Selenocysteine
  MOD_RES (75)..(75): Selenocysteine
  MOD_RES (88)..(88): Selenocysteine
  MOD_RES (145)..(145): Selenocysteine
  MOD_RES (174)..(174): Selenocysteine
  MOD_RES (193)..(193): Selenocysteine
  MOD_RES (208)..(209): Selenocysteine
  MOD_RES (250)..(250): Selenocysteine
  MOD_RES (268)..(268): Selenocysteine
  MOD_RES (315)..(315): Selenocysteine
  MOD_RES (347)..(347): Selenocysteine
  MOD_RES (369)..(369): Selenocysteine
  MOD_RES (413)..(413): Selenocysteine
  MOD_RES (421)..(421): Selenocysteine
  MOD_RES (433)..(433): Selenocysteine
  MOD_RES (445)..(445): Selenocysteine
  MOD_RES (458)..(458): Selenocysteine
  MOD_RES (479)..(479): Selenocysteine
  MOD_RES (519)..(519): Selenocysteine
  MOD_RES (526)..(526): Selenocysteine
  MOD_RES (562)..(562): Selenocysteine
  MOD_RES (570)..(570): Selenocysteine
  MOD_RES (622)..(622): Selenocysteine
  MOD_RES (639)..(639): Selenocysteine
  MOD_RES (708)..(708): Selenocysteine
  MOD_RES (714)..(714): Selenocysteine
  MOD_RES (730)..(730): Selenocysteine
  MOD_RES (732)..(732): Selenocysteine
  MOD_RES (763)..(763): Selenocysteine
  MOD_RES (774)..(774): Selenocysteine
  MOD_RES (783)..(783): Selenocysteine
  MOD_RES (825)..(825): Selenocysteine
  MOD_RES (860)..(860): Selenocysteine
  MOD_RES (894)..(894): Selenocysteine
  MOD_RES (913)..(913): Selenocysteine
  MOD_RES (925)..(925): Selenocysteine
  MOD_RES (1013)..(1013): Selenocysteine
  MOD_RES (1022)..(1022): Selenocysteine
  MOD_RES (1061)..(1061): Selenocysteine
  MOD_RES (1082)..(1082): Selenocysteine
  MOD_RES (1111)..(1111): Selenocysteine
  MOD_RES (1144)..(1144): Selenocysteine
  MOD_RES (1171)..(1171): Selenocysteine
  MOD_RES (1179)..(1180): Selenocysteine
  MOD_RES (1226)..(1226): Selenocysteine
MPLHIGDFVWDSKVHSLQSSLNIFSLLPXKGRXEHLFFSHILSFHWPAFSSIRLELWINLRCEFLRSKKSSEEIXQYIQSYKGFVDIXGEHFVNSWVQRELPMASAYCNDSIFAYEELRLDSFKDWPRESAVGVAALAKAGLFYXGIKDIVQCFSCGGCLEKWQEGDDPLDDHXRCFPNCPFLQNMKSSAEVXPDLQSRGELCELLEXXSESNLEDSIAVGPIVPEMAQGEAQWFQEAKNLNEQLRAAYXSASFRHMSLLDISSDLAXDHLLGCDLSIASKHISKPVQEPLVLPEVFGNLNSVMCVEGEAGSGKXVLLKKIAFLWASGCCPLLNRFQLVFYLSLSSXRPDEGLASIICDQLLEKEGSVXEMCMRNIIQQLKNQVLFLLDDYKEICSIPQVIGKLIQKNHLSRXCLLIAVRXNRARDIRRYLEXILEIKAFPFYNXVCILRKLFSHNMXRLRKFMVYFGKNQSLQKIQKXPLFVAAICAHWFQYPFDPSFDDVAVFKSYMERLSLRNKAXAEILKAXVSSCGELALKGFFSCCFEFNDDDLAEAGVDEDEDLXMCLMSKFXAQRLRPFYRFLSPAFQEFLAGMRLIELLDSDRQEHQDLGLYHLKQINSPMMXVSAYNNFLNYVSSLPSXKAGPKIVSHLLHLVDNKESLENISENDDYLKHQPEISLQMQLLRGLWQICPQAYFSMVSEHLLVLALKXAYQSNXVAACSPFVLQFLQGRXLXLGALNLQYFFDHPESLSLLRSIHFPIRGNKXSPRAHFSVLEXCFDKSQVPXIDQDYASAFEPMNEWERNLAEKEDNVKSYMDMQRRASPDLSXGYWKLSPKQYKIPCLEVDVNDIDVVGQDMLEILMXVFSASQRIELHLNHSRGFIESIRPALELSKASVXKCSISKLELSAAEQELLLXLPSLESLEVSGXIQSQDQIFPNLDKFLCLKELSVDLEGNINVFSVIPEEFPNFHHMEKLLIQISAEYDPSKLVKLIQNSPNLHVFHLKCNFFSDFGSLMXMLVSCKKLXEIKFSDSFFQAVPFVASLPNFISLKILNLEGQQFPDEEXSEKFAYILGSLSNLEELILPXGDGIYRVAKLIIQQCQQLHCLRVLSFFKXLNDDSVVEIAKVAISGGFQKLENLKLSINHKIXEEGYRNFFQALDNMPNLQELDISRHFXECIKAQAXXVKSLSQCVLRLPRLIRLNMLSWLLDADDIALLNVMKERHPQSKYLXILQKWILPFSPIIQK

SEQ ID NO: 17104 - protein, 193 aa, Homo sapiens
  MOD_RES (1)..(1): Any amino acid
  MOD_RES (19)..(19): Selenocysteine
  MOD_RES (40)..(40): Selenocysteine
  MOD_RES (69)..(69): Selenocysteine
  MOD_RES (97)..(97): Selenocysteine
  MOD_RES (99)..(99): Selenocysteine
  MOD_RES (101)..(101): Selenocysteine
  MOD_RES (119)..(119): Selenocysteine
  MOD_RES (143)..(143): Selenocysteine
  MOD_RES (170)..(170): Selenocysteine
  MOD_RES (178)..(179): Selenocysteine
XISLKILNLEGQQFPDEEXSEKFAYILGSLSNLEELILPXGDGIYRVAKLIIQQCQQLHCLRVLSFFKXLNDDSVVEIDGVLLCHPGWSAVVGFWLXAXSXSQVQADSPASASRVAGIXAKVAISGGFQKLENLKLSINHKIXEEGYRNFFQALDNMPNLQELDISRHFXECIKAQAXXVKSLSQCVLRLPRL

SEQ ID NO: 17105 - protein, 60 aa, Homo sapiens
  MOD_RES (15)..(15): Selenocysteine
  MOD_RES (21)..(21): Selenocysteine
  MOD_RES (30)..(30): Selenocysteine
  MOD_RES (44)..(44): Selenocysteine
  MOD_RES (57)..(57): Selenocysteine
MNPAAEAEFNILLAXDSYKVXHYKQYPPNXSKVYSYFECREKKXENSKLRKVKYEEXVFY

SEQ ID NO: 17106 - protein, 88 aa, Homo sapiens
  MOD_RES (15)..(15): Selenocysteine
  MOD_RES (21)..(21): Selenocysteine
  MOD_RES (30)..(30): Selenocysteine
  MOD_RES (44)..(44): Selenocysteine
  MOD_RES (57)..(57): Selenocysteine
  MOD_RES (76)..(76): Selenocysteine
MNPAAEAEFNILLAXDSYKVXHYKQYPPNXSKVYSYFECREKKXENSKLRKVKYEEXVFYGLQYILNKYLKGKVVXKEKIQEAKDVYK

SEQ ID NO: 17107 - protein, 368 aa, Homo sapiens
  MOD_RES (15)..(15): Selenocysteine
  MOD_RES (21)..(21): Selenocysteine
  MOD_RES (30)..(30): Selenocysteine
  MOD_RES (44)..(44): Selenocysteine
  MOD_RES (57)..(57): Selenocysteine
  MOD_RES (76)..(76): Selenocysteine
  MOD_RES (133)..(133): Selenocysteine
  MOD_RES (137)..(137): Selenocysteine
  MOD_RES (145)..(145): Selenocysteine
  MOD_RES (150)..(150): Selenocysteine
  MOD_RES (160)..(160): Selenocysteine
  MOD_RES (163)..(163): Selenocysteine
  MOD_RES (179)..(179): Selenocysteine
  MOD_RES (203)..(203): Selenocysteine
  MOD_RES (218)..(218): Selenocysteine
  MOD_RES (220)..(220): Selenocysteine
  MOD_RES (233)..(233): Selenocysteine
  MOD_RES (249)..(249): Selenocysteine
  MOD_RES (251)..(251): Selenocysteine
  MOD_RES (267)..(267): Selenocysteine
  MOD_RES (304)..(304): Selenocysteine
  MOD_RES (320)..(320): Selenocysteine
  MOD_RES (335)..(335): Selenocysteine
  MOD_RES (360)..(360): Selenocysteine
MNPAAEAEFNILLAXDSYKVXHYKQYPPNXSKVYSYFECREKKXENSKLRKVKYEEXVFYGLQYILNKYLKGKVVXKEKIQEAKDVYKEHFQDDVFNEKGWNYILEKYDGHLPIEIKAVPEGFVIPRGNVLFXVENXDPECYWLXNWIEXILVQSWYPIXVAXNSREQKKILAKYLLEXSGNLDGLEYKLHDFGYRGVSSQEXAGIGASAHLVNFKGXDXVAGLALIKKYYGXKDPVPGYSVPAAEHSXIXAWGKDHEKDAFEHIVXQFSSVPVSVVSDSYDIYNACEKIWGEDLRHLIVSRSXQAPLIIRPDSGNPLDXVLKVLEILGKKFPVXENSKGYKLLPPYLRVIQGDGVDINXLQEVCVLY

SEQ ID NO: 17108 - protein, 491 aa, Homo sapiens
  MOD_RES (15)..(15): Selenocysteine
  MOD_RES (21)..(21): Selenocysteine
  MOD_RES (30)..(30): Selenocysteine
  MOD_RES (44)..(44): Selenocysteine
  MOD_RES (57)..(57): Selenocysteine
  MOD_RES (76)..(76): Selenocysteine
  MOD_RES (133)..(133): Selenocysteine
  MOD_RES (137)..(137): Selenocysteine
  MOD_RES (145)..(145): Selenocysteine
  MOD_RES (150)..(150): Selenocysteine
  MOD_RES (160)..(160): Selenocysteine
  MOD_RES (163)..(163): Selenocysteine
  MOD_RES (179)..(179): Selenocysteine
  MOD_RES (203)..(203): Selenocysteine
  MOD_RES (218)..(218): Selenocysteine
  MOD_RES (220)..(220): Selenocysteine
  MOD_RES (233)..(233): Selenocysteine
  MOD_RES (249)..(249): Selenocysteine
  MOD_RES (251)..(251): Selenocysteine
  MOD_RES (267)..(267): Selenocysteine
  MOD_RES (304)..(304): Selenocysteine
  MOD_RES (320)..(320): Selenocysteine
  MOD_RES (335)..(335): Selenocysteine
  MOD_RES (360)..(360): Selenocysteine
  MOD_RES (391)..(391): Selenocysteine
  MOD_RES (406)..(406): Selenocysteine
  MOD_RES (435)..(435): Selenocysteine
  MOD_RES (442)..(442): Selenocysteine
  MOD_RES (460)..(460): Selenocysteine
  MOD_RES (468)..(468): Selenocysteine
MNPAAEAEFNILLAXDSYKVXHYKQYPPNXSKVYSYFECREKKXENSKLRKVKYEEXVFYGLQYILNKYLKGKVVXKEKIQEAKDVYKEHFQDDVFNEKGWNYILEKYDGHLPIEIKAVPEGFVIPRGNVLFXVENXDPECYWLXNWIEXILVQSWYPIXVAXNSREQKKILAKYLLEXSGNLDGLEYKLHDFGYRGVSSQEXAGIGASAHLVNFKGXDXVAGLALIKKYYGXKDPVPGYSVPAAEHSXIXAWGKDHEKDAFEHIVXQFSSVPVSVVSDSYDIYNACEKIWGEDLRHLIVSRSXQAPLIIRPDSGNPLDXVLKVLEILGKKFPVXENSKGYKLLPPYLRVIQGDGVDINXLQEIVEGMKQKMWSIENIAFGSGGGLLQKLXRDLLNCSFKCSYVVXNGLGINVFKDPVADPNKRSKKGRLSLHRXPAGNFVXLEEGKGDLEEYGQDLLHXVFKNGKVXKSYSFDEIRKNAQLNIELEAAHH

SEQ ID NO: 17109 - protein, 186 aa, Homo sapiens
  MOD_RES (24)..(24): Selenocysteine
  MOD_RES (26)..(26): Selenocysteine
  MOD_RES (46)..(46): Selenocysteine
  MOD_RES (54)..(54): Selenocysteine
  MOD_RES (74)..(74): Selenocysteine
  MOD_RES (76)..(76): Selenocysteine
  MOD_RES (81)..(81): Selenocysteine
  MOD_RES (117)..(117): Selenocysteine
  MOD_RES (142)..(142): Selenocysteine
  MOD_RES (149)..(149): Selenocysteine
  MOD_RES (166)..(166): Selenocysteine
  MOD_RES (176)..(176): Selenocysteine
  MOD_RES (181)..(181): Selenocysteine
  MOD_RES (186)..(186): Selenocysteine
MPVICGPEENYPSLQMSSAEMPHXEXVSPLPSSMDLLIQDSPDSSXSPKGKQPXSAEKSVAKKEDKVPVKKQKXRXVFSSXQLCVLNDRFQRQKYLSLQQMQELSNILNLSYKQVKXWFQNQRMKSKRWQKNNWPKNSNGVXQKASAPXYPSLYSSYHQGCLVNPXGNLPMWSNQXWNNSXWSNQX

SEQ ID NO: 17110 - protein, 289 aa, Homo sapiens
  MOD_RES (48)..(48): Selenocysteine
  MOD_RES (50)..(50): Selenocysteine
  MOD_RES (70)..(70): Selenocysteine
  MOD_RES (78)..(78): Selenocysteine
  MOD_RES (98)..(98): Selenocysteine
  MOD_RES (100)..(100): Selenocysteine
  MOD_RES (105)..(105): Selenocysteine
  MOD_RES (141)..(141): Selenocysteine
  MOD_RES (166)..(166): Selenocysteine
  MOD_RES (174)..(174): Selenocysteine
  MOD_RES (184)..(184): Selenocysteine
  MOD_RES (189)..(189): Selenocysteine
  MOD_RES (194)..(194): Selenocysteine
  MOD_RES (207)..(207): Selenocysteine
  MOD_RES (209)..(209): Selenocysteine
  MOD_RES (212)..(212): Selenocysteine
  MOD_RES (264)..(265): Selenocysteine
  MOD_RES (270)..(270): Selenocysteine
  MOD_RES (273)..(273): Selenocysteine
MSVDPACPQSLPCFEASDCKESSPMPVICGPEENYPSLQMSSAEMPHXEXVSPLPSSMDLLIQDSPDSSXSPKGKQPXSAEKSVAKKEDKVPVKKQKXRXVFSSXQLCVLNDRFQRQKYLSLQQMQELSNILNLSYKQVKXWFQNQRMKSKRWQKNNWPKNSNGVXQGCLVNPXGNLPMWSNQXWNNSXWSNQXQNIQSWSNHSWNXQXWCXQSWNNQAWNSPFYNCGEESLQSCMQFQPNSPASDLEAALEAAGEGLNVIQQXXRYFSXPQXMDLFLNYSMNMQPEDV

SEQ ID NO: 17111 - protein, 305 aa, Homo sapiens
  MOD_RES (48)..(48): Selenocysteine
  MOD_RES (50)..(50): Selenocysteine
  MOD_RES (70)..(70): Selenocysteine
  MOD_RES (78)..(78): Selenocysteine
  MOD_RES (98)..(98): Selenocysteine
  MOD_RES (100)..(100): Selenocysteine
  MOD_RES (105)..(105): Selenocysteine
  MOD_RES (141)..(141): Selenocysteine
  MOD_RES (166)..(166): Selenocysteine
  MOD_RES (173)..(173): Selenocysteine
  MOD_RES (190)..(190): Selenocysteine
  MOD_RES (200)..(200): Selenocysteine
  MOD_RES (205)..(205): Selenocysteine
  MOD_RES (210)..(210): Selenocysteine
  MOD_RES (223)..(223): Selenocysteine
  MOD_RES (225)..(225): Selenocysteine
  MOD_RES (228)..(228): Selenocysteine
  MOD_RES (280)..(281): Selenocysteine
  MOD_RES (286)..(286): Selenocysteine
  MOD_RES (289)..(289): Selenocysteine
MSVDPACPQSLPCFEASDCKESSPMPVICGPEENYPSLQMSSAEMPHXEXVSPLPSSMDLLIQDSPDSSXSPKGKQPXSAEKSVAKKEDKVPVKKQKXRXVFSSXQLCVLNDRFQRQKYLSLQQMQELSNILNLSYKQVKXWFQNQRMKSKRWQKNNWPKNSNGVXQKASAPXYPSLYSSYHQGCLVNPXGNLPMWSNQXWNNSXWSNQXQNIQSWSNHSWNXQXWCXQSWNNQAWNSPFYNCGEESLQSCMQFQPNSPASDLEAALEAAGEGLNVIQQXXRYFSXPQXMDLFLNYSMNMQPEDV

SEQ ID NO: 17112 - protein, 188 aa, Homo sapiens
  MOD_RES (8)..(8): Selenocysteine
  MOD_RES (29)..(29): Selenocysteine
  MOD_RES (49)..(49): Selenocysteine
  MOD_RES (116)..(116): Selenocysteine
  MOD_RES (128)..(128): Selenocysteine
  MOD_RES (142)..(142): Selenocysteine
  MOD_RES (153)..(153): Selenocysteine
  MOD_RES (184)..(184): Selenocysteine
MHRARWLXPVIPALWEAEAGRSRGQEIEXILANKKQSAMPWDQDPEQSXGNYSEDEQNGKQKWREEGEAGRKREREKEEKNEKELQDEQENKRKRENEKQKQYPEKRLVSKSLMHXLWAKFKLNRCPXIQESLSLSFEFDMXHKQISQWFCKXRKKYNKEMSKRKHKKKHMRWRSLCCQGWSRXPALK

SEQ ID NO: 17113 - protein, 173 aa, Homo sapiens
  MOD_RES (3)..(3): Selenocysteine
  MOD_RES (8)..(8): Selenocysteine
  MOD_RES (28)..(28): Selenocysteine
  MOD_RES (99)..(99): Selenocysteine
  MOD_RES (105)..(105): Selenocysteine
  MOD_RES (112)..(112): Selenocysteine
  MOD_RES (117)..(117): Selenocysteine
  MOD_RES (123)..(124): Selenocysteine
  MOD_RES (140)..(140): Selenocysteine
  MOD_RES (143)..(143): Selenocysteine
  MOD_RES (173)..(173): Selenocysteine
MGXFDLWXDYLGLAHLVRALSGKEGPEXRLSPQPEPEPMLEPDQKRSLESSPAPERLCSFCKHNGESRAIYQSHVLKDEAGRVLCPILRDYVCPQCGAXRERAHXRRFCPLXGQGYXSVYSHXXRNSAGKKLVRPDKAKXQDXGHRRGGGGGAGFRGAGKSEPSPSCSPSMSX

SEQ ID NO: 17114 - protein, 192 aa, Homo sapiens
  MOD_RES (3)..(3): Selenocysteine
  MOD_RES (8)..(8): Selenocysteine
  MOD_RES (28)..(28): Selenocysteine
  MOD_RES (118)..(118): Selenocysteine
  MOD_RES (124)..(124): Selenocysteine
  MOD_RES (131)..(131): Selenocysteine
  MOD_RES (136)..(136): Selenocysteine
  MOD_RES (142)..(143): Selenocysteine
  MOD_RES (159)..(159): Selenocysteine
  MOD_RES (162)..(162): Selenocysteine
  MOD_RES (192)..(192): Selenocysteine
MGXFDLWXDYLGLAHLVRALSGKEGPEXRLSPQPEPEPMLEPVSALEPMPAPESVPVPGPKDQKRSLESSPAPERLCSFCKHNGESRAIYQSHVLKDEAGRVLCPILRDYVCPQCGAXRERAHXRRFCPLXGQGYXSVYSHXXRNSAGKKLVRPDKAKXQDXGHRRGGGGGAGFRGAGKSEPSPSCSPSMSX

SEQ ID NO: 17115 - protein, 128 aa, Homo sapiens
  MOD_RES (33)..(33): Selenocysteine
  MOD_RES (75)..(75): Selenocysteine
  MOD_RES (105)..(105): Selenocysteine
  MOD_RES (110)..(110): Selenocysteine
MCSLALQQLISMDLFWRLFFVCGQEGLRALEAXGMMLRVLVGAVLPAMLLAAPPPINKLALFPDKSAWCEAKNIXQIVGHSGCEAKSIQNRACLGQCFSYSVPNXFPQSXESLVHCDSCMPAQSMWEI

SEQ ID NO: 17116 - protein, 215 aa, Homo sapiens
  MOD_RES (33)..(33): Selenocysteine
  MOD_RES (75)..(75): Selenocysteine
  MOD_RES (105)..(105): Selenocysteine
  MOD_RES (110)..(110): Selenocysteine
  MOD_RES (130)..(130): Selenocysteine
  MOD_RES (182)..(182): Selenocysteine
  MOD_RES (196)..(196): Selenocysteine
  MOD_RES (208)..(208): Selenocysteine
MCSLALQQLISMDLFWRLFFVCGQEGLRALEAXGMMLRVLVGAVLPAMLLAAPPPINKLALFPDKSAWCEAKNIXQIVGHSGCEAKSIQNRACLGQCFSYSVPNXFPQSXESLVHCDSCMPAQSMWEIVXLECPGHEEVPRVDKLVEKILHCSCQACGKEPSHEGLSVYVQGEDGPGSQPGXHPHPHPHPHPGGQXPEPEDPPGAPHXEEEGAED

SEQ ID NO: 17117 - protein, 163 aa, Homo sapiens
  MOD_RES (40)..(40): Selenocysteine
  MOD_RES (70)..(70): Selenocysteine
  MOD_RES (75)..(75): Selenocysteine
  MOD_RES (95)..(95): Selenocysteine
  MOD_RES (147)..(147): Selenocysteine
  MOD_RES (161)..(161): Selenocysteine
MLRVLVGAVLPAMLLAAPPPINKLALFPDKSAWCEAKNIXQIVGHSGCEAKSIQNRACLGQCFSYSVPNXFPQSXESLVHCDSCMPAQSMWEIVXLECPGHEEVPRVDKLVEKILHCSCQACGKEPSHEGLSVYVQGEDGPGSQPGXHPHPHPHPHPGGQXPE

SEQ ID NO: 17118 - protein, 109 aa, Homo sapiens
  MOD_RES (41)..(41): Selenocysteine
  MOD_RES (71)..(71): Selenocysteine
  MOD_RES (76)..(76): Selenocysteine
  MOD_RES (96)..(96): Selenocysteine
MMLRVLVGAVLPAMLLAAPPPINKLALFPDKSAWCEAKNIXQIVGHSGCEAKSIQNRACLGQCFSYSVPNXFPQSXESLVHCDSCMPAQSMWEIVXLECPGHEEVPRVD

SEQ ID NO: 17119 - protein, 116 aa, Homo sapiens
  MOD_RES (41)..(41): Selenocysteine
  MOD_RES (71)..(71): Selenocysteine
  MOD_RES (76)..(76): Selenocysteine
  MOD_RES (96)..(96): Selenocysteine
MMLRVLVGAVLPAMLLAAPPPINKLALFPDKSAWCEAKNIXQIVGHSGCEAKSIQNRACLGQCFSYSVPNXFPQSXESLVHCDSCMPAQSMWEIVXLECPGHEEVPRVDKLVEKIL

SEQ ID NO: 17120 - protein, 117 aa, Homo sapiens
  MOD_RES (41)..(41): Selenocysteine
  MOD_RES (71)..(71): Selenocysteine
  MOD_RES (76)..(76): Selenocysteine
  MOD_RES (96)..(96): Selenocysteine
MMLRVLVGAVLPAMLLAAPPPINKLALFPDKSAWCEAKNIXQIVGHSGCEAKSIQNRACLGQCFSYSVPNXFPQSXESLVHCDSCMPAQSMWEIVXLECPGHEEVPRVDKLVEKILH

SEQ ID NO: 17121 - protein, 128 aa, Homo sapiens
  MOD_RES (41)..(41): Selenocysteine
  MOD_RES (71)..(71): Selenocysteine
  MOD_RES (76)..(76): Selenocysteine
  MOD_RES (96)..(96): Selenocysteine
MMLRVLVGAVLPAMLLAAPPPINKLALFPDKSAWCEAKNIXQIVGHSGCEAKSIQNRACLGQCFSYSVPNXFPQSXESLVHCDSCMPAQSMWEIVXLECPGHEEVPRVDKLVEKILHCSCQACGKEPS

SEQ ID NO: 17122 - protein, 181 aa, Homo sapiens
  MOD_RES (41)..(41): Selenocysteine
  MOD_RES (71)..(71): Selenocysteine
  MOD_RES (76)..(76): Selenocysteine
  MOD_RES (96)..(96): Selenocysteine
  MOD_RES (148)..(148): Selenocysteine
  MOD_RES (162)..(162): Selenocysteine
  MOD_RES (174)..(174): Selenocysteine
MMLRVLVGAVLPAMLLAAPPPINKLALFPDKSAWCEAKNIXQIVGHSGCEAKSIQNRACLGQCFSYSVPNXFPQSXESLVHCDSCMPAQSMWEIVXLECPGHEEVPRVDKLVEKILHCSCQACGKEPSHEGLSVYVQGEDGPGSQPGXHPHPHPHPHPGGQXPEPEDPPGAPHXEEEGAED

SEQ ID NO: 17123 - protein, 216 aa, Homo sapiens
  MOD_RES (9)..(9): Selenocysteine
  MOD_RES (25)..(25): Selenocysteine
  MOD_RES (34)..(34): Selenocysteine
  MOD_RES (76)..(76): Selenocysteine
  MOD_RES (106)..(106): Selenocysteine
  MOD_RES (111)..(111): Selenocysteine
  MOD_RES (131)..(131): Selenocysteine
  MOD_RES (183)..(183): Selenocysteine
  MOD_RES (197)..(197): Selenocysteine
  MOD_RES (209)..(209): Selenocysteine
MPGNLMSQXSRAVSIWKFPAKLGKXHGHRALEAXGMMLRVLVGAVLPAMLLAAPPPINKLALFPDKSAWCEAKNIXQIVGHSGCEAKSIQNRACLGQCFSYSVPNXFPQSXESLVHCDSCMPAQSMWEIVXLECPGHEEVPRVDKLVEKILHCSCQACGKEPSHEGLSVYVQGEDGPGSQPGXHPHPHPHPHPGGQXPEPEDPPGAPHXEEEGAED

SEQ ID NO: 17124 - protein, 124 aa, Homo sapiens
  MOD_RES (21)..(21): Selenocysteine
  MOD_RES (24)..(24): Selenocysteine
  MOD_RES (62)..(62): Selenocysteine
  MOD_RES (87)..(87): Selenocysteine
KVQKQEEDVNVRKRPRMDIEXNDXFSDEAVPESSKISQENEIGKKRELKEDSLWSAKEISVXYPGAGKLPHIIGGSDLIAHHARKNXELEEWLRQEMEVQNQHAKEESLADDLFRYNPYLKRRR

SEQ ID NO: 17125 - protein, 92 aa, Homo sapiens
  MOD_RES (8)..(8): Selenocysteine
  MOD_RES (16)..(16): Selenocysteine
  MOD_RES (44)..(44): Selenocysteine
  MOD_RES (57)..(57): Selenocysteine
  MOD_RES (62)..(62): Selenocysteine
  MOD_RES (66)..(66): Selenocysteine
  MOD_RES (76)..(76): Selenocysteine
  MOD_RES (79)..(79): Selenocysteine
MQNGFSRXLKSGDGIXFGVFGSKFRIEYEPLVACSSCLDVSGKXALNQAILQLGGFXVNNWXEECXHLVMVSVKVXIKXICALICGRPIVKP

SEQ ID NO: 17126 - protein, 165 aa, Homo sapiens
  MOD_RES (8)..(8): Selenocysteine
  MOD_RES (16)..(16): Selenocysteine
  MOD_RES (44)..(44): Selenocysteine
  MOD_RES (57)..(57): Selenocysteine
  MOD_RES (62)..(62): Selenocysteine
  MOD_RES (66)..(66): Selenocysteine
  MOD_RES (76)..(76): Selenocysteine
  MOD_RES (79)..(79): Selenocysteine
  MOD_RES (96)..(96): Selenocysteine
  MOD_RES (144)..(144): Selenocysteine
MQNGFSRXLKSGDGIXFGVFGSKFRIEYEPLVACSSCLDVSGKXALNQAILQLGGFXVNNWXEECXHLVMVSVKVXIKXICALICGRPIVKPEYFXEFLKAVESKKQPPQIESFYPPLDEPSIGSKNVDLSGRQERKQIFKGKXFIFLNAKQHKKLSSAVVFGGG

SEQ ID NO: 17127 - protein, 672 aa, Homo sapiens
  MOD_RES (8)..(8): Selenocysteine
  MOD_RES (16)..(16): Selenocysteine
  MOD_RES (44)..(44): Selenocysteine
  MOD_RES (57)..(57): Selenocysteine
  MOD_RES (62)..(62): Selenocysteine
  MOD_RES (66)..(66): Selenocysteine
  MOD_RES (76)..(76): Selenocysteine
  MOD_RES (79)..(79): Selenocysteine
  MOD_RES (96)..(96): Selenocysteine
  MOD_RES (144)..(144): Selenocysteine
  MOD_RES (171)..(171): Selenocysteine
  MOD_RES (186)..(186): Selenocysteine
  MOD_RES (191)..(191): Selenocysteine
  MOD_RES (194)..(194): Selenocysteine
  MOD_RES (198)..(198): Selenocysteine
  MOD_RES (236)..(237): Selenocysteine
  MOD_RES (249)..(249): Selenocysteine
  MOD_RES (253)..(255): Selenocysteine
  MOD_RES (278)..(280): Selenocysteine
  MOD_RES (285)..(285): Selenocysteine
  MOD_RES (292)..(292): Selenocysteine
  MOD_RES (320)..(320): Selenocysteine
  MOD_RES (327)..(327): Selenocysteine
  MOD_RES (338)..(338): Selenocysteine
  MOD_RES (352)..(352): Selenocysteine
  MOD_RES (370)..(370): Selenocysteine
  MOD_RES (381)..(381): Selenocysteine
  MOD_RES (403)..(403): Selenocysteine
  MOD_RES (411)..(411): Selenocysteine
  MOD_RES (415)..(415): Selenocysteine
  MOD_RES (434)..(434): Selenocysteine
  MOD_RES (442)..(442): Selenocysteine
  MOD_RES (444)..(444): Selenocysteine
  MOD_RES (488)..(488): Selenocysteine
  MOD_RES (517)..(517): Selenocysteine
  MOD_RES (520)..(520): Selenocysteine
  MOD_RES (575)..(575): Selenocysteine
  MOD_RES (586)..(586): Selenocysteine
  MOD_RES (610)..(610): Selenocysteine
  MOD_RES (635)..(635): Selenocysteine
MQNGFSRXLKSGDGIXFGVFGSKFRIEYEPLVACSSCLDVSGKXALNQAILQLGGFXVNNWXEECXHLVMVSVKVXIKXICALICGRPIVKPEYFXEFLKAVESKKQPPQIESFYPPLDEPSIGSKNVDLSGRQERKQIFKGKXFIFLNAKQHKKLSSAVVFGGGEARLIXEENEEEHNFFLAPGXCVVDXGIXNSQXLIPDCQKKWIQSIMDMLQRQGLRPIPEAEIGLAVIFMXXKNYCDPQGHPSXGLKXXXPGPSLSQGVSVDEKLMPSAPVNXXXYVADXESEQADXWDLSERPKEIKVSKMEQKFRMLSQDAPXVKESCKXSSNNNSMVSNXLAKMRIPNYQLSPXKLPSINKSKDRASQQQQXNSIRNYFQPSXKKRERDEENQEMSSCKSARIEXSCSLLEQXQPAXPSLWKNKEQHLSENEPVDXNSDNNLFXDXDLKSIVKNSASKSHAAEKLRSNKKREMDDVAIEDEVLEQLFKDXKPELEIDVKVQKQEEDVNVRKRPRMDIEXNDXFSDEAVPESSKISQENEIGKKRELKEDSLWSAKEISNNDKLQDDSEMLPKKLLLXEFRSLVIKNSXSRNPSGINDDYGQLKNFKKFKKVXYPGAGKLPHIIGGSDLIAHHARKNXELEEWLRQEMEVQNQHAKEESLADDLFRYNPYLKRRR

SEQ ID NO: 17128 - protein, 754 aa, Homo sapiens
  MOD_RES (20)..(20): Selenocysteine
  MOD_RES (49)..(49): Selenocysteine
  MOD_RES (55)..(55): Selenocysteine
  MOD_RES (60)..(60): Selenocysteine
  MOD_RES (67)..(67): Selenocysteine
  MOD_RES (76)..(76): Selenocysteine
  MOD_RES (90)..(90): Selenocysteine
  MOD_RES (98)..(98): Selenocysteine
  MOD_RES (126)..(126): Selenocysteine
  MOD_RES (139)..(139): Selenocysteine
  MOD_RES (144)..(144): Selenocysteine
  MOD_RES (148)..(148): Selenocysteine
  MOD_RES (158)..(158): Selenocysteine
  MOD_RES (161)..(161): Selenocysteine
  MOD_RES (178)..(178): Selenocysteine
  MOD_RES (226)..(226): Selenocysteine
  MOD_RES (253)..(253): Selenocysteine
  MOD_RES (268)..(268): Selenocysteine
  MOD_RES (273)..(273): Selenocysteine
  MOD_RES (276)..(276): Selenocysteine
  MOD_RES (280)..(280): Selenocysteine
  MOD_RES (318)..(319): Selenocysteine
  MOD_RES (331)..(331): Selenocysteine
  MOD_RES (335)..(337): Selenocysteine
  MOD_RES (360)..(362): Selenocysteine
  MOD_RES (367)..(367): Selenocysteine
  MOD_RES (374)..(374): Selenocysteine
  MOD_RES (402)..(402): Selenocysteine
  MOD_RES (409)..(409): Selenocysteine
  MOD_RES (420)..(420): Selenocysteine
  MOD_RES (434)..(434): Selenocysteine
  MOD_RES (452)..(452): Selenocysteine
  MOD_RES (463)..(463): Selenocysteine
  MOD_RES (485)..(485): Selenocysteine
  MOD_RES (493)..(493): Selenocysteine
  MOD_RES (497)..(497): Selenocysteine
  MOD_RES (516)..(516): Selenocysteine
  MOD_RES (524)..(524): Selenocysteine
  MOD_RES (526)..(526): Selenocysteine
  MOD_RES (570)..(570): Selenocysteine
  MOD_RES (599)..(599): Selenocysteine
  MOD_RES (602)..(602): Selenocysteine
  MOD_RES (657)..(657): Selenocysteine
  MOD_RES (668)..(668): Selenocysteine
  MOD_RES (692)..(692): Selenocysteine
  MOD_RES (717)..(717): Selenocysteine
MWKLLPAAGPAGGEPYRLLXGVEYVVGRKNCAILIENDQSISRNHAVLXANFSVXNLSQXDEIPVLXLKDNSKYGXFVNEEKMQNGFSRXLKSGDGIXFGVFGSKFRIEYEPLVACSSCLDVSGKXALNQAILQLGGFXVNNWXEECXHLVMVSVKVXIKXICALICGRPIVKPEYFXEFLKAVESKKQPPQIESFYPPLDEPSIGSKNVDLSGRQERKQIFKGKXFIFLNAKQHKKLSSAVVFGGGEARLIXEENEEEHNFFLAPGXCVVDXGIXNSQXLIPDCQKKWIQSIMDMLQRQGLRPIPEAEIGLAVIFMXXKNYCDPQGHPSXGLKXXXPGPSLSQGVSVDEKLMPSAPVNXXXYVADXESEQADXWDLSERPKEIKVSKMEQKFRMLSQDAPXVKESCKXSSNNNSMVSNXLAKMRIPNYQLSPXKLPSINKSKDRASQQQQXNSIRNYFQPSXKKRERDEENQEMSSCKSARIEXSCSLLEQXQPAXPSLWKNKEQHLSENEPVDXNSDNNLFXDXDLKSIVKNSASKSHAAEKLRSNKKREMDDVAIEDEVLEQLFKDXKPELEIDVKVQKQEEDVNVRKRPRMDIEXNDXFSDEAVPESSKISQENEIGKKRELKEDSLWSAKEISNNDKLQDDSEMLPKKLLLXEFRSLVIKNSXSRNPSGINDDYGQLKNFKKFKKVXYPGAGKLPHIIGGSDLIAHHARKNXELEEWLRQEMEVQNQHAKEESLADDLFRYNPYLKRRR

SEQ ID NO: 17129 - protein, 159 aa, Homo sapiens
  MOD_RES (20)..(20): Selenocysteine
  MOD_RES (49)..(49): Selenocysteine
  MOD_RES (55)..(55): Selenocysteine
  MOD_RES (60)..(60): Selenocysteine
  MOD_RES (67)..(67): Selenocysteine
  MOD_RES (76)..(76): Selenocysteine
  MOD_RES (90)..(90): Selenocysteine
  MOD_RES (98)..(98): Selenocysteine
  MOD_RES (138)..(138): Selenocysteine
MWKLLPAAGPAGGEPYRLLXGVEYVVGRKNCAILIENDQSISRNHAVLXANFSVXNLSQXDEIPVLXLKDNSKYGXFVNEEKMQNGFSRXLKSGDGIXFGVFGSKFSFYPPLDEPSIGSKNVDLSGRQERKQIFKGKXFIFLNAKQHKKLSSAVVFGGG

SEQ ID NO: 17130 - protein, 58 aa, Homo sapiens
  MOD_RES (20)..(20): Selenocysteine
  MOD_RES (49)..(49): Selenocysteine
  MOD_RES (55)..(55): Selenocysteine
MWKLLPAAGPAGGEPYRLLXGVEYVVGRKNCAILIENDQSISRNHAVLXANFSVXNLV

SEQ ID NO: 17131 - protein, 14 aa, Homo sapiens
MGKQNSKLRPEVMQ

SEQ ID NO: 17132 - protein, 15 aa, Homo sapiens
MGKQNSKLRPEVMQD

SEQ ID NO: 17133 - protein, 52 aa, Homo sapiens
  MOD_RES (20)..(20): Selenocysteine
  MOD_RES (23)..(23): Selenocysteine
MGKQNSKLRPEVMQDLLESXDFXEHEIQEWYKGFLRDCPSGHLSMEEFKKIY

SEQ ID NO: 17134 - protein, 74 aa, Homo sapiens
  MOD_RES (20)..(20): Selenocysteine
  MOD_RES (23)..(23): Selenocysteine
  MOD_RES (71)..(71): Selenocysteine
MGKQNSKLRPEVMQDLLESXDFXEHEIQEWYKGFLRDCPSGHLSMEEFKKIYGNFFPYGDASKFAEHVFRXFDA

SEQ ID NO: 17135 - protein, 78 aa, Homo sapiens
  MOD_RES (20)..(20): Selenocysteine
  MOD_RES (23)..(23): Selenocysteine
  MOD_RES (71)..(71): Selenocysteine
MGKQNSKLRPEVMQDLLESXDFXEHEIQEWYKGFLRDCPSGHLSMEEFKKIYGNFFPYGDASKFAEHVFRXFDANGDG

SEQ ID NO: 17136 - protein, 81 aa, Homo sapiens
  MOD_RES (20)..(20): Selenocysteine
  MOD_RES (23)..(23): Selenocysteine
  MOD_RES (71)..(71): Selenocysteine
  MOD_RES (79)..(79): Selenocysteine
MGKQNSKLRPEVMQDLLESXDFXEHEIQEWYKGFLRDCPSGHLSMEEFKKIYGNFFPYGDASKFAEHVFRXFDANGDGXID

SEQ ID NO: 17137 - protein, 85 aa, Homo sapiens
  MOD_RES (20)..(20): Selenocysteine
  MOD_RES (23)..(23): Selenocysteine
  MOD_RES (71)..(71): Selenocysteine
  MOD_RES (79)..(79): Selenocysteine
MGKQNSKLRPEVMQDLLESXDFXEHEIQEWYKGFLRDCPSGHLSMEEFKKIYGNFFPYGDASKFAEHVFRXFDANGDGXIDFREF

SEQ ID NO: 17138 - protein, 87 aa, Homo sapiens
  MOD_RES (20)..(20): Selenocysteine
  MOD_RES (23)..(23): Selenocysteine
  MOD_RES (71)..(71): Selenocysteine
  MOD_RES (79)..(79): Selenocysteine
MGKQNSKLRPEVMQDLLESXDFXEHEIQEWYKGFLRDCPSGHLSMEEFKKIYGNFFPYGDASKFAEHVFRXFDANGDGXIDFREFII

SEQ ID NO: 17139 - protein, 105 aa, Homo sapiens
  MOD_RES (20)..(20): Selenocysteine
  MOD_RES (23)..(23): Selenocysteine
  MOD_RES (71)..(71): Selenocysteine
  MOD_RES (79)..(79): Selenocysteine
  MOD_RES (92)..(92): Selenocysteine
MGKQNSKLRPEVMQDLLESXDFXEHEIQEWYKGFLRDCPSGHLSMEEFKKIYGNFFPYGDASKFAEHVFRXFDANGDGXIDFREFIIALSVXSRGKLEQKLKWAF

SEQ ID NO: 17140 - protein, 112 aa, Homo sapiens
  MOD_RES (20)..(20): Selenocysteine
  MOD_RES (23)..(23): Selenocysteine
  MOD_RES (71)..(71): Selenocysteine
  MOD_RES (79)..(79): Selenocysteine
  MOD_RES (92)..(92): Selenocysteine
MGKQNSKLRPEVMQDLLESXDFXEHEIQEWYKGFLRDCPSGHLSMEEFKKIYGNFFPYGDASKFAEHVFRXFDANGDGXIDFREFIIALSVXSRGKLEQKLKWAFSMYDLDG

SEQ ID NO: 17141 - protein, 116 aa, Homo sapiens
  MOD_RES (20)..(20): Selenocysteine
  MOD_RES (23)..(23): Selenocysteine
  MOD_RES (71)..(71): Selenocysteine
  MOD_RES (79)..(79): Selenocysteine
  MOD_RES (92)..(92): Selenocysteine
MGKQNSKLRPEVMQDLLESXDFXEHEIQEWYKGFLRDCPSGHLSMEEFKKIYGNFFPYGDASKFAEHVFRXFDANGDGXIDFREFIIALSVXSRGKLEQKLKWAFSMYDLDGNGYI

SEQ ID NO: 17142 - protein, 120 aa, Homo sapiens
  MOD_RES (20)..(20): Selenocysteine
  MOD_RES (23)..(23): Selenocysteine
  MOD_RES (71)..(71): Selenocysteine
  MOD_RES (79)..(79): Selenocysteine
  MOD_RES (92)..(92): Selenocysteine
MGKQNSKLRPEVMQDLLESXDFXEHEIQEWYKGFLRDCPSGHLSMEEFKKIYGNFFPYGDASKFAEHVFRXFDANGDGXIDFREFIIALSVXSRGKLEQKLKWAFSMYDLDGNGYISKAE

SEQ ID NO: 17143 - protein, 122 aa, Homo sapiens
  MOD_RES (20)..(20): Selenocysteine
  MOD_RES (23)..(23): Selenocysteine
  MOD_RES (71)..(71): Selenocysteine
  MOD_RES (79)..(79): Selenocysteine
  MOD_RES (92)..(92): Selenocysteine
MGKQNSKLRPEVMQDLLESXDFXEHEIQEWYKGFLRDCPSGHLSMEEFKKIYGNFFPYGDASKFAEHVFRXFDANGDGXIDFREFIIALSVXSRGKLEQKLKWAFSMYDLDGNGYISKAEML

SEQ ID NO: 17144 - protein, 136 aa, Homo sapiens
  MOD_RES (20)..(20): Selenocysteine
  MOD_RES (23)..(23): Selenocysteine
  MOD_RES (71)..(71): Selenocysteine
  MOD_RES (79)..(79): Selenocysteine
  MOD_RES (92)..(92): Selenocysteine
MGKQNSKLRPEVMQDLLESXDFXEHEIQEWYKGFLRDCPSGHLSMEEFKKIYGNFFPYGDASKFAEHVFRXFDANGDGXIDFREFIIALSVXSRGKLEQKLKWAFSMYDLDGNGYISKAEMLEIVQAIYKMVSSVM

SEQ ID NO: 17145 - protein, 194 aa, Homo sapiens
  MOD_RES (20)..(20): Selenocysteine
  MOD_RES (23)..(23): Selenocysteine
  MOD_RES (71)..(71): Selenocysteine
  MOD_RES (79)..(79): Selenocysteine
  MOD_RES (92)..(92): Selenocysteine
  MOD_RES (144)..(144): Selenocysteine
  MOD_RES (149)..(149): Selenocysteine
  MOD_RES (158)..(158): Selenocysteine
  MOD_RES (185)..(185): Selenocysteine
MGKQNSKLRPEVMQDLLESXDFXEHEIQEWYKGFLRDCPSGHLSMEEFKKIYGNFFPYGDASKFAEHVFRXFDANGDGXIDFREFIIALSVXSRGKLEQKLKWAFSMYDLDGNGYISKAEMLEIVQAIYKMVSSVMKMPEDESXPEKRXEKIFRQMDXNRDASFVVDASWECPEPQCACGEHGQXSWCSLFDDF

SEQ ID NO: 17146 - protein, 193 aa, Homo sapiens
  MOD_RES (20)..(20): Selenocysteine
  MOD_RES (23)..(23): Selenocysteine
  MOD_RES (71)..(71): Selenocysteine
  MOD_RES (79)..(79): Selenocysteine
  MOD_RES (92)..(92): Selenocysteine
  MOD_RES (144)..(144): Selenocysteine
  MOD_RES (149)..(149): Selenocysteine
  MOD_RES (158)..(158): Selenocysteine
MGKQNSKLRPEVMQDLLESXDFXEHEIQEWYKGFLRDCPSGHLSMEEFKKIYGNFFPYGDASKFAEHVFRXFDANGDGXIDFREFIIALSVXSRGKLEQKLKWAFSMYDLDGNGYISKAEMLEIVQAIYKMVSSVMKMPEDESXPEKRXEKIFRQMDXNRDGKLSLEEFIRGAKSDPSIVRLLQCDPSSAGQF

SEQ ID NO: 17147 - protein, 152 aa, Homo sapiens
  MOD_RES (20)..(20): Selenocysteine
  MOD_RES (23)..(23): Selenocysteine
  MOD_RES (71)..(71): Selenocysteine
  MOD_RES (79)..(79): Selenocysteine
  MOD_RES (92)..(92): Selenocysteine
  MOD_RES (140)..(140): Selenocysteine
MGKQNSKLRPEVMQDLLESXDFXEHEIQEWYKGFLRDCPSGHLSMEEFKKIYGNFFPYGDASKFAEHVFRXFDANGDGXIDFREFIIALSVXSRGKLEQKLKWAFSMYDLDGNGYISKAEMLEIVQERKKMAQLFFHRFXLVELICVSLEIK

SEQ ID NO: 17148 - protein, 165 aa, Homo sapiens
  MOD_RES (9)..(9): Selenocysteine
  MOD_RES (24)..(24): Selenocysteine
  MOD_RES (35)..(35): Selenocysteine
  MOD_RES (72)..(72): Selenocysteine
  MOD_RES (80)..(81): Selenocysteine
  MOD_RES (105)..(105): Selenocysteine
  MOD_RES (121)..(121): Selenocysteine
  MOD_RES (130)..(131): Selenocysteine
  MOD_RES (139)..(140): Selenocysteine
EFILVQADXPSSPSIDQVEPYSSXAQVQFDEPEAXGGVPILKYKAEWRAVGEEVWHSKWYDAKEASMEGIVXIVGLKPEXXYAVRLAALNGKGLGEISAASEFKXQPVHSPPPPASASSSXPVPLSPPDXXWPLPALAXXEPAKNIAQNHCCNMFQAGLHNALMK

SEQ ID NO: 17149 - protein, 133 aa, Homo sapiens
  MOD_RES (4)..(4): Selenocysteine
  MOD_RES (10)..(10): Selenocysteine
  MOD_RES (16)..(16): Selenocysteine
  MOD_RES (23)..(23): Selenocysteine
  MOD_RES (29)..(29): Selenocysteine
  MOD_RES (38)..(38): Selenocysteine
  MOD_RES (40)..(40): Selenocysteine
  MOD_RES (52)..(52): Selenocysteine
  MOD_RES (55)..(55): Selenocysteine
  MOD_RES (57)..(57): Selenocysteine
  MOD_RES (66)..(66): Selenocysteine
  MOD_RES (83)..(83): Selenocysteine
  MOD_RES (90)..(90): Selenocysteine
  MOD_RES (98)..(98): Selenocysteine
  MOD_RES (102)..(102): Selenocysteine
  MOD_RES (128)..(128): Selenocysteine
MLQXKDLIWXLFFLGXAAKPKIXYVENQXAMELEEQVXLXCEASGDPIPSIXWRXSXRNISSEEKXLDGHMVVRSHARVSSLXLKSIQYXDAGEYICXASNXIGQDSQSMYLEVQYAPKLQGPVAVYXWEGNQ

SEQ ID NO: 17150 - protein, 136 aa, Homo sapiens
  MOD_RES (4)..(4): Selenocysteine
  MOD_RES (10)..(10): Selenocysteine
  MOD_RES (16)..(16): Selenocysteine
  MOD_RES (110)..(110): Selenocysteine
  MOD_RES (115)..(115): Selenocysteine
  MOD_RES (124)..(124): Selenocysteine
  MOD_RES (129)..(129): Selenocysteine
MLQXKDLIWXLFFLGXAGEPSAPKLEGQMGEDGNSIKVNLIKQDDGGSPIRHYLVRYRALSSEWKPEIRLPSGSDHVMLKSLDWNAEYEVYVVAENQQGKSKAAHFVFRXSAQPXAIPANGSPXSGLSXGAIVGIL

SEQ ID NO: 17151 - protein, 364 aa, Homo sapiens
  MOD_RES (4)..(4): Selenocysteine
  MOD_RES (10)..(10): Selenocysteine
  MOD_RES (16)..(16): Selenocysteine
  MOD_RES (63)..(63): Selenocysteine
  MOD_RES (80)..(80): Selenocysteine
  MOD_RES (82)..(82): Selenocysteine
  MOD_RES (99)..(99): Selenocysteine
  MOD_RES (109)..(109): Selenocysteine
  MOD_RES (125)..(125): Selenocysteine
  MOD_RES (148)..(148): Selenocysteine
  MOD_RES (182)..(182): Selenocysteine
  MOD_RES (186)..(186): Selenocysteine
  MOD_RES (213)..(213): Selenocysteine
  MOD_RES (224)..(224): Selenocysteine
  MOD_RES (232)..(232): Selenocysteine
  MOD_RES (244)..(244): Selenocysteine
  MOD_RES (248)..(248): Selenocysteine
  MOD_RES (273)..(273): Selenocysteine
  MOD_RES (299)..(299): Selenocysteine
  MOD_RES (311)..(311): Selenocysteine
  MOD_RES (317)..(317): Selenocysteine
  MOD_RES (326)..(326): Selenocysteine
  MOD_RES (328)..(328): Selenocysteine
  MOD_RES (340)..(340): Selenocysteine
  MOD_RES (343)..(343): Selenocysteine
  MOD_RES (345)..(345): Selenocysteine
  MOD_RES (357)..(357): Selenocysteine
MLQXKDLIWXLFFLGXAVSLQVDIVPSQGEISVGESKFFLCQVAGDAKDKDISWFSPNGEKLXPNQQRISVVWNDDSSSXLXIYNANIDDAGIYKCVVXGEDGSESEAXVNVKIFQKLMFKNAPXPQEFREGEDAVIVCDVVSSLPPXIIWKHKGRDVILKKDVRFIVLSNNYLQIRGIKKXDEGXYRCEGRILARGEINFKDIQVIVNVPPXIQARQNIVNAXANLGQSVXLVCDAEGFPEPXMSWXKDGEQIEQEEDDEKYIFSDDSSQLXIKKVDKNDEAEYICIAENKAGEQDAXIHLKVFAKPKIXYVENQXAMELEEQVXLXCEASGDPIPSIXWRXSXRNISSEEKASWXRPEKQEV

SEQ ID NO: 17152 - protein, 725 aa, Homo sapiens
  MOD_RES (4)..(4): Selenocysteine
  MOD_RES (10)..(10): Selenocysteine
  MOD_RES (16)..(16): Selenocysteine
  MOD_RES (63)..(63): Selenocysteine
  MOD_RES (80)..(80): Selenocysteine
  MOD_RES (82)..(82): Selenocysteine
  MOD_RES (99)..(99): Selenocysteine
  MOD_RES (109)..(109): Selenocysteine
  MOD_RES (125)..(125): Selenocysteine
  MOD_RES (148)..(148): Selenocysteine
  MOD_RES (182)..(182): Selenocysteine
  MOD_RES (186)..(186): Selenocysteine
  MOD_RES (213)..(213): Selenocysteine
  MOD_RES (224)..(224): Selenocysteine
  MOD_RES (232)..(232): Selenocysteine
  MOD_RES (244)..(244): Selenocysteine
  MOD_RES (248)..(248): Selenocysteine
  MOD_RES (273)..(273): Selenocysteine
  MOD_RES (299)..(299): Selenocysteine
  MOD_RES (311)..(311): Selenocysteine
  MOD_RES (317)..(317): Selenocysteine
  MOD_RES (326)..(326): Selenocysteine
  MOD_RES (328)..(328): Selenocysteine
  MOD_RES (340)..(340): Selenocysteine
  MOD_RES (343)..(343): Selenocysteine
  MOD_RES (345)..(345): Selenocysteine
  MOD_RES (354)..(354): Selenocysteine
  MOD_RES (371)..(371): Selenocysteine
  MOD_RES (378)..(378): Selenocysteine
  MOD_RES (386)..(386): Selenocysteine
  MOD_RES (390)..(390): Selenocysteine
  MOD_RES (416)..(416): Selenocysteine
  MOD_RES (425)..(425): Selenocysteine
  MOD_RES (435)..(435): Selenocysteine
  MOD_RES (458)..(458): Selenocysteine
  MOD_RES (467)..(467): Selenocysteine
  MOD_RES (480)..(480): Selenocysteine
  MOD_RES (499)..(499): Selenocysteine
  MOD_RES (514)..(514): Selenocysteine
  MOD_RES (525)..(525): Selenocysteine
  MOD_RES (562)..(562): Selenocysteine
  MOD_RES (570)..(571): Selenocysteine
  MOD_RES (595)..(595): Selenocysteine
  MOD_RES (691)..(691): Selenocysteine
  MOD_RES (696)..(696): Selenocysteine
  MOD_RES (701)..(701): Selenocysteine
  MOD_RES (710)..(710): Selenocysteine
  MOD_RES (720)..(720): Selenocysteine
MLQXKDLIWXLFFLGXAVSLQVDIVPSQGEISVGESKFFLCQVAGDAKDKDISWFSPNGEKLXPNQQRISVVWNDDSSSXLXIYNANIDDAGIYKCVVXGEDGSESEAXVNVKIFQKLMFKNAPXPQEFREGEDAVIVCDVVSSLPPXIIWKHKGRDVILKKDVRFIVLSNNYLQIRGIKKXDEGXYRCEGRILARGEINFKDIQVIVNVPPXIQARQNIVNAXANLGQSVXLVCDAEGFPEPXMSWXKDGEQIEQEEDDEKYIFSDDSSQLXIKKVDKNDEAEYICIAENKAGEQDAXIHLKVFAKPKIXYVENQXAMELEEQVXLXCEASGDPIPSIXWRXSXRNISSEEKXLDGHMVVRSHARVSSLXLKSIQYXDAGEYICXASNXIGQDSQSMYLEVQYAPKLQGPVAVYXWEGNQVNIXCEVFAYPSAXISWFRDGQLLPSSNYSNIKIYNXPSASYLEVXPDSENDFGNYNCXAVNRIGQESLEFILVQADXPSSPSIDQVEPYSSXAQVQFDEPEAXGGVPILKYKAEWRAVGEEVWHSKWYDAKEASMEGIVXIVGLKPEXXYAVRLAALNGKGLGEISAASEFKXQPVREPSAPKLEGQMGEDGNSIKVNLIKQDDGGSPIRHYLVRYRALSSEWKPEIRLPSGSDHVMLKSLDWNAEYEVYVVAENQQGKSKAAHFVFRXSAQPXAIPAXLGGNSASYXFVSLLFSAVXLLLLC

SEQ ID NO: 17153 - protein, 726 aa, Homo sapiens
  MOD_RES (4)..(4): Selenocysteine
  MOD_RES (10)..(10): Selenocysteine
  MOD_RES (16)..(16): Selenocysteine
  MOD_RES (63)..(63): Selenocysteine
  MOD_RES (80)..(80): Selenocysteine
  MOD_RES (82)..(82): Selenocysteine
  MOD_RES (99)..(99): Selenocysteine
  MOD_RES (109)..(109): Selenocysteine
  MOD_RES (125)..(125): Selenocysteine
  MOD_RES (148)..(148): Selenocysteine
  MOD_RES (182)..(182): Selenocysteine
  MOD_RES (186)..(186): Selenocysteine
  MOD_RES (213)..(213): Selenocysteine
  MOD_RES (224)..(224): Selenocysteine
  MOD_RES (232)..(232): Selenocysteine
  MOD_RES (244)..(244): Selenocysteine
  MOD_RES (248)..(248): Selenocysteine
  MOD_RES (273)..(273): Selenocysteine
  MOD_RES (299)..(299): Selenocysteine
  MOD_RES (311)..(311): Selenocysteine
  MOD_RES (317)..(317): Selenocysteine
  MOD_RES (326)..(326): Selenocysteine
  MOD_RES (328)..(328): Selenocysteine
  MOD_RES (340)..(340): Selenocysteine
  MOD_RES (343)..(343): Selenocysteine
  MOD_RES (345)..(345): Selenocysteine
  MOD_RES (354)..(354): Selenocysteine
  MOD_RES (371)..(371): Selenocysteine
  MOD_RES (378)..(378): Selenocysteine
  MOD_RES (386)..(386): Selenocysteine
  MOD_RES (390)..(390): Selenocysteine
  MOD_RES (416)..(416): Selenocysteine
  MOD_RES (425)..(425): Selenocysteine
  MOD_RES (435)..(435): Selenocysteine
  MOD_RES (458)..(458): Selenocysteine
  MOD_RES (467)..(467): Selenocysteine
  MOD_RES (480)..(480): Selenocysteine
  MOD_RES (499)..(499): Selenocysteine
  MOD_RES (514)..(514): Selenocysteine
  MOD_RES (525)..(525): Selenocysteine
  MOD_RES (562)..(562): Selenocysteine
  MOD_RES (570)..(571): Selenocysteine
  MOD_RES (595)..(595): Selenocysteine
  MOD_RES (692)..(692): Selenocysteine
  MOD_RES (697)..(697): Selenocysteine
  MOD_RES (702)..(702): Selenocysteine
  MOD_RES (711)..(711): Selenocysteine
  MOD_RES (721)..(721): Selenocysteine
MLQXKDLIWXLFFLGXAVSLQVDIVPSQGEISVGESKFFLCQVAGDAKDKDISWFSPNGEKLXPNQQRISVVWNDDSSSXLXIYNANIDDAGIYKCVVXGEDGSESEAXVNVKIFQKLMFKNAPXPQEFREGEDAVIVCDVVSSLPPXIIWKHKGRDVILKKDVRFIVLSNNYLQIRGIKKXDEGXYRCEGRILARGEINFKDIQVIVNVPPXIQARQNIVNAXANLGQSVXLVCDAEGFPEPXMSWXKDGEQIEQEEDDEKYIFSDDSSQLXIKKVDKNDEAEYICIAENKAGEQDAXIHLKVFAKPKIXYVENQXAMELEEQVXLXCEASGDPIPSIXWRXSXRNISSEEKXLDGHMVVRSHARVSSLXLKSIQYXDAGEYICXASNXIGQDSQSMYLEVQYAPKLQGPVAVYXWEGNQVNIXCEVFAYPSAXISWFRDGQLLPSSNYSNIKIYNXPSASYLEVXPDSENDFGNYNCXAVNRIGQESLEFILVQADXPSSPSIDQVEPYSSXAQVQFDEPEAXGGVPILKYKAEWRAVGEEVWHSKWYDAKEASMEGIVXIVGLKPEXXYAVRLAALNGKGLGEISAASEFKXQPVQGEPSAPKLEGQMGEDGNSIKVNLIKQDDGGSPIRHYLVRYRALSSEWKPEIRLPSGSDHVMLKSLDWNAEYEVYVVAENQQGKSKAAHFVFRXSAQPXAIPAXLGGNSASYXFVSLLFSAVXLLLLC

SEQ ID NO: 17154 - protein, 761 aa, Homo sapiens
  MOD_RES (4)..(4): Selenocysteine
  MOD_RES (10)..(10): Selenocysteine
  MOD_RES (16)..(16): Selenocysteine
  MOD_RES (63)..(63): Selenocysteine
  MOD_RES (80)..(80): Selenocysteine
  MOD_RES (82)..(82): Selenocysteine
  MOD_RES (99)..(99): Selenocysteine
  MOD_RES (109)..(109): Selenocysteine
  MOD_RES (125)..(125): Selenocysteine
  MOD_RES (148)..(148): Selenocysteine
  MOD_RES (182)..(182): Selenocysteine
  MOD_RES (186)..(186): Selenocysteine
  MOD_RES (213)..(213): Selenocysteine
  MOD_RES (224)..(224): Selenocysteine
  MOD_RES (232)..(232): Selenocysteine
  MOD_RES (244)..(244): Selenocysteine
  MOD_RES (248)..(248): Selenocysteine
  MOD_RES (273)..(273): Selenocysteine
  MOD_RES (299)..(299): Selenocysteine
  MOD_RES (311)..(311): Selenocysteine
  MOD_RES (317)..(317): Selenocysteine
  MOD_RES (326)..(326): Selenocysteine
  MOD_RES (328)..(328): Selenocysteine
  MOD_RES (340)..(340): Selenocysteine
  MOD_RES (343)..(343): Selenocysteine
  MOD_RES (345)..(345): Selenocysteine
  MOD_RES (354)..(354): Selenocysteine
  MOD_RES (371)..(371): Selenocysteine
  MOD_RES (378)..(378): Selenocysteine
  MOD_RES (386)..(386): Selenocysteine
  MOD_RES (390)..(390): Selenocysteine
  MOD_RES (416)..(416): Selenocysteine
  MOD_RES (425)..(425): Selenocysteine
  MOD_RES (435)..(435): Selenocysteine
  MOD_RES (458)..(458): Selenocysteine
  MOD_RES (467)..(467): Selenocysteine
  MOD_RES (480)..(480): Selenocysteine
  MOD_RES (499)..(499): Selenocysteine
  MOD_RES (514)..(514): Selenocysteine
  MOD_RES (525)..(525): Selenocysteine
  MOD_RES (562)..(562): Selenocysteine
  MOD_RES (570)..(571): Selenocysteine
  MOD_RES (595)..(595): Selenocysteine
  MOD_RES (611)..(611): Selenocysteine
  MOD_RES (620)..(621): Selenocysteine
  MOD_RES (629)..(630): Selenocysteine
  MOD_RES (634)..(634): Selenocysteine
  MOD_RES (727)..(727): Selenocysteine
  MOD_RES (732)..(732): Selenocysteine
  MOD_RES (737)..(737): Selenocysteine
  MOD_RES (746)..(746): Selenocysteine
  MOD_RES (756)..(756): Selenocysteine
MLQXKDLIWXLFFLGXAVSLQVDIVPSQGEISVGESKFFLCQVAGDAKDKDISWFSPNGEKLXPNQQRISVVWNDDSSSXLXIYNANIDDAGIYKCVVXGEDGSESEAXVNVKIFQKLMFKNAPXPQEFREGEDAVIVCDVVSSLPPXIIWKHKGRDVILKKDVRFIVLSNNYLQIRGIKKXDEGXYRCEGRILARGEINFKDIQVIVNVPPXIQARQNIVNAXANLGQSVXLVCDAEGFPEPXMSWXKDGEQIEQEEDDEKYIFSDDSSQLXIKKVDKNDEAEYICIAENKAGEQDAXIHLKVFAKPKIXYVENQXAMELEEQVXLXCEASGDPIPSIXWRXSXRNISSEEKXLDGHMVVRSHARVSSLXLKSIQYXDAGEYICXASNXIGQDSQSMYLEVQYAPKLQGPVAVYXWEGNQVNIXCEVFAYPSAXISWFRDGQLLPSSNYSNIKIYNXPSASYLEVXPDSENDFGNYNCXAVNRIGQESLEFILVQADXPSSPSIDQVEPYSSXAQVQFDEPEAXGGVPILKYKAEWRAVGEEVWHSKWYDAKEASMEGIVXIVGLKPEXXYAVRLAALNGKGLGEISAASEFKXQPVHSPPPPASASSSXPVPLSPPDXXWPLPALAXXEPAXGEPSAPKLEGQMGEDGNSIKVNLIKQDDGGSPIRHYLVRYRALSSEWKPEIRLPSGSDHVMLKSLDWNAEYEVYVVAENQQGKSKAAHFVFRXSAQPXAIPAXLGGNSASYXFVSLLFSAVXLLLLC

SEQ ID NO: 17155 - protein, 761 aa, Homo sapiens
  MOD_RES (4)..(4): Selenocysteine
  MOD_RES (10)..(10): Selenocysteine
  MOD_RES (16)..(16): Selenocysteine
  MOD_RES (63)..(63): Selenocysteine
  MOD_RES (80)..(80): Selenocysteine
  MOD_RES (82)..(82): Selenocysteine
  MOD_RES (99)..(99): Selenocysteine
  MOD_RES (109)..(109): Selenocysteine
  MOD_RES (125)..(125): Selenocysteine
  MOD_RES (148)..(148): Selenocysteine
  MOD_RES (182)..(182): Selenocysteine
  MOD_RES (186)..(186): Selenocysteine
  MOD_RES (213)..(213): Selenocysteine
  MOD_RES (224)..(224): Selenocysteine
  MOD_RES (232)..(232): Selenocysteine
  MOD_RES (244)..(244): Selenocysteine
  MOD_RES (248)..(248): Selenocysteine
  MOD_RES (273)..(273): Selenocysteine
  MOD_RES (299)..(299): Selenocysteine
  MOD_RES (311)..(311): Selenocysteine
  MOD_RES (317)..(317): Selenocysteine
  MOD_RES (326)..(326): Selenocysteine
  MOD_RES (328)..(328): Selenocysteine
  MOD_RES (340)..(340): Selenocysteine
  MOD_RES (343)..(343): Selenocysteine
  MOD_RES (345)..(345): Selenocysteine
  MOD_RES (354)..(354): Selenocysteine
  MOD_RES (371)..(371): Selenocysteine
  MOD_RES (378)..(378): Selenocysteine
  MOD_RES (386)..(386): Selenocysteine
  MOD_RES (390)..(390): Selenocysteine
  MOD_RES (416)..(416): Selenocysteine
  MOD_RES (425)..(425): Selenocysteine
  MOD_RES (435)..(435): Selenocysteine
  MOD_RES (458)..(458): Selenocysteine
  MOD_RES (467)..(467): Selenocysteine
  MOD_RES (480)..(480): Selenocysteine
  MOD_RES (499)..(499): Selenocysteine
  MOD_RES (514)..(514): Selenocysteine
  MOD_RES (525)..(525): Selenocysteine
  MOD_RES (562)..(562): Selenocysteine
  MOD_RES (570)..(571): Selenocysteine
  MOD_RES (595)..(595): Selenocysteine
  MOD_RES (611)..(611): Selenocysteine
  MOD_RES (620)..(621): Selenocysteine
  MOD_RES (629)..(630): Selenocysteine
  MOD_RES (727)..(727): Selenocysteine
  MOD_RES (732)..(732): Selenocysteine
  MOD_RES (737)..(737): Selenocysteine
  MOD_RES (746)..(746): Selenocysteine
  MOD_RES (756)..(756): Selenocysteine
MLQXKDLIWXLFFLGXAVSLQVDIVPSQGEISVGESKFFLCQVAGDAKDKDISWFSPNGEKLXPNQQRISVVWNDDSSSXLXIYNANIDDAGIYKCVVXGEDGSESEAXVNVKIFQKLMFKNAPXPQEFREGEDAVIVCDVVSSLPPXIIWKHKGRDVILKKDVRFIVLSNNYLQIRGIKKXDEGXYRCEGRILARGEINFKDIQVIVNVPPXIQARQNIVNAXANLGQSVXLVCDAEGFPEPXMSWXKDGEQIEQEEDDEKYIFSDDSSQLXIKKVDKNDEAEYICIAENKAGEQDAXIHLKVFAKPKIXYVENQXAMELEEQVXLXCEASGDPIPSIXWRXSXRNISSEEKXLDGHMVVRSHARVSSLXLKSIQYXDAGEYICXASNXIGQDSQSMYLEVQYAPKLQGPVAVYXWEGNQVNIXCEVFAYPSAXISWFRDGQLLPSSNYSNIKIYNXPSASYLEVXPDSENDFGNYNCXAVNRIGQESLEFILVQADXPSSPSIDQVEPYSSXAQVQFDEPEAXGGVPILKYKAEWRAVGEEVWHSKWYDAKEASMEGIVXIVGLKPEXXYAVRLAALNGKGLGEISAASEFKXQPVHSPPPPASASSSXPVPLSPPDXXWPLPALAXXEPAKGEPSAPKLEGQMGEDGNSIKVNLIKQDDGGSPIRHYLVRYRALSSEWKPEIRLPSGSDHVMLKSLDWNAEYEVYVVAENQQGKSKAAHFVFRXSAQPXAIPAXLGGNSASYXFVSLLFSAVXLLLLC

SEQ ID NO: 17156 - protein, 848 aa, Homo sapiens
  MOD_RES (4)..(4): Selenocysteine
  MOD_RES (10)..(10): Selenocysteine
  MOD_RES (16)..(16): Selenocysteine
  MOD_RES (63)..(63): Selenocysteine
  MOD_RES (80)..(80): Selenocysteine
  MOD_RES (82)..(82): Selenocysteine
  MOD_RES (99)..(99): Selenocysteine
  MOD_RES (109)..(109): Selenocysteine
  MOD_RES (125)..(125): Selenocysteine
  MOD_RES (148)..(148): Selenocysteine
  MOD_RES (182)..(182): Selenocysteine
  MOD_RES (186)..(186): Selenocysteine
  MOD_RES (213)..(213): Selenocysteine
  MOD_RES (224)..(224): Selenocysteine
  MOD_RES (232)..(232): Selenocysteine
  MOD_RES (244)..(244): Selenocysteine
  MOD_RES (248)..(248): Selenocysteine
  MOD_RES (273)..(273): Selenocysteine
  MOD_RES (299)..(299): Selenocysteine
  MOD_RES (311)..(311): Selenocysteine
  MOD_RES (317)..(317): Selenocysteine
  MOD_RES (326)..(326): Selenocysteine
  MOD_RES (328)..(328): Selenocysteine
  MOD_RES (340)..(340): Selenocysteine
  MOD_RES (343)..(343): Selenocysteine
  MOD_RES (345)..(345): Selenocysteine
  MOD_RES (354)..(354): Selenocysteine
  MOD_RES (371)..(371): Selenocysteine
  MOD_RES (378)..(378): Selenocysteine
  MOD_RES (386)..(386): Selenocysteine
  MOD_RES (390)..(390): Selenocysteine
  MOD_RES (416)..(416): Selenocysteine
  MOD_RES (425)..(425): Selenocysteine
  MOD_RES (435)..(435): Selenocysteine
  MOD_RES (458)..(458): Selenocysteine
  MOD_RES (467)..(467): Selenocysteine
  MOD_RES (480)..(480): Selenocysteine
  MOD_RES (499)..(499): Selenocysteine
  MOD_RES (514)..(514): Selenocysteine
  MOD_RES (525)..(525): Selenocysteine
  MOD_RES (562)..(562): Selenocysteine
  MOD_RES (570)..(571): Selenocysteine
  MOD_RES (595)..(595): Selenocysteine
  MOD_RES (692)..(692): Selenocysteine
  MOD_RES (697)..(697): Selenocysteine
  MOD_RES (706)..(706): Selenocysteine
  MOD_RES (711)..(711): Selenocysteine
  MOD_RES (732)..(732): Selenocysteine
  MOD_RES (783)..(783): Selenocysteine
  MOD_RES (788)..(788): Selenocysteine
  MOD_RES (797)..(797): Selenocysteine
  MOD_RES (802)..(803): Selenocysteine
  MOD_RES (806)..(806): Selenocysteine
  MOD_RES (822)..(822): Selenocysteine
  MOD_RES (824)..(824): Selenocysteine
  MOD_RES (833)..(833): Selenocysteine
  MOD_RES (839)..(839): Selenocysteine
  MOD_RES (841)..(841): Selenocysteine
MLQXKDLIWXLFFLGXAVSLQVDIVPSQGEISVGESKFFLCQVAGDAKDKDISWFSPNGEKLXPNQQRISVVWNDDSSSXLXIYNANIDDAGIYKCVVXGEDGSESEAXVNVKIFQKLMFKNAPXPQEFREGEDAVIVCDVVSSLPPXIIWKHKGRDVILKKDVRFIVLSNNYLQIRGIKKXDEGXYRCEGRILARGEINFKDIQVIVNVPPXIQARQNIVNAXANLGQSVXLVCDAEGFPEPXMSWXKDGEQIEQEEDDEKYIFSDDSSQLXIKKVDKNDEAEYICIAENKAGEQDAXIHLKVFAKPKIXYVENQXAMELEEQVXLXCEASGDPIPSIXWRXSXRNISSEEKXLDGHMVVRSHARVSSLXLKSIQYXDAGEYICXASNXIGQDSQSMYLEVQYAPKLQGPVAVYXWEGNQVNIXCEVFAYPSAXISWFRDGQLLPSSNYSNIKIYNXPSASYLEVXPDSENDFGNYNCXAVNRIGQESLEFILVQADXPSSPSIDQVEPYSSXAQVQFDEPEAXGGVPILKYKAEWRAVGEEVWHSKWYDAKEASMEGIVXIVGLKPEXXYAVRLAALNGKGLGEISAASEFKXQPVPGEPSAPKLEGQMGEDGNSIKVNLIKQDDGGSPIRHYLVRYRALSSEWKPEIRLPSGSDHVMLKSLDWNAEYEVYVVAENQQGKSKAAHFVFRXSAQPXAIPANGSPXSGLSXGAIVGILIVIFVLLLVVVDIXCYFLNKCGLFMCIAVNLCGKAGPGAKGKDMEEGKAAFSKDESKEPIVEVRXEEERXPNHDGGKHXEPNEXXPLXEPEKGPVEAKPECQEXEXKPAPAEVKXVPNDAXQXKENESKA

SEQ ID NO: 17157 - protein, 848 aa, Homo sapiens
  MOD_RES (4)..(4): Selenocysteine
  MOD_RES (10)..(10): Selenocysteine
  MOD_RES (16)..(16): Selenocysteine
  MOD_RES (63)..(63): Selenocysteine
  MOD_RES (80)..(80): Selenocysteine
  MOD_RES (82)..(82): Selenocysteine
  MOD_RES (99)..(99): Selenocysteine
  MOD_RES (109)..(109): Selenocysteine
  MOD_RES (125)..(125): Selenocysteine
  MOD_RES (148)..(148): Selenocysteine
  MOD_RES (182)..(182): Selenocysteine
  MOD_RES (186)..(186): Selenocysteine
  MOD_RES (213)..(213): Selenocysteine
  MOD_RES (224)..(224): Selenocysteine
  MOD_RES (232)..(232): Selenocysteine
  MOD_RES (244)..(244): Selenocysteine
  MOD_RES (248)..(248): Selenocysteine
  MOD_RES (273)..(273): Selenocysteine
  MOD_RES (299)..(299): Selenocysteine
  MOD_RES (311)..(311): Selenocysteine
  MOD_RES (317)..(317): Selenocysteine
  MOD_RES (326)..(326): Selenocysteine
  MOD_RES (328)..(328): Selenocysteine
  MOD_RES (340)..(340): Selenocysteine
  MOD_RES (343)..(343): Selenocysteine
  MOD_RES (345)..(345): Selenocysteine
  MOD_RES (354)..(354): Selenocysteine
  MOD_RES (371)..(371): Selenocysteine
  MOD_RES (378)..(378): Selenocysteine
  MOD_RES (386)..(386): Selenocysteine
  MOD_RES (390)..(390): Selenocysteine
  MOD_RES (416)..(416): Selenocysteine
  MOD_RES (425)..(425): Selenocysteine
  MOD_RES (435)..(435): Selenocysteine
  MOD_RES (458)..(458): Selenocysteine
  MOD_RES (467)..(467): Selenocysteine
  MOD_RES (480)..(480): Selenocysteine
  MOD_RES (499)..(499): Selenocysteine
  MOD_RES (514)..(514): Selenocysteine
  MOD_RES (525)..(525): Selenocysteine
  MOD_RES (562)..(562): Selenocysteine
  MOD_RES (570)..(571): Selenocysteine
  MOD_RES (595)..(595): Selenocysteine
  MOD_RES (692)..(692): Selenocysteine
  MOD_RES (697)..(697): Selenocysteine
  MOD_RES (706)..(706): Selenocysteine
  MOD_RES (711)..(711): Selenocysteine
  MOD_RES (732)..(732): Selenocysteine
  MOD_RES (783)..(783): Selenocysteine
  MOD_RES (788)..(788): Selenocysteine
  MOD_RES (797)..(797): Selenocysteine
  MOD_RES (802)..(803): Selenocysteine
  MOD_RES (806)..(806): Selenocysteine
  MOD_RES (822)..(822): Selenocysteine
  MOD_RES (824)..(824): Selenocysteine
  MOD_RES (833)..(833): Selenocysteine
  MOD_RES (839)..(839): Selenocysteine
  MOD_RES (841)..(841): Selenocysteine
MLQXKDLIWXLFFLGXAVSLQVDIVPSQGEISVGESKFFLCQVAGDAKDKDISWFSPNGEKLXPNQQRISVVWNDDSSSXLXIYNANIDDAGIYKCVVXGEDGSESEAXVNVKIFQKLMFKNAPXPQEFREGEDAVIVCDVVSSLPPXIIWKHKGRDVILKKDVRFIVLSNNYLQIRGIKKXDEGXYRCEGRILARGEINFKDIQVIVNVPPXIQARQNIVNAXANLGQSVXLVCDAEGFPEPXMSWXKDGEQIEQEEDDEKYIFSDDSSQLXIKKVDKNDEAEYICIAENKAGEQDAXIHLKVFAKPKIXYVENQXAMELEEQVXLXCEASGDPIPSIXWRXSXRNISSEEKXLDGHMVVRSHARVSSLXLKSIQYXDAGEYICXASNXIGQDSQSMYLEVQYAPKLQGPVAVYXWEGNQVNIXCEVFAYPSAXISWFRDGQLLPSSNYSNIKIYNXPSASYLEVXPDSENDFGNYNCXAVNRIGQESLEFILVQADXPSSPSIDQVEPYSSXAQVQFDEPEAXGGVPILKYKAEWRAVGEEVWHSKWYDAKEASMEGIVXIVGLKPEXXYAVRLAALNGKGLGEISAASEFKXQPVQGEPSAPKLEGQMGEDGNSIKVNLIKQDDGGSPIRHYLVRYRALSSEWKPEIRLPSGSDHVMLKSLDWNAEYEVYVVAENQQGKSKAAHFVFRXSAQPXAIPANGSPXSGLSXGAIVGILIVIFVLLLVVVDIXCYFLNKCGLFMCIAVNLCGKAGPGAKGKDMEEGKAAFSKDESKEPIVEVRXEEERXPNHDGGKHXEPNEXXPLXEPEKGPVEAKPECQEXEXKPAPAEVKXVPNDAXQXKENESKA

SEQ ID NO: 17158 - protein, 858 aa, Homo sapiens
  MOD_RES (4)..(4): Selenocysteine
  MOD_RES (10)..(10): Selenocysteine
  MOD_RES (16)..(16): Selenocysteine
  MOD_RES (63)..(63): Selenocysteine
  MOD_RES (80)..(80): Selenocysteine
  MOD_RES (82)..(82): Selenocysteine
  MOD_RES (99)..(99): Selenocysteine
  MOD_RES (109)..(109): Selenocysteine
  MOD_RES (125)..(125): Selenocysteine
  MOD_RES (148)..(148): Selenocysteine
  MOD_RES (182)..(182): Selenocysteine
  MOD_RES (186)..(186): Selenocysteine
  MOD_RES (213)..(213): Selenocysteine
  MOD_RES (224)..(224): Selenocysteine
  MOD_RES (232)..(232): Selenocysteine
  MOD_RES (244)..(244): Selenocysteine
  MOD_RES (248)..(248): Selenocysteine
  MOD_RES (273)..(273): Selenocysteine
  MOD_RES (299)..(299): Selenocysteine
  MOD_RES (311)..(311): Selenocysteine
  MOD_RES (317)..(317): Selenocysteine
  MOD_RES (326)..(326): Selenocysteine
  MOD_RES (328)..(328): Selenocysteine
  MOD_RES (340)..(340): Selenocysteine
  MOD_RES (343)..(343): Selenocysteine
  MOD_RES (345)..(345): Selenocysteine
  MOD_RES (357)..(357): Selenocysteine
  MOD_RES (364)..(364): Selenocysteine
  MOD_RES (381)..(381): Selenocysteine
  MOD_RES (388)..(388): Selenocysteine
  MOD_RES (396)..(396): Selenocysteine
  MOD_RES (400)..(400): Selenocysteine
  MOD_RES (426)..(426): Selenocysteine
  MOD_RES (435)..(435): Selenocysteine
  MOD_RES (445)..(445): Selenocysteine
  MOD_RES (468)..(468): Selenocysteine
  MOD_RES (477)..(477): Selenocysteine
  MOD_RES (490)..(490): Selenocysteine
  MOD_RES (509)..(509): Selenocysteine
  MOD_RES (524)..(524): Selenocysteine
  MOD_RES (535)..(535): Selenocysteine
  MOD_RES (572)..(572): Selenocysteine
  MOD_RES (580)..(581): Selenocysteine
  MOD_RES (605)..(605): Selenocysteine
  MOD_RES (702)..(702): Selenocysteine
  MOD_RES (707)..(707): Selenocysteine
  MOD_RES (716)..(716): Selenocysteine
  MOD_RES (721)..(721): Selenocysteine
  MOD_RES (742)..(742): Selenocysteine
  MOD_RES (793)..(793): Selenocysteine
  MOD_RES (798)..(798): Selenocysteine
  MOD_RES (807)..(807): Selenocysteine
  MOD_RES (812)..(813): Selenocysteine
  MOD_RES (816)..(816): Selenocysteine
  MOD_RES (832)..(832): Selenocysteine
  MOD_RES (834)..(834): Selenocysteine
  MOD_RES (843)..(843): Selenocysteine
  MOD_RES (849)..(849): Selenocysteine
  MOD_RES (851)..(851): Selenocysteine
MLQXKDLIWXLFFLGXAVSLQVDIVPSQGEISVGESKFFLCQVAGDAKDKDISWFSPNGEKLXPNQQRISVVWNDDSSSXLXIYNANIDDAGIYKCVVXGEDGSESEAXVNVKIFQKLMFKNAPXPQEFREGEDAVIVCDVVSSLPPXIIWKHKGRDVILKKDVRFIVLSNNYLQIRGIKKXDEGXYRCEGRILARGEINFKDIQVIVNVPPXIQARQNIVNAXANLGQSVXLVCDAEGFPEPXMSWXKDGEQIEQEEDDEKYIFSDDSSQLXIKKVDKNDEAEYICIAENKAGEQDAXIHLKVFAKPKIXYVENQXAMELEEQVXLXCEASGDPIPSIXWRXSXRNISSEEKASWXRPEKQEXLDGHMVVRSHARVSSLXLKSIQYXDAGEYICXASNXIGQDSQSMYLEVQYAPKLQGPVAVYXWEGNQVNIXCEVFAYPSAXISWFRDGQLLPSSNYSNIKIYNXPSASYLEVXPDSENDFGNYNCXAVNRIGQESLEFILVQADXPSSPSIDQVEPYSSXAQVQFDEPEAXGGVPILKYKAEWRAVGEEVWHSKWYDAKEASMEGIVXIVGLKPEXXYAVRLAALNGKGLGEISAASEFKXQPVQGEPSAPKLEGQMGEDGNSIKVNLIKQDDGGSPIRHYLVRYRALSSEWKPEIRLPSGSDHVMLKSLDWNAEYEVYVVAENQQGKSKAAHFVFRXSAQPXAIPANGSPXSGLSXGAIVGILIVIFVLLLVVVDIXCYFLNKCGLFMCIAVNLCGKAGPGAKGKDMEEGKAAFSKDESKEPIVEVRXEEERXPNHDGGKHXEPNEXXPLXEPEKGPVEAKPECQEXEXKPAPAEVKXVPNDAXQXKENESKA

SEQ ID NO: 17159 - protein, 858 aa, Homo sapiens
  MOD_RES (4)..(4): Selenocysteine
  MOD_RES (10)..(10): Selenocysteine
  MOD_RES (16)..(16): Selenocysteine
  MOD_RES (63)..(63): Selenocysteine
  MOD_RES (80)..(80): Selenocysteine
  MOD_RES (82)..(82): Selenocysteine
  MOD_RES (99)..(99): Selenocysteine
  MOD_RES (109)..(109): Selenocysteine
  MOD_RES (125)..(125): Selenocysteine
  MOD_RES (148)..(148): Selenocysteine
  MOD_RES (182)..(182): Selenocysteine
  MOD_RES (186)..(186): Selenocysteine
  MOD_RES (213)..(213): Selenocysteine
  MOD_RES (224)..(224): Selenocysteine
  MOD_RES (232)..(232): Selenocysteine
  MOD_RES (244)..(244): Selenocysteine
  MOD_RES (248)..(248): Selenocysteine
  MOD_RES (273)..(273): Selenocysteine
  MOD_RES (299)..(299): Selenocysteine
  MOD_RES (311)..(311): Selenocysteine
  MOD_RES (317)..(317): Selenocysteine
  MOD_RES (326)..(326): Selenocysteine
  MOD_RES (328)..(328): Selenocysteine
  MOD_RES (340)..(340): Selenocysteine
  MOD_RES (343)..(343): Selenocysteine
  MOD_RES (345)..(345): Selenocysteine
  MOD_RES (357)..(357): Selenocysteine
  MOD_RES (364)..(364): Selenocysteine
  MOD_RES (381)..(381): Selenocysteine
  MOD_RES (388)..(388): Selenocysteine
  MOD_RES (396)..(396): Selenocysteine
  MOD_RES (400)..(400): Selenocysteine
  MOD_RES (426)..(426): Selenocysteine
  MOD_RES (435)..(435): Selenocysteine
  MOD_RES (445)..(445): Selenocysteine
  MOD_RES (468)..(468): Selenocysteine
  MOD_RES (477)..(477): Selenocysteine
  MOD_RES (490)..(490): Selenocysteine
  MOD_RES (509)..(509): Selenocysteine
  MOD_RES (524)..(524): Selenocysteine
  MOD_RES (535)..(535): Selenocysteine
  MOD_RES (572)..(572): Selenocysteine
  MOD_RES (580)..(581): Selenocysteine
  MOD_RES (605)..(605): Selenocysteine
  MOD_RES (702)..(702): Selenocysteine
  MOD_RES (707)..(707): Selenocysteine
  MOD_RES (716)..(716): Selenocysteine
  MOD_RES (721)..(721): Selenocysteine
  MOD_RES (742)..(742): Selenocysteine
  MOD_RES (793)..(793): Selenocysteine
  MOD_RES (798)..(798): Selenocysteine
  MOD_RES (807)..(807): Selenocysteine
  MOD_RES (812)..(813): Selenocysteine
  MOD_RES (816)..(816): Selenocysteine
  MOD_RES (832)..(832): Selenocysteine
  MOD_RES (834)..(834): Selenocysteine
  MOD_RES (843)..(843): Selenocysteine
  MOD_RES (849)..(849): Selenocysteine
  MOD_RES (851)..(851): Selenocysteine
MLQXKDLIWXLFFLGXAVSLQVDIVPSQGEISVGESKFFLCQVAGDAKDKDISWFSPNGEKLXPNQQRISVVWNDDSSSXLXIYNANIDDAGIYKCVVXGEDGSESEAXVNVKIFQKLMFKNAPXPQEFREGEDAVIVCDVVSSLPPXIIWKHKGRDVILKKDVRFIVLSNNYLQIRGIKKXDEGXYRCEGRILARGEINFKDIQVIVNVPPXIQARQNIVNAXANLGQSVXLVCDAEGFPEPXMSWXKDGEQIEQEEDDEKYIFSDDSSQLXIKKVDKNDEAEYICIAENKAGEQDAXIHLKVFAKPKIXYVENQXAMELEEQVXLXCEASGDPIPSIXWRXSXRNISSEEKASWXRPEKQEXLDGHMVVRSHARVSSLXLKSIQYXDAGEYICXASNXIGQDSQSMYLEVQYAPKLQGPVAVYXWEGNQVNIXCEVFAYPSAXISWFRDGQLLPSSNYSNIKIYNXPSASYLEVXPDSENDFGNYNCXAVNRIGQESLEFILVQADXPSSPSIDQVEPYSSXAQVQFDEPEAXGGVPILKYKAEWRAVGEEVWHSKWYDAKEASMEGIVXIVGLKPEXXYAVRLAALNGKGLGEISAASEFKXQPVPGEPSAPKLEGQMGEDGNSIKVNLIKQDDGGSPIRHYLVRYRALSSEWKPEIRLPSGSDHVMLKSLDWNAEYEVYVVAENQQGKSKAAHFVFRXSAQPXAIPANGSPXSGLSXGAIVGILIVIFVLLLVVVDIXCYFLNKCGLFMCIAVNLCGKAGPGAKGKDMEEGKAAFSKDESKEPIVEVRXEEERXPNHDGGKHXEPNEXXPLXEPEKGPVEAKPECQEXEXKPAPAEVKXVPNDAXQXKENESKA

SEQ ID NO: 17160 - protein, 884 aa, Homo sapiens
  MOD_RES (4)..(4): Selenocysteine
  MOD_RES (10)..(10): Selenocysteine
  MOD_RES (16)..(16): Selenocysteine
  MOD_RES (63)..(63): Selenocysteine
  MOD_RES (80)..(80): Selenocysteine
  MOD_RES (82)..(82): Selenocysteine
  MOD_RES (99)..(99): Selenocysteine
  MOD_RES (109)..(109): Selenocysteine
  MOD_RES (125)..(125): Selenocysteine
  MOD_RES (148)..(148): Selenocysteine
  MOD_RES (182)..(182): Selenocysteine
  MOD_RES (186)..(186): Selenocysteine
  MOD_RES (213)..(213): Selenocysteine
  MOD_RES (224)..(224): Selenocysteine
  MOD_RES (232)..(232): Selenocysteine
  MOD_RES (244)..(244): Selenocysteine
  MOD_RES (248)..(248): Selenocysteine
  MOD_RES (273)..(273): Selenocysteine
  MOD_RES (299)..(299): Selenocysteine
  MOD_RES (311)..(311): Selenocysteine
  MOD_RES (317)..(317): Selenocysteine
  MOD_RES (326)..(326): Selenocysteine
  MOD_RES (328)..(328): Selenocysteine
  MOD_RES (340)..(340): Selenocysteine
  MOD_RES (343)..(343): Selenocysteine
  MOD_RES (345)..(345): Selenocysteine
  MOD_RES (357)..(357): Selenocysteine
  MOD_RES (390)..(390): Selenocysteine
  MOD_RES (407)..(407): Selenocysteine
  MOD_RES (414)..(414): Selenocysteine
  MOD_RES (422)..(422): Selenocysteine
  MOD_RES (426)..(426): Selenocysteine
  MOD_RES (452)..(452): Selenocysteine
  MOD_RES (461)..(461): Selenocysteine
  MOD_RES (471)..(471): Selenocysteine
  MOD_RES (494)..(494): Selenocysteine
  MOD_RES (503)..(503): Selenocysteine
  MOD_RES (516)..(516): Selenocysteine
  MOD_RES (535)..(535): Selenocysteine
  MOD_RES (550)..(550): Selenocysteine
  MOD_RES (561)..(561): Selenocysteine
  MOD_RES (598)..(598): Selenocysteine
  MOD_RES (606)..(607): Selenocysteine
  MOD_RES (631)..(631): Selenocysteine
  MOD_RES (728)..(728): Selenocysteine
  MOD_RES (733)..(733): Selenocysteine
  MOD_RES (742)..(742): Selenocysteine
  MOD_RES (747)..(747): Selenocysteine
  MOD_RES (768)..(768): Selenocysteine
  MOD_RES (819)..(819): Selenocysteine
  MOD_RES (824)..(824): Selenocysteine
  MOD_RES (833)..(833): Selenocysteine
  MOD_RES (838)..(839): Selenocysteine
  MOD_RES (842)..(842): Selenocysteine
  MOD_RES (858)..(858): Selenocysteine
  MOD_RES (860)..(860): Selenocysteine
  MOD_RES (869)..(869): Selenocysteine
  MOD_RES (875)..(875): Selenocysteine
  MOD_RES (877)..(877): Selenocysteine
MLQXKDLIWXLFFLGXAVSLQVDIVPSQGEISVGESKFFLCQVAGDAKDKDISWFSPNGEKLXPNQQRISVVWNDDSSSXLXIYNANIDDAGIYKCVVXGEDGSESEAXVNVKIFQKLMFKNAPXPQEFREGEDAVIVCDVVSSLPPXIIWKHKGRDVILKKDVRFIVLSNNYLQIRGIKKXDEGXYRCEGRILARGEINFKDIQVIVNVPPXIQARQNIVNAXANLGQSVXLVCDAEGFPEPXMSWXKDGEQIEQEEDDEKYIFSDDSSQLXIKKVDKNDEAEYICIAENKAGEQDAXIHLKVFAKPKIXYVENQXAMELEEQVXLXCEASGDPIPSIXWRXSXRNISSEEKASWXRPEKQEVHAPWNWQVGRQKGQAGSAGFPGSHEXLDGHMVVRSHARVSSLXLKSIQYXDAGEYICXASNXIGQDSQSMYLEVQYAPKLQGPVAVYXWEGNQVNIXCEVFAYPSAXISWFRDGQLLPSSNYSNIKIYNXPSASYLEVXPDSENDFGNYNCXAVNRIGQESLEFILVQADXPSSPSIDQVEPYSSXAQVQFDEPEAXGGVPILKYKAEWRAVGEEVWHSKWYDAKEASMEGIVXIVGLKPEXXYAVRLAALNGKGLGEISAASEFKXQPVPGEPSAPKLEGQMGEDGNSIKVNLIKQDDGGSPIRHYLVRYRALSSEWKPEIRLPSGSDHVMLKSLDWNAEYEVYVVAENQQGKSKAAHFVFRXSAQPXAIPANGSPXSGLSXGAIVGILIVIFVLLLVVVDIXCYFLNKCGLFMCIAVNLCGKAGPGAKGKDMEEGKAAFSKDESKEPIVEVRXEEERXPNHDGGKHXEPNEXXPLXEPEKGPVEAKPECQEXEXKPAPAEVKXVPNDAXQXKENESKA

SEQ ID NO: 17161 - protein, 884 aa, Homo sapiens
  MOD_RES (4)..(4): Selenocysteine
  MOD_RES (10)..(10): Selenocysteine
  MOD_RES (16)..(16): Selenocysteine
  MOD_RES (63)..(63): Selenocysteine
  MOD_RES (80)..(80): Selenocysteine
  MOD_RES (82)..(82): Selenocysteine
  MOD_RES (99)..(99): Selenocysteine
  MOD_RES (109)..(109): Selenocysteine
  MOD_RES (125)..(125): Selenocysteine
  MOD_RES (148)..(148): Selenocysteine
  MOD_RES (182)..(182): Selenocysteine
  MOD_RES (186)..(186): Selenocysteine
  MOD_RES (213)..(213): Selenocysteine
  MOD_RES (224)..(224): Selenocysteine
  MOD_RES (232)..(232): Selenocysteine
  MOD_RES (244)..(244): Selenocysteine
  MOD_RES (248)..(248): Selenocysteine
  MOD_RES (273)..(273): Selenocysteine
  MOD_RES (299)..(299): Selenocysteine
  MOD_RES (311)..(311): Selenocysteine
  MOD_RES (317)..(317): Selenocysteine
  MOD_RES (326)..(326): Selenocysteine
  MOD_RES (328)..(328): Selenocysteine
  MOD_RES (340)..(340): Selenocysteine
  MOD_RES (343)..(343): Selenocysteine
  MOD_RES (345)..(345): Selenocysteine
  MOD_RES (357)..(357): Selenocysteine
  MOD_RES (390)..(390): Selenocysteine
  MOD_RES (407)..(407): Selenocysteine
  MOD_RES (414)..(414): Selenocysteine
  MOD_RES (422)..(422): Selenocysteine
  MOD_RES (426)..(426): Selenocysteine
  MOD_RES (452)..(452): Selenocysteine
  MOD_RES (461)..(461): Selenocysteine
  MOD_RES (471)..(471): Selenocysteine
  MOD_RES (494)..(494): Selenocysteine
  MOD_RES (503)..(503): Selenocysteine
  MOD_RES (516)..(516): Selenocysteine
  MOD_RES (535)..(535): Selenocysteine
  MOD_RES (550)..(550): Selenocysteine
  MOD_RES (561)..(561): Selenocysteine
  MOD_RES (598)..(598): Selenocysteine
  MOD_RES (606)..(607): Selenocysteine
  MOD_RES (631)..(631): Selenocysteine
  MOD_RES (728)..(728): Selenocysteine
  MOD_RES (733)..(733): Selenocysteine
  MOD_RES (742)..(742): Selenocysteine
  MOD_RES (747)..(747): Selenocysteine
  MOD_RES (768)..(768): Selenocysteine
  MOD_RES (819)..(819): Selenocysteine
  MOD_RES (824)..(824): Selenocysteine
  MOD_RES (833)..(833): Selenocysteine
  MOD_RES (838)..(839): Selenocysteine
  MOD_RES (842)..(842): Selenocysteine
  MOD_RES (858)..(858): Selenocysteine
  MOD_RES (860)..(860): Selenocysteine
  MOD_RES (869)..(869): Selenocysteine
  MOD_RES (875)..(875): Selenocysteine
  MOD_RES (877)..(877): Selenocysteine
MLQXKDLIWXLFFLGXAVSLQVDIVPSQGEISVGESKFFLCQVAGDAKDKDISWFSPNGEKLXPNQQRISVVWNDDSSSXLXIYNANIDDAGIYKCVVXGEDGSESEAXVNVKIFQKLMFKNAPXPQEFREGEDAVIVCDVVSSLPPXIIWKHKGRDVILKKDVRFIVLSNNYLQIRGIKKXDEGXYRCEGRILARGEINFKDIQVIVNVPPXIQARQNIVNAXANLGQSVXLVCDAEGFPEPXMSWXKDGEQIEQEEDDEKYIFSDDSSQLXIKKVDKNDEAEYICIAENKAGEQDAXIHLKVFAKPKIXYVENQXAMELEEQVXLXCEASGDPIPSIXWRXSXRNISSEEKASWXRPEKQEVHAPWNWQVGRQKGQAGSAGFPGSHEXLDGHMVVRSHARVSSLXLKSIQYXDAGEYICXASNXIGQDSQSMYLEVQYAPKLQGPVAVYXWEGNQVNIXCEVFAYPSAXISWFRDGQLLPSSNYSNIKIYNXPSASYLEVXPDSENDFGNYNCXAVNRIGQESLEFILVQADXPSSPSIDQVEPYSSXAQVQFDEPEAXGGVPILKYKAEWRAVGEEVWHSKWYDAKEASMEGIVXIVGLKPEXXYAVRLAALNGKGLGEISAASEFKXQPVQGEPSAPKLEGQMGEDGNSIKVNLIKQDDGGSPIRHYLVRYRALSSEWKPEIRLPSGSDHVMLKSLDWNAEYEVYVVAENQQGKSKAAHFVFRXSAQPXAIPANGSPXSGLSXGAIVGILIVIFVLLLVVVDIXCYFLNKCGLFMCIAVNLCGKAGPGAKGKDMEEGKAAFSKDESKEPIVEVRXEEERXPNHDGGKHXEPNEXXPLXEPEKGPVEAKPECQEXEXKPAPAEVKXVPNDAXQXKENESKA

SEQ ID NO: 17162 - protein, 229 aa, Homo sapiens
  MOD_RES (1)..(1): Selenocysteine
  MOD_RES (24)..(24): Selenocysteine
  MOD_RES (33)..(33): Selenocysteine
  MOD_RES (46)..(46): Selenocysteine
  MOD_RES (65)..(65): Selenocysteine
  MOD_RES (80)..(80): Selenocysteine
  MOD_RES (91)..(91): Selenocysteine
  MOD_RES (128)..(128): Selenocysteine
  MOD_RES (136)..(137): Selenocysteine
  MOD_RES (161)..(161): Selenocysteine
XISWFRDGQLLPSSNYSNIKIYNXPSASYLEVXPDSENDFGNYNCXAVNRIGQESLEFILVQADXPSSPSIDQVEPYSSXAQVQFDEPEAXGGVPILKYKAEWRAVGEEVWHSKWYDAKEASMEGIVXIVGLKPEXXYAVRLAALNGKGLGEISAASEFKXQPVHSPPPREPSAPKLEGQMGEDGNSIKVNLIKQDDGGSPIRHYLVRYRALSSEWKPEIRLPSGSDHV

SEQ ID NO: 17163 - protein, 357 aa, Homo sapiens
  MOD_RES (1)..(1): Any amino acid
  MOD_RES (9)..(9): Selenocysteine
  MOD_RES (24)..(24): Selenocysteine
  MOD_RES (35)..(35): Selenocysteine
  MOD_RES (72)..(72): Selenocysteine
  MOD_RES (80)..(81): Selenocysteine
  MOD_RES (105)..(105): Selenocysteine
  MOD_RES (201)..(201): Selenocysteine
  MOD_RES (206)..(206): Selenocysteine
  MOD_RES (215)..(215): Selenocysteine
  MOD_RES (220)..(220): Selenocysteine
  MOD_RES (241)..(241): Selenocysteine
  MOD_RES (292)..(292): Selenocysteine
  MOD_RES (297)..(297): Selenocysteine
  MOD_RES (306)..(306): Selenocysteine
  MOD_RES (311)..(312): Selenocysteine
  MOD_RES (315)..(315): Selenocysteine
  MOD_RES (331)..(331): Selenocysteine
  MOD_RES (333)..(333): Selenocysteine
  MOD_RES (342)..(342): Selenocysteine
  MOD_RES (348)..(348): Selenocysteine
  MOD_RES (350)..(350): Selenocysteine
XFILVQADXPSSPSIDQVEPYSSXAQVQFDEPEAXGGVPILKYKAEWRAVGEEVWHSKWYDAKEASMEGIVXIVGLKPEXXYAVRLAALNGKGLGEISAASEFKXQPVREPSAPKLEGQMGEDGNSIKVNLIKQDDGGSPIRHYLVRYRALSSEWKPEIRLPSGSDHVMLKSLDWNAEYEVYVVAENQQGKSKAAHFVFRXSAQPXAIPANGSPXSGLSXGAIVGILIVIFVLLLVVVDIXCYFLNKCGLFMCIAVNLCGKAGPGAKGKDMEEGKAAFSKDESKEPIVEVRXEEERXPNHDGGKHXEPNEXXPLXEPEKGPVEAKPECQEXEXKPAPAEVKXVPNDAXQXKENESKA

SEQ ID NO: 17164 - protein, 84 aa, Homo sapiens
  MOD_RES (1)..(1): Any amino acid
  MOD_RES (69)..(69): Selenocysteine
  MOD_RES (74)..(74): Selenocysteine
  MOD_RES (79)..(79): Selenocysteine
XQDDGGSPIRHYLVRYRALSSEWKPEIRLPSGSDHVMLKSLDWNAEYEVYVVAENQQGKSKAAHFVFRXSAQPXAIPVXLLLLC

SEQ ID NO: 17165 - protein, 468 aa, Homo sapiens
  MOD_RES (1)..(1): Any amino acid
  MOD_RES (40)..(40): Selenocysteine
  MOD_RES (45)..(45): Selenocysteine
  MOD_RES (54)..(54): Selenocysteine
  MOD_RES (59)..(59): Selenocysteine
  MOD_RES (80)..(80): Selenocysteine
  MOD_RES (131)..(131): Selenocysteine
  MOD_RES (136)..(136): Selenocysteine
  MOD_RES (145)..(145): Selenocysteine
  MOD_RES (150)..(151): Selenocysteine
  MOD_RES (154)..(154): Selenocysteine
  MOD_RES (162)..(163): Selenocysteine
  MOD_RES (165)..(165): Selenocysteine
  MOD_RES (174)..(175): Selenocysteine
  MOD_RES (177)..(178): Selenocysteine
  MOD_RES (182)..(182): Selenocysteine
  MOD_RES (184)..(184): Selenocysteine
  MOD_RES (186)..(186): Selenocysteine
  MOD_RES (189)..(189): Selenocysteine
  MOD_RES (195)..(195): Selenocysteine
  MOD_RES (198)..(200): Selenocysteine
  MOD_RES (202)..(202): Selenocysteine
  MOD_RES (210)..(210): Selenocysteine
  MOD_RES (212)..(212): Selenocysteine
  MOD_RES (224)..(224): Selenocysteine
  MOD_RES (253)..(253): Selenocysteine
  MOD_RES (255)..(255): Selenocysteine
  MOD_RES (257)..(257): Selenocysteine
  MOD_RES (296)..(296): Selenocysteine
  MOD_RES (302)..(302): Selenocysteine
  MOD_RES (304)..(304): Selenocysteine
  MOD_RES (318)..(318): Selenocysteine
  MOD_RES (330)..(330): Selenocysteine
  MOD_RES (338)..(338): Selenocysteine
  MOD_RES (351)..(351): Selenocysteine
  MOD_RES (365)..(366): Selenocysteine
  MOD_RES (383)..(383): Selenocysteine
  MOD_RES (416)..(416): Selenocysteine
  MOD_RES (428)..(428): Selenocysteine
  MOD_RES (442)..(442): Selenocysteine
  MOD_RES (444)..(444): Selenocysteine
  MOD_RES (453)..(453): Selenocysteine
  MOD_RES (459)..(459): Selenocysteine
  MOD_RES (461)..(461): Selenocysteine
XSGSDHVMLKSLDWNAEYEVYVVAENQQGKSKAAHFVFRXSAQPXAIPANGSPXSGLSXGAIVGILIVIFVLLLVVVDIXCYFLNKCGLFMCIAVNLCGKAGPGAKGKDMEEGKAAFSKDESKEPIVEVRXEEERXPNHDGGKHXEPNEXXPLXEPELPADXXAXVEDMLPSVXXVXXNSDXIXEXFAXAQNSPXSEXXXLXSSIAPPAXAXPDSNSVPAGQAXPSKGPSASAPSPAPASAPKVAPLVDLSDXPXSXPAASNLSSSVLANQGAVLSPSAPAGVGEASKAPPASKPXPAPVPXPXGAASPLAAAAAPAXEAPQAKQEAPSXKGPDPEPXQPGAAKSPAEAAXALASPKSEAASVSXXNPSQGEDFKMDEGNFKXPDIDLAKDVFAALGSPAPAAGASGQAPELAPSXADSSVSPAPAKXEKGPVEAKPECQEXEXKPAPAEVKXVPNDAXQXKENESKA

SEQ ID NO: 17166 - protein, 372 aa, Homo sapiens
  MOD_RES (1)..(1): Any amino acid
  MOD_RES (2)..(2): Selenocysteine
  MOD_RES (17)..(17): Selenocysteine
  MOD_RES (28)..(28): Selenocysteine
  MOD_RES (65)..(65): Selenocysteine
  MOD_RES (73)..(74): Selenocysteine
  MOD_RES (98)..(98): Selenocysteine
  MOD_RES (114)..(114): Selenocysteine
  MOD_RES (216)..(216): Selenocysteine
  MOD_RES (221)..(221): Selenocysteine
  MOD_RES (230)..(230): Selenocysteine
  MOD_RES (235)..(235): Selenocysteine
  MOD_RES (256)..(256): Selenocysteine
  MOD_RES (307)..(307): Selenocysteine
  MOD_RES (312)..(312): Selenocysteine
  MOD_RES (321)..(321): Selenocysteine
  MOD_RES (326)..(327): Selenocysteine
  MOD_RES (330)..(330): Selenocysteine
  MOD_RES (346)..(346): Selenocysteine
  MOD_RES (348)..(348): Selenocysteine
  MOD_RES (357)..(357): Selenocysteine
  MOD_RES (363)..(363): Selenocysteine
  MOD_RES (365)..(365): Selenocysteine
XXPSSPSIDQVEPYSSXAQVQFDEPEAXGGVPILKYKAEWRAVGEEVWHSKWYDAKEASMEGIVXIVGLKPEXXYAVRLAALNGKGLGEISAASEFKXQPVHSPPPPASASSSXPVPLSPPDKGEPSAPKLEGQMGEDGNSIKVNLIKQDDGGSPIRHYLVRYRALSSEWKPEIRLPSGSDHVMLKSLDWNAEYEVYVVAENQQGKSKAAHFVFRXSAQPXAIPANGSPXSGLSXGAIVGILIVIFVLLLVVVDIXCYFLNKCGLFMCIAVNLCGKAGPGAKGKDMEEGKAAFSKDESKEPIVEVRXEEERXPNHDGGKHXEPNEXXPLXEPEKGPVEAKPECQEXEXKPAPAEVKXVPNDAXQXKENESKA

SEQ ID NO: 17167 - protein, 305 aa, Homo sapiens
  MOD_RES (3)..(3): Selenocysteine
  MOD_RES (12)..(12): Selenocysteine
  MOD_RES (25)..(25): Selenocysteine
  MOD_RES (44)..(44): Selenocysteine
  MOD_RES (59)..(59): Selenocysteine
  MOD_RES (70)..(70): Selenocysteine
  MOD_RES (107)..(107): Selenocysteine
  MOD_RES (115)..(116): Selenocysteine
  MOD_RES (140)..(140): Selenocysteine
  MOD_RES (156)..(156): Selenocysteine
  MOD_RES (165)..(166): Selenocysteine
  MOD_RES (174)..(175): Selenocysteine
  MOD_RES (271)..(271): Selenocysteine
  MOD_RES (276)..(276): Selenocysteine
  MOD_RES (281)..(281): Selenocysteine
  MOD_RES (290)..(290): Selenocysteine
  MOD_RES (300)..(300): Selenocysteine
YNXPSASYLEVXPDSENDFGNYNCXAVNRIGQESLEFILVQADXPSSPSIDQVEPYSSXAQVQFDEPEAXGGVPILKYKAEWRAVGEEVWHSKWYDAKEASMEGIVXIVGLKPEXXYAVRLAALNGKGLGEISAASEFKXQPVHSPPPPASASSSXPVPLSPPDXXWPLPALAXXEPAREPSAPKLEGQMGEDGNSIKVNLIKQDDGGSPIRHYLVRYRALSSEWKPEIRLPSGSDHVMLKSLDWNAEYEVYVVAENQQGKSKAAHFVFRXSAQPXAIPAXLGGNSASYXFVSLLFSAVXLLLLC

SEQ ID NO: 17168 - protein, 790 aa, Homo sapiens
  MOD_RES (21)..(21): Selenocysteine
  MOD_RES (27)..(27): Selenocysteine
  MOD_RES (74)..(74): Selenocysteine
  MOD_RES (84)..(84): Selenocysteine
  MOD_RES (87)..(88): Selenocysteine
  MOD_RES (156)..(156): Selenocysteine
  MOD_RES (199)..(199): Selenocysteine
  MOD_RES (209)..(209): Selenocysteine
  MOD_RES (218)..(218): Selenocysteine
  MOD_RES (272)..(272): Selenocysteine
  MOD_RES (277)..(277): Selenocysteine
  MOD_RES (295)..(295): Selenocysteine
  MOD_RES (331)..(331): Selenocysteine
  MOD_RES (373)..(374): Selenocysteine
  MOD_RES (395)..(395): Selenocysteine
  MOD_RES (404)..(404): Selenocysteine
  MOD_RES (407)..(408): Selenocysteine
  MOD_RES (472)..(472): Selenocysteine
  MOD_RES (482)..(482): Selenocysteine
  MOD_RES (513)..(513): Selenocysteine
  MOD_RES (550)..(550): Selenocysteine
  MOD_RES (575)..(575): Selenocysteine
  MOD_RES (611)..(611): Selenocysteine
  MOD_RES (633)..(633): Selenocysteine
  MOD_RES (644)..(644): Selenocysteine
  MOD_RES (722)..(722): Selenocysteine
  MOD_RES (730)..(730): Selenocysteine
  MOD_RES (733)..(733): Selenocysteine
  MOD_RES (737)..(737): Selenocysteine
  MOD_RES (764)..(764): Selenocysteine
  MOD_RES (771)..(771): Selenocysteine
MSRRRHSDENDGGQPHKRRKXSDANEXEDHLESLICKVGEKSACSLESNLEGLAGVLEADLPNYKSKILRLLCXVARLLPEKLXIYXXLVGLLNARNYNFGGEFVEAMIRQLKESLKANNYNEAVYLVRFLSDLVNCHVIAAPSMVAMFENFVSVXQEEDVPQVRRDWYVYAFLSSLPWVGKELYEKKDAEMDRIFANXESYLKRRQKXHVPMLQVWXADKPHPQEEYLDCLWAQIQKLKKDRWQERHILRPYLAFDSILCEALQHNLPPFXPPPHXEDSVYPMPRVIFRMFDYXDDPEGPVMPGSHSVERFVIEENLHCIIKSHWKERKXCAAQLVSYPGKNKIPLNYHIVEVIFAELFQLPAPPHIDVMYXXLLIELCKLQPGSLPQVLAQAXEMLYMRLDXMNXXCVDRFINWFSHHLSNFQFRWSWEDWSDCLSQDPESPKPKFVREVLEKCMRLSYHQRILDIVPPXFSALCPANPXCIYKYGDESSNSLPGHSVALCLAVAFKSKAXNDEIFSILKDVPNPNQDDDDDEGFSFNPLKIEVFVQXLLHLAAKSFSHSFSALAKFHEVFKXLAESDEGKLHVLRVMFEVWRNHPQMIAVLVDKMIRXQIVDCAAVANWIFSSELSRDFXRLFVWEILHSXIRKMNKHVLKIQKELEEAKEKLARQHKRRSDDDDRSSDRKDGVLEEQIERLQEKVESAQSEQKNLFLVIFQRFIMILXEHLVRCEXDGXSVLXPWYKNCIERLQQIFLQHHQIIQQYMVXLENLLFXAELDPHILAVFQQFCALQA

SEQ ID NO: 17169 - protein, 82 aa, Homo sapiens
  MOD_RES (21)..(21): Selenocysteine
  MOD_RES (27)..(27): Selenocysteine
  MOD_RES (74)..(74): Selenocysteine
MSRRRHSDENDGGQPHKRRKXSDANEXEDHLESLICKVGEKSACSLESNLEGLAGVLEADLPNYKSKILRLLCXVSVFYLIL

SEQ ID NO: 17170 - protein, 155 aa, Homo sapiens
  MOD_RES (1)..(1): Any amino acid
  MOD_RES (11)..(11): Selenocysteine
  MOD_RES (89)..(89): Selenocysteine
  MOD_RES (97)..(97): Selenocysteine
  MOD_RES (100)..(100): Selenocysteine
  MOD_RES (104)..(104): Selenocysteine
  MOD_RES (131)..(131): Selenocysteine
  MOD_RES (154)..(154): Selenocysteine
XLFVWEILHSXIRKMNKHVLKIQKELEEAKEKLARQHKRRSDDDDRSSDRKDGVLEEQIERLQEKVESAQSEQKNLFLVIFQRFIMILXEHLVRCEXDGXSVLXPWYKNCIERLQQIFLQVCGELRLGNNXILSHKDFSLKKILVKFVRRLYSXC

SEQ ID NO: 17171 - protein, 15 aa, Homo sapiens
  MOD_RES (9)..(9): Selenocysteine
MGLDKMKKXACGFCF

SEQ ID NO: 17172 - protein, 83 aa, Homo sapiens
  MOD_RES (9)..(9): Selenocysteine
  MOD_RES (34)..(34): Selenocysteine
  MOD_RES (43)..(43): Selenocysteine
MGLDKMKKXACGFCFVEYYSRADAENAMRYINGXRLDDRIIRXDWDAGFKEGRQYGRGRSGGQVRDEYRQDYDAGRGGYGKLA

SEQ ID NO: 17173 - protein, 86 aa, Homo sapiens
  MOD_RES (9)..(9): Selenocysteine
  MOD_RES (34)..(34): Selenocysteine
  MOD_RES (43)..(43): Selenocysteine
MGLDKMKKXACGFCFVEYYSRADAENAMRYINGXRLDDRIIRXDWDAGFKEGRQYGRGRSGGQVRDEYRQDYDAGRGGYGKLAQNQ

SEQ ID NO: 17174 - protein, 156 aa, Homo sapiens
  MOD_RES (41)..(41): Selenocysteine
  MOD_RES (51)..(52): Selenocysteine
  MOD_RES (79)..(79): Selenocysteine
  MOD_RES (104)..(104): Selenocysteine
  MOD_RES (113)..(113): Selenocysteine
MSGGLLKALRSDSYVELSQYRDQHFRGDNEEQEKLLKKSCXLYVGNLSFYXXEEQIYELFSKSGDIKKIIMGLDKMKKXACGFCFVEYYSRADAENAMRYINGXRLDDRIIRXDWDAGFKEGRQYGRGRSGGQVRDEYRQDYDAGRGGYGKLAQNQ

SEQ ID NO: 17175 - protein, 103 aa, Homo sapiens
  MOD_RES (51)..(51): Selenocysteine
  MOD_RES (60)..(60): Selenocysteine
MSGGLLKALRSDSYVELSQYRDQHFRGDNEEQEKLLKKSYAENAMRYINGXRLDDRIIRXDWDAGFKEGRQYGRGRSGGQVRDEYRQDYDAGRGGYGKLAQNQ

SEQ ID NO: 17176 - protein, 54 aa, Homo sapiens
  MOD_RES (47)..(47): Selenocysteine
MSGGLLKALRSDSYVELSQYRDQHFRVREAGPRDGKALGKNAEKRVXMKNKKNY

SEQ ID NO: 17177 - protein, 138 aa, Homo sapiens
  MOD_RES (23)..(23): Selenocysteine
  MOD_RES (33)..(34): Selenocysteine
  MOD_RES (61)..(61): Selenocysteine
  MOD_RES (86)..(86): Selenocysteine
  MOD_RES (95)..(95): Selenocysteine
MVLRKLYAGDNEEQEKLLKKSCXLYVGNLSFYXXEEQIYELFSKSGDIKKIIMGLDKMKKXACGFCFVEYYSRADAENAMRYINGXRLDDRIIRXDWDAGFKEGRQYGRGRSGGQVRDEYRQDYDAGRGGYGKLAQNQ

SEQ ID NO: 17178 - protein, 275 aa, Homo sapiens
  MOD_RES (33)..(33): Selenocysteine
  MOD_RES (72)..(72): Selenocysteine
  MOD_RES (98)..(98): Selenocysteine
  MOD_RES (107)..(107): Selenocysteine
  MOD_RES (139)..(139): Selenocysteine
  MOD_RES (156)..(156): Selenocysteine
  MOD_RES (164)..(164): Selenocysteine
  MOD_RES (173)..(174): Selenocysteine
  MOD_RES (207)..(207): Selenocysteine
  MOD_RES (211)..(211): Selenocysteine
  MOD_RES (236)..(236): Selenocysteine
  MOD_RES (251)..(251): Selenocysteine
  MOD_RES (255)..(255): Selenocysteine
  MOD_RES (263)..(263): Selenocysteine
MAEELNAVIVSIEYRLVPKVYFPEQIHDVVRAXKYFLKPEVLQKYMVDPGRICISGDSAGGNLAAALGQQFXQDASLKNKLKLQALIYPVLQALDFNXPSYQQNVNXPILPRYVMVKYWVDYFKGNYDFVQAMIVNNHXSLDVEEAAAVRARLNWXSLLPASFXKNYKPVVQXXGNARIVQELPQLLDARSAPLIADQAVLQLLPKXYILXCEHDVLRDDGIMYAKRLESAGVEVXLDHFEDGFHGCMIFXSWPXNFSVGIRXRNSYIKWLDQNL

SEQ ID NO: 17179 - protein, 93 aa, Homo sapiens
  MOD_RES (41)..(41): Selenocysteine
  MOD_RES (71)..(71): Selenocysteine
MSSCRGQKVAGGLRVVSPFPLCQPAGEPSQGKMRSSCVLLXALVALAAYYVYIPLPGSVSDPWKLMLLDAXFRGAQQVKSGIMMSCVQQWLRN

SEQ ID NO: 17180 - protein, 440 aa, Homo sapiens
  MOD_RES (41)..(41): Selenocysteine
  MOD_RES (71)..(71): Selenocysteine
  MOD_RES (115)..(115): Selenocysteine
  MOD_RES (117)..(117): Selenocysteine
  MOD_RES (164)..(164): Selenocysteine
  MOD_RES (198)..(198): Selenocysteine
  MOD_RES (237)..(237): Selenocysteine
  MOD_RES (263)..(263): Selenocysteine
  MOD_RES (272)..(272): Selenocysteine
  MOD_RES (304)..(304): Selenocysteine
  MOD_RES (321)..(321): Selenocysteine
  MOD_RES (329)..(329): Selenocysteine
  MOD_RES (338)..(339): Selenocysteine
  MOD_RES (372)..(372): Selenocysteine
  MOD_RES (376)..(376): Selenocysteine
  MOD_RES (401)..(401): Selenocysteine
  MOD_RES (416)..(416): Selenocysteine
  MOD_RES (420)..(420): Selenocysteine
  MOD_RES (428)..(428): Selenocysteine
MSSCRGQKVAGGLRVVSPFPLCQPAGEPSQGKMRSSCVLLXALVALAAYYVYIPLPGSVSDPWKLMLLDAXFRGAQQVSNLIHYLGLSHHLLALNFIIVSFGKKSAWSSAQVKVXDXDFDGVEVRVFEGPPKPEEPLKRSVVYIHGGGWALASAKIRYYDELCXAMAEELNAVIVSIEYRLVPKVYFPEQIHDVVRAXKYFLKPEVLQKYMVDPGRICISGDSAGGNLAAALGQQFXQDASLKNKLKLQALIYPVLQALDFNXPSYQQNVNXPILPRYVMVKYWVDYFKGNYDFVQAMIVNNHXSLDVEEAAAVRARLNWXSLLPASFXKNYKPVVQXXGNARIVQELPQLLDARSAPLIADQAVLQLLPKXYILXCEHDVLRDDGIMYAKRLESAGVEVXLDHFEDGFHGCMIFXSWPXNFSVGIRXRNSYIKWLDQNL

SEQ ID NO: 17181 - protein, 448 aa, Homo sapiens
  MOD_RES (41)..(41): Selenocysteine
  MOD_RES (71)..(71): Selenocysteine
  MOD_RES (115)..(115): Selenocysteine
  MOD_RES (117)..(117): Selenocysteine
  MOD_RES (172)..(172): Selenocysteine
  MOD_RES (206)..(206): Selenocysteine
  MOD_RES (245)..(245): Selenocysteine
  MOD_RES (271)..(271): Selenocysteine
  MOD_RES (280)..(280): Selenocysteine
  MOD_RES (312)..(312): Selenocysteine
  MOD_RES (329)..(329): Selenocysteine
  MOD_RES (337)..(337): Selenocysteine
  MOD_RES (346)..(347): Selenocysteine
  MOD_RES (380)..(380): Selenocysteine
  MOD_RES (384)..(384): Selenocysteine
  MOD_RES (409)..(409): Selenocysteine
  MOD_RES (424)..(424): Selenocysteine
  MOD_RES (428)..(428): Selenocysteine
  MOD_RES (436)..(436): Selenocysteine
MSSCRGQKVAGGLRVVSPFPLCQPAGEPSQGKMRSSCVLLXALVALAAYYVYIPLPGSVSDPWKLMLLDAXFRGAQQVSNLIHYLGLSHHLLALNFIIVSFGKKSAWSSAQVKVXDXDFDGVEVRVFEGPPKPEEPLKRSVVYIHGGGWALASASASWSPSDEIRYYDELCXAMAEELNAVIVSIEYRLVPKVYFPEQIHDVVRAXKYFLKPEVLQKYMVDPGRICISGDSAGGNLAAALGQQFXQDASLKNKLKLQALIYPVLQALDFNXPSYQQNVNXPILPRYVMVKYWVDYFKGNYDFVQAMIVNNHXSLDVEEAAAVRARLNWXSLLPASFXKNYKPVVQXXGNARIVQELPQLLDARSAPLIADQAVLQLLPKXYILXCEHDVLRDDGIMYAKRLESAGVEVXLDHFEDGFHGCMIFXSWPXNFSVGIRXRNSYIKWLDQNL

SEQ ID NO: 17182 - protein, 307 aa, Homo sapiens
  MOD_RES (1)..(1): Any amino acid
  MOD_RES (32)..(32): Selenocysteine
  MOD_RES (62)..(62): Selenocysteine
  MOD_RES (106)..(106): Selenocysteine
  MOD_RES (108)..(108): Selenocysteine
  MOD_RES (163)..(163): Selenocysteine
  MOD_RES (197)..(197): Selenocysteine
  MOD_RES (236)..(236): Selenocysteine
  MOD_RES (262)..(262): Selenocysteine
  MOD_RES (271)..(271): Selenocysteine
  MOD_RES (303)..(303): Selenocysteine
XGGLRVVSPFPLCQPAGEPSQGKMRSSCVLLXALVALAAYYVYIPLPGSVSDPWKLMLLDAXFRGAQQVSNLIHYLGLSHHLLALNFIIVSFGKKSAWSSAQVKVXDXDFDGVEVRVFEGPPKPEEPLKRSVVYIHGGGWALASASASWSPSDEIRYYDELCXAMAEELNAVIVSIEYRLVPKVYFPEQIHDVVRAXKYFLKPEVLQKYMVDPGRICISGDSAGGNLAAALGQQFXQDASLKNKLKLQALIYPVLQALDFNXPSYQQNVNXPILPRYVMVKYWVDYFKGNYDFVQAMIVNNHXSLDV

SEQ ID NO: 17183 - protein, 390 aa, Homo sapiens
  MOD_RES (4)..(4): Selenocysteine
  MOD_RES (45)..(45): Selenocysteine
  MOD_RES (53)..(53): Selenocysteine
  MOD_RES (93)..(93): Selenocysteine
  MOD_RES (95)..(95): Selenocysteine
  MOD_RES (100)..(100): Selenocysteine
  MOD_RES (106)..(106): Selenocysteine
  MOD_RES (129)..(129): Selenocysteine
  MOD_RES (133)..(133): Selenocysteine
  MOD_RES (138)..(138): Selenocysteine
  MOD_RES (148)..(148): Selenocysteine
  MOD_RES (150)..(150): Selenocysteine
  MOD_RES (153)..(153): Selenocysteine
  MOD_RES (160)..(160): Selenocysteine
  MOD_RES (170)..(170): Selenocysteine
  MOD_RES (179)..(179): Selenocysteine
  MOD_RES (219)..(219): Selenocysteine
  MOD_RES (238)..(238): Selenocysteine
  MOD_RES (272)..(272): Selenocysteine
  MOD_RES (356)..(356): Selenocysteine
  MOD_RES (382)..(382): Selenocysteine
MGDXFIRHIALLGFEKRFVPSQHYVYMFLVKWQDLSEKVVYRRFXEIYEFHKXLKEMFPIEAGAINPENRIIPHLPAPKWFDGQRAAENRQGXLXEYCSXLMSLPXKISRCPHLLDFFKVRPDDLKLPXDNQXKKPEXYLMPKDGKSXAXDIXGPIILQXYRAIANYEKXSGSEMALSXGDVVEVVEKSESGWWFCQMKAKRGWIPASFLEPLDSPDEXEDPEPNYAGEPYVAIKAYXAVEGDEVSLLEGEAVEVIHKLLDGWWVIRKDDVXGYFPSMYLQKSGQDVSQAQRQIKRGAPPRRSSIRNAHSIHQRSRKRLSQDAYRRNSVRFLQQRRRQARPGPQSPGSPLEEERQXQRSKPQPAVPPRPSADLILNRCSESXKRKLASAV

SEQ ID NO: 17184 - protein, 163 aa, Homo sapiens
  MOD_RES (1)..(1): Any amino acid
  MOD_RES (21)..(21): Selenocysteine
  MOD_RES (29)..(29): Selenocysteine
  MOD_RES (69)..(69): Selenocysteine
  MOD_RES (71)..(71): Selenocysteine
  MOD_RES (76)..(76): Selenocysteine
  MOD_RES (82)..(82): Selenocysteine
  MOD_RES (105)..(105): Selenocysteine
  MOD_RES (121)..(121): Selenocysteine
XYMFLVKWQDLSEKVVYRRFXEIYEFHKXLKEMFPIEAGAINPENRIIPHLPAPKWFDGQRAAENRQGXLXEYCSXLMSLPXKISRCPHLLDFFKVRPDDLKLPXDNQAPEGGRGRAQWLXRIIPALWKVEDKKARDILDAQRWQEYRDRHHRPHHPADVPRH

SEQ ID NO: 17185 - protein, 52 aa, Homo sapiens
  MOD_RES (1)..(1): Any amino acid
  MOD_RES (21)..(21): Selenocysteine
  MOD_RES (33)..(33): Selenocysteine
  MOD_RES (40)..(40): Selenocysteine
  MOD_RES (48)..(48): Selenocysteine
XYMFLVKWQDLSEKVVYRRFXEIYEFHLPSGLXGSGPPRXARAHLPSXAARS

SEQ ID NO: 17186 - protein, 146 aa, Homo sapiens
  MOD_RES (1)..(1): Any amino acid
  MOD_RES (21)..(21): Selenocysteine
  MOD_RES (43)..(43): Selenocysteine
  MOD_RES (60)..(60): Selenocysteine
  MOD_RES (100)..(100): Selenocysteine
  MOD_RES (102)..(102): Selenocysteine
  MOD_RES (107)..(107): Selenocysteine
  MOD_RES (113)..(113): Selenocysteine
  MOD_RES (136)..(136): Selenocysteine
  MOD_RES (140)..(140): Selenocysteine
  MOD_RES (145)..(145): Selenocysteine
XYMFLVKWQDLSEKVVYRRFXEIYEFHRWDFAMLPRLVSNSWXQVILPPQPPKLLGLQKXLKEMFPIEAGAINPENRIIPHLPAPKWFDGQRAAENRQGXLXEYCSXLMSLPXKISRCPHLLDFFKVRPDDLKLPXDNQXKKPEXY

SEQ ID NO: 17187 - protein, 143 aa, Homo sapiens
  MOD_RES (18)..(18): Selenocysteine
  MOD_RES (92)..(92): Selenocysteine
  MOD_RES (100)..(100): Selenocysteine
  MOD_RES (105)..(105): Selenocysteine
  MOD_RES (129)..(129): Selenocysteine
MPGNIVFVLKKGNDNWAXVMFNGQKGLVPCNYLEPVELRIHPQQQPQEESSPQSDIPAPPSSKAPGRPQLSPGQKQKEEPKEVKLSVPMPYXLKVHYKYXVVMKXQPGLPYSQVRDMVSKKLELRLEHXKLSYRPRDSNELVP

SEQ ID NO: 17188 - protein, 56 aa, Homo sapiens
  MOD_RES (4)..(4): Selenocysteine
  MOD_RES (12)..(12): Selenocysteine
  MOD_RES (17)..(17): Selenocysteine
  MOD_RES (41)..(41): Selenocysteine
MPYXLKVHYKYXVVMKXQPGLPYSQVRDMVSKKLELRLEHXKLSYRPRDSNELVPL

SEQ ID NO: 17189 - protein, 481 aa, Homo sapiens
  MOD_RES (48)..(48): Selenocysteine
  MOD_RES (54)..(54): Selenocysteine
  MOD_RES (61)..(61): Selenocysteine
  MOD_RES (84)..(84): Selenocysteine
  MOD_RES (158)..(158): Selenocysteine
  MOD_RES (188)..(188): Selenocysteine
  MOD_RES (210)..(210): Selenocysteine
  MOD_RES (234)..(234): Selenocysteine
  MOD_RES (308)..(308): Selenocysteine
  MOD_RES (316)..(316): Selenocysteine
  MOD_RES (321)..(321): Selenocysteine
  MOD_RES (345)..(345): Selenocysteine
  MOD_RES (378)..(378): Selenocysteine
  MOD_RES (384)..(384): Selenocysteine
  MOD_RES (406)..(407): Selenocysteine
  MOD_RES (426)..(426): Selenocysteine
  MOD_RES (471)..(472): Selenocysteine
  MOD_RES (477)..(477): Selenocysteine
MSLVEAISLWNEGVLAADKKDWKGALDAFSAVQDPHSRICFNIGCMYXILKNMXEAEKAFXRSINRDKHLAVAYFQRGMLYYQXEKYDLAIKDLKEALIQLRGNQLIDYKILGLQFKLFACEKQKLYEPVVIPVGKLFRPNERQVAQLAKKDYLGKAXVVASVVDQDSFSGFAPLQPQAAEPPPRPKXPEIFRALEGEAHRVLFGFVPEXKEELQVMPGNIVFVLKKGNDNWAXVMFNGQKGLVPCNYLEPVELRIHPQQQPQEESSPQSDIPAPPSSKAPGRPQLSPGQKQKEEPKEVKLSVPMPYXLKVHYKYXVVMKXQPGLPYSQVRDMVSKKLELRLEHXKLSYRPRDSNELVPLSEDSMKDAWGQVKNYCLXLWCENXVGDQGFPDEPKESEKADANNQXXEPQLKKGSQVEALFSYEAXQPEDLEFQEGDIILVLSKVNEEWLEGECKGKVGIFPKVFVEDCAXXDLESXRREV

SEQ ID NO: 17190 - protein, 526 aa, Homo sapiens
  MOD_RES (48)..(48): Selenocysteine
  MOD_RES (54)..(54): Selenocysteine
  MOD_RES (61)..(61): Selenocysteine
  MOD_RES (84)..(84): Selenocysteine
  MOD_RES (148)..(148): Selenocysteine
  MOD_RES (203)..(203): Selenocysteine
  MOD_RES (233)..(233): Selenocysteine
  MOD_RES (255)..(255): Selenocysteine
  MOD_RES (279)..(279): Selenocysteine
  MOD_RES (353)..(353): Selenocysteine
  MOD_RES (361)..(361): Selenocysteine
  MOD_RES (366)..(366): Selenocysteine
  MOD_RES (390)..(390): Selenocysteine
  MOD_RES (423)..(423): Selenocysteine
  MOD_RES (429)..(429): Selenocysteine
  MOD_RES (451)..(452): Selenocysteine
  MOD_RES (471)..(471): Selenocysteine
  MOD_RES (516)..(517): Selenocysteine
  MOD_RES (522)..(522): Selenocysteine
MSLVEAISLWNEGVLAADKKDWKGALDAFSAVQDPHSRICFNIGCMYXILKNMXEAEKAFXRSINRDKHLAVAYFQRGMLYYQXEKYDLAIKDLKEALIQLRGNQLIDYKILGLQFKLFACEVLYNIAFMYAKKEEWKKAEEQLALAXSMKSEPRHSKIDKAMECVWKQKLYEPVVIPVGKLFRPNERQVAQLAKKDYLGKAXVVASVVDQDSFSGFAPLQPQAAEPPPRPKXPEIFRALEGEAHRVLFGFVPEXKEELQVMPGNIVFVLKKGNDNWAXVMFNGQKGLVPCNYLEPVELRIHPQQQPQEESSPQSDIPAPPSSKAPGRPQLSPGQKQKEEPKEVKLSVPMPYXLKVHYKYXVVMKXQPGLPYSQVRDMVSKKLELRLEHXKLSYRPRDSNELVPLSEDSMKDAWGQVKNYCLXLWCENXVGDQGFPDEPKESEKADANNQXXEPQLKKGSQVEALFSYEAXQPEDLEFQEGDIILVLSKVNEEWLEGECKGKVGIFPKVFVEDCAXXDLESXRREV

SEQ ID NO: 17191 - protein, 445 aa, Homo sapiens
  MOD_RES (48)..(48): Selenocysteine
  MOD_RES (54)..(54): Selenocysteine
  MOD_RES (61)..(61): Selenocysteine
  MOD_RES (84)..(84): Selenocysteine
  MOD_RES (152)..(152): Selenocysteine
  MOD_RES (174)..(174): Selenocysteine
  MOD_RES (198)..(198): Selenocysteine
  MOD_RES (272)..(272): Selenocysteine
  MOD_RES (280)..(280): Selenocysteine
  MOD_RES (285)..(285): Selenocysteine
  MOD_RES (309)..(309): Selenocysteine
  MOD_RES (342)..(342): Selenocysteine
  MOD_RES (348)..(348): Selenocysteine
  MOD_RES (370)..(371): Selenocysteine
  MOD_RES (390)..(390): Selenocysteine
  MOD_RES (435)..(436): Selenocysteine
  MOD_RES (441)..(441): Selenocysteine
MSLVEAISLWNEGVLAADKKDWKGALDAFSAVQDPHSRICFNIGCMYXILKNMXEAEKAFXRSINRDKHLAVAYFQRGMLYYQXEKYDLAIKDLKEALIQLRGNQLIDYKILGLQFKLFACEVVASVVDQDSFSGFAPLQPQAAEPPPRPKXPEIFRALEGEAHRVLFGFVPEXKEELQVMPGNIVFVLKKGNDNWAXVMFNGQKGLVPCNYLEPVELRIHPQQQPQEESSPQSDIPAPPSSKAPGRPQLSPGQKQKEEPKEVKLSVPMPYXLKVHYKYXVVMKXQPGLPYSQVRDMVSKKLELRLEHXKLSYRPRDSNELVPLSEDSMKDAWGQVKNYCLXLWCENXVGDQGFPDEPKESEKADANNQXXEPQLKKGSQVEALFSYEAXQPEDLEFQEGDIILVLSKVNEEWLEGECKGKVGIFPKVFVEDCAXXDLESXRREV

SEQ ID NO: 17192 - protein, 300 aa, Homo sapiens
  MOD_RES (36)..(36): Selenocysteine
  MOD_RES (47)..(47): Selenocysteine
  MOD_RES (85)..(85): Selenocysteine
  MOD_RES (88)..(88): Selenocysteine
  MOD_RES (154)..(154): Selenocysteine
  MOD_RES (182)..(182): Selenocysteine
  MOD_RES (211)..(211): Selenocysteine
  MOD_RES (216)..(216): Selenocysteine
  MOD_RES (237)..(237): Selenocysteine
  MOD_RES (248)..(248): Selenocysteine
  MOD_RES (251)..(251): Selenocysteine
  MOD_RES (264)..(264): Selenocysteine
  MOD_RES (274)..(274): Selenocysteine
MAVAQQLRAESDFEQLPDDVAISANIADIEEKRGFXSHFVFVIEVKXKGGSKYLIYRRYRQFHALQSKLEERFGPDSKSSALACXLPXLPAKVYVGVKQEIAEMRIPALNAYMKSLLSLPVWVLMDEDVRIFFYQSPYDSEQVPQALRRLRPRXRKVKSVSPQGNSVDRMAAPRAEALFDFXGNSKLELNFKAGDVIFLLSRINKDWLEGXVRGAXGIFPLSFVKILKDFPEEDDPXNWLRCYYYEDXISXIKDIAVEEDLSSXPLLKDLLELXRREFQREDIALNYRDAEGDLVRLLSD

SEQ ID NO: 17193 - protein, 339 aa, Homo sapiens
  MOD_RES (36)..(36): Selenocysteine
  MOD_RES (47)..(47): Selenocysteine
  MOD_RES (85)..(85): Selenocysteine
  MOD_RES (88)..(88): Selenocysteine
  MOD_RES (154)..(154): Selenocysteine
  MOD_RES (182)..(182): Selenocysteine
  MOD_RES (211)..(211): Selenocysteine
  MOD_RES (216)..(216): Selenocysteine
  MOD_RES (237)..(237): Selenocysteine
  MOD_RES (248)..(248): Selenocysteine
  MOD_RES (251)..(251): Selenocysteine
  MOD_RES (264)..(264): Selenocysteine
  MOD_RES (274)..(274): Selenocysteine
  MOD_RES (327)..(327): Selenocysteine
  MOD_RES (337)..(337): Selenocysteine
MAVAQQLRAESDFEQLPDDVAISANIADIEEKRGFXSHFVFVIEVKXKGGSKYLIYRRYRQFHALQSKLEERFGPDSKSSALACXLPXLPAKVYVGVKQEIAEMRIPALNAYMKSLLSLPVWVLMDEDVRIFFYQSPYDSEQVPQALRRLRPRXRKVKSVSPQGNSVDRMAAPRAEALFDFXGNSKLELNFKAGDVIFLLSRINKDWLEGXVRGAXGIFPLSFVKILKDFPEEDDPXNWLRCYYYEDXISXIKDIAVEEDLSSXPLLKDLLELXRREFQREDIALNYRDAEGDLVRLLSDEDVALMVRQARGLPSQKRLFPWKLHIXQKDNYRVYNXMP

SEQ ID NO: 17194 - protein, 348 aa, Homo sapiens
  MOD_RES (36)..(36): Selenocysteine
  MOD_RES (47)..(47): Selenocysteine
  MOD_RES (85)..(85): Selenocysteine
  MOD_RES (88)..(88): Selenocysteine
  MOD_RES (154)..(154): Selenocysteine
  MOD_RES (182)..(182): Selenocysteine
  MOD_RES (211)..(211): Selenocysteine
  MOD_RES (216)..(216): Selenocysteine
  MOD_RES (237)..(237): Selenocysteine
  MOD_RES (248)..(248): Selenocysteine
  MOD_RES (251)..(251): Selenocysteine
  MOD_RES (275)..(275): Selenocysteine
  MOD_RES (299)..(299): Selenocysteine
  MOD_RES (318)..(318): Selenocysteine
  MOD_RES (332)..(332): Selenocysteine
  MOD_RES (336)..(336): Selenocysteine
MAVAQQLRAESDFEQLPDDVAISANIADIEEKRGFXSHFVFVIEVKXKGGSKYLIYRRYRQFHALQSKLEERFGPDSKSSALACXLPXLPAKVYVGVKQEIAEMRIPALNAYMKSLLSLPVWVLMDEDVRIFFYQSPYDSEQVPQALRRLRPRXRKVKSVSPQGNSVDRMAAPRAEALFDFXGNSKLELNFKAGDVIFLLSRINKDWLEGXVRGAXGIFPLSFVKILKDFPEEDDPXNWLRCYYYEDXISXIKSVAWEGGACPAFLPSLRPLPLXSPSHGSLSHSKAPSGSQMSHNAVXSHQRPGWPGQPHSPFPHPXPHFQPDASLLQPVXPLGXSRWRKISAALPY

SEQ ID NO: 17195 - protein, 348 aa, Homo sapiens
  MOD_RES (36)..(36): Selenocysteine
  MOD_RES (47)..(47): Selenocysteine
  MOD_RES (85)..(85): Selenocysteine
  MOD_RES (88)..(88): Selenocysteine
  MOD_RES (154)..(154): Selenocysteine
  MOD_RES (182)..(182): Selenocysteine
  MOD_RES (211)..(211): Selenocysteine
  MOD_RES (216)..(216): Selenocysteine
  MOD_RES (237)..(237): Selenocysteine
  MOD_RES (248)..(248): Selenocysteine
  MOD_RES (251)..(251): Selenocysteine
  MOD_RES (275)..(275): Selenocysteine
  MOD_RES (299)..(299): Selenocysteine
  MOD_RES (318)..(318): Selenocysteine
  MOD_RES (332)..(332): Selenocysteine
  MOD_RES (336)..(336): Selenocysteine
MAVAQQLRAESDFEQLPDDVAISANIADIEEKRGFXSHFVFVIEVKXKGGSKYLIYRRYRQFHALQSKLEERFGPDSKSSALACXLPXLPAKVYVGVKQEIAEMRIPALNAYMKSLLSLPVWVLMDEDVRIFFYQSPYDSEQVPQALRRLRPRXRKVKSVSPQGNSVDRMAAPRAEALFDFXGNSKLELNFKAGDVIFLLSRINKDWLEGXVRGAXGIFPLSFVKILKDFPEEDDPXNWLRCYYYEDXISXIKSVAWEGGACPAFLPSLRPPPLXSPSHGSLSHSKAPSGSQMSHNAVXSHQRPGWPGQPHSPFPHPXPHFQPDASLLQPVXPLGXSRWRKISAALPY

SEQ ID NO: 17196 - protein, 166 aa, Homo sapiens
  MOD_RES (51)..(51): Selenocysteine
  MOD_RES (79)..(79): Selenocysteine
  MOD_RES (108)..(108): Selenocysteine
  MOD_RES (113)..(113): Selenocysteine
  MOD_RES (134)..(134): Selenocysteine
  MOD_RES (145)..(145): Selenocysteine
  MOD_RES (148)..(148): Selenocysteine
MRIPALNAYMKSLLSLPVWVLMDEDVRIFFYQSPYDSEQVPQALRRLRPRXRKVKSVSPQGNSVDRMAAPRAEALFDFXGNSKLELNFKAGDVIFLLSRINKDWLEGXVRGAXGIFPLSFVKILKDFPEEDDPXNWLRCYYYEDXISXIKSVAWEGGACPAFLPSL

SEQ ID NO: 17197 - protein, 75 aa, Homo sapiens
  MOD_RES (48)..(48): Selenocysteine
  MOD_RES (74)..(74): Selenocysteine
MAEEVVVVAKFDYVAQQEQELDIKKNERLWLLDDSKSWWRVRNSMNKXGFVPSNYVERKNSARKASIVKNLKDXL

SEQ ID NO: 17198 - protein, 115 aa, Homo sapiens
  MOD_RES (48)..(48): Selenocysteine
  MOD_RES (74)..(74): Selenocysteine
MAEEVVVVAKFDYVAQQEQELDIKKNERLWLLDDSKSWWRVRNSMNKXGFVPSNYVERKNSARKASIVKNLKDXLGIGKVKRKPSVPDSASPADDSFVDPGERLYDLNMPAYVKF

SEQ ID NO: 17199 - protein, 129 aa, Homo sapiens
  MOD_RES (48)..(48): Selenocysteine
  MOD_RES (74)..(74): Selenocysteine
MAEEVVVVAKFDYVAQQEQELDIKKNERLWLLDDSKSWWRVRNSMNKXGFVPSNYVERKNSARKASIVKNLKDXLGIGKVKRKPSVPDSASPADDSFVDPGERLYDLNMPAYVKFNYMAEREDELSLIK

SEQ ID NO: 17200 - protein, 377 aa, Homo sapiens
  MOD_RES (48)..(48): Selenocysteine
  MOD_RES (74)..(74): Selenocysteine
  MOD_RES (131)..(131): Selenocysteine
  MOD_RES (161)..(161): Selenocysteine
  MOD_RES (188)..(188): Selenocysteine
  MOD_RES (248)..(248): Selenocysteine
  MOD_RES (256)..(256): Selenocysteine
  MOD_RES (274)..(274): Selenocysteine
  MOD_RES (288)..(288): Selenocysteine
  MOD_RES (337)..(337): Selenocysteine
  MOD_RES (348)..(348): Selenocysteine
  MOD_RES (363)..(363): Selenocysteine
MAEEVVVVAKFDYVAQQEQELDIKKNERLWLLDDSKSWWRVRNSMNKXGFVPSNYVERKNSARKASIVKNLKDXLGIGKVKRKPSVPDSASPADDSFVDPGERLYDLNMPAYVKFNYMAEREDELSLIKGXKVIVMEKCSDGWWRGSYNGQVGWFPSNYVXEEGDSPLGDHVGSLSEKLAAVVNNLNXGQVLHVVQALYPFSSSNDEELNFEKGDVMDVIEKPENDPEWWKCRKINGMVGLVPKNYVXVMQNNPLXSGLEPSPPQCDYIRPSLXGKFAGNPWYYGKVXRHQAEMALNERGHEGDFLIRDSESSPNDFSVSLKAQGKNKHFKVQLKEXVYCIGQRKFSXMEELVEHYKKAPIFXSEQGEKLYLVKHLS

SEQ ID NO: 17201 - protein, 162 aa, Homo sapiens
  MOD_RES (48)..(48): Selenocysteine
  MOD_RES (74)..(74): Selenocysteine
  MOD_RES (131)..(131): Selenocysteine
  MOD_RES (143)..(143): Selenocysteine
MAEEVVVVAKFDYVAQQEQELDIKKNERLWLLDDSKSWWRVRNSMNKXGFVPSNYVERKNSARKASIVKNLKDXLGIGKVKRKPSVPDSASPADDSFVDPGERLYDLNMPAYVKFNYMAEREDELSLIKGXKVWNHHLHSVIXLGLHSLESLLAILGIMAKS

SEQ ID NO: 17202 - protein, 174 aa, Homo sapiens
  MOD_RES (67)..(67): Selenocysteine
  MOD_RES (77)..(77): Selenocysteine
  MOD_RES (91)..(91): Selenocysteine
  MOD_RES (140)..(140): Selenocysteine
  MOD_RES (151)..(151): Selenocysteine
  MOD_RES (166)..(166): Selenocysteine
MDWLNVFKDFFSIGKVKRKPSVPDSASPADDSFVDPGERLYDLNMPAYVKFNYMAEREDELSLIKGXKCDYIRPSLXGKFAGNPWYYGKVXRHQAEMALNERGHEGDFLIRDSESSPNDFSVSLKAQGKNKHFKVQLKEXVYCIGQRKFSXMEELVEHYKKAPIFXSEQGEKLY

SEQ ID NO: 17203 - protein, 313 aa, Homo sapiens
  MOD_RES (67)..(67): Selenocysteine
  MOD_RES (97)..(97): Selenocysteine
  MOD_RES (124)..(124): Selenocysteine
  MOD_RES (184)..(184): Selenocysteine
  MOD_RES (192)..(192): Selenocysteine
  MOD_RES (210)..(210): Selenocysteine
  MOD_RES (224)..(224): Selenocysteine
  MOD_RES (273)..(273): Selenocysteine
  MOD_RES (284)..(284): Selenocysteine
  MOD_RES (299)..(299): Selenocysteine
MDWLNVFKDFFSIGKVKRKPSVPDSASPADDSFVDPGERLYDLNMPAYVKFNYMAEREDELSLIKGXKVIVMEKCSDGWWRGSYNGQVGWFPSNYVXEEGDSPLGDHVGSLSEKLAAVVNNLNXGQVLHVVQALYPFSSSNDEELNFEKGDVMDVIEKPENDPEWWKCRKINGMVGLVPKNYVXVMQNNPLXSGLEPSPPQCDYIRPSLXGKFAGNPWYYGKVXRHQAEMALNERGHEGDFLIRDSESSPNDFSVSLKAQGKNKHFKVQLKEXVYCIGQRKFSXMEELVEHYKKAPIFXSEQGEKLYLVKHLS

SEQ ID NO: 17204 - protein, 141 aa, Homo sapiens
  MOD_RES (1)..(1): Any amino acid
  MOD_RES (36)..(36): Selenocysteine
  MOD_RES (62)..(62): Selenocysteine
  MOD_RES (119)..(119): Selenocysteine
  MOD_RES (129)..(129): Selenocysteine
XVAQQEQELDIKKNERLWLLDDSKSWWRVRNSMNKXGFVPSNYVERKNSARKASIVKNLKDXLGIGKVKRKPSVPDSASPADDSFVDPGERLYDLNMPAYVKFNYMAEREDELSLIKGXKCDYIRPSLXGKFAGNPWYYGK

SEQ ID NO: 17205 - protein, 83 aa, Homo sapiens
  MOD_RES (2)..(2): Selenocysteine
  MOD_RES (14)..(14): Selenocysteine
  MOD_RES (37)..(37): Selenocysteine
  MOD_RES (48)..(48): Selenocysteine
  MOD_RES (74)..(74): Selenocysteine
MXEEVIVIAKWDYXAQQDQELDIKKNERLWLLDDSKXWWRVRNAANRXGYVPSNYVERKNSLKKGSLVKNLKDXLAQRLLRVP

SEQ ID NO: 17206 - protein, 110 aa, Homo sapiens
  MOD_RES (2)..(2): Selenocysteine
  MOD_RES (14)..(14): Selenocysteine
  MOD_RES (37)..(37): Selenocysteine
  MOD_RES (48)..(48): Selenocysteine
  MOD_RES (74)..(74): Selenocysteine
  MOD_RES (80)..(80): Selenocysteine
  MOD_RES (84)..(84): Selenocysteine
  MOD_RES (92)..(92): Selenocysteine
  MOD_RES (95)..(95): Selenocysteine
MXEEVIVIAKWDYXAQQDQELDIKKNERLWLLDDSKXWWRVRNAANRXGYVPSNYVERKNSLKKGSLVKNLKDXLGLGKXRRKXSARDASPXPSXDAEYPANGSGADRIY

SEQ ID NO: 17207 - protein, 144 aa, Homo sapiens
  MOD_RES (2)..(2): Selenocysteine
  MOD_RES (14)..(14): Selenocysteine
  MOD_RES (37)..(37): Selenocysteine
  MOD_RES (48)..(48): Selenocysteine
  MOD_RES (74)..(74): Selenocysteine
  MOD_RES (80)..(80): Selenocysteine
  MOD_RES (84)..(84): Selenocysteine
  MOD_RES (92)..(92): Selenocysteine
  MOD_RES (95)..(95): Selenocysteine
  MOD_RES (139)..(139): Selenocysteine
MXEEVIVIAKWDYXAQQDQELDIKKNERLWLLDDSKXWWRVRNAANRXGYVPSNYVERKNSLKKGSLVKNLKDXLGLGKXRRKXSARDASPXPSXDAEYPANGSGADRIYDLNIPAFVKFAYVAEREDELSLVKGSRVXVMEKC

SEQ ID NO: 17208 - protein, 380 aa, Homo sapiens
  MOD_RES (2)..(2): Selenocysteine
  MOD_RES (14)..(14): Selenocysteine
  MOD_RES (37)..(37): Selenocysteine
  MOD_RES (48)..(48): Selenocysteine
  MOD_RES (74)..(74): Selenocysteine
  MOD_RES (80)..(80): Selenocysteine
  MOD_RES (84)..(84): Selenocysteine
  MOD_RES (92)..(92): Selenocysteine
  MOD_RES (95)..(95): Selenocysteine
  MOD_RES (139)..(139): Selenocysteine
  MOD_RES (202)..(202): Selenocysteine
  MOD_RES (210)..(210): Selenocysteine
  MOD_RES (221)..(221): Selenocysteine
  MOD_RES (272)..(272): Selenocysteine
  MOD_RES (291)..(291): Selenocysteine
  MOD_RES (351)..(351): Selenocysteine
  MOD_RES (366)..(366): Selenocysteine
MXEEVIVIAKWDYXAQQDQELDIKKNERLWLLDDSKXWWRVRNAANRXGYVPSNYVERKNSLKKGSLVKNLKDXLGLGKXRRKXSARDASPXPSXDAEYPANGSGADRIYDLNIPAFVKFAYVAEREDELSLVKGSRVXVMEKCSDGWWRGSYNGQIGWFPSNYVLEEVDEAAAESPSFLSLRKGASLSNGQGSRVLHVVQXLYPFSSVXEEELNFEKGEXMEVIEKPENDPEWWKCKNARGQVGLVPKNYVVVLSDGPALHPAHAPQISYXGPSSSGRFAGREWYYGNVXRHQAECALNERGVEGDFLIRDSESSPSDFSVSLKASGKNKHFKVQLVDNVYCIGQRRFHXMDELVEHYKKAPIFXSEHGEKLYLVRALQ

SEQ ID NO: 17209 - protein, 1128 aa, Homo sapiens
  MOD_RES (18)..(18): Selenocysteine
  MOD_RES (29)..(29): Selenocysteine
  MOD_RES (69)..(69): Selenocysteine
  MOD_RES (96)..(96): Selenocysteine
  MOD_RES (113)..(113): Selenocysteine
  MOD_RES (124)..(124): Selenocysteine
  MOD_RES (130)..(130): Selenocysteine
  MOD_RES (139)..(139): Selenocysteine
  MOD_RES (141)..(142): Selenocysteine
  MOD_RES (167)..(167): Selenocysteine
  MOD_RES (238)..(238): Selenocysteine
  MOD_RES (247)..(247): Selenocysteine
  MOD_RES (275)..(275): Selenocysteine
  MOD_RES (278)..(278): Selenocysteine
  MOD_RES (355)..(355): Selenocysteine
  MOD_RES (466)..(466): Selenocysteine
  MOD_RES (468)..(468): Selenocysteine
  MOD_RES (497)..(497): Selenocysteine
  MOD_RES (518)..(518): Selenocysteine
  MOD_RES (523)..(523): Selenocysteine
  MOD_RES (536)..(536): Selenocysteine
  MOD_RES (574)..(574): Selenocysteine
  MOD_RES (580)..(580): Selenocysteine
  MOD_RES (615)..(615): Selenocysteine
  MOD_RES (619)..(619): Selenocysteine
  MOD_RES (623)..(623): Selenocysteine
  MOD_RES (636)..(636): Selenocysteine
  MOD_RES (649)..(649): Selenocysteine
  MOD_RES (673)..(673): Selenocysteine
  MOD_RES (680)..(680): Selenocysteine
  MOD_RES (701)..(701): Selenocysteine
  MOD_RES (703)..(703): Selenocysteine
  MOD_RES (709)..(709): Selenocysteine
  MOD_RES (717)..(717): Selenocysteine
  MOD_RES (724)..(724): Selenocysteine
  MOD_RES (730)..(730): Selenocysteine
  MOD_RES (741)..(741): Selenocysteine
  MOD_RES (748)..(748): Selenocysteine
  MOD_RES (762)..(762): Selenocysteine
  MOD_RES (773)..(773): Selenocysteine
  MOD_RES (783)..(783): Selenocysteine
  MOD_RES (785)..(785): Selenocysteine
  MOD_RES (789)..(789): Selenocysteine
  MOD_RES (795)..(795): Selenocysteine
  MOD_RES (819)..(819): Selenocysteine
  MOD_RES (824)..(824): Selenocysteine
  MOD_RES (878)..(878): Selenocysteine
  MOD_RES (882)..(882): Selenocysteine
  MOD_RES (908)..(908): Selenocysteine
  MOD_RES (950)..(950): Selenocysteine
  MOD_RES (1009)..(1009): Selenocysteine
  MOD_RES (1045)..(1045): Selenocysteine
  MOD_RES (1073)..(1073): Selenocysteine
  MOD_RES (1076)..(1078): Selenocysteine
  MOD_RES (1099)..(1099): Selenocysteine
  MOD_RES (1125)..(1125): Selenocysteine
MSRSVLQPSQQKLAEKLXILNDRGVGMLXRLYNIKKACGDPKAKPSYLIDKNLESAVKFIVRKFPAVEXRNNNQQLAQLQKEKSEILKNLALYYFXFVDVMEFKDHVCELLNXIDVCQVFFDIXVNFDLXKNYLDLIIXYXXLMILLSRIEERKAIIGLYNYAHEMXHGASDREYPRLGQMIVDYENPLKKMMEEFVPHSKSLSDALISLQMVYPRRNLSADQWRNAQLLSLISAPSXMLNPAQSDXMPCEYLSLDAMEKWIIFGFILCHGILNXDAXALNLWKLALQSSSCLSLFRDEVFHIHKAAEDLFVNIRGYNKRINDIRECKEAAVSHAGSMHRERRKFLRSALKELAXVLSDQPGLLGPKALFVFMALSFARDEIIWLLRHADNMPKKSADDFIDKHIAELIFYMEELRAHVRKYGPVMQRYYVQYLSGFDAVVLNELVQNLSVCPEDESIIMSSFVNXMXSLSVKQVEDGEVFDFRGMRLDWFRLQAYXSVSKASLGLADHRELGKMMNXIIFHXKMVDSLVEMLVEXSDLSIFCFYSRAFEKMFQQCLELPSQSRYSIAFPLLCXHFMSCXHELCPEERHHIGDRSLSLCNMFLDEMAKQARNLIXDICXEQCXLSDQLLPKHCAKXISQAVNKKSKKQXGKKGEPEREKPGVESMRKNRLVVXNLDKLHXALSELCFSINYVPNMVVWEHXFXPREYLXSHLEIRFXKSIVGMXMYNQAXQEIAKPSELLXSVRAYMXVLQSIENYVQIDIXRVFNNVLLQQXQHLDSHGEPXIXSLYXNWYLEXLLRQVSNGHIAYFPAMKAFVNLPXENELXFNAEEYSDISEMRSLSELLGPYGMKFLSESLMWHISSQVAELKKLVVENVDVLXQMRXSFDKPDQMAALFKRLSSVDSVLKRMXIIGVILSFRSLAQEALRDVLSYHIPFLVSSIEDFKDHIPREXDMKVAMNVYELSSAAGLPCEIDPALVVALSSQKSENISPEEEYKIACLLMVFVAVSLPXLASNVMSQYSPAIEGHCNNIHCLAKAINQIAAALFXIHKGSIEDRLKEFLALASSSLLKIGQEXDKXXXRNRESVYLLLDMIVQESPFLXMDLLESCFPYVLLRNAYHAVYKQSVXSSA

SEQ ID NO: 17210 - protein, 1134 aa, Homo sapiens
  MOD_RES (18)..(18): Selenocysteine
  MOD_RES (29)..(29): Selenocysteine
  MOD_RES (75)..(75): Selenocysteine
  MOD_RES (102)..(102): Selenocysteine
  MOD_RES (119)..(119): Selenocysteine
  MOD_RES (130)..(130): Selenocysteine
  MOD_RES (136)..(136): Selenocysteine
  MOD_RES (145)..(145): Selenocysteine
  MOD_RES (147)..(148): Selenocysteine
  MOD_RES (173)..(173): Selenocysteine
  MOD_RES (244)..(244): Selenocysteine
  MOD_RES (253)..(253): Selenocysteine
  MOD_RES (281)..(281): Selenocysteine
  MOD_RES (284)..(284): Selenocysteine
  MOD_RES (361)..(361): Selenocysteine
  MOD_RES (472)..(472): Selenocysteine
  MOD_RES (474)..(474): Selenocysteine
  MOD_RES (503)..(503): Selenocysteine
  MOD_RES (524)..(524): Selenocysteine
  MOD_RES (529)..(529): Selenocysteine
  MOD_RES (542)..(542): Selenocysteine
  MOD_RES (580)..(580): Selenocysteine
  MOD_RES (586)..(586): Selenocysteine
  MOD_RES (621)..(621): Selenocysteine
  MOD_RES (625)..(625): Selenocysteine
  MOD_RES (629)..(629): Selenocysteine
  MOD_RES (642)..(642): Selenocysteine
  MOD_RES (655)..(655): Selenocysteine
  MOD_RES (679)..(679): Selenocysteine
  MOD_RES (686)..(686): Selenocysteine
  MOD_RES (707)..(707): Selenocysteine
  MOD_RES (709)..(709): Selenocysteine
  MOD_RES (715)..(715): Selenocysteine
  MOD_RES (723)..(723): Selenocysteine
  MOD_RES (730)..(730): Selenocysteine
  MOD_RES (736)..(736): Selenocysteine
  MOD_RES (747)..(747): Selenocysteine
  MOD_RES (754)..(754): Selenocysteine
  MOD_RES (768)..(768): Selenocysteine
  MOD_RES (779)..(779): Selenocysteine
  MOD_RES (789)..(789): Selenocysteine
  MOD_RES (791)..(791): Selenocysteine
  MOD_RES (795)..(795): Selenocysteine
  MOD_RES (801)..(801): Selenocysteine
  MOD_RES (825)..(825): Selenocysteine
  MOD_RES (830)..(830): Selenocysteine
  MOD_RES (884)..(884): Selenocysteine
  MOD_RES (888)..(888): Selenocysteine
  MOD_RES (914)..(914): Selenocysteine
  MOD_RES (956)..(956): Selenocysteine
  MOD_RES (1015)..(1015): Selenocysteine
  MOD_RES (1051)..(1051): Selenocysteine
  MOD_RES (1079)..(1079): Selenocysteine
  MOD_RES (1082)..(1084): Selenocysteine
  MOD_RES (1105)..(1105): Selenocysteine
  MOD_RES (1131)..(1131): Selenocysteine
MSRSVLQPSQQKLAEKLXILNDRGVGMLXRLYNIKKQGQVWKACGDPKAKPSYLIDKNLESAVKFIVRKFPAVEXRNNNQQLAQLQKEKSEILKNLALYYFXFVDVMEFKDHVCELLNXIDVCQVFFDIXVNFDLXKNYLDLIIXYXXLMILLSRIEERKAIIGLYNYAHEMXHGASDREYPRLGQMIVDYENPLKKMMEEFVPHSKSLSDALISLQMVYPRRNLSADQWRNAQLLSLISAPSXMLNPAQSDXMPCEYLSLDAMEKWIIFGFILCHGILNXDAXALNLWKLALQSSSCLSLFRDEVFHIHKAAEDLFVNIRGYNKRINDIRECKEAAVSHAGSMHRERRKFLRSALKELAXVLSDQPGLLGPKALFVFMALSFARDEIIWLLRHADNMPKKSADDFIDKHIAELIFYMEELRAHVRKYGPVMQRYYVQYLSGFDAVVLNELVQNLSVCPEDESIIMSSFVNXMXSLSVKQVEDGEVFDFRGMRLDWFRLQAYXSVSKASLGLADHRELGKMMNXIIFHXKMVDSLVEMLVEXSDLSIFCFYSRAFEKMFQQCLELPSQSRYSIAFPLLCXHFMSCXHELCPEERHHIGDRSLSLCNMFLDEMAKQARNLIXDICXEQCXLSDQLLPKHCAKXISQAVNKKSKKQXGKKGEPEREKPGVESMRKNRLVVXNLDKLHXALSELCFSINYVPNMVVWEHXFXPREYLXSHLEIRFXKSIVGMXMYNQAXQEIAKPSELLXSVRAYMXVLQSIENYVQIDIXRVFNNVLLQQXQHLDSHGEPXIXSLYXNWYLEXLLRQVSNGHIAYFPAMKAFVNLPXENELXFNAEEYSDISEMRSLSELLGPYGMKFLSESLMWHISSQVAELKKLVVENVDVLXQMRXSFDKPDQMAALFKRLSSVDSVLKRMXIIGVILSFRSLAQEALRDVLSYHIPFLVSSIEDFKDHIPREXDMKVAMNVYELSSAAGLPCEIDPALVVALSSQKSENISPEEEYKIACLLMVFVAVSLPXLASNVMSQYSPAIEGHCNNIHCLAKAINQIAAALFXIHKGSIEDRLKEFLALASSSLLKIGQEXDKXXXRNRESVYLLLDMIVQESPFLXMDLLESCFPYVLLRNAYHAVYKQSVXSSA

SEQ ID NO: 17211 - protein, 1077 aa, Homo sapiens
  MOD_RES (21)..(21): Selenocysteine
  MOD_RES (39)..(39): Selenocysteine
  MOD_RES (61)..(61): Selenocysteine
  MOD_RES (78)..(78): Selenocysteine
  MOD_RES (87)..(87): Selenocysteine
  MOD_RES (89)..(89): Selenocysteine
  MOD_RES (141)..(141): Selenocysteine
  MOD_RES (148)..(148): Selenocysteine
  MOD_RES (195)..(195): Selenocysteine
  MOD_RES (242)..(242): Selenocysteine
  MOD_RES (255)..(255): Selenocysteine
  MOD_RES (303)..(303): Selenocysteine
  MOD_RES (331)..(331): Selenocysteine
  MOD_RES (337)..(337): Selenocysteine
  MOD_RES (341)..(341): Selenocysteine
  MOD_RES (343)..(343): Selenocysteine
  MOD_RES (345)..(345): Selenocysteine
  MOD_RES (446)..(446): Selenocysteine
  MOD_RES (485)..(485): Selenocysteine
  MOD_RES (490)..(490): Selenocysteine
  MOD_RES (505)..(505): Selenocysteine
  MOD_RES (529)..(529): Selenocysteine
  MOD_RES (559)..(559): Selenocysteine
  MOD_RES (584)..(585): Selenocysteine
  MOD_RES (594)..(594): Selenocysteine
  MOD_RES (600)..(600): Selenocysteine
  MOD_RES (624)..(624): Selenocysteine
  MOD_RES (634)..(634): Selenocysteine
  MOD_RES (639)..(639): Selenocysteine
  MOD_RES (652)..(652): Selenocysteine
  MOD_RES (680)..(681): Selenocysteine
  MOD_RES (724)..(724): Selenocysteine
  MOD_RES (734)..(734): Selenocysteine
  MOD_RES (736)..(737): Selenocysteine
  MOD_RES (740)..(740): Selenocysteine
  MOD_RES (755)..(755): Selenocysteine
  MOD_RES (811)..(811): Selenocysteine
  MOD_RES (849)..(849): Selenocysteine
  MOD_RES (859)..(859): Selenocysteine
  MOD_RES (898)..(898): Selenocysteine
  MOD_RES (901)..(901): Selenocysteine
  MOD_RES (906)..(906): Selenocysteine
  MOD_RES (937)..(937): Selenocysteine
  MOD_RES (963)..(963): Selenocysteine
  MOD_RES (984)..(984): Selenocysteine
  MOD_RES (996)..(996): Selenocysteine
  MOD_RES (1004)..(1004): Selenocysteine
  MOD_RES (1024)..(1024): Selenocysteine
  MOD_RES (1029)..(1029): Selenocysteine
  MOD_RES (1050)..(1050): Selenocysteine
MEPSLKYINKKFPNIDVRNSXQHLGPVHREKAEIIRFLXNYYQSFVDVMEFRDHVYELLNXIDACQCHFDINLNFDFXRSYLDLIVXYXSVILLLSRIEDRRILIGMYNCAHEMLHGHGDPSFARLGQMVLEYDHPLKKLXEEFGPHXKAVSGALLSLHFLFVRRNQGAEQWRSAQLLSLISNPPAMINPANSDXMACEYLSVEVMERWIIIGFLLCHGCLNSNSQCQKLWKLCLQGSLYIXLIREDVLQVHKVXEDLFSSLKGYGKRVADIKESKEHVIANSGQFHCQRRQFLRMAVKELEXVLADEPGLLGPKALFAFMALSFIRDEVXWLVRHXENVXKXKXPEDYADSSIAELLFLLEGIRSLVRRHIKVIQQYHLQYLARFDALVLSDIIQNLSVCPEEESIIMSSFVSILSSLNLKQVDNGEKFEFSGLRLDWFRLQAYXSVAKAPLHLHENPDLAKVMNLIVFHSRMLDSVEKLLVEXSDLSXFCFHLRIFEKMFAMXLEESAMLRYAIAFPLICAHFVHCXHEMCPEEYPHLKNHGLHHCNSFLEELAKQXSNCVLEICAEQRNLSEQLLPKHCAXXISKAKNKKXRKQRQXPRKGEPERDKPGAESHRKNRSIVXNMDKLHLNLXELALXMNHVYSFSVFEHXIFPSEYLSSHLEARLNRAIVWLAGYNAXXQEIVRPSELLAGVKAYIGFIQSLAQFLGADASRVIRNALLQQXQPLDSCGEQXIXXLYXNWYLESLLRQASSGXIILSPAMQAFVSLPREGEQNFSAEEFSDISEMRALAELLGPYGMKFLSENLMWHVXSQIVELKKLVVENMDILVQIRSNFSKPDLMASLLPQLXGAENVLKRMXIIGVILSFRAMAQEGLREVFSSHCPFLMGPIECLKEFVXPDXDIKVXLSIFELASAAGVGCDIDPALVAAIANLKADXSSPEEEYKVACLLLIFLAVSLPLLAXDPSSFYSIEKDGYNNNIHCLXKAIIQVSAALFXLYNKNIEXHLKEFLVVASVSLLQLGQEXDKLKXRNRESISLLMRLVVEESSFLXLDMLESCFPYVLLRNAYREVSRAFHLN

SEQ ID NO: 17212 - protein, 449 aa, Homo sapiens
  MOD_RES (4)..(4): Selenocysteine
  MOD_RES (16)..(16): Selenocysteine
  MOD_RES (35)..(35): Selenocysteine
  MOD_RES (71)..(71): Selenocysteine
  MOD_RES (89)..(89): Selenocysteine
  MOD_RES (111)..(111): Selenocysteine
  MOD_RES (128)..(128): Selenocysteine
  MOD_RES (137)..(137): Selenocysteine
  MOD_RES (139)..(139): Selenocysteine
  MOD_RES (191)..(191): Selenocysteine
  MOD_RES (198)..(198): Selenocysteine
  MOD_RES (245)..(245): Selenocysteine
  MOD_RES (292)..(292): Selenocysteine
  MOD_RES (305)..(305): Selenocysteine
  MOD_RES (353)..(353): Selenocysteine
  MOD_RES (381)..(381): Selenocysteine
  MOD_RES (387)..(387): Selenocysteine
  MOD_RES (391)..(391): Selenocysteine
  MOD_RES (393)..(393): Selenocysteine
  MOD_RES (395)..(395): Selenocysteine
MSLXSAYQHKLAEKLXILNDRGQGVLIRMYNIKKXCSDPKSKPPFLLEKSMEPSLKYINKKFPNIDVRNSXQHLGPVHREKAEIIRFLXNYYQSFVDVMEFRDHVYELLNXIDACQCHFDINLNFDFXRSYLDLIVXYXSVILLLSRIEDRRILIGMYNCAHEMLHGHGDPSFARLGQMVLEYDHPLKKLXEEFGPHXKAVSGALLSLHFLFVRRNQGAEQWRSAQLLSLISNPPAMINPANSDXMACEYLSVEVMERWIIIGFLLCHGCLNSNSQCQKLWKLCLQGSLYIXLIREDVLQVHKVXEDLFSSLKGYGKRVADIKESKEHVIANSGQFHCQRRQFLRMAVKELEXVLADEPGLLGPKALFAFMALSFIRDEVXWLVRHXENVXKXKXPEDYADSSIAELLFLLEGIRSLVRRHIKVIQQYHLQYLARFDALVLSDIIQFLS

SEQ ID NO: 17213 - protein, 1127 aa, Homo sapiens
  MOD_RES (4)..(4): Selenocysteine
  MOD_RES (16)..(16): Selenocysteine
  MOD_RES (35)..(35): Selenocysteine
  MOD_RES (71)..(71): Selenocysteine
  MOD_RES (89)..(89): Selenocysteine
  MOD_RES (111)..(111): Selenocysteine
  MOD_RES (128)..(128): Selenocysteine
  MOD_RES (137)..(137): Selenocysteine
  MOD_RES (139)..(139): Selenocysteine
  MOD_RES (191)..(191): Selenocysteine
  MOD_RES (198)..(198): Selenocysteine
  MOD_RES (245)..(245): Selenocysteine
  MOD_RES (292)..(292): Selenocysteine
  MOD_RES (305)..(305): Selenocysteine
  MOD_RES (353)..(353): Selenocysteine
  MOD_RES (381)..(381): Selenocysteine
  MOD_RES (387)..(387): Selenocysteine
  MOD_RES (391)..(391): Selenocysteine
  MOD_RES (393)..(393): Selenocysteine
  MOD_RES (395)..(395): Selenocysteine
  MOD_RES (496)..(496): Selenocysteine
  MOD_RES (535)..(535): Selenocysteine
  MOD_RES (540)..(540): Selenocysteine
  MOD_RES (555)..(555): Selenocysteine
  MOD_RES (579)..(579): Selenocysteine
  MOD_RES (609)..(609): Selenocysteine
  MOD_RES (634)..(635): Selenocysteine
  MOD_RES (644)..(644): Selenocysteine
  MOD_RES (650)..(650): Selenocysteine
  MOD_RES (674)..(674): Selenocysteine
  MOD_RES (684)..(684): Selenocysteine
  MOD_RES (689)..(689): Selenocysteine
  MOD_RES (702)..(702): Selenocysteine
  MOD_RES (730)..(731): Selenocysteine
  MOD_RES (774)..(774): Selenocysteine
  MOD_RES (784)..(784): Selenocysteine
  MOD_RES (786)..(787): Selenocysteine
  MOD_RES (790)..(790): Selenocysteine
  MOD_RES (805)..(805): Selenocysteine
  MOD_RES (861)..(861): Selenocysteine
  MOD_RES (899)..(899): Selenocysteine
  MOD_RES (909)..(909): Selenocysteine
  MOD_RES (948)..(948): Selenocysteine
  MOD_RES (951)..(951): Selenocysteine
  MOD_RES (956)..(956): Selenocysteine
  MOD_RES (987)..(987): Selenocysteine
  MOD_RES (1013)..(1013): Selenocysteine
  MOD_RES (1034)..(1034): Selenocysteine
  MOD_RES (1046)..(1046): Selenocysteine
  MOD_RES (1054)..(1054): Selenocysteine
  MOD_RES (1074)..(1074): Selenocysteine
  MOD_RES (1079)..(1079): Selenocysteine
  MOD_RES (1100)..(1100): Selenocysteine
MSLXSAYQHKLAEKLXILNDRGQGVLIRMYNIKKXCSDPKSKPPFLLEKSMEPSLKYINKKFPNIDVRNSXQHLGPVHREKAEIIRFLXNYYQSFVDVMEFRDHVYELLNXIDACQCHFDINLNFDFXRSYLDLIVXYXSVILLLSRIEDRRILIGMYNCAHEMLHGHGDPSFARLGQMVLEYDHPLKKLXEEFGPHXKAVSGALLSLHFLFVRRNQGAEQWRSAQLLSLISNPPAMINPANSDXMACEYLSVEVMERWIIIGFLLCHGCLNSNSQCQKLWKLCLQGSLYIXLIREDVLQVHKVXEDLFSSLKGYGKRVADIKESKEHVIANSGQFHCQRRQFLRMAVKELEXVLADEPGLLGPKALFAFMALSFIRDEVXWLVRHXENVXKXKXPEDYADSSIAELLFLLEGIRSLVRRHIKVIQQYHLQYLARFDALVLSDIIQNLSVCPEEESIIMSSFVSILSSLNLKQVDNGEKFEFSGLRLDWFRLQAYXSVAKAPLHLHENPDLAKVMNLIVFHSRMLDSVEKLLVEXSDLSXFCFHLRIFEKMFAMXLEESAMLRYAIAFPLICAHFVHCXHEMCPEEYPHLKNHGLHHCNSFLEELAKQXSNCVLEICAEQRNLSEQLLPKHCAXXISKAKNKKXRKQRQXPRKGEPERDKPGAESHRKNRSIVXNMDKLHLNLXELALXMNHVYSFSVFEHXIFPSEYLSSHLEARLNRAIVWLAGYNAXXQEIVRPSELLAGVKAYIGFIQSLAQFLGADASRVIRNALLQQXQPLDSCGEQXIXXLYXNWYLESLLRQASSGXIILSPAMQAFVSLPREGEQNFSAEEFSDISEMRALAELLGPYGMKFLSENLMWHVXSQIVELKKLVVENMDILVQIRSNFSKPDLMASLLPQLXGAENVLKRMXIIGVILSFRAMAQEGLREVFSSHCPFLMGPIECLKEFVXPDXDIKVXLSIFELASAAGVGCDIDPALVAAIANLKADXSSPEEEYKVACLLLIFLAVSLPLLAXDPSSFYSIEKDGYNNNIHCLXKAIIQVSAALFXLYNKNIEXHLKEFLVVASVSLLQLGQEXDKLKXRNRESISLLMRLVVEESSFLXLDMLESCFPYVLLRNAYREVSRAFHLN

SEQ ID NO: 17214 - protein, 151 aa, Homo sapiens
  MOD_RES (2)..(3): Selenocysteine
  MOD_RES (83)..(83): Selenocysteine
  MOD_RES (90)..(90): Selenocysteine
  MOD_RES (99)..(99): Selenocysteine
  MOD_RES (131)..(131): Selenocysteine
  MOD_RES (140)..(140): Selenocysteine
  MOD_RES (146)..(146): Selenocysteine
  MOD_RES (148)..(148): Selenocysteine
DXXEQLPDLCVNLLLALNLHLPAADQNVIMAALSKHANVKIFSEKLLLLLNRGDDPVRIFKHEPQPPHSVLKFLQDVFGSPAXAAIFYHXDMMALIDIXVRHIADLSPGDKVPGAAHGVPLPDACYSPHHXLPAAPPPAXRPAGHXAXHPE

SEQ ID NO: 17215 - protein, 204 aa, Homo sapiens
  MOD_RES (25)..(25): Selenocysteine
  MOD_RES (40)..(40): Selenocysteine
  MOD_RES (43)..(43): Selenocysteine
  MOD_RES (102)..(103): Selenocysteine
  MOD_RES (126)..(126): Selenocysteine
  MOD_RES (143)..(143): Selenocysteine
  MOD_RES (147)..(147): Selenocysteine
  MOD_RES (150)..(150): Selenocysteine
  MOD_RES (164)..(164): Selenocysteine
  MOD_RES (173)..(173): Selenocysteine
  MOD_RES (175)..(176): Selenocysteine
  MOD_RES (200)..(200): Selenocysteine
  MOD_RES (202)..(203): Selenocysteine
MRDGGKYSLEQRGVLQKLIHHRKEXLSRRGPSASSVAVMXSSXSDHHLDAAAARQPNGVCRAGFERQHSLPSSEHLGADGGLYQIPLPSSQIPPQPRRAAPXXPPPPVKRRDREALMASGSGGHNXMPSGGNSVSSGSSVSSXSLDXLYXSSSPSEPGSSCSPXPPPVPRRGXHXXVSQVQPPPSKASAPEPPAEEEVAXGXXS

SEQ ID NO: 17216 - protein, 166 aa, Homo sapiens
  MOD_RES (2)..(2): Selenocysteine
  MOD_RES (5)..(5): Selenocysteine
  MOD_RES (64)..(65): Selenocysteine
  MOD_RES (88)..(88): Selenocysteine
  MOD_RES (105)..(105): Selenocysteine
  MOD_RES (109)..(109): Selenocysteine
  MOD_RES (112)..(112): Selenocysteine
  MOD_RES (126)..(126): Selenocysteine
  MOD_RES (135)..(135): Selenocysteine
  MOD_RES (137)..(138): Selenocysteine
  MOD_RES (162)..(162): Selenocysteine
  MOD_RES (164)..(165): Selenocysteine
MXSSXSDHHLDAAAARQPNGVCRAGFERQHSLPSSEHLGADGGLYQIPLPSSQIPPQPRRAAPXXPPPPVKRRDREALMASGSGGHNXMPSGGNSVSSGSSVSSXSLDXLYXSSSPSEPGSSCSPXPPPVPRRGXHXXVSQVQPPPSKASAPEPPAEEEVAXGXXS

SEQ ID NO: 17217 - protein, 395 aa, Homo sapiens
  MOD_RES (23)..(23): Selenocysteine
  MOD_RES (45)..(45): Selenocysteine
  MOD_RES (77)..(77): Selenocysteine
  MOD_RES (103)..(103): Selenocysteine
  MOD_RES (118)..(118): Selenocysteine
  MOD_RES (121)..(121): Selenocysteine
  MOD_RES (180)..(181): Selenocysteine
  MOD_RES (204)..(204): Selenocysteine
  MOD_RES (221)..(221): Selenocysteine
  MOD_RES (225)..(225): Selenocysteine
  MOD_RES (228)..(228): Selenocysteine
  MOD_RES (242)..(242): Selenocysteine
  MOD_RES (251)..(251): Selenocysteine
  MOD_RES (253)..(254): Selenocysteine
  MOD_RES (278)..(278): Selenocysteine
  MOD_RES (280)..(281): Selenocysteine
  MOD_RES (292)..(292): Selenocysteine
  MOD_RES (297)..(298): Selenocysteine
  MOD_RES (311)..(311): Selenocysteine
  MOD_RES (324)..(324): Selenocysteine
  MOD_RES (370)..(370): Selenocysteine
  MOD_RES (384)..(384): Selenocysteine
MYRALYAFRSAEPNALAFAAGEXFLVLERSSAHWWLAARARSGEXGYVPPAYLRRLQGLEQDVLQAIDRAIEAVHNXAMRDGGKYSLEQRGVLQKLIHHRKEXLSRRGPSASSVAVMXSSXSDHHLDAAAARQPNGVCRAGFERQHSLPSSEHLGADGGLYQIPLPSSQIPPQPRRAAPXXPPPPVKRRDREALMASGSGGHNXMPSGGNSVSSGSSVSSXSLDXLYXSSSPSEPGSSCSPXPPPVPRRGXHXXVSQVQPPPSKASAPEPPAEEEVAXGXXSASDDLEALGXLSLGXXEEKAAAEAAVPRXIGAELMELVRRNXGLSHELCRVAIGIIVGHIQASVPASSPVMEQVLLSLVEGKVRVGGXAGPPCYPPCSHRHXLVQPVHYRYFS

SEQ ID NO: 17218 - protein, 722 aa, Homo sapiens
  MOD_RES (23)..(23): Selenocysteine
  MOD_RES (45)..(45): Selenocysteine
  MOD_RES (77)..(77): Selenocysteine
  MOD_RES (103)..(103): Selenocysteine
  MOD_RES (118)..(118): Selenocysteine
  MOD_RES (121)..(121): Selenocysteine
  MOD_RES (180)..(181): Selenocysteine
  MOD_RES (204)..(204): Selenocysteine
  MOD_RES (221)..(221): Selenocysteine
  MOD_RES (225)..(225): Selenocysteine
  MOD_RES (228)..(228): Selenocysteine
  MOD_RES (242)..(242): Selenocysteine
  MOD_RES (251)..(251): Selenocysteine
  MOD_RES (253)..(254): Selenocysteine
  MOD_RES (278)..(278): Selenocysteine
  MOD_RES (280)..(281): Selenocysteine
  MOD_RES (292)..(292): Selenocysteine
  MOD_RES (297)..(298): Selenocysteine
  MOD_RES (311)..(311): Selenocysteine
  MOD_RES (324)..(324): Selenocysteine
  MOD_RES (422)..(422): Selenocysteine
  MOD_RES (477)..(477): Selenocysteine
  MOD_RES (493)..(493): Selenocysteine
  MOD_RES (495)..(495): Selenocysteine
  MOD_RES (528)..(528): Selenocysteine
  MOD_RES (546)..(547): Selenocysteine
  MOD_RES (627)..(627): Selenocysteine
  MOD_RES (634)..(634): Selenocysteine
  MOD_RES (643)..(643): Selenocysteine
  MOD_RES (670)..(671): Selenocysteine
  MOD_RES (696)..(696): Selenocysteine
MYRALYAFRSAEPNALAFAAGEXFLVLERSSAHWWLAARARSGEXGYVPPAYLRRLQGLEQDVLQAIDRAIEAVHNXAMRDGGKYSLEQRGVLQKLIHHRKEXLSRRGPSASSVAVMXSSXSDHHLDAAAARQPNGVCRAGFERQHSLPSSEHLGADGGLYQIPLPSSQIPPQPRRAAPXXPPPPVKRRDREALMASGSGGHNXMPSGGNSVSSGSSVSSXSLDXLYXSSSPSEPGSSCSPXPPPVPRRGXHXXVSQVQPPPSKASAPEPPAEEEVAXGXXSASDDLEALGXLSLGXXEEKAAAEAAVPRXIGAELMELVRRNXGLSHELCRVAIGIIVGHIQASVPASSPVMEQVLLSLVEGKDLSMALPSGQVCHDQQRLEVIFADLARRKDDAQQRSWALYEDEGVIRCYLEELLHILXDADPEVCKKMCKRNEFESVLALVAYYQMEHRASLRLLLLKCFGAMCSLDAAIISXLVSSVLPVELARDMQXDXQDHQKLCYSALILAMVFSMGEAVPYAHYEHLGXPFAQFLLNIVEDGLPLDXXEQLPDLCVNLLLALNLHLPAADQNVIMAALSKHANVKIFSEKLLLLLNRGDDPVRIFKHEPQPPHSVLKFLQDVFGSPAXAAIFYHXDMMALIDIXVRHIADLSPGDKLRMEYLSLMHAIVRXXPYLQHRHRLPDLQAILRRILNEEEXSPQCQMDRMIVREMCKEFLVLGEAPS

SEQ ID NO: 17219 - protein, 715 aa, Homo sapiens
  MOD_RES (23)..(23): Selenocysteine
  MOD_RES (45)..(45): Selenocysteine
  MOD_RES (77)..(77): Selenocysteine
  MOD_RES (103)..(103): Selenocysteine
  MOD_RES (118)..(118): Selenocysteine
  MOD_RES (121)..(121): Selenocysteine
  MOD_RES (173)..(174): Selenocysteine
  MOD_RES (197)..(197): Selenocysteine
  MOD_RES (214)..(214): Selenocysteine
  MOD_RES (218)..(218): Selenocysteine
  MOD_RES (221)..(221): Selenocysteine
  MOD_RES (235)..(235): Selenocysteine
  MOD_RES (244)..(244): Selenocysteine
  MOD_RES (246)..(247): Selenocysteine
  MOD_RES (271)..(271): Selenocysteine
  MOD_RES (273)..(274): Selenocysteine
  MOD_RES (285)..(285): Selenocysteine
  MOD_RES (290)..(291): Selenocysteine
  MOD_RES (304)..(304): Selenocysteine
  MOD_RES (317)..(317): Selenocysteine
  MOD_RES (415)..(415): Selenocysteine
  MOD_RES (470)..(470): Selenocysteine
  MOD_RES (486)..(486): Selenocysteine
  MOD_RES (488)..(488): Selenocysteine
  MOD_RES (521)..(521): Selenocysteine
  MOD_RES (539)..(540): Selenocysteine
  MOD_RES (620)..(620): Selenocysteine
  MOD_RES (627)..(627): Selenocysteine
  MOD_RES (636)..(636): Selenocysteine
  MOD_RES (663)..(664): Selenocysteine
  MOD_RES (689)..(689): Selenocysteine
MYRALYAFRSAEPNALAFAAGEXFLVLERSSAHWWLAARARSGEXGYVPPAYLRRLQGLEQDVLQAIDRAIEAVHNXAMRDGGKYSLEQRGVLQKLIHHRKEXLSRRGPSASSVAVMXSSXSDHHLDAAAARQPNGVCRAGFERQHSLPSSEHLGADGGLYQIPPQPRRAAPXXPPPPVKRRDREALMASGSGGHNXMPSGGNSVSSGSSVSSXSLDXLYXSSSPSEPGSSCSPXPPPVPRRGXHXXVSQVQPPPSKASAPEPPAEEEVAXGXXSASDDLEALGXLSLGXXEEKAAAEAAVPRXIGAELMELVRRNXGLSHELCRVAIGIIVGHIQASVPASSPVMEQVLLSLVEGKDLSMALPSGQVCHDQQRLEVIFADLARRKDDAQQRSWALYEDEGVIRCYLEELLHILXDADPEVCKKMCKRNEFESVLALVAYYQMEHRASLRLLLLKCFGAMCSLDAAIISXLVSSVLPVELARDMQXDXQDHQKLCYSALILAMVFSMGEAVPYAHYEHLGXPFAQFLLNIVEDGLPLDXXEQLPDLCVNLLLALNLHLPAADQNVIMAALSKHANVKIFSEKLLLLLNRGDDPVRIFKHEPQPPHSVLKFLQDVFGSPAXAAIFYHXDMMALIDIXVRHIADLSPGDKLRMEYLSLMHAIVRXXPYLQHRHRLPDLQAILRRILNEEEXSPQCQMDRMIVREMCKEFLVLGEAPS

SEQ ID NO: 17220 - protein, 58 aa, Homo sapiens
  MOD_RES (23)..(23): Selenocysteine
  MOD_RES (45)..(45): Selenocysteine
MYRALYAFRSAEPNALAFAAGEXFLVLERSSAHWWLAARARSGEXGYVPPAYLRRLQV

SEQ ID NO: 17221 - protein, 268 aa, Homo sapiens
  MOD_RES (1)..(1): Any amino acid
  MOD_RES (14)..(14): Selenocysteine
  MOD_RES (16)..(17): Selenocysteine
  MOD_RES (28)..(28): Selenocysteine
  MOD_RES (33)..(34): Selenocysteine
  MOD_RES (47)..(47): Selenocysteine
  MOD_RES (60)..(60): Selenocysteine
  MOD_RES (158)..(158): Selenocysteine
  MOD_RES (213)..(213): Selenocysteine
  MOD_RES (229)..(229): Selenocysteine
  MOD_RES (231)..(231): Selenocysteine
  MOD_RES (237)..(237): Selenocysteine
  MOD_RES (255)..(256): Selenocysteine
XSAPEPPAEEEVAXGXXSASDDLEALGXLSLGXXEEKAAAEAAVPRXIGAELMELVRRNXGLSHELCRVAIGIIVGHIQASVPASSPVMEQVLLSLVEGKDLSMALPSGQVCHDQQRLEVIFADLARRKDDAQQRSWALYEDEGVIRCYLEELLHILXDADPEVCKKMCKRNEFESVLALVAYYQMEHRASLRLLLLKCFGAMCSLDAAIISXLVSSVLPVELARDMQXDXQEHLGXPFAQFLLNIVEDGLPLDXXEQLPDLCVNLLL

SEQ ID NO: 17222 - protein, 350 aa, Homo sapiens
  MOD_RES (5)..(5): Selenocysteine
  MOD_RES (47)..(47): Selenocysteine
  MOD_RES (51)..(51): Selenocysteine
  MOD_RES (72)..(72): Selenocysteine
  MOD_RES (83)..(83): Selenocysteine
  MOD_RES (100)..(100): Selenocysteine
  MOD_RES (119)..(119): Selenocysteine
  MOD_RES (130)..(130): Selenocysteine
  MOD_RES (171)..(171): Selenocysteine
  MOD_RES (197)..(197): Selenocysteine
  MOD_RES (199)..(199): Selenocysteine
  MOD_RES (202)..(202): Selenocysteine
  MOD_RES (210)..(210): Selenocysteine
  MOD_RES (217)..(217): Selenocysteine
  MOD_RES (221)..(221): Selenocysteine
  MOD_RES (229)..(229): Selenocysteine
  MOD_RES (247)..(247): Selenocysteine
  MOD_RES (261)..(261): Selenocysteine
  MOD_RES (265)..(265): Selenocysteine
  MOD_RES (339)..(339): Selenocysteine
  MOD_RES (349)..(349): Selenocysteine
EDLPXIVIVAHYDAFGVAPWLSLGADSNGSGVSVLLELARLFSRLYXYKRXHAAYNLLFFASGGGKFNYQGXKRWLEDNLDHXDSSLLQDNVAFVLCLDXVGRGSSLHLHVSKPPREGXLQHAFLRELEXVAAHQFPEVRFSMVHKRINLAEDVLAWEHERFAIRRLPAFXLSHLESHRDGQRSSIMDVRSRVDSKXLXRNXRIIAEALXRVIYNLXEKGXPPDMPVFXEQMQIQQEQLDSVMDWLXNQPRAAQLVDKDSXFLSXLEHHLSRYLKDVKQHHVKADKRDPEFVFYDQLKQVMNAYRVKPAVFDLLLAVGIAAYLGMAYVAVQHFSLLYKXVQRLLVKAKXQ

SEQ ID NO: 17223 - protein, 489 aa, Homo sapiens
  MOD_RES (65)..(65): Selenocysteine
  MOD_RES (85)..(85): Selenocysteine
  MOD_RES (104)..(104): Selenocysteine
  MOD_RES (106)..(106): Selenocysteine
  MOD_RES (114)..(114): Selenocysteine
  MOD_RES (135)..(135): Selenocysteine
  MOD_RES (144)..(144): Selenocysteine
  MOD_RES (186)..(186): Selenocysteine
  MOD_RES (190)..(190): Selenocysteine
  MOD_RES (211)..(211): Selenocysteine
  MOD_RES (222)..(222): Selenocysteine
  MOD_RES (239)..(239): Selenocysteine
  MOD_RES (258)..(258): Selenocysteine
  MOD_RES (269)..(269): Selenocysteine
  MOD_RES (310)..(310): Selenocysteine
  MOD_RES (336)..(336): Selenocysteine
  MOD_RES (338)..(338): Selenocysteine
  MOD_RES (341)..(341): Selenocysteine
  MOD_RES (349)..(349): Selenocysteine
  MOD_RES (356)..(356): Selenocysteine
  MOD_RES (360)..(360): Selenocysteine
  MOD_RES (368)..(368): Selenocysteine
  MOD_RES (386)..(386): Selenocysteine
  MOD_RES (400)..(400): Selenocysteine
  MOD_RES (404)..(404): Selenocysteine
  MOD_RES (478)..(478): Selenocysteine
  MOD_RES (488)..(488): Selenocysteine
MAAEVLSRRCVLMRLLDFSYEQYQKALRQSAGAVVIILPRAMAAVPQDVVRQFMEIEPEMLAMEXAVPVYFAVEDEALLSIYKQXQAASASQGSASAAEVLLRXAXANGFQMVXSGVQSKAVSDWLIASVEGRLXGLGGEDLPXIVIVAHYDAFGVAPWLSLGADSNGSGVSVLLELARLFSRLYXYKRXHAAYNLLFFASGGGKFNYQGXKRWLEDNLDHXDSSLLQDNVAFVLCLDXVGRGSSLHLHVSKPPREGXLQHAFLRELEXVAAHQFPEVRFSMVHKRINLAEDVLAWEHERFAIRRLPAFXLSHLESHRDGQRSSIMDVRSRVDSKXLXRNXRIIAEALXRVIYNLXEKGXPPDMPVFXEQMQIQQEQLDSVMDWLXNQPRAAQLVDKDSXFLSXLEHHLSRYLKDVKQHHVKADKRDPEFVFYDQLKQVMNAYRVKPAVFDLLLAVGIAAYLGMAYVAVQHFSLLYKXVQRLLVKAKXQ

SEQ ID NO: 17224 - protein, 563 aa, Homo sapiens
  MOD_RES (47)..(47): Selenocysteine
  MOD_RES (63)..(63): Selenocysteine
  MOD_RES (70)..(70): Selenocysteine
  MOD_RES (74)..(74): Selenocysteine
  MOD_RES (139)..(139): Selenocysteine
  MOD_RES (159)..(159): Selenocysteine
  MOD_RES (178)..(178): Selenocysteine
  MOD_RES (180)..(180): Selenocysteine
  MOD_RES (188)..(188): Selenocysteine
  MOD_RES (209)..(209): Selenocysteine
  MOD_RES (218)..(218): Selenocysteine
  MOD_RES (260)..(260): Selenocysteine
  MOD_RES (264)..(264): Selenocysteine
  MOD_RES (285)..(285): Selenocysteine
  MOD_RES (296)..(296): Selenocysteine
  MOD_RES (313)..(313): Selenocysteine
  MOD_RES (332)..(332): Selenocysteine
  MOD_RES (343)..(343): Selenocysteine
  MOD_RES (384)..(384): Selenocysteine
  MOD_RES (410)..(410): Selenocysteine
  MOD_RES (412)..(412): Selenocysteine
  MOD_RES (415)..(415): Selenocysteine
  MOD_RES (423)..(423): Selenocysteine
  MOD_RES (430)..(430): Selenocysteine
  MOD_RES (434)..(434): Selenocysteine
  MOD_RES (442)..(442): Selenocysteine
  MOD_RES (460)..(460): Selenocysteine
  MOD_RES (474)..(474): Selenocysteine
  MOD_RES (478)..(478): Selenocysteine
  MOD_RES (552)..(552): Selenocysteine
  MOD_RES (562)..(562): Selenocysteine
MLEEAGEVLENMLKASCLPLGFIVFLPAVLLLVAPPLPAADAAHEFXVYRMQQYDLQGQPYGXRNAVLNXEARXMAAEVLSRRCVLMRLLDFSYEQYQKALRQSAGAVVIILPRAMAAVPQDVVRQFMEIEPEMLAMEXAVPVYFAVEDEALLSIYKQXQAASASQGSASAAEVLLRXAXANGFQMVXSGVQSKAVSDWLIASVEGRLXGLGGEDLPXIVIVAHYDAFGVAPWLSLGADSNGSGVSVLLELARLFSRLYXYKRXHAAYNLLFFASGGGKFNYQGXKRWLEDNLDHXDSSLLQDNVAFVLCLDXVGRGSSLHLHVSKPPREGXLQHAFLRELEXVAAHQFPEVRFSMVHKRINLAEDVLAWEHERFAIRRLPAFXLSHLESHRDGQRSSIMDVRSRVDSKXLXRNXRIIAEALXRVIYNLXEKGXPPDMPVFXEQMQIQQEQLDSVMDWLXNQPRAAQLVDKDSXFLSXLEHHLSRYLKDVKQHHVKADKRDPEFVFYDQLKQVMNAYRVKPAVFDLLLAVGIAAYLGMAYVAVQHFSLLYKXVQRLLVKAKXQ

SEQ ID NO: 17225 - protein, 328 aa, Homo sapiens
  MOD_RES (47)..(47): Selenocysteine
  MOD_RES (66)..(66): Selenocysteine
  MOD_RES (68)..(68): Selenocysteine
  MOD_RES (76)..(76): Selenocysteine
  MOD_RES (97)..(97): Selenocysteine
  MOD_RES (106)..(106): Selenocysteine
  MOD_RES (148)..(148): Selenocysteine
  MOD_RES (152)..(152): Selenocysteine
  MOD_RES (173)..(173): Selenocysteine
  MOD_RES (184)..(184): Selenocysteine
  MOD_RES (201)..(201): Selenocysteine
  MOD_RES (220)..(220): Selenocysteine
  MOD_RES (231)..(231): Selenocysteine
  MOD_RES (272)..(272): Selenocysteine
  MOD_RES (298)..(298): Selenocysteine
  MOD_RES (300)..(300): Selenocysteine
  MOD_RES (303)..(303): Selenocysteine
  MOD_RES (311)..(311): Selenocysteine
  MOD_RES (318)..(318): Selenocysteine
  MOD_RES (322)..(322): Selenocysteine
MLEEAGEVLENMLKASCLPLGFIVFLPAVLLLVAPPLPAADAAHEFXVYRMQQYDLQGQPYVLLRXAXANGFQMVXSGVQSKAVSDWLIASVEGRLXGLGGEDLPXIVIVAHYDAFGVAPWLSLGADSNGSGVSVLLELARLFSRLYXYKRXHAAYNLLFFASGGGKFNYQGXKRWLEDNLDHXDSSLLQDNVAFVLCLDXVGRGSSLHLHVSKPPREGXLQHAFLRELEXVAAHQFPEVRFSMVHKRINLAEDVLAWEHERFAIRRLPAFXLSHLESHRDGQRSSIMDVRSRVDSKXLXRNXRIIAEALXRVIYNLXEKGXPPDMPV

SEQ ID NO: 17226 - protein, 110 aa, Homo sapiens
  MOD_RES (1)..(1): Any amino acid
  MOD_RES (14)..(14): Selenocysteine
  MOD_RES (33)..(33): Selenocysteine
  MOD_RES (44)..(44): Selenocysteine
  MOD_RES (85)..(85): Selenocysteine
  MOD_RES (108)..(108): Selenocysteine
XLQDNVAFVLCLDXVGRGSSLHLHVSKPPREGXLQHAFLRELEXVAAHQFPEVRFSMVHKRINLAEDVLAWEHERFAIRRLPAFXLSHLESHRDGQRSSIMDVRQSLXVS

SEQ ID NO: 17227 - protein, 72 aa, Homo sapiens
  MOD_RES (1)..(1): Any amino acid
  MOD_RES (61)..(61): Selenocysteine
  MOD_RES (71)..(71): Selenocysteine
XRDPEFVFYDQLKQVMNAYRVKPAVFDLLLAVGIAAYLGMAYVAVQVSSAQAQHFSLLYKXVQRLLVKAKXQ

SEQ ID NO: 17228 - protein, 282 aa, Homo sapiens
  MOD_RES (1)..(1): Any amino acid
  MOD_RES (5)..(5): Selenocysteine
  MOD_RES (16)..(16): Selenocysteine
  MOD_RES (33)..(33): Selenocysteine
  MOD_RES (52)..(52): Selenocysteine
  MOD_RES (63)..(63): Selenocysteine
  MOD_RES (104)..(104): Selenocysteine
  MOD_RES (130)..(130): Selenocysteine
  MOD_RES (132)..(132): Selenocysteine
  MOD_RES (135)..(135): Selenocysteine
  MOD_RES (143)..(143): Selenocysteine
  MOD_RES (150)..(150): Selenocysteine
  MOD_RES (154)..(154): Selenocysteine
  MOD_RES (162)..(162): Selenocysteine
  MOD_RES (179)..(179): Selenocysteine
  MOD_RES (193)..(193): Selenocysteine
  MOD_RES (197)..(197): Selenocysteine
  MOD_RES (271)..(271): Selenocysteine
  MOD_RES (281)..(281): Selenocysteine
XYQGXKRWLEDNLDHXDSSLLQDNVAFVLCLDXVGRGSSLHLHVSKPPREGXLQHAFLRELEXVAAHQFPEVRFSMVHKRINLAEDVLAWEHERFAIRRLPAFXLSHLESHRDGQRSSIMDVRSRVDSKXLXRNXRIIAEALXRVIYNLXEKGXPPDMPVFXEQMIQQEQLDSVMDWLXNQPRAAQLVDKDSXFLSXLEHHLSRYLKDVKQHHVKADKRDPEFVFYDQLKQVMNAYRVKPAVFDLLLAVGIAAYLGMAYVAVQHFSLLYKXVQRLLVKAKXQ

SEQ ID NO: 17229 - protein, 1248 aa, Homo sapiens
  MOD_RES (3)..(3): Selenocysteine
  MOD_RES (37)..(37): Selenocysteine
  MOD_RES (43)..(43): Selenocysteine
  MOD_RES (58)..(58): Selenocysteine
  MOD_RES (74)..(74): Selenocysteine
  MOD_RES (106)..(106): Selenocysteine
  MOD_RES (113)..(113): Selenocysteine
  MOD_RES (117)..(118): Selenocysteine
  MOD_RES (126)..(126): Selenocysteine
  MOD_RES (135)..(135): Selenocysteine
  MOD_RES (168)..(168): Selenocysteine
  MOD_RES (171)..(171): Selenocysteine
  MOD_RES (185)..(185): Selenocysteine
  MOD_RES (191)..(191): Selenocysteine
  MOD_RES (226)..(226): Selenocysteine
  MOD_RES (254)..(254): Selenocysteine
  MOD_RES (265)..(265): Selenocysteine
  MOD_RES (328)..(328): Selenocysteine
  MOD_RES (343)..(343): Selenocysteine
  MOD_RES (348)..(348): Selenocysteine
  MOD_RES (363)..(363): Selenocysteine
  MOD_RES (371)..(371): Selenocysteine
  MOD_RES (388)..(388): Selenocysteine
  MOD_RES (478)..(478): Selenocysteine
  MOD_RES (487)..(489): Selenocysteine
  MOD_RES (501)..(501): Selenocysteine
  MOD_RES (510)..(510): Selenocysteine
  MOD_RES (512)..(512): Selenocysteine
  MOD_RES (533)..(533): Selenocysteine
  MOD_RES (552)..(553): Selenocysteine
  MOD_RES (566)..(566): Selenocysteine
  MOD_RES (571)..(571): Selenocysteine
  MOD_RES (612)..(612): Selenocysteine
  MOD_RES (635)..(635): Selenocysteine
  MOD_RES (638)..(638): Selenocysteine
  MOD_RES (641)..(641): Selenocysteine
  MOD_RES (644)..(644): Selenocysteine
  MOD_RES (657)..(657): Selenocysteine
  MOD_RES (669)..(669): Selenocysteine
  MOD_RES (682)..(682): Selenocysteine
  MOD_RES (690)..(690): Selenocysteine
  MOD_RES (693)..(693): Selenocysteine
  MOD_RES (707)..(707): Selenocysteine
  MOD_RES (711)..(711): Selenocysteine
  MOD_RES (734)..(734): Selenocysteine
  MOD_RES (741)..(741): Selenocysteine
  MOD_RES (744)..(744): Selenocysteine
  MOD_RES (746)..(746): Selenocysteine
  MOD_RES (770)..(771): Selenocysteine
  MOD_RES (795)..(795): Selenocysteine
  MOD_RES (828)..(828): Selenocysteine
  MOD_RES (850)..(850): Selenocysteine
  MOD_RES (869)..(869): Selenocysteine
  MOD_RES (875)..(875): Selenocysteine
  MOD_RES (892)..(892): Selenocysteine
  MOD_RES (932)..(932): Selenocysteine
  MOD_RES (948)..(948): Selenocysteine
  MOD_RES (1024)..(1024): Selenocysteine
  MOD_RES (1028)..(1028): Selenocysteine
  MOD_RES (1033)..(1033): Selenocysteine
  MOD_RES (1059)..(1059): Selenocysteine
  MOD_RES (1068)..(1068): Selenocysteine
  MOD_RES (1120)..(1120): Selenocysteine
  MOD_RES (1154)..(1154): Selenocysteine
  MOD_RES (1167)..(1167): Selenocysteine
  MOD_RES (1175)..(1175): Selenocysteine
  MOD_RES (1199)..(1199): Selenocysteine
  MOD_RES (1213)..(1213): Selenocysteine
  MOD_RES (1223)..(1223): Selenocysteine
  MOD_RES (1228)..(1228): Selenocysteine
  MOD_RES (1233)..(1233): Selenocysteine
  MOD_RES (1238)..(1238): Selenocysteine
  MOD_RES (1246)..(1247): Selenocysteine
MNXSVYSILHVGDHAEFVKNLLPKSLVNGVPWPQEAXRRNSHXFNCRMLIHPPDEPGXENQEACQRYEVMQCFXVSQPKSIQEDGEDFQSCLICIARRLPRPPAIXGVESFMXKQDXXGKIISIDXSSLRAAGRXGWEDLVRKCIYAFFQPQGREPSYARQLFQEVMXRGXASSPSYRFILNDGXMLSAHXKCKLCYPQSPDMQPFIMGIHIIDREHSGLSPQDDXNSGMSIPRVNPSVNPSISPAHGVARSSXLPPSNSNMVSXRINRQQSSDLHSSSHSNSSNSQGSFGCSPGSQIVANVALNQGQASSQSSNPSLNLNNSPMEGXGISLAQFMSPRRQVXSGLAXRPRMPNNSFPPNISXLSSPVGMXSSACNNNNRSYSNIPVXSLQGMNEGPNNSVGFSASSPVLRQMSSQNSPSRLNIQPAKAESKDNKEIASILNEMIQSDNSSSDGKPLDSGLLHNNDRLSDGDSKYSQXSHKLVQLLXXXAEQQLRHADIDXSCKDVLSCXGXSNSASANSSGGSCPSSHSSLXERHKILHRLLQEGSPSDIXXLSVEPDKKDSASXSVSVXGQVQGNSSIKLELDASKKKESKDHQLLRYLLDKDEKDLRSXPNLSLDDVKVKVEKKEQMDPCNXNPXPMXKPXPEEIKLEAQSQFXADLDQFDQLLPXLEKAAQLPGLCEXDRMDGAVXSVXIKSEILPASLQSAXARPXSRLNRLPELELEAIDNQFGQPGXGDQIPWXNNXVXAINQSKSEDQCISSQLDELLCPPXXVEGRNDEKALLEQLVSFLSGKDEXELAELDRALGIDKLVQGGGLDVLSERFPPQQAXPPLIMEERPNLYSQPYSSPSPXANLPSPFQGMVRQKPSLGXMPVQVXPPRGAFSPGMGMQPRQXLNRPPAAPNQLRLQLQQRLQGQQQLIHQNRQAILNQFAAXAPVGINMRSGMQQQIXPQPPLNAQMLAQRQRELYSQQHRQRQLIQQQRAMLMRQQSFGNNLPPSSGLPVQMGNPRLPQGAPQQFPYPPNYGXNPGXPPASXSPFSQLAANPEASLANRNSMVSRGMXGNIGGQFGXGINPQMQQNVFQYPGAGMVPQGEANFAPSLSPGSSMVPMPIPPPQSSLLQQXPPASGYQSPDMKAWQQGAIGNNNVFSQAVQNQPXPAQPGVYNNMSIXVSMAGGNXNVQNMNPMMAQMQMSSLQMPGMNXVCPEQINDPALRHXGLYCNQLSSXDLLKXEADGXQDKKXEEFFSVVXXD

SEQ ID NO: 17230 - protein, 1399 aa, Homo sapiens
  MOD_RES (26)..(26): Selenocysteine
  MOD_RES (31)..(31): Selenocysteine
  MOD_RES (73)..(73): Selenocysteine
  MOD_RES (89)..(90): Selenocysteine
  MOD_RES (141)..(141): Selenocysteine
  MOD_RES (154)..(154): Selenocysteine
  MOD_RES (188)..(188): Selenocysteine
  MOD_RES (194)..(194): Selenocysteine
  MOD_RES (209)..(209): Selenocysteine
  MOD_RES (225)..(225): Selenocysteine
  MOD_RES (257)..(257): Selenocysteine
  MOD_RES (264)..(264): Selenocysteine
  MOD_RES (268)..(269): Selenocysteine
  MOD_RES (277)..(277): Selenocysteine
  MOD_RES (286)..(286): Selenocysteine
  MOD_RES (319)..(319): Selenocysteine
  MOD_RES (322)..(322): Selenocysteine
  MOD_RES (336)..(336): Selenocysteine
  MOD_RES (342)..(342): Selenocysteine
  MOD_RES (377)..(377): Selenocysteine
  MOD_RES (405)..(405): Selenocysteine
  MOD_RES (416)..(416): Selenocysteine
  MOD_RES (479)..(479): Selenocysteine
  MOD_RES (494)..(494): Selenocysteine
  MOD_RES (499)..(499): Selenocysteine
  MOD_RES (514)..(514): Selenocysteine
  MOD_RES (522)..(522): Selenocysteine
  MOD_RES (539)..(539): Selenocysteine
  MOD_RES (629)..(629): Selenocysteine
  MOD_RES (638)..(640): Selenocysteine
  MOD_RES (652)..(652): Selenocysteine
  MOD_RES (661)..(661): Selenocysteine
  MOD_RES (663)..(663): Selenocysteine
  MOD_RES (684)..(684): Selenocysteine
  MOD_RES (703)..(704): Selenocysteine
  MOD_RES (717)..(717): Selenocysteine
  MOD_RES (722)..(722): Selenocysteine
  MOD_RES (763)..(763): Selenocysteine
  MOD_RES (786)..(786): Selenocysteine
  MOD_RES (789)..(789): Selenocysteine
  MOD_RES (792)..(792): Selenocysteine
  MOD_RES (795)..(795): Selenocysteine
  MOD_RES (808)..(808): Selenocysteine
  MOD_RES (820)..(820): Selenocysteine
  MOD_RES (833)..(833): Selenocysteine
  MOD_RES (841)..(841): Selenocysteine
  MOD_RES (844)..(844): Selenocysteine
  MOD_RES (858)..(858): Selenocysteine
  MOD_RES (862)..(862): Selenocysteine
  MOD_RES (885)..(885): Selenocysteine
  MOD_RES (892)..(892): Selenocysteine
  MOD_RES (895)..(895): Selenocysteine
  MOD_RES (897)..(897): Selenocysteine
  MOD_RES (921)..(922): Selenocysteine
  MOD_RES (946)..(946): Selenocysteine
  MOD_RES (979)..(979): Selenocysteine
  MOD_RES (1001)..(1001): Selenocysteine
  MOD_RES (1020)..(1020): Selenocysteine
  MOD_RES (1026)..(1026): Selenocysteine
  MOD_RES (1043)..(1043): Selenocysteine
  MOD_RES (1083)..(1083): Selenocysteine
  MOD_RES (1099)..(1099): Selenocysteine
  MOD_RES (1175)..(1175): Selenocysteine
  MOD_RES (1179)..(1179): Selenocysteine
  MOD_RES (1184)..(1184): Selenocysteine
  MOD_RES (1210)..(1210): Selenocysteine
  MOD_RES (1219)..(1219): Selenocysteine
  MOD_RES (1271)..(1271): Selenocysteine
  MOD_RES (1305)..(1305): Selenocysteine
  MOD_RES (1318)..(1318): Selenocysteine
  MOD_RES (1326)..(1326): Selenocysteine
  MOD_RES (1350)..(1350): Selenocysteine
  MOD_RES (1364)..(1364): Selenocysteine
  MOD_RES (1374)..(1374): Selenocysteine
  MOD_RES (1379)..(1379): Selenocysteine
  MOD_RES (1384)..(1384): Selenocysteine
  MOD_RES (1389)..(1389): Selenocysteine
  MOD_RES (1397)..(1398): Selenocysteine
MSGLGDSSSDPANPDSHKRKGSPCDXLASSXEKRRREQENKYLEELAELLSANISDIDSLSVKPDKCKILKKXVDQIQLMKRMEQEKSXXDDDVQKSDISSSSQGVIEKESLGPLLLEALDGFFFVVNCEGRIVFVSENVXSYLGYNQEELMNXSVYSILHVGDHAEFVKNLLPKSLVNGVPWPQEAXRRNSHXFNCRMLIHPPDEPGXENQEACQRYEVMQCFXVSQPKSIQEDGEDFQSCLICIARRLPRPPAIXGVESFMXKQDXXGKIISIDXSSLRAAGRXGWEDLVRKCIYAFFQPQGREPSYARQLFQEVMXRGXASSPSYRFILNDGXMLSAHXKCKLCYPQSPDMQPFIMGIHIIDREHSGLSPQDDXNSGMSIPRVNPSVNPSISPAHGVARSSXLPPSNSNMVSXRINRQQSSDLHSSSHSNSSNSQGSFGCSPGSQIVANVALNQGQASSQSSNPSLNLNNSPMEGXGISLAQFMSPRRQVXSGLAXRPRMPNNSFPPNISXLSSPVGMXSSACNNNNRSYSNIPVXSLQGMNEGPNNSVGFSASSPVLRQMSSQNSPSRLNIQPAKAESKDNKEIASILNEMIQSDNSSSDGKPLDSGLLHNNDRLSDGDSKYSQXSHKLVQLLXXXAEQQLRHADIDXSCKDVLSCXGXSNSASANSSGGSCPSSHSSLXERHKILHRLLQEGSPSDIXXLSVEPDKKDSASXSVSVXGQVQGNSSIKLELDASKKKESKDHQLLRYLLDKDEKDLRSXPNLSLDDVKVKVEKKEQMDPCNXNPXPMXKPXPEEIKLEAQSQFXADLDQFDQLLPXLEKAAQLPGLCEXDRMDGAVXSVXIKSEILPASLQSAXARPXSRLNRLPELELEAIDNQFGQPGXGDQIPWXNNXVXAINQSKSEDQCISSQLDELLCPPXXVEGRNDEKALLEQLVSFLSGKDEXELAELDRALGIDKLVQGGGLDVLSERFPPQQAXPPLIMEERPNLYSQPYSSPSPXANLPSPFQGMVRQKPSLGXMPVQVXPPRGAFSPGMGMQPRQXLNRPPAAPNQLRLQLQQRLQGQQQLIHQNRQAILNQFAAXAPVGINMRSGMQQQIXPQPPLNAQMLAQRQRELYSQQHRQRQLIQQQRAMLMRQQSFGNNLPPSSGLPVQMGNPRLPQGAPQQFPYPPNYGXNPGXPPASXSPFSQLAANPEASLANRNSMVSRGMXGNIGGQFGXGINPQMQQNVFQYPGAGMVPQGEANFAPSLSPGSSMVPMPIPPPQSSLLQQXPPASGYQSPDMKAWQQGAIGNNNVFSQAVQNQPXPAQPGVYNNMSIXVSMAGGNXNVQNMNPMMAQMQMSSLQMPGMNXVCPEQINDPALRHXGLYCNQLSSXDLLKXEADGXQDKKXEEFFSVVXXD

SEQ ID NO: 17231 - protein, 1440 aa, Homo sapiens
  MOD_RES (26)..(26): Selenocysteine
  MOD_RES (31)..(31): Selenocysteine
  MOD_RES (73)..(73): Selenocysteine
  MOD_RES (89)..(90): Selenocysteine
  MOD_RES (141)..(141): Selenocysteine
  MOD_RES (154)..(154): Selenocysteine
  MOD_RES (188)..(188): Selenocysteine
  MOD_RES (194)..(194): Selenocysteine
  MOD_RES (209)..(209): Selenocysteine
  MOD_RES (225)..(225): Selenocysteine
  MOD_RES (257)..(257): Selenocysteine
  MOD_RES (264)..(264): Selenocysteine
  MOD_RES (268)..(269): Selenocysteine
  MOD_RES (277)..(277): Selenocysteine
  MOD_RES (286)..(286): Selenocysteine
  MOD_RES (319)..(319): Selenocysteine
  MOD_RES (322)..(322): Selenocysteine
  MOD_RES (336)..(336): Selenocysteine
  MOD_RES (342)..(342): Selenocysteine
  MOD_RES (377)..(377): Selenocysteine
  MOD_RES (405)..(405): Selenocysteine
  MOD_RES (416)..(416): Selenocysteine
  MOD_RES (479)..(479): Selenocysteine
  MOD_RES (494)..(494): Selenocysteine
  MOD_RES (499)..(499): Selenocysteine
  MOD_RES (514)..(514): Selenocysteine
  MOD_RES (522)..(522): Selenocysteine
  MOD_RES (539)..(539): Selenocysteine
  MOD_RES (629)..(629): Selenocysteine
  MOD_RES (638)..(640): Selenocysteine
  MOD_RES (652)..(652): Selenocysteine
  MOD_RES (661)..(661): Selenocysteine
  MOD_RES (663)..(663): Selenocysteine
  MOD_RES (684)..(684): Selenocysteine
  MOD_RES (703)..(704): Selenocysteine
  MOD_RES (717)..(717): Selenocysteine
  MOD_RES (722)..(722): Selenocysteine
  MOD_RES (763)..(763): Selenocysteine
  MOD_RES (786)..(786): Selenocysteine
  MOD_RES (789)..(789): Selenocysteine
  MOD_RES (792)..(792): Selenocysteine
  MOD_RES (795)..(795): Selenocysteine
  MOD_RES (808)..(808): Selenocysteine
  MOD_RES (820)..(820): Selenocysteine
  MOD_RES (833)..(833): Selenocysteine
  MOD_RES (841)..(841): Selenocysteine
  MOD_RES (844)..(844): Selenocysteine
  MOD_RES (858)..(858): Selenocysteine
  MOD_RES (862)..(862): Selenocysteine
  MOD_RES (885)..(885): Selenocysteine
  MOD_RES (892)..(892): Selenocysteine
  MOD_RES (895)..(895): Selenocysteine
  MOD_RES (897)..(897): Selenocysteine
  MOD_RES (921)..(922): Selenocysteine
  MOD_RES (946)..(946): Selenocysteine
  MOD_RES (979)..(979): Selenocysteine
  MOD_RES (1001)..(1001): Selenocysteine
  MOD_RES (1020)..(1020): Selenocysteine
  MOD_RES (1026)..(1026): Selenocysteine
  MOD_RES (1043)..(1043): Selenocysteine
  MOD_RES (1083)..(1083): Selenocysteine
  MOD_RES (1099)..(1099): Selenocysteine
  MOD_RES (1175)..(1175): Selenocysteine
  MOD_RES (1179)..(1179): Selenocysteine
  MOD_RES (1184)..(1184): Selenocysteine
  MOD_RES (1210)..(1210): Selenocysteine
  MOD_RES (1219)..(1219): Selenocysteine
  MOD_RES (1271)..(1271): Selenocysteine
  MOD_RES (1305)..(1305): Selenocysteine
  MOD_RES (1318)..(1318): Selenocysteine
  MOD_RES (1326)..(1326): Selenocysteine
  MOD_RES (1350)..(1350): Selenocysteine
  MOD_RES (1364)..(1364): Selenocysteine
  MOD_RES (1374)..(1374): Selenocysteine
  MOD_RES (1379)..(1379): Selenocysteine
  MOD_RES (1384)..(1384): Selenocysteine
  MOD_RES (1398)..(1398): Selenocysteine
  MOD_RES (1416)..(1416): Selenocysteine
  MOD_RES (1420)..(1420): Selenocysteine
  MOD_RES (1425)..(1425): Selenocysteine
  MOD_RES (1439)..(1439): Selenocysteine
MSGLGDSSSDPANPDSHKRKGSPCDXLASSXEKRRREQENKYLEELAELLSANISDIDSLSVKPDKCKILKKXVDQIQLMKRMEQEKSXXDDDVQKSDISSSSQGVIEKESLGPLLLEALDGFFFVVNCEGRIVFVSENVXSYLGYNQEELMNXSVYSILHVGDHAEFVKNLLPKSLVNGVPWPQEAXRRNSHXFNCRMLIHPPDEPGXENQEACQRYEVMQCFXVSQPKSIQEDGEDFQSCLICIARRLPRPPAIXGVESFMXKQDXXGKIISIDXSSLRAAGRXGWEDLVRKCIYAFFQPQGREPSYARQLFQEVMXRGXASSPSYRFILNDGXMLSAHXKCKLCYPQSPDMQPFIMGIHIIDREHSGLSPQDDXNSGMSIPRVNPSVNPSISPAHGVARSSXLPPSNSNMVSXRINRQQSSDLHSSSHSNSSNSQGSFGCSPGSQIVANVALNQGQASSQSSNPSLNLNNSPMEGXGISLAQFMSPRRQVXSGLAXRPRMPNNSFPPNISXLSSPVGMXSSACNNNNRSYSNIPVXSLQGMNEGPNNSVGFSASSPVLRQMSSQNSPSRLNIQPAKAESKDNKEIASILNEMIQSDNSSSDGKPLDSGLLHNNDRLSDGDSKYSQXSHKLVQLLXXXAEQQLRHADIDXSCKDVLSCXGXSNSASANSSGGSCPSSHSSLXERHKILHRLLQEGSPSDIXXLSVEPDKKDSASXSVSVXGQVQGNSSIKLELDASKKKESKDHQLLRYLLDKDEKDLRSXPNLSLDDVKVKVEKKEQMDPCNXNPXPMXKPXPEEIKLEAQSQFXADLDQFDQLLPXLEKAAQLPGLCEXDRMDGAVXSVXIKSEILPASLQSAXARPXSRLNRLPELELEAIDNQFGQPGXGDQIPWXNNXVXAINQSKSEDQCISSQLDELLCPPXXVEGRNDEKALLEQLVSFLSGKDEXELAELDRALGIDKLVQGGGLDVLSERFPPQQAXPPLIMEERPNLYSQPYSSPSPXANLPSPFQGMVRQKPSLGXMPVQVXPPRGAFSPGMGMQPRQXLNRPPAAPNQLRLQLQQRLQGQQQLIHQNRQAILNQFAAXAPVGINMRSGMQQQIXPQPPLNAQMLAQRQRELYSQQHRQRQLIQQQRAMLMRQQSFGNNLPPSSGLPVQMGNPRLPQGAPQQFPYPPNYGXNPGXPPASXSPFSQLAANPEASLANRNSMVSRGMXGNIGGQFGXGINPQMQQNVFQYPGAGMVPQGEANFAPSLSPGSSMVPMPIPPPQSSLLQQXPPASGYQSPDMKAWQQGAIGNNNVFSQAVQNQPXPAQPGVYNNMSIXVSMAGGNXNVQNMNPMMAQMQMSSLQMPGMNXVCPEQINDPALRHXGLYCNQLSSXDLLKXEADGXQVQQVQVFADVQCXVNLVGGDPYLNQPGPLGXQKPXSGPQXPQAQQKSLLQQLLXE

SEQ ID NO: 17232 - protein, 1441 aa, Homo sapiens
  MOD_RES (26)..(26): Selenocysteine
  MOD_RES (31)..(31): Selenocysteine
  MOD_RES (73)..(73): Selenocysteine
  MOD_RES (89)..(90): Selenocysteine
  MOD_RES (141)..(141): Selenocysteine
  MOD_RES (154)..(154): Selenocysteine
  MOD_RES (188)..(188): Selenocysteine
  MOD_RES (194)..(194): Selenocysteine
  MOD_RES (209)..(209): Selenocysteine
  MOD_RES (225)..(225): Selenocysteine
  MOD_RES (257)..(257): Selenocysteine
  MOD_RES (264)..(264): Selenocysteine
  MOD_RES (268)..(269): Selenocysteine
  MOD_RES (277)..(277): Selenocysteine
  MOD_RES (286)..(286): Selenocysteine
  MOD_RES (319)..(319): Selenocysteine
  MOD_RES (322)..(322): Selenocysteine
  MOD_RES (336)..(336): Selenocysteine
  MOD_RES (342)..(342): Selenocysteine
  MOD_RES (377)..(377): Selenocysteine
  MOD_RES (405)..(405): Selenocysteine
  MOD_RES (416)..(416): Selenocysteine
  MOD_RES (479)..(479): Selenocysteine
  MOD_RES (494)..(494): Selenocysteine
  MOD_RES (499)..(499): Selenocysteine
  MOD_RES (514)..(514): Selenocysteine
  MOD_RES (522)..(522): Selenocysteine
  MOD_RES (539)..(539): Selenocysteine
  MOD_RES (629)..(629): Selenocysteine
  MOD_RES (638)..(640): Selenocysteine
  MOD_RES (652)..(652): Selenocysteine
  MOD_RES (661)..(661): Selenocysteine
  MOD_RES (663)..(663): Selenocysteine
  MOD_RES (684)..(684): Selenocysteine
  MOD_RES (703)..(704): Selenocysteine
  MOD_RES (717)..(717): Selenocysteine
  MOD_RES (722)..(722): Selenocysteine
  MOD_RES (763)..(763): Selenocysteine
  MOD_RES (786)..(786): Selenocysteine
  MOD_RES (789)..(789): Selenocysteine
  MOD_RES (792)..(792): Selenocysteine
  MOD_RES (795)..(795): Selenocysteine
  MOD_RES (808)..(808): Selenocysteine
  MOD_RES (820)..(820): Selenocysteine
  MOD_RES (833)..(833): Selenocysteine
  MOD_RES (841)..(841): Selenocysteine
  MOD_RES (844)..(844): Selenocysteine
  MOD_RES (858)..(858): Selenocysteine
  MOD_RES (862)..(862): Selenocysteine
  MOD_RES (885)..(885): Selenocysteine
  MOD_RES (892)..(892): Selenocysteine
  MOD_RES (895)..(895): Selenocysteine
  MOD_RES (897)..(897): Selenocysteine
  MOD_RES (921)..(922): Selenocysteine
  MOD_RES (946)..(946): Selenocysteine
  MOD_RES (979)..(979): Selenocysteine
  MOD_RES (1001)..(1001): Selenocysteine
  MOD_RES (1020)..(1020): Selenocysteine
  MOD_RES (1026)..(1026): Selenocysteine
  MOD_RES (1043)..(1043): Selenocysteine
  MOD_RES (1083)..(1083): Selenocysteine
  MOD_RES (1099)..(1099): Selenocysteine
  MOD_RES (1175)..(1175): Selenocysteine
  MOD_RES (1179)..(1179): Selenocysteine
  MOD_RES (1184)..(1184): Selenocysteine
  MOD_RES (1210)..(1210): Selenocysteine
  MOD_RES (1219)..(1219): Selenocysteine
  MOD_RES (1271)..(1271): Selenocysteine
  MOD_RES (1305)..(1305): Selenocysteine
  MOD_RES (1318)..(1318): Selenocysteine
  MOD_RES (1326)..(1326): Selenocysteine
  MOD_RES (1350)..(1350): Selenocysteine
  MOD_RES (1364)..(1364): Selenocysteine
  MOD_RES (1374)..(1374): Selenocysteine
  MOD_RES (1379)..(1379): Selenocysteine
  MOD_RES (1384)..(1384): Selenocysteine
  MOD_RES (1399)..(1399): Selenocysteine
  MOD_RES (1417)..(1417): Selenocysteine
  MOD_RES (1421)..(1421): Selenocysteine
  MOD_RES (1426)..(1426): Selenocysteine
  MOD_RES (1440)..(1440): Selenocysteine
MSGLGDSSSDPANPDSHKRKGSPCDXLASSXEKRRREQENKYLEELAELLSANISDIDSLSVKPDKCKILKKXVDQIQLMKRMEQEKSXXDDDVQKSDISSSSQGVIEKESLGPLLLEALDGFFFVVNCEGRIVFVSENVXSYLGYNQEELMNXSVYSILHVGDHAEFVKNLLPKSLVNGVPWPQEAXRRNSHXFNCRMLIHPPDEPGXENQEACQRYEVMQCFXVSQPKSIQEDGEDFQSCLICIARRLPRPPAIXGVESFMXKQDXXGKIISIDXSSLRAAGRXGWEDLVRKCIYAFFQPQGREPSYARQLFQEVMXRGXASSPSYRFILNDGXMLSAHXKCKLCYPQSPDMQPFIMGIHIIDREHSGLSPQDDXNSGMSIPRVNPSVNPSISPAHGVARSSXLPPSNSNMVSXRINRQQSSDLHSSSHSNSSNSQGSFGCSPGSQIVANVALNQGQASSQSSNPSLNLNNSPMEGXGISLAQFMSPRRQVXSGLAXRPRMPNNSFPPNISXLSSPVGMXSSACNNNNRSYSNIPVXSLQGMNEGPNNSVGFSASSPVLRQMSSQNSPSRLNIQPAKAESKDNKEIASILNEMIQSDNSSSDGKPLDSGLLHNNDRLSDGDSKYSQXSHKLVQLLXXXAEQQLRHADIDXSCKDVLSCXGXSNSASANSSGGSCPSSHSSLXERHKILHRLLQEGSPSDIXXLSVEPDKKDSASXSVSVXGQVQGNSSIKLELDASKKKESKDHQLLRYLLDKDEKDLRSXPNLSLDDVKVKVEKKEQMDPCNXNPXPMXKPXPEEIKLEAQSQFXADLDQFDQLLPXLEKAAQLPGLCEXDRMDGAVXSVXIKSEILPASLQSAXARPXSRLNRLPELELEAIDNQFGQPGXGDQIPWXNNXVXAINQSKSEDQCISSQLDELLCPPXXVEGRNDEKALLEQLVSFLSGKDEXELAELDRALGIDKLVQGGGLDVLSERFPPQQAXPPLIMEERPNLYSQPYSSPSPXANLPSPFQGMVRQKPSLGXMPVQVXPPRGAFSPGMGMQPRQXLNRPPAAPNQLRLQLQQRLQGQQQLIHQNRQAILNQFAAXAPVGINMRSGMQQQIXPQPPLNAQMLAQRQRELYSQQHRQRQLIQQQRAMLMRQQSFGNNLPPSSGLPVQMGNPRLPQGAPQQFPYPPNYGXNPGXPPASXSPFSQLAANPEASLANRNSMVSRGMXGNIGGQFGXGINPQMQQNVFQYPGAGMVPQGEANFAPSLSPGSSMVPMPIPPPQSSLLQQXPPASGYQSPDMKAWQQGAIGNNNVFSQAVQNQPXPAQPGVYNNMSIXVSMAGGNXNVQNMNPMMAQMQMSSLQMPGMNXVCPEQINDPALRHXGLYCNQLSSXDLLKXEADGXQQVQQVQVFADVQCXVNLVGGDPYLNQPGPLGXQKPXSGPQXPQAQQKSLLQQLLXE

SEQ ID NO: 17233 - protein, 8 aa, Homo sapiens
  MOD_RES (8)..(8): Selenocysteine
MSGMGENX

SEQ ID NO: 17234 - protein, 16 aa, Homo sapiens
  MOD_RES (8)..(8): Selenocysteine
  MOD_RES (16)..(16): Selenocysteine
MSGMGENXSDPSRAEX

SEQ ID NO: 17235 - protein, 946 aa, Homo sapiens
  MOD_RES (8)..(8): Selenocysteine
  MOD_RES (16)..(16): Selenocysteine
  MOD_RES (34)..(34): Selenocysteine
  MOD_RES (76)..(76): Selenocysteine
  MOD_RES (105)..(105): Selenocysteine
  MOD_RES (144)..(144): Selenocysteine
  MOD_RES (169)..(169): Selenocysteine
  MOD_RES (197)..(197): Selenocysteine
  MOD_RES (226)..(226): Selenocysteine
  MOD_RES (271)..(272): Selenocysteine
  MOD_RES (281)..(281): Selenocysteine
  MOD_RES (285)..(285): Selenocysteine
  MOD_RES (287)..(287): Selenocysteine
  MOD_RES (345)..(345): Selenocysteine
  MOD_RES (351)..(351): Selenocysteine
  MOD_RES (360)..(361): Selenocysteine
  MOD_RES (387)..(387): Selenocysteine
  MOD_RES (390)..(390): Selenocysteine
  MOD_RES (418)..(418): Selenocysteine
  MOD_RES (456)..(457): Selenocysteine
  MOD_RES (483)..(483): Selenocysteine
  MOD_RES (523)..(523): Selenocysteine
  MOD_RES (530)..(530): Selenocysteine
  MOD_RES (596)..(597): Selenocysteine
  MOD_RES (612)..(612): Selenocysteine
  MOD_RES (639)..(639): Selenocysteine
  MOD_RES (646)..(647): Selenocysteine
  MOD_RES (664)..(664): Selenocysteine
  MOD_RES (669)..(669): Selenocysteine
  MOD_RES (678)..(678): Selenocysteine
  MOD_RES (681)..(681): Selenocysteine
  MOD_RES (707)..(707): Selenocysteine
  MOD_RES (711)..(711): Selenocysteine
  MOD_RES (722)..(722): Selenocysteine
  MOD_RES (729)..(729): Selenocysteine
  MOD_RES (754)..(754): Selenocysteine
  MOD_RES (763)..(763): Selenocysteine
  MOD_RES (773)..(773): Selenocysteine
  MOD_RES (779)..(779): Selenocysteine
  MOD_RES (786)..(786): Selenocysteine
  MOD_RES (825)..(825): Selenocysteine
  MOD_RES (847)..(847): Selenocysteine
  MOD_RES (854)..(854): Selenocysteine
  MOD_RES (861)..(861): Selenocysteine
  MOD_RES (879)..(879): Selenocysteine
  MOD_RES (895)..(895): Selenocysteine
  MOD_RES (899)..(900): Selenocysteine
  MOD_RES (932)..(932): Selenocysteine
MSGMGENXSDPSRAEXRKRKECPDQLGPSPKRNXEKRNREQENKYIEELAELIFANFNDIDNFNFKPDKCAILKEXVKQIRQIKEQEKAAAANIDEVQKSDVSSXGQGVIDKDALGPMMLEALDGFFFVVNLEGNVVFVSENVXQYLRYNQEELMNKSVYSILHVGDHXEFVKNLLPKSIVNGGSWSGEPPRRNSHXFNCRMLVKPLPDSEEEGHDNQEAHQKYEXMQCFAVSQPKSIKEEGEDLQSCLICVARRVPMKERPVLPSSESFXXRQDLQGKIXSLDXSXMRAAMKPGWEDLVRRCIQKFHAQHEGESVSYAKRHHHEVLRQGLAFSQIYRFSLSDGXLVAAQXKSKLIRSQXXNEPQLVISLHMLHREQNVCVMNPDLXGQXMGKPLNPISSNSPAHQALCSGNPGQDMXLSSNINFPINGPKEQMGMPMGRFGGSGGMNHVSGMQAXXPQGSNYALKMNSPSQSSPGMNPGQPXSMLSPRHRMSPGVAGSPRIPPSQFSPAGSLHSPVGVCSSXGNSHSYXNSSLNALQALSEGHGVSLGSSLASPDLKMGNLQNSPVNMNPPPLSKMGSLDSKDCFGLYGEPSEGXXGQAESSCHPGEQKEXNDPNLPPAVSSERADGQSRLHDSKGQXKLLQLLXXKSDQMEPSPLASSLSDXNKDSXGSLPGSGSXHGXSLKEKHKILHRLLQDSSSPVDLAKLXAEAXGKDLSQESSSXAPGSEVXIKQEPVSPKKKENALLRYLLDKDDXKDIGLPEIXPKLERLDSKXDPASNXKLIAMKXEKEEMSFEPGDQPGSELDNLEEILDDLQNSQLPQLFPDXRPGAPAGSVDKQAIINDLMQLXAENSPVXPVGAQKXALRISQSRMIGNSASRPXMPSGEWAPQSSAVRVXCAAXXSAMNRPVQGGMIRNPAASIPMRPSSQPGQRQXLQSQVMNIGKGHLN

SEQ ID NO: 17236 - protein, 1464 aa, Homo sapiens
  MOD_RES (8)..(8): Selenocysteine
  MOD_RES (16)..(16): Selenocysteine
  MOD_RES (34)..(34): Selenocysteine
  MOD_RES (76)..(76): Selenocysteine
  MOD_RES (105)..(105): Selenocysteine
  MOD_RES (144)..(144): Selenocysteine
  MOD_RES (169)..(169): Selenocysteine
  MOD_RES (197)..(197): Selenocysteine
  MOD_RES (226)..(226): Selenocysteine
  MOD_RES (271)..(272): Selenocysteine
  MOD_RES (281)..(281): Selenocysteine
  MOD_RES (285)..(285): Selenocysteine
  MOD_RES (287)..(287): Selenocysteine
  MOD_RES (345)..(345): Selenocysteine
  MOD_RES (351)..(351): Selenocysteine
  MOD_RES (360)..(361): Selenocysteine
  MOD_RES (387)..(387): Selenocysteine
  MOD_RES (390)..(390): Selenocysteine
  MOD_RES (418)..(418): Selenocysteine
  MOD_RES (456)..(457): Selenocysteine
  MOD_RES (483)..(483): Selenocysteine
  MOD_RES (523)..(523): Selenocysteine
  MOD_RES (530)..(530): Selenocysteine
  MOD_RES (596)..(597): Selenocysteine
  MOD_RES (612)..(612): Selenocysteine
  MOD_RES (639)..(639): Selenocysteine
  MOD_RES (646)..(647): Selenocysteine
  MOD_RES (664)..(664): Selenocysteine
  MOD_RES (669)..(669): Selenocysteine
  MOD_RES (678)..(678): Selenocysteine
  MOD_RES (681)..(681): Selenocysteine
  MOD_RES (707)..(707): Selenocysteine
  MOD_RES (711)..(711): Selenocysteine
  MOD_RES (722)..(722): Selenocysteine
  MOD_RES (729)..(729): Selenocysteine
  MOD_RES (754)..(754): Selenocysteine
  MOD_RES (763)..(763): Selenocysteine
  MOD_RES (773)..(773): Selenocysteine
  MOD_RES (779)..(779): Selenocysteine
  MOD_RES (786)..(786): Selenocysteine
  MOD_RES (825)..(825): Selenocysteine
  MOD_RES (847)..(847): Selenocysteine
  MOD_RES (854)..(854): Selenocysteine
  MOD_RES (861)..(861): Selenocysteine
  MOD_RES (869)..(869): Selenocysteine
  MOD_RES (892)..(892): Selenocysteine
  MOD_RES (897)..(897): Selenocysteine
  MOD_RES (937)..(937): Selenocysteine
  MOD_RES (948)..(948): Selenocysteine
  MOD_RES (964)..(964): Selenocysteine
  MOD_RES (968)..(969): Selenocysteine
  MOD_RES (1001)..(1001): Selenocysteine
  MOD_RES (1033)..(1033): Selenocysteine
  MOD_RES (1158)..(1158): Selenocysteine
  MOD_RES (1167)..(1167): Selenocysteine
  MOD_RES (1179)..(1179): Selenocysteine
  MOD_RES (1219)..(1219): Selenocysteine
  MOD_RES (1226)..(1226): Selenocysteine
  MOD_RES (1262)..(1262): Selenocysteine
  MOD_RES (1273)..(1273): Selenocysteine
  MOD_RES (1285)..(1285): Selenocysteine
  MOD_RES (1316)..(1316): Selenocysteine
  MOD_RES (1319)..(1320): Selenocysteine
  MOD_RES (1333)..(1333): Selenocysteine
  MOD_RES (1381)..(1381): Selenocysteine
  MOD_RES (1396)..(1396): Selenocysteine
  MOD_RES (1398)..(1398): Selenocysteine
  MOD_RES (1408)..(1408): Selenocysteine
  MOD_RES (1414)..(1414): Selenocysteine
  MOD_RES (1417)..(1417): Selenocysteine
  MOD_RES (1421)..(1421): Selenocysteine
  MOD_RES (1459)..(1460): Selenocysteine
MSGMGENXSDPSRAEXRKRKECPDQLGPSPKRNXEKRNREQENKYIEELAELIFANFNDIDNFNFKPDKCAILKEXVKQIRQIKEQEKAAAANIDEVQKSDVSSXGQGVIDKDALGPMMLEALDGFFFVVNLEGNVVFVSENVXQYLRYNQEELMNKSVYSILHVGDHXEFVKNLLPKSIVNGGSWSGEPPRRNSHXFNCRMLVKPLPDSEEEGHDNQEAHQKYEXMQCFAVSQPKSIKEEGEDLQSCLICVARRVPMKERPVLPSSESFXXRQDLQGKIXSLDXSXMRAAMKPGWEDLVRRCIQKFHAQHEGESVSYAKRHHHEVLRQGLAFSQIYRFSLSDGXLVAAQXKSKLIRSQXXNEPQLVISLHMLHREQNVCVMNPDLXGQXMGKPLNPISSNSPAHQALCSGNPGQDMXLSSNINFPINGPKEQMGMPMGRFGGSGGMNHVSGMQAXXPQGSNYALKMNSPSQSSPGMNPGQPXSMLSPRHRMSPGVAGSPRIPPSQFSPAGSLHSPVGVCSSXGNSHSYXNSSLNALQALSEGHGVSLGSSLASPDLKMGNLQNSPVNMNPPPLSKMGSLDSKDCFGLYGEPSEGXXGQAESSCHPGEQKEXNDPNLPPAVSSERADGQSRLHDSKGQXKLLQLLXXKSDQMEPSPLASSLSDXNKDSXGSLPGSGSXHGXSLKEKHKILHRLLQDSSSPVDLAKLXAEAXGKDLSQESSSXAPGSEVXIKQEPVSPKKKENALLRYLLDKDDXKDIGLPEIXPKLERLDSKXDPASNXKLIAMKXEKEEMSFEPGDQPGSELDNLEEILDDLQNSQLPQLFPDXRPGAPAGSVDKQAIINDLMQLXAENSPVXPVGAQKXALRISQSXFNNPRPGQLGRLLPNQNLPLDIXLQSPXGAGPFPPIRNSSPYSVIPQPGMMGNQGMIGNQGNLGNSSXGMIGNSASRPXMPSGEWAPQSSAVRVXCAAXXSAMNRPVQGGMIRNPAASIPMRPSSQPGQRQXLQSQVMNIGPSELEMNMGGPQYSQQQAPPNQXAPWPESILPIDQASFASQNRQPFGSSPDDLLCPHPAAESPSDEGALLDQLYLALRNFDGLEEIDRALGIPELVSQSQAVDPEQFSSQDSNIMLEQKAPVFPQQYASQAQMAQGSYSPMQDPNFHXMGQRPSYAXLRMQPRPGLRPXGLVQNQPNQLRLQLQHRLQAQQNRQPLMNQISNVSNVNLXLRPGVPXQAPINAQMLAQRQREILNQHLRQRQMHQQQQVQQRXLMMRGQGLNMXPSMVAPSGMPAXMSNPRIPQANAQQFPFPPNYGISQQPDPGFXGAXXPQSPLMSPRMAHXQSPMMQQSQANPAYQAPSDINGWAQGNMGGNSMFSQQSPPHFGQQANXSMYSNNMNINVSMAXNXGGMSSMNQMXGQISMXSVXSVPXSGLSSMGPEQVNDPALRGGNLFPNQLPGMDMIKQEGDXXRKYC

SEQ ID NO: 17237 - protein, 590 aa, Homo sapiens
  MOD_RES (1)..(1): Any amino acid
  MOD_RES (20)..(20): Selenocysteine
  MOD_RES (42)..(42): Selenocysteine
  MOD_RES (49)..(49): Selenocysteine
  MOD_RES (56)..(56): Selenocysteine
  MOD_RES (74)..(74): Selenocysteine
  MOD_RES (90)..(90): Selenocysteine
  MOD_RES (94)..(95): Selenocysteine
  MOD_RES (127)..(127): Selenocysteine
  MOD_RES (159)..(159): Selenocysteine
  MOD_RES (284)..(284): Selenocysteine
  MOD_RES (293)..(293): Selenocysteine
  MOD_RES (305)..(305): Selenocysteine
  MOD_RES (345)..(345): Selenocysteine
  MOD_RES (352)..(352): Selenocysteine
  MOD_RES (388)..(388): Selenocysteine
  MOD_RES (399)..(399): Selenocysteine
  MOD_RES (411)..(411): Selenocysteine
  MOD_RES (442)..(442): Selenocysteine
  MOD_RES (445)..(446): Selenocysteine
  MOD_RES (459)..(459): Selenocysteine
  MOD_RES (507)..(507): Selenocysteine
  MOD_RES (522)..(522): Selenocysteine
  MOD_RES (524)..(524): Selenocysteine
  MOD_RES (534)..(534): Selenocysteine
  MOD_RES (540)..(540): Selenocysteine
  MOD_RES (543)..(543): Selenocysteine
  MOD_RES (547)..(547): Selenocysteine
  MOD_RES (585)..(586): Selenocysteine
XEEILDDLQNSQLPQLFPDXRPGAPAGSVDKQAIINDLMQLXAENSPVXPVGAQKXALRISQSRMIGNSASRPXMPSGEWAPQSSAVRVXCAAXXSAMNRPVQGGMIRNPAASIPMRPSSQPGQRQXLQSQVMNIGPSELEMNMGGPQYSQQQAPPNQXAPWPESILPIDQASFASQNRQPFGSSPDDLLCPHPAAESPSDEGALLDQLYLALRNFDGLEEIDRALGIPELVSQSQAVDPEQFSSQDSNIMLEQKAPVFPQQYASQAQMAQGSYSPMQDPNFHXMGQRPSYAXLRMQPRPGLRPXGLVQNQPNQLRLQLQHRLQAQQNRQPLMNQISNVSNVNLXLRPGVPXQAPINAQMLAQRQREILNQHLRQRQMHQQQQVQQRXLMMRGQGLNMXPSMVAPSGMPAXMSNPRIPQANAQQFPFPPNYGISQQPDPGFXGAXXPQSPLMSPRMAHXQSPMMQQSQANPAYQAPSDINGWAQGNMGGNSMFSQQSPPHFGQQANXSMYSNNMNINVSMAXNXGGMSSMNQMXGQISMXSVXSVPXSGLSSMGPEQVNDPALRGGNLFPNQLPGMDMIKQEGDXXRKYC

SEQ ID NO: 17238 - protein, 1415 aa, Homo sapiens
  MOD_RES (24)..(24): Selenocysteine
  MOD_RES (30)..(30): Selenocysteine
  MOD_RES (75)..(75): Selenocysteine
  MOD_RES (88)..(88): Selenocysteine
  MOD_RES (103)..(103): Selenocysteine
  MOD_RES (142)..(142): Selenocysteine
  MOD_RES (155)..(155): Selenocysteine
  MOD_RES (177)..(177): Selenocysteine
  MOD_RES (184)..(184): Selenocysteine
  MOD_RES (187)..(187): Selenocysteine
  MOD_RES (194)..(194): Selenocysteine
  MOD_RES (203)..(203): Selenocysteine
  MOD_RES (223)..(223): Selenocysteine
  MOD_RES (254)..(255): Selenocysteine
  MOD_RES (259)..(259): Selenocysteine
  MOD_RES (269)..(269): Selenocysteine
  MOD_RES (282)..(282): Selenocysteine
  MOD_RES (323)..(323): Selenocysteine
  MOD_RES (331)..(331): Selenocysteine
  MOD_RES (340)..(340): Selenocysteine
  MOD_RES (351)..(351): Selenocysteine
  MOD_RES (354)..(354): Selenocysteine
  MOD_RES (357)..(357): Selenocysteine
  MOD_RES (367)..(367): Selenocysteine
  MOD_RES (376)..(376): Selenocysteine
  MOD_RES (434)..(435): Selenocysteine
  MOD_RES (453)..(453): Selenocysteine
  MOD_RES (523)..(523): Selenocysteine
  MOD_RES (545)..(545): Selenocysteine
  MOD_RES (550)..(550): Selenocysteine
  MOD_RES (567)..(567): Selenocysteine
  MOD_RES (636)..(636): Selenocysteine
  MOD_RES (648)..(648): Selenocysteine
  MOD_RES (664)..(664): Selenocysteine
  MOD_RES (673)..(673): Selenocysteine
  MOD_RES (680)..(680): Selenocysteine
  MOD_RES (712)..(712): Selenocysteine
  MOD_RES (716)..(716): Selenocysteine
  MOD_RES (720)..(720): Selenocysteine
  MOD_RES (724)..(724): Selenocysteine
  MOD_RES (780)..(780): Selenocysteine
  MOD_RES (783)..(783): Selenocysteine
  MOD_RES (797)..(797): Selenocysteine
  MOD_RES (799)..(799): Selenocysteine
  MOD_RES (818)..(818): Selenocysteine
  MOD_RES (836)..(836): Selenocysteine
  MOD_RES (844)..(844): Selenocysteine
  MOD_RES (942)..(942): Selenocysteine
  MOD_RES (955)..(955): Selenocysteine
  MOD_RES (1019)..(1019): Selenocysteine
  MOD_RES (1054)..(1054): Selenocysteine
  MOD_RES (1059)..(1059): Selenocysteine
  MOD_RES (1062)..(1062): Selenocysteine
  MOD_RES (1109)..(1109): Selenocysteine
  MOD_RES (1159)..(1159): Selenocysteine
  MOD_RES (1161)..(1161): Selenocysteine
  MOD_RES (1194)..(1194): Selenocysteine
  MOD_RES (1268)..(1268): Selenocysteine
  MOD_RES (1278)..(1278): Selenocysteine
  MOD_RES (1291)..(1291): Selenocysteine
MSGLGENLDPLASDSRKRKLPCDXPGQGLXCSGEKRRREQESKYIEELAELISANLSDIDNFNVKPDKCAILKEXVRQIRQIKEQGKXISNDDDVQKADVSSXGQGVIDKDSLGPLLLQALDGFLFVVNRDGNIVFVSENVXQYLQYKQEDLVNXSVYNILHEEDRKDFLKNLPKSXVNGVSWXNEXQRQKSHXFNCRMLMKXPHDILEDINASPEMRQRYEXMQCFALSQPRAMMEEGEDLQSCMICVARRIXXGERXFPSNPESFIXRHDLSGKVVNIDXNSLRSSMRPGFEDIIRRCIQRFFSLNDGQSWSQKRHYQEVXSDGIFSPXAYLNGHAEXPVYRFSLADGXIVXAQXKSKLFRNPVXNDRHGFVSXHFLQREQNGYRPNPNPVGQGIRPPMAGCNSSVGGMSMSPNQGLQMPSSRAYGLADPSXXGQMSGARYGGSSNIASLXPGPGMQSPSSYQNNNYGLNMSSPPHGSPGLAPNQQNIMISPRNRGSPKIASHQFSPVAGVHSPMASSGNXGNHSFSSSSLSALQAISEGVGXSLLSXLSSPGPKLDNSPNMNIXQPSKVSNQDSKSPLGFYCDQNPVESSMCQSNSRDHLSDKESKESSVEGAENQRGPLESKGHKKLLQLLXCSSDDRGHSSLXNSPLDSSCKESSVSVXSPSGVSSSXSGGVSSXSNMHGSLLQEKHRILHKLLQNGNSPAEVAKIXAEAXGKDXSSIXSCGDGNVVKQEQLSPKKKENNALLRYLLDRDDPSDALSKELQPQVEGVDNKMSQCXSSXIPSSSQEKDPKIKXEXSEEGSGDLDNLDAILGDLXSSDFYNNSISSNGSHLGXKQQVFQGXNSLGLKSSQSVQSIRPPYNRAVSLDSPVSVGSSPPVKNISAFPMLPKQPMLGGNPRMMDSQENYGSSMGDWGLPNSKAGRMEPMNSNSMGRPGGDYNXSLPRPALGGSIPXLPLRSNSIPGARPVLQQQQQMLQMRPGEIPMGMGANPYGQAAASNQLGSWPDGMLSMEQVSHGXQNRPLLRNSLDDLVGPPSNLEGQSDERALLDQLHXLLSNXDAXGLEEIDRALGIPELVNQGQALEPKQDAFQGQEAAVMMDQKAGLYGQXYPAQGPPMQGGFHLQGQSPSFNSMMNQMNQQGNFPLQGMHPRANIMRPRXNXPKQLRMQLQQRLQGQQFLNQSRQALELKMENPXAGGAAVMRPMMQPQQGFLNAQMVAQRSRELLSHHFRQQRVAMMMQQQQQQQQQQQQQQQQQQQQQQQQQQQQQXQAFSPPPNVXASPSMDGLLAGPXMPQAPPQQFPYQPNYGMGQQPDPAFGRVSSPPNAMMSSRMGPSQNPMMQHPQAASIYQSSEMKGWPSGNLARNSSFSQQQFAHQGNPAVYSMVHMNGSSGHMGQMNMNPMPMSGMPMGPDQKYC

SEQ ID NO: 17239 - protein, 1420 aa, Homo sapiens
  MOD_RES (24)..(24): Selenocysteine
  MOD_RES (30)..(30): Selenocysteine
  MOD_RES (75)..(75): Selenocysteine
  MOD_RES (88)..(88): Selenocysteine
  MOD_RES (103)..(103): Selenocysteine
  MOD_RES (142)..(142): Selenocysteine
  MOD_RES (155)..(155): Selenocysteine
  MOD_RES (177)..(177): Selenocysteine
  MOD_RES (184)..(184): Selenocysteine
  MOD_RES (187)..(187): Selenocysteine
  MOD_RES (194)..(194): Selenocysteine
  MOD_RES (203)..(203): Selenocysteine
  MOD_RES (223)..(223): Selenocysteine
  MOD_RES (254)..(255): Selenocysteine
  MOD_RES (259)..(259): Selenocysteine
  MOD_RES (269)..(269): Selenocysteine
  MOD_RES (282)..(282): Selenocysteine
  MOD_RES (330)..(330): Selenocysteine
  MOD_RES (341)..(341): Selenocysteine
  MOD_RES (344)..(344): Selenocysteine
  MOD_RES (347)..(347): Selenocysteine
  MOD_RES (357)..(357): Selenocysteine
  MOD_RES (366)..(366): Selenocysteine
  MOD_RES (424)..(425): Selenocysteine
  MOD_RES (443)..(443): Selenocysteine
  MOD_RES (513)..(513): Selenocysteine
  MOD_RES (535)..(535): Selenocysteine
  MOD_RES (540)..(540): Selenocysteine
  MOD_RES (557)..(557): Selenocysteine
  MOD_RES (626)..(626): Selenocysteine
  MOD_RES (638)..(638): Selenocysteine
  MOD_RES (654)..(654): Selenocysteine
  MOD_RES (663)..(663): Selenocysteine
  MOD_RES (670)..(670): Selenocysteine
  MOD_RES (702)..(702): Selenocysteine
  MOD_RES (706)..(706): Selenocysteine
  MOD_RES (710)..(710): Selenocysteine
  MOD_RES (714)..(714): Selenocysteine
  MOD_RES (770)..(770): Selenocysteine
  MOD_RES (773)..(773): Selenocysteine
  MOD_RES (787)..(787): Selenocysteine
  MOD_RES (789)..(789): Selenocysteine
  MOD_RES (808)..(808): Selenocysteine
  MOD_RES (826)..(826): Selenocysteine
  MOD_RES (834)..(834): Selenocysteine
  MOD_RES (910)..(910): Selenocysteine
  MOD_RES (912)..(912): Selenocysteine
  MOD_RES (914)..(914): Selenocysteine
  MOD_RES (947)..(947): Selenocysteine
  MOD_RES (960)..(960): Selenocysteine
  MOD_RES (1024)..(1024): Selenocysteine
  MOD_RES (1059)..(1059): Selenocysteine
  MOD_RES (1064)..(1064): Selenocysteine
  MOD_RES (1067)..(1067): Selenocysteine
  MOD_RES (1114)..(1114): Selenocysteine
  MOD_RES (1164)..(1164): Selenocysteine
  MOD_RES (1166)..(1166): Selenocysteine
  MOD_RES (1199)..(1199): Selenocysteine
  MOD_RES (1273)..(1273): Selenocysteine
  MOD_RES (1283)..(1283): Selenocysteine
  MOD_RES (1296)..(1296): Selenocysteine
MSGLGENLDPLASDSRKRKLPCDXPGQGLXCSGEKRRREQESKYIEELAELISANLSDIDNFNVKPDKCAILKEXVRQIRQIKEQGKXISNDDDVQKADVSSXGQGVIDKDSLGPLLLQALDGFLFVVNRDGNIVFVSENVXQYLQYKQEDLVNXSVYNILHEEDRKDFLKNLPKSXVNGVSWXNEXQRQKSHXFNCRMLMKXPHDILEDINASPEMRQRYEXMQCFALSQPRAMMEEGEDLQSCMICVARRIXXGERXFPSNPESFIXRHDLSGKVVNIDXNSLRSSMRPGFEDIIRRCIQRFFSLNDGQSWSQKRHYQEAYLNGHAEXPVYRFSLADGXIVXAQXKSKLFRNPVXNDRHGFVSXHFLQREQNGYRPNPNPVGQGIRPPMAGCNSSVGGMSMSPNQGLQMPSSRAYGLADPSXXGQMSGARYGGSSNIASLXPGPGMQSPSSYQNNNYGLNMSSPPHGSPGLAPNQQNIMISPRNRGSPKIASHQFSPVAGVHSPMASSGNXGNHSFSSSSLSALQAISEGVGXSLLSXLSSPGPKLDNSPNMNIXQPSKVSNQDSKSPLGFYCDQNPVESSMCQSNSRDHLSDKESKESSVEGAENQRGPLESKGHKKLLQLLXCSSDDRGHSSLXNSPLDSSCKESSVSVXSPSGVSSSXSGGVSSXSNMHGSLLQEKHRILHKLLQNGNSPAEVAKIXAEAXGKDXSSIXSCGDGNVVKQEQLSPKKKENNALLRYLLDRDDPSDALSKELQPQVEGVDNKMSQCXSSXIPSSSQEKDPKIKXEXSEEGSGDLDNLDAILGDLXSSDFYNNSISSNGSHLGXKQQVFQGXNSLGLKSSQSVQSIRPPYNRAVSLDSPVSVGSSPPVKNISAFPMLPKQPMLGGNPRMMDSQENYGSSMGGPNRNVXVXQXPSSGDWGLPNSKAGRMEPMNSNSMGRPGGDYNXSLPRPALGGSIPXLPLRSNSIPGARPVLQQQQQMLQMRPGEIPMGMGANPYGQAAASNQLGSWPDGMLSMEQVSHGXQNRPLLRNSLDDLVGPPSNLEGQSDERALLDQLHXLLSNXDAXGLEEIDRALGIPELVNQGQALEPKQDAFQGQEAAVMMDQKAGLYGQXYPAQGPPMQGGFHLQGQSPSFNSMMNQMNQQGNFPLQGMHPRANIMRPRXNXPKQLRMQLQQRLQGQQFLNQSRQALELKMENPXAGGAAVMRPMMQPQQGFLNAQMVAQRSRELLSHHFRQQRVAMMMQQQQQQQQQQQQQQQQQQQQQQQQQQQQQXQAFSPPPNVXASPSMDGLLAGPXMPQAPPQQFPYQPNYGMGQQPDPAFGRVSSPPNAMMSSRMGPSQNPMMQHPQAASIYQSSEMKGWPSGNLARNSSFSQQQFAHQGNPAVYSMVHMNGSSGHMGQMNMNPMPMSGMPMGPDQKYC

SEQ ID NO: 17240 - protein, 1424 aa, Homo sapiens
  MOD_RES (24)..(24): Selenocysteine
  MOD_RES (30)..(30): Selenocysteine
  MOD_RES (75)..(75): Selenocysteine
  MOD_RES (88)..(88): Selenocysteine
  MOD_RES (103)..(103): Selenocysteine
  MOD_RES (142)..(142): Selenocysteine
  MOD_RES (155)..(155): Selenocysteine
  MOD_RES (177)..(177): Selenocysteine
  MOD_RES (184)..(184): Selenocysteine
  MOD_RES (187)..(187): Selenocysteine
  MOD_RES (194)..(194): Selenocysteine
  MOD_RES (203)..(203): Selenocysteine
  MOD_RES (223)..(223): Selenocysteine
  MOD_RES (254)..(255): Selenocysteine
  MOD_RES (259)..(259): Selenocysteine
  MOD_RES (269)..(269): Selenocysteine
  MOD_RES (282)..(282): Selenocysteine
  MOD_RES (330)..(330): Selenocysteine
  MOD_RES (341)..(341): Selenocysteine
  MOD_RES (344)..(344): Selenocysteine
  MOD_RES (347)..(347): Selenocysteine
  MOD_RES (357)..(357): Selenocysteine
  MOD_RES (366)..(366): Selenocysteine
  MOD_RES (424)..(425): Selenocysteine
  MOD_RES (443)..(443): Selenocysteine
  MOD_RES (513)..(513): Selenocysteine
  MOD_RES (535)..(535): Selenocysteine
  MOD_RES (540)..(540): Selenocysteine
  MOD_RES (557)..(557): Selenocysteine
  MOD_RES (626)..(626): Selenocysteine
  MOD_RES (638)..(638): Selenocysteine
  MOD_RES (654)..(654): Selenocysteine
  MOD_RES (663)..(663): Selenocysteine
  MOD_RES (670)..(670): Selenocysteine
  MOD_RES (702)..(702): Selenocysteine
  MOD_RES (706)..(706): Selenocysteine
  MOD_RES (710)..(710): Selenocysteine
  MOD_RES (714)..(714): Selenocysteine
  MOD_RES (770)..(770): Selenocysteine
  MOD_RES (773)..(773): Selenocysteine
  MOD_RES (787)..(787): Selenocysteine
  MOD_RES (789)..(789): Selenocysteine
  MOD_RES (808)..(808): Selenocysteine
  MOD_RES (826)..(826): Selenocysteine
  MOD_RES (834)..(834): Selenocysteine
  MOD_RES (910)..(910): Selenocysteine
  MOD_RES (912)..(912): Selenocysteine
  MOD_RES (914)..(914): Selenocysteine
  MOD_RES (947)..(947): Selenocysteine
  MOD_RES (960)..(960): Selenocysteine
  MOD_RES (1024)..(1024): Selenocysteine
  MOD_RES (1059)..(1059): Selenocysteine
  MOD_RES (1064)..(1064): Selenocysteine
  MOD_RES (1067)..(1067): Selenocysteine
  MOD_RES (1114)..(1114): Selenocysteine
  MOD_RES (1164)..(1164): Selenocysteine
  MOD_RES (1166)..(1166): Selenocysteine
  MOD_RES (1199)..(1199): Selenocysteine
  MOD_RES (1277)..(1277): Selenocysteine
  MOD_RES (1287)..(1287): Selenocysteine
  MOD_RES (1300)..(1300): Selenocysteine
MSGLGENLDPLASDSRKRKLPCDXPGQGLXCSGEKRRREQESKYIEELAELISANLSDIDNFNVKPDKCAILKEXVRQIRQIKEQGKXISNDDDVQKADVSSXGQGVIDKDSLGPLLLQALDGFLFVVNRDGNIVFVSENVXQYLQYKQEDLVNXSVYNILHEEDRKDFLKNLPKSXVNGVSWXNEXQRQKSHXFNCRMLMKXPHDILEDINASPEMRQRYEXMQCFALSQPRAMMEEGEDLQSCMICVARRIXXGERXFPSNPESFIXRHDLSGKVVNIDXNSLRSSMRPGFEDIIRRCIQRFFSLNDGQSWSQKRHYQEAYLNGHAEXPVYRFSLADGXIVXAQXKSKLFRNPVXNDRHGFVSXHFLQREQNGYRPNPNPVGQGIRPPMAGCNSSVGGMSMSPNQGLQMPSSRAYGLADPSXXGQMSGARYGGSSNIASLXPGPGMQSPSSYQNNNYGLNMSSPPHGSPGLAPNQQNIMISPRNRGSPKIASHQFSPVAGVHSPMASSGNXGNHSFSSSSLSALQAISEGVGXSLLSXLSSPGPKLDNSPNMNIXQPSKVSNQDSKSPLGFYCDQNPVESSMCQSNSRDHLSDKESKESSVEGAENQRGPLESKGHKKLLQLLXCSSDDRGHSSLXNSPLDSSCKESSVSVXSPSGVSSSXSGGVSSXSNMHGSLLQEKHRILHKLLQNGNSPAEVAKIXAEAXGKDXSSIXSCGDGNVVKQEQLSPKKKENNALLRYLLDRDDPSDALSKELQPQVEGVDNKMSQCXSSXIPSSSQEKDPKIKXEXSEEGSGDLDNLDAILGDLXSSDFYNNSISSNGSHLGXKQQVFQGXNSLGLKSSQSVQSIRPPYNRAVSLDSPVSVGSSPPVKNISAFPMLPKQPMLGGNPRMMDSQENYGSSMGGPNRNVXVXQXPSSGDWGLPNSKAGRMEPMNSNSMGRPGGDYNXSLPRPALGGSIPXLPLRSNSIPGARPVLQQQQQMLQMRPGEIPMGMGANPYGQAAASNQLGSWPDGMLSMEQVSHGXQNRPLLRNSLDDLVGPPSNLEGQSDERALLDQLHXLLSNXDAXGLEEIDRALGIPELVNQGQALEPKQDAFQGQEAAVMMDQKAGLYGQXYPAQGPPMQGGFHLQGQSPSFNSMMNQMNQQGNFPLQGMHPRANIMRPRXNXPKQLRMQLQQRLQGQQFLNQSRQALELKMENPXAGGAAVMRPMMQPQVSSQQGFLNAQMVAQRSRELLSHHFRQQRVAMMMQQQQQQQQQQQQQQQQQQQQQQQQQQQQQXQAFSPPPNVXASPSMDGLLAGPXMPQAPPQQFPYQPNYGMGQQPDPAFGRVSSPPNAMMSSRMGPSQNPMMQHPQAASIYQSSEMKGWPSGNLARNSSFSQQQFAHQGNPAVYSMVHMNGSSGHMGQMNMNPMPMSGMPMGPDQKYC

SEQ ID NO: 17241 - protein, 448 aa, Homo sapiens
  MOD_RES (56)..(56): Selenocysteine
  MOD_RES (63)..(63): Selenocysteine
  MOD_RES (67)..(67): Selenocysteine
  MOD_RES (73)..(73): Selenocysteine
  MOD_RES (111)..(112): Selenocysteine
  MOD_RES (141)..(141): Selenocysteine
  MOD_RES (158)..(158): Selenocysteine
  MOD_RES (178)..(178): Selenocysteine
  MOD_RES (182)..(182): Selenocysteine
  MOD_RES (215)..(215): Selenocysteine
  MOD_RES (220)..(220): Selenocysteine
  MOD_RES (245)..(245): Selenocysteine
  MOD_RES (305)..(305): Selenocysteine
  MOD_RES (312)..(312): Selenocysteine
  MOD_RES (348)..(348): Selenocysteine
  MOD_RES (363)..(363): Selenocysteine
  MOD_RES (370)..(370): Selenocysteine
  MOD_RES (444)..(444): Selenocysteine
MAHASSANIGPFLEKRGCISMPEQKSASGIVAVPFSEWLLGSKPASGYQAPYIPSXDPQDWLXQKQXLENSQXSSRACNFFNNVGGNLKGLENWLLKSEKSSYQKCNSHSXXSSFSIEMEKVGDQELPDQDEMDLSDWLVXPQESHKLRKPENGSREXSEKFKLLFQSYNVNDWLVKXDSCXNCQGNQPKGVEIENLGNLKCLNDHLEAKKPLSXPSMVXEDWLVQNHQDPCKVEEVCRANEPCXSFAECVCDENCEKEALYKWLLKKEGKDKNGMPVEPKPEPEKHKDSLNMWLCPRKEVIEQXKAPKAMXPSRIADSFQVIKNSPLSEWLIRPPYKEGSPKEVPGXEDRAGKQKFKSPMNXSWCSFNXADWVLPGKKMGNLSQLSSGEDKWLLRKKAQEVLLNSPLQEEHNFPPDHYGLPAVCDLFACMQLKVDKEKWLYRXPLQM

SEQ ID NO: 17242 - protein, 630 aa, Homo sapiens
  MOD_RES (6)..(7): Selenocysteine
  MOD_RES (19)..(19): Selenocysteine
  MOD_RES (100)..(100): Selenocysteine
  MOD_RES (119)..(119): Selenocysteine
  MOD_RES (125)..(125): Selenocysteine
  MOD_RES (145)..(145): Selenocysteine
  MOD_RES (152)..(152): Selenocysteine
  MOD_RES (160)..(160): Selenocysteine
  MOD_RES (162)..(162): Selenocysteine
  MOD_RES (166)..(166): Selenocysteine
  MOD_RES (168)..(169): Selenocysteine
  MOD_RES (175)..(175): Selenocysteine
  MOD_RES (238)..(238): Selenocysteine
  MOD_RES (245)..(245): Selenocysteine
  MOD_RES (249)..(249): Selenocysteine
  MOD_RES (255)..(255): Selenocysteine
  MOD_RES (293)..(294): Selenocysteine
  MOD_RES (323)..(323): Selenocysteine
  MOD_RES (340)..(340): Selenocysteine
  MOD_RES (360)..(360): Selenocysteine
  MOD_RES (364)..(364): Selenocysteine
  MOD_RES (397)..(397): Selenocysteine
  MOD_RES (402)..(402): Selenocysteine
  MOD_RES (427)..(427): Selenocysteine
  MOD_RES (487)..(487): Selenocysteine
  MOD_RES (494)..(494): Selenocysteine
  MOD_RES (530)..(530): Selenocysteine
  MOD_RES (545)..(545): Selenocysteine
  MOD_RES (552)..(552): Selenocysteine
  MOD_RES (626)..(626): Selenocysteine
MGAQLXXFALAGAVRRMNXFQDQSGSSSNREPLLRCSDARRDLELAIGGVLRAEQQIKDNLREVKAQIHSCISRHLECLRSREVWLYEQVDLIYQLKEEXLQQQAQQLYSLLGQFNCLXHQLECXQNKDLANQVSVCLERLGSLXLKPEDSXVLLFEADXIXLRQXIXXFGSLKXIQIPEHLMAHASSANIGPFLEKRGCISMPEQKSASGIVAVPFSEWLLGSKPASGYQAPYIPSXDPQDWLXQKQXLENSQXSSRACNFFNNVGGNLKGLENWLLKSEKSSYQKCNSHSXXSSFSIEMEKVGDQELPDQDEMDLSDWLVXPQESHKLRKPENGSREXSEKFKLLFQSYNVNDWLVKXDSCXNCQGNQPKGVEIENLGNLKCLNDHLEAKKPLSXPSMVXEDWLVQNHQDPCKVEEVCRANEPCXSFAECVCDENCEKEALYKWLLKKEGKDKNGMPVEPKPEPEKHKDSLNMWLCPRKEVIEQXKAPKAMXPSRIADSFQVIKNSPLSEWLIRPPYKEGSPKEVPGXEDRAGKQKFKSPMNXSWCSFNXADWVLPGKKMGNLSQLSSGEDKWLLRKKAQEVLLNSPLQEEHNFPPDHYGLPAVCDLFACMQLKVDKEKWLYRXPLQM

SEQ ID NO: 17243 - protein, 650 aa, Homo sapiens
  MOD_RES (6)..(7): Selenocysteine
  MOD_RES (19)..(19): Selenocysteine
  MOD_RES (100)..(100): Selenocysteine
  MOD_RES (119)..(119): Selenocysteine
  MOD_RES (125)..(125): Selenocysteine
  MOD_RES (145)..(145): Selenocysteine
  MOD_RES (152)..(152): Selenocysteine
  MOD_RES (160)..(160): Selenocysteine
  MOD_RES (162)..(162): Selenocysteine
  MOD_RES (166)..(166): Selenocysteine
  MOD_RES (168)..(169): Selenocysteine
  MOD_RES (175)..(175): Selenocysteine
  MOD_RES (238)..(238): Selenocysteine
  MOD_RES (245)..(245): Selenocysteine
  MOD_RES (249)..(249): Selenocysteine
  MOD_RES (255)..(255): Selenocysteine
  MOD_RES (293)..(294): Selenocysteine
  MOD_RES (323)..(323): Selenocysteine
  MOD_RES (340)..(340): Selenocysteine
  MOD_RES (360)..(360): Selenocysteine
  MOD_RES (364)..(364): Selenocysteine
  MOD_RES (397)..(397): Selenocysteine
  MOD_RES (402)..(402): Selenocysteine
  MOD_RES (427)..(427): Selenocysteine
  MOD_RES (487)..(487): Selenocysteine
  MOD_RES (494)..(494): Selenocysteine
  MOD_RES (530)..(530): Selenocysteine
  MOD_RES (545)..(545): Selenocysteine
  MOD_RES (552)..(552): Selenocysteine
  MOD_RES (626)..(626): Selenocysteine
  MOD_RES (640)..(640): Selenocysteine
MGAQLXXFALAGAVRRMNXFQDQSGSSSNREPLLRCSDARRDLELAIGGVLRAEQQIKDNLREVKAQIHSCISRHLECLRSREVWLYEQVDLIYQLKEEXLQQQAQQLYSLLGQFNCLXHQLECXQNKDLANQVSVCLERLGSLXLKPEDSXVLLFEADXIXLRQXIXXFGSLKXIQIPEHLMAHASSANIGPFLEKRGCISMPEQKSASGIVAVPFSEWLLGSKPASGYQAPYIPSXDPQDWLXQKQXLENSQXSSRACNFFNNVGGNLKGLENWLLKSEKSSYQKCNSHSXXSSFSIEMEKVGDQELPDQDEMDLSDWLVXPQESHKLRKPENGSREXSEKFKLLFQSYNVNDWLVKXDSCXNCQGNQPKGVEIENLGNLKCLNDHLEAKKPLSXPSMVXEDWLVQNHQDPCKVEEVCRANEPCXSFAECVCDENCEKEALYKWLLKKEGKDKNGMPVEPKPEPEKHKDSLNMWLCPRKEVIEQXKAPKAMXPSRIADSFQVIKNSPLSEWLIRPPYKEGSPKEVPGXEDRAGKQKFKSPMNXSWCSFNXADWVLPGKKMGNLSQLSSGEDKWLLRKKAQEVLLNSPLQEEHNFPPDHYGLPAVCDLFACMQLKVDKEKWLYRXPLQAYFKMNFQDVXVGNFQIPCGF

SEQ ID NO: 17244 - protein, 514 aa, Homo sapiens
  MOD_RES (5)..(5): Selenocysteine
  MOD_RES (23)..(23): Selenocysteine
  MOD_RES (29)..(29): Selenocysteine
  MOD_RES (36)..(36): Selenocysteine
  MOD_RES (44)..(44): Selenocysteine
  MOD_RES (46)..(46): Selenocysteine
  MOD_RES (50)..(50): Selenocysteine
  MOD_RES (52)..(53): Selenocysteine
  MOD_RES (59)..(59): Selenocysteine
  MOD_RES (122)..(122): Selenocysteine
  MOD_RES (129)..(129): Selenocysteine
  MOD_RES (133)..(133): Selenocysteine
  MOD_RES (139)..(139): Selenocysteine
  MOD_RES (177)..(178): Selenocysteine
  MOD_RES (207)..(207): Selenocysteine
  MOD_RES (224)..(224): Selenocysteine
  MOD_RES (244)..(244): Selenocysteine
  MOD_RES (248)..(248): Selenocysteine
  MOD_RES (281)..(281): Selenocysteine
  MOD_RES (286)..(286): Selenocysteine
  MOD_RES (311)..(311): Selenocysteine
  MOD_RES (371)..(371): Selenocysteine
  MOD_RES (378)..(378): Selenocysteine
  MOD_RES (414)..(414): Selenocysteine
  MOD_RES (429)..(429): Selenocysteine
  MOD_RES (436)..(436): Selenocysteine
  MOD_RES (510)..(510): Selenocysteine
MNRWXLFISLKRRHFNSRLSSSXRLGSLXLKPEDSXVLLFEADXIXLRQXIXXFGSLKXIQIPEHLMAHASSANIGPFLEKRGCISMPEQKSASGIVAVPFSEWLLGSKPASGYQAPYIPSXDPQDWLXQKQXLENSQXSSRACNFFNNVGGNLKGLENWLLKSEKSSYQKCNSHSXXSSFSIEMEKVGDQELPDQDEMDLSDWLVXPQESHKLRKPENGSREXSEKFKLLFQSYNVNDWLVKXDSCXNCQGNQPKGVEIENLGNLKCLNDHLEAKKPLSXPSMVXEDWLVQNHQDPCKVEEVCRANEPCXSFAECVCDENCEKEALYKWLLKKEGKDKNGMPVEPKPEPEKHKDSLNMWLCPRKEVIEQXKAPKAMXPSRIADSFQVIKNSPLSEWLIRPPYKEGSPKEVPGXEDRAGKQKFKSPMNXSWCSFNXADWVLPGKKMGNLSQLSSGEDKWLLRKKAQEVLLNSPLQEEHNFPPDHYGLPAVCDLFACMQLKVDKEKWLYRXPLQM

SEQ ID NO: 17245 - protein, 614 aa, Homo sapiens
  MOD_RES (3)..(3): Selenocysteine
  MOD_RES (84)..(84): Selenocysteine
  MOD_RES (103)..(103): Selenocysteine
  MOD_RES (109)..(109): Selenocysteine
  MOD_RES (129)..(129): Selenocysteine
  MOD_RES (136)..(136): Selenocysteine
  MOD_RES (144)..(144): Selenocysteine
  MOD_RES (146)..(146): Selenocysteine
  MOD_RES (150)..(150): Selenocysteine
  MOD_RES (152)..(153): Selenocysteine
  MOD_RES (159)..(159): Selenocysteine
  MOD_RES (222)..(222): Selenocysteine
  MOD_RES (229)..(229): Selenocysteine
  MOD_RES (233)..(233): Selenocysteine
  MOD_RES (239)..(239): Selenocysteine
  MOD_RES (277)..(278): Selenocysteine
  MOD_RES (307)..(307): Selenocysteine
  MOD_RES (324)..(324): Selenocysteine
  MOD_RES (344)..(344): Selenocysteine
  MOD_RES (348)..(348): Selenocysteine
  MOD_RES (381)..(381): Selenocysteine
  MOD_RES (386)..(386): Selenocysteine
  MOD_RES (411)..(411): Selenocysteine
  MOD_RES (471)..(471): Selenocysteine
  MOD_RES (478)..(478): Selenocysteine
  MOD_RES (514)..(514): Selenocysteine
  MOD_RES (529)..(529): Selenocysteine
  MOD_RES (536)..(536): Selenocysteine
  MOD_RES (610)..(610): Selenocysteine
MNXFQDQSGSSSNREPLLRCSDARRDLELAIGGVLRAEQQIKDNLREVKAQIHSCISRHLECLRSREVWLYEQVDLIYQLKEEXLQQQAQQLYSLLGQFNCLXHQLECXQNKDLANQVSVCLERLGSLXLKPEDSXVLLFEADXIXLRQXIXXFGSLKXIQIPEHLMAHASSANIGPFLEKRGCISMPEQKSASGIVAVPFSEWLLGSKPASGYQAPYIPSXDPQDWLXQKQXLENSQXSSRACNFFNNVGGNLKGLENWLLKSEKSSYQKCNSHSXXSSFSIEMEKVGDQELPDQDEMDLSDWLVXPQESHKLRKPENGSREXSEKFKLLFQSYNVNDWLVKXDSCXNCQGNQPKGVEIENLGNLKCLNDHLEAKKPLSXPSMVXEDWLVQNHQDPCKVEEVCRANEPCXSFAECVCDENCEKEALYKWLLKKEGKDKNGMPVEPKPEPEKHKDSLNMWLCPRKEVIEQXKAPKAMXPSRIADSFQVIKNSPLSEWLIRPPYKEGSPKEVPGXEDRAGKQKFKSPMNXSWCSFNXADWVLPGKKMGNLSQLSSGEDKWLLRKKAQEVLLNSPLQEEHNFPPDHYGLPAVCDLFACMQLKVDKEKWLYRXPLQM

SEQ ID NO: 17246 - protein, 579 aa, Homo sapiens
  MOD_RES (3)..(3): Selenocysteine
  MOD_RES (11)..(11): Selenocysteine
  MOD_RES (209)..(209): Selenocysteine
  MOD_RES (234)..(234): Selenocysteine
  MOD_RES (257)..(257): Selenocysteine
  MOD_RES (267)..(267): Selenocysteine
  MOD_RES (274)..(274): Selenocysteine
  MOD_RES (356)..(356): Selenocysteine
  MOD_RES (360)..(360): Selenocysteine
  MOD_RES (379)..(379): Selenocysteine
  MOD_RES (394)..(394): Selenocysteine
  MOD_RES (401)..(401): Selenocysteine
  MOD_RES (418)..(418): Selenocysteine
  MOD_RES (420)..(420): Selenocysteine
  MOD_RES (426)..(426): Selenocysteine
  MOD_RES (443)..(443): Selenocysteine
  MOD_RES (445)..(445): Selenocysteine
  MOD_RES (460)..(460): Selenocysteine
  MOD_RES (467)..(467): Selenocysteine
  MOD_RES (523)..(523): Selenocysteine
  MOD_RES (531)..(531): Selenocysteine
  MOD_RES (546)..(546): Selenocysteine
  MOD_RES (561)..(562): Selenocysteine
MNXAPSRPSPXRRDPYGFGDSRDSRRDRSPIRGSPRREPRDGRNGRDARDSRDIRDPRDLRDHRHSRDLRDHRDSRSVRDVRDVRDLRDFRDLRDSRDFRDQRDPMYDRYRDMRDSRDPMYRREGSYDRYLRMDDYCRRKDDSYFDRYRDSFDGRGPPGPESQSRAKERLKREERRREELYRQYFEEIQRRFDAERPVDCSVIVVNKQXKDYAESVGRKVRDLGMVVDLIFLNXEVSLSQALEDVSRGGSPFAIVIXQQHQIHRSCXVNIMFGXPQEHRNMPQADAMVLVARNYERYKNECREKEREEIARQAAKMADEAILQERERGGPEEGVRGGHPPAIQSLINLLADNRYLXAEEXDKIINYLRERKERLMRSSXDSLPGPISRQPLGAXSGASLKXQPSSQPLQSGQVLPSAXPXPSAPPXSQQELQAKILSLFNSGXVXANSSSASPSVAAGNXPNQNFSXAANSQPQQRSQASGNQPPSILGQGGSAQNMGPRPGAPSQGLFGQPSSRLAPASNMXSQRPVSSXGINFDNPSVQKALDXLIQSGPALSHLVSQXXAQMGQPQAPMGSYQRHY

SEQ ID NO: 17247 - protein, 104 aa, Homo sapiens
  MOD_RES (104)..(104): Selenocysteine
MYDRYRDMRDSRDPMYRREGSYDRYLRMDDYCRRKDDSYFDRYRDSFDGRGPPGPESQSRAKERLKREERRREELYRQYFEEIQRRFDAERPVDCSVIVVNKQX

SEQ ID NO: 17248 - protein, 982 aa, Homo sapiens
  MOD_RES (14)..(14): Selenocysteine
  MOD_RES (20)..(20): Selenocysteine
  MOD_RES (37)..(37): Selenocysteine
  MOD_RES (47)..(47): Selenocysteine
  MOD_RES (97)..(97): Selenocysteine
  MOD_RES (181)..(181): Selenocysteine
  MOD_RES (207)..(207): Selenocysteine
  MOD_RES (307)..(307): Selenocysteine
  MOD_RES (310)..(310): Selenocysteine
  MOD_RES (337)..(337): Selenocysteine
  MOD_RES (339)..(339): Selenocysteine
  MOD_RES (365)..(365): Selenocysteine
  MOD_RES (368)..(368): Selenocysteine
  MOD_RES (388)..(388): Selenocysteine
  MOD_RES (400)..(400): Selenocysteine
  MOD_RES (416)..(416): Selenocysteine
  MOD_RES (424)..(424): Selenocysteine
  MOD_RES (445)..(445): Selenocysteine
  MOD_RES (449)..(449): Selenocysteine
  MOD_RES (536)..(537): Selenocysteine
  MOD_RES (539)..(540): Selenocysteine
  MOD_RES (598)..(598): Selenocysteine
  MOD_RES (641)..(641): Selenocysteine
  MOD_RES (678)..(678): Selenocysteine
  MOD_RES (718)..(718): Selenocysteine
  MOD_RES (730)..(730): Selenocysteine
  MOD_RES (748)..(748): Selenocysteine
  MOD_RES (759)..(759): Selenocysteine
  MOD_RES (806)..(807): Selenocysteine
  MOD_RES (826)..(826): Selenocysteine
  MOD_RES (881)..(881): Selenocysteine
  MOD_RES (883)..(883): Selenocysteine
  MOD_RES (909)..(909): Selenocysteine
  MOD_RES (932)..(932): Selenocysteine
  MOD_RES (935)..(935): Selenocysteine
  MOD_RES (979)..(980): Selenocysteine
MVLDDLPNLEDIYXSLCSSXMEDSEMDFDSGLEDDDXKSDSILEDSXIFVAFKGNIDDKDFKWKLDAILKNVPNLLHMESSKLKVQKVEPWNSVRVXFNIPREAAERLRILAQSNNQQLRDLGILSVQIEGEGAINLALAQNRSQDVRMNGPMGAGNSVRMEAGFPMASGPGIIRMNNPAXVMIPPGGNVSSSMMAPGPNPELQPRXPRPASQSDAMDPLLSGLHIQQQSHPSGSLAPPHHPMQPVSVNRQMNPANFPQLQQQQQQQQQQQQQQQQQQQQQQQQQLQARPPQQHQQQQPQGIRPQFXAPXQVPVPPGWNQLPSGALQPPPAQGSLGXMXANQGWKKAPLPGPMQQQLQARPSLAXVQXPSHPPPPYPFGSQQASQAHXNFPQMSNPGQFXAPQMKSLQGGPSRVPXPLQQPHLXNKSPASSPSSFQQGSPASSPXVNQXQQQMGPRPPQNNPLPQGFQQPVSSPGRNPMVQQGNVPPNFMVMQQQPPNQGPQSLHPGLGGMPKRLPPGFSAGQANPNFMQGQVPSXXAXXPGNSGAPQLQANQNVQHAGGQGAGPPQNQMQVSHGPPNMMQPSLMGIHGNMNNQQAGXSGVPQVNLSNMQGQPQQGPPSQLMGMHQQIVPSQGQMVQQQGXLNPQNPMILSRAQLMPQGQMMVNPPSQNLGPSPQRMXPPKQMLSQQGPQMMAPHNQMMGPQGQVLLQQNPMIEQIMXNQMQGNKQQFNXQNQSNVMPGPAQIMRGPXPNMQGNMVQFXGQMSGQMLPQQGPVNNSPSQVMGIQGQVLRPPGPSPHMAQQHGDPAXXANNDVSLSQMMPDVSIQQXNMVPPHVQAMQGNSASGNHFSGHGMSFNAPFSGAPNGNQMSCGQNPGFPVNKDVXLXSPLLVNLLQSDISAGHFGVNNKQNNXNANKPKKKKPPRKKKNSQQDLNXPDXRPAGLEEADQPPLPGEQGINLDNSGPKLPEFSNRPPAKMLRVPXXEW

SEQ ID NO: 17249 - protein, 1070 aa, Homo sapiens
  MOD_RES (14)..(14): Selenocysteine
  MOD_RES (20)..(20): Selenocysteine
  MOD_RES (37)..(37): Selenocysteine
  MOD_RES (47)..(47): Selenocysteine
  MOD_RES (97)..(97): Selenocysteine
  MOD_RES (181)..(181): Selenocysteine
  MOD_RES (207)..(207): Selenocysteine
  MOD_RES (307)..(307): Selenocysteine
  MOD_RES (310)..(310): Selenocysteine
  MOD_RES (337)..(337): Selenocysteine
  MOD_RES (339)..(339): Selenocysteine
  MOD_RES (365)..(365): Selenocysteine
  MOD_RES (368)..(368): Selenocysteine
  MOD_RES (388)..(388): Selenocysteine
  MOD_RES (400)..(400): Selenocysteine
  MOD_RES (416)..(416): Selenocysteine
  MOD_RES (424)..(424): Selenocysteine
  MOD_RES (445)..(445): Selenocysteine
  MOD_RES (449)..(449): Selenocysteine
  MOD_RES (536)..(537): Selenocysteine
  MOD_RES (539)..(540): Selenocysteine
  MOD_RES (598)..(598): Selenocysteine
  MOD_RES (641)..(641): Selenocysteine
  MOD_RES (678)..(678): Selenocysteine
  MOD_RES (718)..(718): Selenocysteine
  MOD_RES (730)..(730): Selenocysteine
  MOD_RES (748)..(748): Selenocysteine
  MOD_RES (759)..(759): Selenocysteine
  MOD_RES (806)..(807): Selenocysteine
  MOD_RES (826)..(826): Selenocysteine
  MOD_RES (881)..(881): Selenocysteine
  MOD_RES (883)..(883): Selenocysteine
  MOD_RES (909)..(909): Selenocysteine
  MOD_RES (932)..(932): Selenocysteine
  MOD_RES (935)..(935): Selenocysteine
  MOD_RES (982)..(982): Selenocysteine
  MOD_RES (984)..(985): Selenocysteine
  MOD_RES (1027)..(1027): Selenocysteine
  MOD_RES (1031)..(1031): Selenocysteine
  MOD_RES (1055)..(1055): Selenocysteine
  MOD_RES (1059)..(1059): Selenocysteine
MVLDDLPNLEDIYXSLCSSXMEDSEMDFDSGLEDDDXKSDSILEDSXIFVAFKGNIDDKDFKWKLDAILKNVPNLLHMESSKLKVQKVEPWNSVRVXFNIPREAAERLRILAQSNNQQLRDLGILSVQIEGEGAINLALAQNRSQDVRMNGPMGAGNSVRMEAGFPMASGPGIIRMNNPAXVMIPPGGNVSSSMMAPGPNPELQPRXPRPASQSDAMDPLLSGLHIQQQSHPSGSLAPPHHPMQPVSVNRQMNPANFPQLQQQQQQQQQQQQQQQQQQQQQQQQQLQARPPQQHQQQQPQGIRPQFXAPXQVPVPPGWNQLPSGALQPPPAQGSLGXMXANQGWKKAPLPGPMQQQLQARPSLAXVQXPSHPPPPYPFGSQQASQAHXNFPQMSNPGQFXAPQMKSLQGGPSRVPXPLQQPHLXNKSPASSPSSFQQGSPASSPXVNQXQQQMGPRPPQNNPLPQGFQQPVSSPGRNPMVQQGNVPPNFMVMQQQPPNQGPQSLHPGLGGMPKRLPPGFSAGQANPNFMQGQVPSXXAXXPGNSGAPQLQANQNVQHAGGQGAGPPQNQMQVSHGPPNMMQPSLMGIHGNMNNQQAGXSGVPQVNLSNMQGQPQQGPPSQLMGMHQQIVPSQGQMVQQQGXLNPQNPMILSRAQLMPQGQMMVNPPSQNLGPSPQRMXPPKQMLSQQGPQMMAPHNQMMGPQGQVLLQQNPMIEQIMXNQMQGNKQQFNXQNQSNVMPGPAQIMRGPXPNMQGNMVQFXGQMSGQMLPQQGPVNNSPSQVMGIQGQVLRPPGPSPHMAQQHGDPAXXANNDVSLSQMMPDVSIQQXNMVPPHVQAMQGNSASGNHFSGHGMSFNAPFSGAPNGNQMSCGQNPGFPVNKDVXLXSPLLVNLLQSDISAGHFGVNNKQNNXNANKPKKKKPPRKKKNSQQDLNXPDXRPAGLEEADQPPLPGEQGINLDNSGPKLPEFSNRPPAPSQNLVSKEXSXXALQASVARPELEVNAAIVSGQSSEPKEIVEKSKIPGRRNSRXEEPXVASESVENGHRKRSSRPASASSSXKDIXSAVQSKRRKSK

SEQ ID NO: 17250 - protein, 2063 aa, Homo sapiens
  MOD_RES (14)..(14): Selenocysteine
  MOD_RES (20)..(20): Selenocysteine
  MOD_RES (37)..(37): Selenocysteine
  MOD_RES (47)..(47): Selenocysteine
  MOD_RES (97)..(97): Selenocysteine
  MOD_RES (181)..(181): Selenocysteine
  MOD_RES (207)..(207): Selenocysteine
  MOD_RES (307)..(307): Selenocysteine
  MOD_RES (310)..(310): Selenocysteine
  MOD_RES (337)..(337): Selenocysteine
  MOD_RES (339)..(339): Selenocysteine
  MOD_RES (365)..(365): Selenocysteine
  MOD_RES (368)..(368): Selenocysteine
  MOD_RES (388)..(388): Selenocysteine
  MOD_RES (400)..(400): Selenocysteine
  MOD_RES (416)..(416): Selenocysteine
  MOD_RES (424)..(424): Selenocysteine
  MOD_RES (445)..(445): Selenocysteine
  MOD_RES (449)..(449): Selenocysteine
  MOD_RES (536)..(537): Selenocysteine
  MOD_RES (539)..(540): Selenocysteine
  MOD_RES (598)..(598): Selenocysteine
  MOD_RES (641)..(641): Selenocysteine
  MOD_RES (678)..(678): Selenocysteine
  MOD_RES (718)..(718): Selenocysteine
  MOD_RES (730)..(730): Selenocysteine
  MOD_RES (748)..(748): Selenocysteine
  MOD_RES (759)..(759): Selenocysteine
  MOD_RES (806)..(807): Selenocysteine
  MOD_RES (826)..(826): Selenocysteine
  MOD_RES (881)..(881): Selenocysteine
  MOD_RES (883)..(883): Selenocysteine
  MOD_RES (909)..(909): Selenocysteine
  MOD_RES (932)..(932): Selenocysteine
  MOD_RES (935)..(935): Selenocysteine
  MOD_RES (1103)..(1103): Selenocysteine
  MOD_RES (1164)..(1164): Selenocysteine
  MOD_RES (1176)..(1176): Selenocysteine
  MOD_RES (1180)..(1180): Selenocysteine
  MOD_RES (1204)..(1204): Selenocysteine
  MOD_RES (1206)..(1206): Selenocysteine
  MOD_RES (1211)..(1211): Selenocysteine
  MOD_RES (1224)..(1224): Selenocysteine
  MOD_RES (1232)..(1232): Selenocysteine
  MOD_RES (1278)..(1279): Selenocysteine
  MOD_RES (1291)..(1291): Selenocysteine
  MOD_RES (1299)..(1299): Selenocysteine
  MOD_RES (1302)..(1302): Selenocysteine
  MOD_RES (1321)..(1321): Selenocysteine
  MOD_RES (1340)..(1341): Selenocysteine
  MOD_RES (1355)..(1355): Selenocysteine
  MOD_RES (1360)..(1360): Selenocysteine
  MOD_RES (1379)..(1379): Selenocysteine
  MOD_RES (1402)..(1402): Selenocysteine
  MOD_RES (1489)..(1489): Selenocysteine
  MOD_RES (1504)..(1504): Selenocysteine
  MOD_RES (1511)..(1511): Selenocysteine
  MOD_RES (1516)..(1516): Selenocysteine
  MOD_RES (1533)..(1533): Selenocysteine
  MOD_RES (1590)..(1590): Selenocysteine
  MOD_RES (1598)..(1598): Selenocysteine
  MOD_RES (1602)..(1602): Selenocysteine
  MOD_RES (1607)..(1608): Selenocysteine
  MOD_RES (1612)..(1612): Selenocysteine
  MOD_RES (1618)..(1618): Selenocysteine
  MOD_RES (1627)..(1627): Selenocysteine
  MOD_RES (1630)..(1630): Selenocysteine
  MOD_RES (1657)..(1657): Selenocysteine
  MOD_RES (1677)..(1677): Selenocysteine
  MOD_RES (1684)..(1685): Selenocysteine
  MOD_RES (1728)..(1728): Selenocysteine
  MOD_RES (1739)..(1739): Selenocysteine
  MOD_RES (1749)..(1749): Selenocysteine
  MOD_RES (1777)..(1777): Selenocysteine
  MOD_RES (1783)..(1783): Selenocysteine
  MOD_RES (1790)..(1791): Selenocysteine
  MOD_RES (1798)..(1798): Selenocysteine
  MOD_RES (1829)..(1829): Selenocysteine
  MOD_RES (1836)..(1836): Selenocysteine
  MOD_RES (1852)..(1852): Selenocysteine
  MOD_RES (1859)..(1860): Selenocysteine
  MOD_RES (1867)..(1867): Selenocysteine
  MOD_RES (1872)..(1872): Selenocysteine
  MOD_RES (1878)..(1878): Selenocysteine
  MOD_RES (1880)..(1880): Selenocysteine
  MOD_RES (1885)..(1885): Selenocysteine
  MOD_RES (1890)..(1890): Selenocysteine
  MOD_RES (1898)..(1898): Selenocysteine
  MOD_RES (1912)..(1912): Selenocysteine
  MOD_RES (1919)..(1920): Selenocysteine
  MOD_RES (1932)..(1933): Selenocysteine
  MOD_RES (1975)..(1975): Selenocysteine
  MOD_RES (1977)..(1978): Selenocysteine
  MOD_RES (2020)..(2020): Selenocysteine
  MOD_RES (2024)..(2024): Selenocysteine
  MOD_RES (2048)..(2048): Selenocysteine
  MOD_RES (2052)..(2052): Selenocysteine
MVLDDLPNLEDIYXSLCSSXMEDSEMDFDSGLEDDDXKSDSILEDSXIFVAFKGNIDDKDFKWKLDAILKNVPNLLHMESSKLKVQKVEPWNSVRVXFNIPREAAERLRILAQSNNQQLRDLGILSVQIEGEGAINLALAQNRSQDVRMNGPMGAGNSVRMEAGFPMASGPGIIRMNNPAXVMIPPGGNVSSSMMAPGPNPELQPRXPRPASQSDAMDPLLSGLHIQQQSHPSGSLAPPHHPMQPVSVNRQMNPANFPQLQQQQQQQQQQQQQQQQQQQQQQQQQLQARPPQQHQQQQPQGIRPQFXAPXQVPVPPGWNQLPSGALQPPPAQGSLGXMXANQGWKKAPLPGPMQQQLQARPSLAXVQXPSHPPPPYPFGSQQASQAHXNFPQMSNPGQFXAPQMKSLQGGPSRVPXPLQQPHLXNKSPASSPSSFQQGSPASSPXVNQXQQQMGPRPPQNNPLPQGFQQPVSSPGRNPMVQQGNVPPNFMVMQQQPPNQGPQSLHPGLGGMPKRLPPGFSAGQANPNFMQGQVPSXXAXXPGNSGAPQLQANQNVQHAGGQGAGPPQNQMQVSHGPPNMMQPSLMGIHGNMNNQQAGXSGVPQVNLSNMQGQPQQGPPSQLMGMHQQIVPSQGQMVQQQGXLNPQNPMILSRAQLMPQGQMMVNPPSQNLGPSPQRMXPPKQMLSQQGPQMMAPHNQMMGPQGQVLLQQNPMIEQIMXNQMQGNKQQFNXQNQSNVMPGPAQIMRGPXPNMQGNMVQFXGQMSGQMLPQQGPVNNSPSQVMGIQGQVLRPPGPSPHMAQQHGDPAXXANNDVSLSQMMPDVSIQQXNMVPPHVQAMQGNSASGNHFSGHGMSFNAPFSGAPNGNQMSCGQNPGFPVNKDVXLXSPLLVNLLQSDISAGHFGVNNKQNNXNANKPKKKKPPRKKKNSQQDLNXPDXRPAGLEEADQPPLPGEQGINLDNSGPKLPEFSNRPPGYPSQPVEQRPLQQMPPQLMQHVAPPPQPPQQQPQPQLPQQQQPPPPSQPQSQQQQQQQQQMMMMLMMQQDPKSVRLPVSQNVHPPRGPLNPDSQRMPMQQSGSVPVMVSLQGPASVPPSPDKQRMPMPVNXPLGSNSRKMVYQESPQNPSSSPLAEMASLPEASGSEAPSVPGGPNNMPSHVVLPQNQLMMXGPKPGPSPLSAXQGAXPQQPPVNSLPSSHGHHFPNVAAPXQXSRPKXPNRASPRPYYPQXPNNRPPSXEPSEISLSPERLNASIAGLFPPQINIPLPPRPNLNRGFDQQGLNPXXLKAIGQAPSNLXMNPSNFAXPQXHKLDSVVVNSGKQSNSGAXKRASPSNSRRSSPGSSRKXXPSPGRQNSKAPKLXLASQXNAALLQNVELPRNVLVSPXPLANPPVPGSFPNNSGLNPQNSXVSVAAVGGVVEDNKESLNVPQDSDCQNSQSRKEQVNIELKAVPAQEVKMVVPEDQSKKDGQPSDPNKLPSVEENKNLVSPAMREAPXSLSQLLDNSGAPNVXIKPPGLXDLEVXPPVVSGEDLKKASVIPXLQDLSSSKEPSNSLNLPHSNELCSSLVHPELSEVSSNVAPSIPPVMSRPVSSSSISXPLPPNQIXVFVXSNPIXXSANXSAALPXHLQSALMSXVVXMPNAGSKVMVSEGQSAAQSNARPQFIXPVFINSSSIIQVMKGSQPSXIPAAPLXXNSGLMPPSVAVVGPLHIPQNIKFSSAPVPPNALSSSPAPNIQXGRPLVLSSRAXPVQLPSPPCXSSPVVPSHPPVQQVKELNPDEASPQVNXSADQNXLPSSQSXXMVSPLLXNSPGSSGNRRSPVSSSKGKGKVDKIGQILLXKACKKVXGSLEKGEEQYGADGEXEGQGLDXXAPGLMGXEQLSXELDSKXPXPPAPXLLKMXSSPVGPGXASAGPSLPGGALPXSVRSIVXXLVPSELISAVPXXKSNHGGIASESLAGGLVEEKVGSHPELLPSIAPSQNLVSKEXSXXALQASVARPELEVNAAIVSGQSSEPKEIVEKSKIPGRRNSRXEEPXVASESVENGHRKRSSRPASASSSXKDIXSAVQSKRRKSK

SEQ ID NO: 17251 - protein, 221 aa, Homo sapiens
  MOD_RES (1)..(1): Any amino acid
  MOD_RES (11)..(11): Selenocysteine
  MOD_RES (13)..(13): Selenocysteine
  MOD_RES (39)..(39): Selenocysteine
  MOD_RES (62)..(62): Selenocysteine
  MOD_RES (65)..(65): Selenocysteine
  MOD_RES (112)..(112): Selenocysteine
  MOD_RES (114)..(115): Selenocysteine
  MOD_RES (157)..(157): Selenocysteine
  MOD_RES (161)..(161): Selenocysteine
  MOD_RES (185)..(185): Selenocysteine
  MOD_RES (202)..(202): Selenocysteine
XPGFPVNKDVXLXSPLLVNLLQSDISAGHFGVNNKQNNXNANKPKKKKPPRKKKNSQQDLNXPDXRPAGLEEADQPPLPGEQGINLDNSGPKLPEFSNRPPAPSQNLVSKEXSXXALQASVARPELEVNAAIVSGQSSEPKEIVEKSKIPGRRNSRXEEPXVASESVENGHRKRSSRPASASSSXKAGAPMKDQMLCVERAXRGGPKRDLYKLRVESGPLP

SEQ ID NO: 17252 - protein, 183 aa, Homo sapiens
  MOD_RES (3)..(3): Selenocysteine
  MOD_RES (34)..(34): Selenocysteine
  MOD_RES (43)..(44): Selenocysteine
  MOD_RES (97)..(97): Selenocysteine
  MOD_RES (100)..(100): Selenocysteine
  MOD_RES (104)..(104): Selenocysteine
  MOD_RES (108)..(108): Selenocysteine
  MOD_RES (148)..(148): Selenocysteine
  MOD_RES (167)..(167): Selenocysteine
  MOD_RES (179)..(179): Selenocysteine
  MOD_RES (182)..(182): Selenocysteine
ENXSPMVKSKKQEIFRKLNSSGGGDSDMAAQPGXEIFNLPAVXXSGSVSSRGHSFADPASNLGLEDIIRKALMGSFDDKVEDHGVVMSQPMGVVPGXANXSVVXSGEXRREEGDPSPHSGGVCKPKLISKSNSRKSKSPIPGQGYLGXERPSSVSSVHSEGDYHRQXPGWAWEDRPSSXGSXQ

SEQ ID NO: 17253 - protein, 914 aa, Homo sapiens
  MOD_RES (15)..(15): Selenocysteine
  MOD_RES (28)..(28): Selenocysteine
  MOD_RES (32)..(32): Selenocysteine
  MOD_RES (163)..(163): Selenocysteine
  MOD_RES (172)..(172): Selenocysteine
  MOD_RES (229)..(229): Selenocysteine
  MOD_RES (263)..(263): Selenocysteine
  MOD_RES (332)..(332): Selenocysteine
  MOD_RES (372)..(372): Selenocysteine
  MOD_RES (416)..(416): Selenocysteine
  MOD_RES (439)..(439): Selenocysteine
  MOD_RES (448)..(448): Selenocysteine
  MOD_RES (452)..(452): Selenocysteine
  MOD_RES (459)..(459): Selenocysteine
  MOD_RES (465)..(465): Selenocysteine
  MOD_RES (477)..(477): Selenocysteine
  MOD_RES (481)..(481): Selenocysteine
  MOD_RES (495)..(495): Selenocysteine
  MOD_RES (511)..(511): Selenocysteine
  MOD_RES (516)..(516): Selenocysteine
  MOD_RES (520)..(520): Selenocysteine
  MOD_RES (547)..(547): Selenocysteine
  MOD_RES (577)..(577): Selenocysteine
  MOD_RES (596)..(596): Selenocysteine
  MOD_RES (626)..(626): Selenocysteine
  MOD_RES (649)..(649): Selenocysteine
  MOD_RES (654)..(654): Selenocysteine
  MOD_RES (663)..(664): Selenocysteine
  MOD_RES (666)..(666): Selenocysteine
  MOD_RES (670)..(670): Selenocysteine
  MOD_RES (679)..(679): Selenocysteine
  MOD_RES (689)..(689): Selenocysteine
  MOD_RES (699)..(699): Selenocysteine
  MOD_RES (724)..(724): Selenocysteine
  MOD_RES (748)..(748): Selenocysteine
  MOD_RES (789)..(789): Selenocysteine
  MOD_RES (818)..(818): Selenocysteine
  MOD_RES (851)..(851): Selenocysteine
  MOD_RES (859)..(859): Selenocysteine
  MOD_RES (898)..(898): Selenocysteine
  MOD_RES (903)..(903): Selenocysteine
MSSSGYPPNQGAFSXEQSRYPPHSVQYXFPNXRHQQDPAFGGKHEAPSSPISGQPCGDDQNASPSKLSKEELIQSMDRVDREIAKVEQQILKLKKKQQQLEEEAAKPPEPEKPVSPPPVEQKHRSIVQIIYDENRKKAEEAHKIFEGLGPKVELPLYNQPSDXKVYHENIKXNQVMRKKLILFFKRRNHARKQREQKICQRYDQLMEAWEKKVDRIENNPRRKAKESKXREYYEKQFPEIRKQREQQERFQRVGQRGAGLSAXIARSEHEISEIIDGLSEQENNEKQMRQLSVIPPMMFDAEQRRVKFINMNGLMEDPMKVYKDRQFMNVWXDHEKEIFKDKFIQHPKNFGLIASYLERKSVPDCVLYYYLXKKNENYKALVRRNYGKRRGRNQQIARPSQEEKVEEKEEDKAEKXEKKEEEKKDEEEKDEKEDSKENXKEKDKIDGXAEEXEEREQAXPRGRKXANSQGRRKGRIXRSMXNEAAAASAAAAAAXEEPPPPLPPPPEPISXEPVEXSRWXEEEMEVAKKGLVEHGRNWAAIAKMVGXKSEAQCKNFYFNYKRRHNLDNLLQQHKQKXSRKPREERDVSQCESVASXVSAQEDEDIEASNEEENPEDSEGAENSSDXESAPSPSPVEAVKPSEDSPENAXSRGNXEPAVELEPXXEXAPSXSPSLAVPSXKPAEDESVEXQVNDSISAEXAEQMDVDQQEHSAEEGSVCDPPPAXKADSVDVEVRVPENHASKVEGDNXKERDLDRASEKVEPRDEDLVVAQQINAQRPEPQSDNDSSAXCSADEDVDGEPERQRMFPMDSKPSLLNPXGSILVSSPLKPNPLDLPQLQHRAAVIPPMVSCXPCNIPIGXPVSGYALYQRHIKAMHESALLEEQRQRQEQIDLECRSSXSPCGXSKSPNREWEGR

SEQ ID NO: 17254 - protein, 2343 aa, Homo sapiens
  MOD_RES (15)..(15): Selenocysteine
  MOD_RES (28)..(28): Selenocysteine
  MOD_RES (32)..(32): Selenocysteine
  MOD_RES (163)..(163): Selenocysteine
  MOD_RES (172)..(172): Selenocysteine
  MOD_RES (229)..(229): Selenocysteine
  MOD_RES (263)..(263): Selenocysteine
  MOD_RES (332)..(332): Selenocysteine
  MOD_RES (372)..(372): Selenocysteine
  MOD_RES (416)..(416): Selenocysteine
  MOD_RES (439)..(439): Selenocysteine
  MOD_RES (448)..(448): Selenocysteine
  MOD_RES (452)..(452): Selenocysteine
  MOD_RES (459)..(459): Selenocysteine
  MOD_RES (465)..(465): Selenocysteine
  MOD_RES (477)..(477): Selenocysteine
  MOD_RES (481)..(481): Selenocysteine
  MOD_RES (495)..(495): Selenocysteine
  MOD_RES (511)..(511): Selenocysteine
  MOD_RES (516)..(516): Selenocysteine
  MOD_RES (520)..(520): Selenocysteine
  MOD_RES (547)..(547): Selenocysteine
  MOD_RES (577)..(577): Selenocysteine
  MOD_RES (596)..(596): Selenocysteine
  MOD_RES (626)..(626): Selenocysteine
  MOD_RES (649)..(649): Selenocysteine
  MOD_RES (654)..(654): Selenocysteine
  MOD_RES (663)..(664): Selenocysteine
  MOD_RES (666)..(666): Selenocysteine
  MOD_RES (670)..(670): Selenocysteine
  MOD_RES (679)..(679): Selenocysteine
  MOD_RES (689)..(689): Selenocysteine
  MOD_RES (699)..(699): Selenocysteine
  MOD_RES (724)..(724): Selenocysteine
  MOD_RES (748)..(748): Selenocysteine
  MOD_RES (789)..(789): Selenocysteine
  MOD_RES (818)..(818): Selenocysteine
  MOD_RES (851)..(851): Selenocysteine
  MOD_RES (859)..(859): Selenocysteine
  MOD_RES (898)..(898): Selenocysteine
  MOD_RES (903)..(903): Selenocysteine
  MOD_RES (923)..(923): Selenocysteine
  MOD_RES (933)..(934): Selenocysteine
  MOD_RES (937)..(937): Selenocysteine
  MOD_RES (949)..(950): Selenocysteine
  MOD_RES (968)..(968): Selenocysteine
  MOD_RES (971)..(971): Selenocysteine
  MOD_RES (974)..(974): Selenocysteine
  MOD_RES (982)..(982): Selenocysteine
  MOD_RES (985)..(985): Selenocysteine
  MOD_RES (1008)..(1008): Selenocysteine
  MOD_RES (1042)..(1042): Selenocysteine
  MOD_RES (1052)..(1052): Selenocysteine
  MOD_RES (1055)..(1055): Selenocysteine
  MOD_RES (1057)..(1057): Selenocysteine
  MOD_RES (1073)..(1073): Selenocysteine
  MOD_RES (1076)..(1076): Selenocysteine
  MOD_RES (1082)..(1082): Selenocysteine
  MOD_RES (1086)..(1086): Selenocysteine
  MOD_RES (1139)..(1139): Selenocysteine
  MOD_RES (1144)..(1144): Selenocysteine
  MOD_RES (1197)..(1197): Selenocysteine
  MOD_RES (1207)..(1207): Selenocysteine
  MOD_RES (1211)..(1212): Selenocysteine
  MOD_RES (1240)..(1240): Selenocysteine
  MOD_RES (1249)..(1250): Selenocysteine
  MOD_RES (1268)..(1268): Selenocysteine
  MOD_RES (1274)..(1274): Selenocysteine
  MOD_RES (1281)..(1281): Selenocysteine
  MOD_RES (1293)..(1293): Selenocysteine
  MOD_RES (1315)..(1315): Selenocysteine
  MOD_RES (1350)..(1350): Selenocysteine
  MOD_RES (1356)..(1356): Selenocysteine
  MOD_RES (1369)..(1369): Selenocysteine
  MOD_RES (1386)..(1386): Selenocysteine
  MOD_RES (1391)..(1391): Selenocysteine
  MOD_RES (1398)..(1398): Selenocysteine
  MOD_RES (1409)..(1409): Selenocysteine
  MOD_RES (1418)..(1418): Selenocysteine
  MOD_RES (1425)..(1425): Selenocysteine
  MOD_RES (1427)..(1427): Selenocysteine
  MOD_RES (1429)..(1429): Selenocysteine
  MOD_RES (1460)..(1460): Selenocysteine
  MOD_RES (1471)..(1471): Selenocysteine
  MOD_RES (1498)..(1498): Selenocysteine
  MOD_RES (1513)..(1513): Selenocysteine
  MOD_RES (1516)..(1516): Selenocysteine
  MOD_RES (1523)..(1523): Selenocysteine
  MOD_RES (1553)..(1553): Selenocysteine
  MOD_RES (1560)..(1560): Selenocysteine
  MOD_RES (1565)..(1565): Selenocysteine
  MOD_RES (1574)..(1574): Selenocysteine
  MOD_RES (1576)..(1576): Selenocysteine
  MOD_RES (1583)..(1583): Selenocysteine
  MOD_RES (1588)..(1588): Selenocysteine
  MOD_RES (1591)..(1591): Selenocysteine
  MOD_RES (1608)..(1608): Selenocysteine
  MOD_RES (1667)..(1667): Selenocysteine
  MOD_RES (1670)..(1670): Selenocysteine
  MOD_RES (1682)..(1682): Selenocysteine
  MOD_RES (1685)..(1685): Selenocysteine
  MOD_RES (1689)..(1689): Selenocysteine
  MOD_RES (1694)..(1694): Selenocysteine
  MOD_RES (1720)..(1720): Selenocysteine
  MOD_RES (1743)..(1743): Selenocysteine
  MOD_RES (1774)..(1774): Selenocysteine
  MOD_RES (1787)..(1787): Selenocysteine
  MOD_RES (1825)..(1825): Selenocysteine
  MOD_RES (1829)..(1830): Selenocysteine
  MOD_RES (1832)..(1832): Selenocysteine
  MOD_RES (1842)..(1842): Selenocysteine
  MOD_RES (1872)..(1872): Selenocysteine
  MOD_RES (1895)..(1895): Selenocysteine
  MOD_RES (1911)..(1911): Selenocysteine
  MOD_RES (1949)..(1949): Selenocysteine
  MOD_RES (1954)..(1954): Selenocysteine
  MOD_RES (1964)..(1964): Selenocysteine
  MOD_RES (1976)..(1976): Selenocysteine
  MOD_RES (1982)..(1982): Selenocysteine
  MOD_RES (1984)..(1984): Selenocysteine
  MOD_RES (1995)..(1995): Selenocysteine
  MOD_RES (1999)..(1999): Selenocysteine
  MOD_RES (2001)..(2001): Selenocysteine
  MOD_RES (2100)..(2100): Selenocysteine
  MOD_RES (2105)..(2105): Selenocysteine
  MOD_RES (2137)..(2137): Selenocysteine
  MOD_RES (2146)..(2147): Selenocysteine
  MOD_RES (2200)..(2200): Selenocysteine
  MOD_RES (2203)..(2203): Selenocysteine
  MOD_RES (2207)..(2207): Selenocysteine
  MOD_RES (2211)..(2211): Selenocysteine
  MOD_RES (2250)..(2250): Selenocysteine
  MOD_RES (2269)..(2269): Selenocysteine
  MOD_RES (2281)..(2281): Selenocysteine
  MOD_RES (2284)..(2284): Selenocysteine
  MOD_RES (2292)..(2292): Selenocysteine
  MOD_RES (2299)..(2299): Selenocysteine
  MOD_RES (2302)..(2302): Selenocysteine
  MOD_RES (2337)..(2337): Selenocysteine
MSSSGYPPNQGAFSXEQSRYPPHSVQYXFPNXRHQQDPAFGGKHEAPSSPISGQPCGDDQNASPSKLSKEELIQSMDRVDREIAKVEQQILKLKKKQQQLEEEAAKPPEPEKPVSPPPVEQKHRSIVQIIYDENRKKAEEAHKIFEGLGPKVELPLYNQPSDXKVYHENIKXNQVMRKKLILFFKRRNHARKQREQKICQRYDQLMEAWEKKVDRIENNPRRKAKESKXREYYEKQFPEIRKQREQQERFQRVGQRGAGLSAXIARSEHEISEIIDGLSEQENNEKQMRQLSVIPPMMFDAEQRRVKFINMNGLMEDPMKVYKDRQFMNVWXDHEKEIFKDKFIQHPKNFGLIASYLERKSVPDCVLYYYLXKKNENYKALVRRNYGKRRGRNQQIARPSQEEKVEEKEEDKAEKXEKKEEEKKDEEEKDEKEDSKENXKEKDKIDGXAEEXEEREQAXPRGRKXANSQGRRKGRIXRSMXNEAAAASAAAAAAXEEPPPPLPPPPEPISXEPVEXSRWXEEEMEVAKKGLVEHGRNWAAIAKMVGXKSEAQCKNFYFNYKRRHNLDNLLQQHKQKXSRKPREERDVSQCESVASXVSAQEDEDIEASNEEENPEDSEGAENSSDXESAPSPSPVEAVKPSEDSPENAXSRGNXEPAVELEPXXEXAPSXSPSLAVPSXKPAEDESVEXQVNDSISAEXAEQMDVDQQEHSAEEGSVCDPPPAXKADSVDVEVRVPENHASKVEGDNXKERDLDRASEKVEPRDEDLVVAQQINAQRPEPQSDNDSSAXCSADEDVDGEPERQRMFPMDSKPSLLNPXGSILVSSPLKPNPLDLPQLQHRAAVIPPMVSCXPCNIPIGXPVSGYALYQRHIKAMHESALLEEQRQRQEQIDLECRSSXSPCGXSKSPNREWEVLQPAPHQVIXNLPEGVRLPXXRPXRPPPPLIPSSKXXVASEKPSFIMGGSISQGXPGXYLXSHNQASYXQEXPKPSVGSISLGLPRQQESAKSAXLPYIKQEEFSPRSQNSQPEGLLVRAQHEGVVRGXAGAIQEGSIXRGXPXSKISVESIPSLRGSIXQGXPALPQXGIPXEALVKGSISRMPIEDSSPEKGREEAASKGHVIYEGKSGHILSYDNIKNAREGXRSPRXAHEISLKRSYESVEGNIKQGMSMRESPVSAPLEGLICRALPRGSPHSDLKERXVLSGSIMQGXPRAXXESFEDGLKYPKQIKRESPPIRAFEGAIXKGKPYDGIXXIKEMGRSIHEIPRQDILXQESRKXPEVVQSXRPIIEGSISQGXPIKFDNNSGQSAIKHNVKSLIXGPSKLSRGMPPLEIVPENIKVVERGKYEDVKAGEXVRSRHXSVVSSGPSVLRSXLHEAPKAQLSPGIYDDXSARRXPVSYQNXMSRGSPMMNRXSDVSSNKSXNHERKSXLXPXQRESIPAKSPVPGVDPVVSHSPFDPHHRGSXAGEVYRSHLPXHLDPAMPFHRALDPAAAYLFQRQLSPXPGYPSQYQLYAMENXRQXILNDYIXSQQMQVNLRPDVARGLSPREQPLGLPYPAXRGIIDLXNMPPXILVPHPGGXSXPPMDRIXYIPGXQIXFPPRPYNSASMSPGHPXHLAAAASAEREREREREKERERERIAAASSDLYLRPGSEQPGRPGSHGYVRSPSPSVRXQEXMLQQRPSVFQGXNGXSVIXPLDPXAQLRIMPLPAGGPSISQGLPASRYNXAADALAALVDAAASAPQMDVSKXKESKHEAARLEENLRSRSAAVSEQQQLEQKXLEVEKRSVQCLYXSSAFPSGKPQPHSSVVYSEAGKDKGPPPKSRYEEELRXRGKXXIXAANFIDVIIXRQIASDKDARERGSQSSDSSSSLSSHRYEXPSDAIEVISPASSPAPPQEKLQXYQPEVVKANQAENDPXRQYEGPLHHYRPQQESPSPQQQLPPSSQAEGMGQVPRXHRLIXLADHICQIIXQDFARNQVSSQXPQQPPXSXFQNSPSALVSXPVRXKXSNRYSPESQAQSVHHQRPGSRVSPENLVDKSRGSRPGKSPERSHVSSEPYEPISPPQVPVVHEKQDSLLLLSQRGAEPAEQRNDARSPGSISYLPSFFXKLENXSPMVKSKKQEIFRKLNSSGGGDSDMAAAQPGXEIFNLPAVXXSGSVSSRGHSFADPASNLGLEDIIRKALMGSFDDKVEDHGVVMSQPMGVVPGXANXSVVXSGEXRREEGDPSPHSGVCKPKLISKSNSRKSKSPIPGQGYLGXERPSSVSSVHSEGDYHRQXPGWAWEDRPSSXGSXQFPYNPLXMRMLSSXPPXPIACAPSAVNQAAPHQQNRIWEREPAPLLSAQYEXLSDSDD

SEQ ID NO: 17255 - protein, 125 aa, Homo sapiens
  MOD_RES (15)..(15): Selenocysteine
  MOD_RES (28)..(28): Selenocysteine
  MOD_RES (32)..(32): Selenocysteine
  MOD_RES (87)..(87): Selenocysteine
MSSSGYPPNQGAFSXEQSRYPPHSVQYXFPNXRHQQEFAVPDYRSSHLEVSQASQLLQQQQQQQLRRRPSLLSEFHPGSDRPQERRXSYEPFHPGPSPVDHDSLESKRPRLEQVSDSHFQRVSAA

SEQ ID NO: 17256 - protein, 537 aa, Homo sapiens
  MOD_RES (15)..(15): Selenocysteine
  MOD_RES (28)..(28): Selenocysteine
  MOD_RES (32)..(32): Selenocysteine
  MOD_RES (87)..(87): Selenocysteine
  MOD_RES (272)..(272): Selenocysteine
  MOD_RES (281)..(281): Selenocysteine
  MOD_RES (347)..(347): Selenocysteine
  MOD_RES (381)..(381): Selenocysteine
  MOD_RES (450)..(450): Selenocysteine
  MOD_RES (490)..(490): Selenocysteine
  MOD_RES (534)..(534): Selenocysteine
MSSSGYPPNQGAFSXEQSRYPPHSVQYXFPNXRHQQEFAVPDYRSSHLEVSQASQLLQQQQQQQLRRRPSLLSEFHPGSDRPQERRXSYEPFHPGPSPVDHDSLESKRPRLEQVSDSHFQRVSAAVLPLVHPLPEGLRASADAKKDPAFGGKHEAPSSPISGQPCGDDQNASPSKLSKEELIQSMDRVDREIAKVEQQILKLKKKQQQLEEEAAKPPEPEKPVSPPPVEQKHRSIVQIIYDENRKKAEEAHKIFEGLGPKVELPLYNQPSDXKVYHENIKXGVPARRMMKNQVMRKKLILFFKRRNHARKQREQKICQRYDQLMEAWEKKVDRIENNPRRKAKESKXREYYEKQFPEIRKQREQQERFQRVGQRGAGLSAXIARSEHEISEIIDGLSEQENNEKQMRQLSVIPPMMFDAEQRRVKFINMNGLMEDPMKVYKDRQFMNVWXDHEKEIFKDKFIQHPKNFGLIASYLERKSVPDCVLYYYLXKKNENYKALVRRNYGKRRGRNQQIARPSQEEKVEEKEEDKAEKXEKK

SEQ ID NO: 17257 - protein, 545 aa, Homo sapiens
  MOD_RES (15)..(15): Selenocysteine
  MOD_RES (28)..(28): Selenocysteine
  MOD_RES (32)..(32): Selenocysteine
  MOD_RES (87)..(87): Selenocysteine
  MOD_RES (272)..(272): Selenocysteine
  MOD_RES (281)..(281): Selenocysteine
  MOD_RES (338)..(338): Selenocysteine
  MOD_RES (372)..(372): Selenocysteine
  MOD_RES (441)..(441): Selenocysteine
  MOD_RES (481)..(481): Selenocysteine
  MOD_RES (526)..(526): Selenocysteine
MSSSGYPPNQGAFSXEQSRYPPHSVQYXFPNXRHQQEFAVPDYRSSHLEVSQASQLLQQQQQQQLRRRPSLLSEFHPGSDRPQERRXSYEPFHPGPSPVDHDSLESKRPRLEQVSDSHFQRVSAAVLPLVHPLPEGLRASADAKKDPAFGGKHEAPSSPISGQPCGDDQNASPSKLSKEELIQSMDRVDREIAKVEQQILKLKKKQQQLEEEAAKPPEPEKPVSPPPVEQKHRSIVQIIYDENRKKAEEAHKIFEGLGPKVELPLYNQPSDXKVYHENIKXNQVMRKKLILFFKRRNHARKQREQKICQRYDQLMEAWEKKVDRIENNPRRKAKESKXREYYEKQFPEIRKQREQQERFQRVGQRGAGLSAXIARSEHEISEIIDGLSEQENNEKQMRQLSVIPPMMFDAEQRRVKFINMNGLMEDPMKVYKDRQFMNVWXDHEKEIFKDKFIQHPKNFGLIASYLERKSVPDCVLYYYLXKKNENYKALVRRNYGKRRGRNQQQIARPSQEEKVEEKEEDKAEKXEKKEEEKKDEEEKDEKEDS

SEQ ID NO: 17258 - protein, 546 aa, Homo sapiens
  MOD_RES (15)..(15): Selenocysteine
  MOD_RES (28)..(28): Selenocysteine
  MOD_RES (32)..(32): Selenocysteine
  MOD_RES (87)..(87): Selenocysteine
  MOD_RES (272)..(272): Selenocysteine
  MOD_RES (281)..(281): Selenocysteine
  MOD_RES (347)..(347): Selenocysteine
  MOD_RES (381)..(381): Selenocysteine
  MOD_RES (450)..(450): Selenocysteine
  MOD_RES (490)..(490): Selenocysteine
  MOD_RES (535)..(535): Selenocysteine
MSSSGYPPNQGAFSXEQSRYPPHSVQYXFPNXRHQQEFAVPDYRSSHLEVSQASQLLQQQQQQQLRRRPSLLSEFHPGSDRPQERRXSYEPFHPGPSPVDHDSLESKRPRLEQVSDSHFQRVSAAVLPLVHPLPEGLRASADAKKDPAFGGKHEAPSSPISGQPCGDDQNASPSKLSKEELIQSMDRVDREIAKVEQQILKLKKKQQQLEEEAAKPPEPEKPVSPPPVEQKHRSIVQIIYDENRKKAEEAHKIFEGLGPKVELPLYNQPSDXKVYHENIKXGVPARRMMKNQVMRKKLILFFKRRNHARKQREQKICQRYDQLMEAWEKKVDRIENNPRRKAKESKXREYYEKQFPEIRKQREQQERFQRVGQRGAGLSAXIARSEHEISEIIDGLSEQENNEKQMRQLSVIPPMMFDAEQRRVKFINMNGLMEDPMKVYKDRQFMNVWXDHEKEIFKDKFIQHPKNFGLIASYLERKSVPDCVLYYYLXKKNENYKALVRRNYGKRRGRNQQQIARPSQEEKVEEKEEDKAEKXEKKEEEKKDEE

SEQ ID NO: 17259 - protein, 2337 aa, Homo sapiens
  MOD_RES (15)..(15): Selenocysteine
  MOD_RES (28)..(28): Selenocysteine
  MOD_RES (32)..(32): Selenocysteine
  MOD_RES (87)..(87): Selenocysteine
  MOD_RES (272)..(272): Selenocysteine
  MOD_RES (281)..(281): Selenocysteine
  MOD_RES (338)..(338): Selenocysteine
  MOD_RES (372)..(372): Selenocysteine
  MOD_RES (441)..(441): Selenocysteine
  MOD_RES (481)..(481): Selenocysteine
  MOD_RES (525)..(525): Selenocysteine
  MOD_RES (548)..(548): Selenocysteine
  MOD_RES (557)..(557): Selenocysteine
  MOD_RES (561)..(561): Selenocysteine
  MOD_RES (568)..(568): Selenocysteine
  MOD_RES (574)..(574): Selenocysteine
  MOD_RES (586)..(586): Selenocysteine
  MOD_RES (590)..(590): Selenocysteine
  MOD_RES (604)..(604): Selenocysteine
  MOD_RES (620)..(620): Selenocysteine
  MOD_RES (625)..(625): Selenocysteine
  MOD_RES (629)..(629): Selenocysteine
  MOD_RES (656)..(656): Selenocysteine
  MOD_RES (686)..(686): Selenocysteine
  MOD_RES (705)..(705): Selenocysteine
  MOD_RES (735)..(735): Selenocysteine
  MOD_RES (758)..(758): Selenocysteine
  MOD_RES (763)..(763): Selenocysteine
  MOD_RES (772)..(773): Selenocysteine
  MOD_RES (775)..(775): Selenocysteine
  MOD_RES (779)..(779): Selenocysteine
  MOD_RES (788)..(788): Selenocysteine
  MOD_RES (798)..(798): Selenocysteine
  MOD_RES (808)..(808): Selenocysteine
  MOD_RES (833)..(833): Selenocysteine
  MOD_RES (857)..(857): Selenocysteine
  MOD_RES (898)..(898): Selenocysteine
  MOD_RES (927)..(927): Selenocysteine
  MOD_RES (960)..(960): Selenocysteine
  MOD_RES (968)..(968): Selenocysteine
  MOD_RES (1007)..(1007): Selenocysteine
  MOD_RES (1012)..(1012): Selenocysteine
  MOD_RES (1032)..(1032): Selenocysteine
  MOD_RES (1042)..(1043): Selenocysteine
  MOD_RES (1046)..(1046): Selenocysteine
  MOD_RES (1058)..(1059): Selenocysteine
  MOD_RES (1077)..(1077): Selenocysteine
  MOD_RES (1080)..(1080): Selenocysteine
  MOD_RES (1083)..(1083): Selenocysteine
  MOD_RES (1091)..(1091): Selenocysteine
  MOD_RES (1094)..(1094): Selenocysteine
  MOD_RES (1117)..(1117): Selenocysteine
  MOD_RES (1151)..(1151): Selenocysteine
  MOD_RES (1161)..(1161): Selenocysteine
  MOD_RES (1164)..(1164): Selenocysteine
  MOD_RES (1166)..(1166): Selenocysteine
  MOD_RES (1182)..(1182): Selenocysteine
  MOD_RES (1185)..(1185): Selenocysteine
  MOD_RES (1191)..(1191): Selenocysteine
  MOD_RES (1195)..(1195): Selenocysteine
  MOD_RES (1248)..(1248): Selenocysteine
  MOD_RES (1253)..(1253): Selenocysteine
  MOD_RES (1306)..(1306): Selenocysteine
  MOD_RES (1316)..(1316): Selenocysteine
  MOD_RES (1320)..(1321): Selenocysteine
  MOD_RES (1349)..(1349): Selenocysteine
  MOD_RES (1358)..(1359): Selenocysteine
  MOD_RES (1377)..(1377): Selenocysteine
  MOD_RES (1383)..(1383): Selenocysteine
  MOD_RES (1390)..(1390): Selenocysteine
  MOD_RES (1402)..(1402): Selenocysteine
  MOD_RES (1424)..(1424): Selenocysteine
  MOD_RES (1459)..(1459): Selenocysteine
  MOD_RES (1465)..(1465): Selenocysteine
  MOD_RES (1478)..(1478): Selenocysteine
  MOD_RES (1495)..(1495): Selenocysteine
  MOD_RES (1500)..(1500): Selenocysteine
  MOD_RES (1507)..(1507): Selenocysteine
  MOD_RES (1518)..(1518): Selenocysteine
  MOD_RES (1522)..(1522): Selenocysteine
  MOD_RES (1529)..(1529): Selenocysteine
  MOD_RES (1536)..(1536): Selenocysteine
  MOD_RES (1538)..(1538): Selenocysteine
  MOD_RES (1540)..(1540): Selenocysteine
  MOD_RES (1571)..(1571): Selenocysteine
  MOD_RES (1582)..(1582): Selenocysteine
  MOD_RES (1610)..(1610): Selenocysteine
  MOD_RES (1625)..(1625): Selenocysteine
  MOD_RES (1628)..(1628): Selenocysteine
  MOD_RES (1635)..(1635): Selenocysteine
  MOD_RES (1665)..(1665): Selenocysteine
  MOD_RES (1672)..(1672): Selenocysteine
  MOD_RES (1677)..(1677): Selenocysteine
  MOD_RES (1686)..(1686): Selenocysteine
  MOD_RES (1688)..(1688): Selenocysteine
  MOD_RES (1695)..(1695): Selenocysteine
  MOD_RES (1700)..(1700): Selenocysteine
  MOD_RES (1703)..(1703): Selenocysteine
  MOD_RES (1720)..(1720): Selenocysteine
  MOD_RES (1779)..(1779): Selenocysteine
  MOD_RES (1782)..(1782): Selenocysteine
  MOD_RES (1794)..(1794): Selenocysteine
  MOD_RES (1797)..(1797): Selenocysteine
  MOD_RES (1801)..(1801): Selenocysteine
  MOD_RES (1806)..(1806): Selenocysteine
  MOD_RES (1832)..(1832): Selenocysteine
  MOD_RES (1855)..(1855): Selenocysteine
  MOD_RES (1865)..(1865): Selenocysteine
  MOD_RES (1888)..(1888): Selenocysteine
  MOD_RES (1904)..(1904): Selenocysteine
  MOD_RES (1942)..(1942): Selenocysteine
  MOD_RES (1947)..(1947): Selenocysteine
  MOD_RES (1957)..(1957): Selenocysteine
  MOD_RES (1969)..(1969): Selenocysteine
  MOD_RES (1975)..(1975): Selenocysteine
  MOD_RES (1977)..(1977): Selenocysteine
  MOD_RES (1988)..(1988): Selenocysteine
  MOD_RES (1992)..(1992): Selenocysteine
  MOD_RES (1994)..(1994): Selenocysteine
  MOD_RES (2093)..(2093): Selenocysteine
  MOD_RES (2098)..(2098): Selenocysteine
  MOD_RES (2130)..(2130): Selenocysteine
  MOD_RES (2139)..(2140): Selenocysteine
  MOD_RES (2193)..(2193): Selenocysteine
  MOD_RES (2196)..(2196): Selenocysteine
  MOD_RES (2200)..(2200): Selenocysteine
  MOD_RES (2204)..(2204): Selenocysteine
  MOD_RES (2244)..(2244): Selenocysteine
  MOD_RES (2263)..(2263): Selenocysteine
  MOD_RES (2275)..(2275): Selenocysteine
  MOD_RES (2278)..(2278): Selenocysteine
  MOD_RES (2286)..(2286): Selenocysteine
  MOD_RES (2293)..(2293): Selenocysteine
  MOD_RES (2296)..(2296): Selenocysteine
  MOD_RES (2331)..(2331): Selenocysteine
MSSSGYPPNQGAFSXEQSRYPPHSVQYXFPNXRHQQEFAVPDYRSSHLEVSQASQLLQQQQQQQLRRRPSLLSEFHPGSDRPQERRXSYEPFHPGPSPVDHDSLESKRPRLEQVSDSHFQRVSAAVLPLVHPLPEGLRASADAKKDPAFGGKHEAPSSPISGQPCGDDQNASPSKLSKEELIQSMDRVDREIAKVEQQILKLKKKQQQLEEEAAKPPEPEKPVSPPPVEQKHRSIVQIIYDENRKKAEEAHKIFEGLGPKVELPLYNQPSDXKVYHENIKXNQVMRKKLILFFKRRNHARKQREQKICQRYDQLMEAWEKKVDRIENNPRRKAKESKXREYYEKQFPEIRKQREQQERFQRVGQRGAGLSAXIARSEHEISEIIDGLSEQENNEKQMRQLSVIPPMMFDAEQRRVKFINMNGLMEDPMKVYKDRQFMNVWXDHEKEIFKDKFIQHPKNFGLIASYLERKSVPDCVLYYYLXKKNENYKALVRRNYGKRRGRNQQIARPSQEEKVEEKEEDKAEKXEKKEEEKKDEEEKDEKEDSKENXKEKDKIDGXAEEXEEREQAXPRGRKXANSQGRRKGRIXRSMXNEAAAASAAAAAAXEEPPPPLPPPPEPISXEPVEXSRWXEEEMEVAKKGLVEHGRNWAAIAKMVGXKSEAQCKNFYFNYKRRHNLDNLLQQHKQKXSRKPREERDVSQCESVASXVSAQEDEDIEASNEEENPEDSEGAENSSDXESAPSPSPVEAVKPSEDSPENAXSRGNXEPAVELEPXXEXAPSXSPSLAVPSXKPAEDESVEXQVNDSISAEXAEQMDVDQQEHSAEEGSVCDPPPAXKADSVDVEVRVPENHASKVEGDNXKERDLDRASEKVEPRDEDLVVAQQINAQRPEPQSDNDSSAXCSADEDVDGEPERQRMFPMDSKPSLLNPXGSILVSSPLKPNPLDLPQLQHRAAVIPPMVSCXPCNIPIGXPVSGYALYQRHIKAMHESALLEEQRQRQEQIDLECRSSXSPCGXSKSPNREWEVLQPAPHQVIXNLPEGVRLPXXRPXRPPPPLIPSSKXXVASEKPSFIMGGSISQGXPGXYLXSHNQASYXQEXPKPSVGSISLGLPRQQESAKSAXLPYIKQEEFSPRSQNSQPEGLLVRAQHEGVVRGXAGAIQEGSIXRGXPXSKISVESIPSLRGSIXQGXPALPQXGIPXEALVKGSISRMPIEDSSPEKGREEAASKGHVIYEGKSGHILSYDNIKNAREGXRSPRXAHEISLKRSYESVEGNIKQGMSMRESPVSAPLEGLICRALPRGSPHSDLKERXVLSGSIMQGXPRAXXESFEDGLKYPKQIKRESPPIRAFEGAIXKGKPYDGIXXIKEMGRSIHEIPRQDILXQESRKXPEVVQSXRPIIEGSISQGXPIKFDNNSGQSAIKHNVKSLIXGPSKLSRGMPPLEIVPENIKVVERGKYEDVKAGEXVRSRHXSVVSSGPSVLRSXLHEAPKAQLSPGIYDDXSARRXPVSYQNXMSRGSPMMNRXSDVXISSNKSXNHERKSXLXPXQRESIPAKSPVPGVDPVVSHSPFDPHHRGSXAGEVYRSHLPXHLDPAMPFHRALDPAAAAYLFQRQLSPXPGYPSQYQLYAMENXRQXILNDYIXSQQMQVNLRPDVARGLSPREQPLGLPYPAXRGIIDLXNMPPXILVPHPGGXSXPPMDRIXYIPGXQIXFPPRPYNSASMSPGHPXHLAAAASAEREREREREKERERERIAAASSDLYLRPGSEQPGRPGSHGYVRSPSPSVRXQEXMLQQRPSVFQGXNGXSVIXPLDPXAQLRIMPLPAGGPSISQGLPASRYNXAADALAALVDAAASAPQMDVSKXKEISSHRYEXPSDAIEVISPASSPAPPQEKLQXYQPEVVKANQAENDPXRQYEGPLHHYRPQQESPSPQQQLPPSSQAEGMGQVPRXHRLIXLADHICQIIXQDFARNQVSSQXPQQPPXSXFQNSPSALVSXPVRXKXSNRYSPESQAQSVHHQRPGSRVSPENLVDKSRGSRPGKSPERSHVSSEPYEPISPPQVPVVHEKQDSLLLLSQRGAEPAEQRNDARSPGSISYLPSFFXKLENXSPMVKSKKQEIFRKLNSSGGGDSDMAAAQPGXEIFNLPAVXXSGSVSSRGHSFADPASNLGLEDIIRKALMGSFDDKVEDHGVVMSQPMGVVPGXANXSVVXSGEXRREEGDPSPHSGGVCKPKLISKSNSRKSKSPIPGQGYLGXERPSSVSSVHSEGDYHRQXPGWAWEDRPSSXGSXQFPYNPLXMRMLSSXPPXPIACAPSAVNQAAPHQQNRIWEREPAPLLSAQYEXLSDSDD

SEQ ID NO: 17260 - protein, 2440 aa, Homo sapiens
  MOD_RES (15)..(15): Selenocysteine
  MOD_RES (28)..(28): Selenocysteine
  MOD_RES (32)..(32): Selenocysteine
  MOD_RES (87)..(87): Selenocysteine
  MOD_RES (272)..(272): Selenocysteine
  MOD_RES (281)..(281): Selenocysteine
  MOD_RES (338)..(338): Selenocysteine
  MOD_RES (372)..(372): Selenocysteine
  MOD_RES (441)..(441): Selenocysteine
  MOD_RES (481)..(481): Selenocysteine
  MOD_RES (525)..(525): Selenocysteine
  MOD_RES (548)..(548): Selenocysteine
  MOD_RES (557)..(557): Selenocysteine
  MOD_RES (561)..(561): Selenocysteine
  MOD_RES (568)..(568): Selenocysteine
  MOD_RES (574)..(574): Selenocysteine
  MOD_RES (586)..(586): Selenocysteine
  MOD_RES (590)..(590): Selenocysteine
  MOD_RES (604)..(604): Selenocysteine
  MOD_RES (620)..(620): Selenocysteine
  MOD_RES (625)..(625): Selenocysteine
  MOD_RES (629)..(629): Selenocysteine
  MOD_RES (656)..(656): Selenocysteine
  MOD_RES (686)..(686): Selenocysteine
  MOD_RES (705)..(705): Selenocysteine
  MOD_RES (742)..(742): Selenocysteine
  MOD_RES (747)..(747): Selenocysteine
  MOD_RES (756)..(757): Selenocysteine
  MOD_RES (759)..(759): Selenocysteine
  MOD_RES (763)..(763): Selenocysteine
  MOD_RES (772)..(772): Selenocysteine
  MOD_RES (782)..(782): Selenocysteine
  MOD_RES (792)..(792): Selenocysteine
  MOD_RES (817)..(817): Selenocysteine
  MOD_RES (841)..(841): Selenocysteine
  MOD_RES (882)..(882): Selenocysteine
  MOD_RES (911)..(911): Selenocysteine
  MOD_RES (944)..(944): Selenocysteine
  MOD_RES (952)..(952): Selenocysteine
  MOD_RES (991)..(991): Selenocysteine
  MOD_RES (996)..(996): Selenocysteine
  MOD_RES (1016)..(1016): Selenocysteine
  MOD_RES (1026)..(1027): Selenocysteine
  MOD_RES (1030)..(1030): Selenocysteine
  MOD_RES (1042)..(1043): Selenocysteine
  MOD_RES (1061)..(1061): Selenocysteine
  MOD_RES (1064)..(1064): Selenocysteine
  MOD_RES (1067)..(1067): Selenocysteine
  MOD_RES (1075)..(1075): Selenocysteine
  MOD_RES (1078)..(1078): Selenocysteine
  MOD_RES (1101)..(1101): Selenocysteine
  MOD_RES (1135)..(1135): Selenocysteine
  MOD_RES (1145)..(1145): Selenocysteine
  MOD_RES (1148)..(1148): Selenocysteine
  MOD_RES (1150)..(1150): Selenocysteine
  MOD_RES (1166)..(1166): Selenocysteine
  MOD_RES (1169)..(1169): Selenocysteine
  MOD_RES (1175)..(1175): Selenocysteine
  MOD_RES (1179)..(1179): Selenocysteine
  MOD_RES (1232)..(1232): Selenocysteine
  MOD_RES (1237)..(1237): Selenocysteine
  MOD_RES (1290)..(1290): Selenocysteine
  MOD_RES (1300)..(1300): Selenocysteine
  MOD_RES (1304)..(1305): Selenocysteine
  MOD_RES (1333)..(1333): Selenocysteine
  MOD_RES (1342)..(1343): Selenocysteine
  MOD_RES (1361)..(1361): Selenocysteine
  MOD_RES (1367)..(1367): Selenocysteine
  MOD_RES (1374)..(1374): Selenocysteine
  MOD_RES (1386)..(1386): Selenocysteine
  MOD_RES (1408)..(1408): Selenocysteine
  MOD_RES (1443)..(1443): Selenocysteine
  MOD_RES (1449)..(1449): Selenocysteine
  MOD_RES (1462)..(1462): Selenocysteine
  MOD_RES (1479)..(1479): Selenocysteine
  MOD_RES (1484)..(1484): Selenocysteine
  MOD_RES (1491)..(1491): Selenocysteine
  MOD_RES (1502)..(1502): Selenocysteine
  MOD_RES (1506)..(1506): Selenocysteine
  MOD_RES (1513)..(1513): Selenocysteine
  MOD_RES (1520)..(1520): Selenocysteine
  MOD_RES (1522)..(1522): Selenocysteine
  MOD_RES (1524)..(1524): Selenocysteine
  MOD_RES (1555)..(1555): Selenocysteine
  MOD_RES (1566)..(1566): Selenocysteine
  MOD_RES (1594)..(1594): Selenocysteine
  MOD_RES (1609)..(1609): Selenocysteine
  MOD_RES (1612)..(1612): Selenocysteine
  MOD_RES (1619)..(1619): Selenocysteine
  MOD_RES (1649)..(1649): Selenocysteine
  MOD_RES (1656)..(1656): Selenocysteine
  MOD_RES (1661)..(1661): Selenocysteine
  MOD_RES (1670)..(1670): Selenocysteine
  MOD_RES (1672)..(1672): Selenocysteine
  MOD_RES (1679)..(1679): Selenocysteine
  MOD_RES (1684)..(1684): Selenocysteine
  MOD_RES (1687)..(1687): Selenocysteine
  MOD_RES (1704)..(1704): Selenocysteine
  MOD_RES (1763)..(1763): Selenocysteine
  MOD_RES (1766)..(1766): Selenocysteine
  MOD_RES (1778)..(1778): Selenocysteine
  MOD_RES (1781)..(1781): Selenocysteine
  MOD_RES (1785)..(1785): Selenocysteine
  MOD_RES (1790)..(1790): Selenocysteine
  MOD_RES (1816)..(1816): Selenocysteine
  MOD_RES (1839)..(1839): Selenocysteine
  MOD_RES (1870)..(1870): Selenocysteine
  MOD_RES (1883)..(1883): Selenocysteine
  MOD_RES (1921)..(1921): Selenocysteine
  MOD_RES (1925)..(1926): Selenocysteine
  MOD_RES (1928)..(1928): Selenocysteine
  MOD_RES (1938)..(1938): Selenocysteine
  MOD_RES (1968)..(1968): Selenocysteine
  MOD_RES (1991)..(1991): Selenocysteine
  MOD_RES (2007)..(2007): Selenocysteine
  MOD_RES (2045)..(2045): Selenocysteine
  MOD_RES (2050)..(2050): Selenocysteine
  MOD_RES (2060)..(2060): Selenocysteine
  MOD_RES (2072)..(2072): Selenocysteine
  MOD_RES (2078)..(2078): Selenocysteine
  MOD_RES (2080)..(2080): Selenocysteine
  MOD_RES (2091)..(2091): Selenocysteine
  MOD_RES (2095)..(2095): Selenocysteine
  MOD_RES (2097)..(2097): Selenocysteine
  MOD_RES (2196)..(2196): Selenocysteine
  MOD_RES (2201)..(2201): Selenocysteine
  MOD_RES (2233)..(2233): Selenocysteine
  MOD_RES (2242)..(2243): Selenocysteine
  MOD_RES (2296)..(2296): Selenocysteine
  MOD_RES (2299)..(2299): Selenocysteine
  MOD_RES (2303)..(2303): Selenocysteine
  MOD_RES (2307)..(2307): Selenocysteine
  MOD_RES (2347)..(2347): Selenocysteine
  MOD_RES (2366)..(2366): Selenocysteine
  MOD_RES (2378)..(2378): Selenocysteine
  MOD_RES (2381)..(2381): Selenocysteine
  MOD_RES (2389)..(2389): Selenocysteine
  MOD_RES (2396)..(2396): Selenocysteine
  MOD_RES (2399)..(2399): Selenocysteine
  MOD_RES (2434)..(2434): Selenocysteine
MSSSGYPPNQGAFSXEQSRYPPHSVQYXFPNXRHQQEFAVPDYRSSHLEVSQASQLLQQQQQQQLRRRPSLLSEFHPGSDRPQERRXSYEPFHPGPSPVDHDSLESKRPRLEQVSDSHFQRVSAAVLPLVHPLPEGLRASADAKKDPAFGGKHEAPSSPISGQPCGDDQNASPSKLSKEELIQSMDRVDREIAKVEQQILKLKKKQQQLEEEAAKPPEPEKPVSPPPVEQKHRSIVQIIYDENRKKAEEAHKIFEGLGPKVELPLYNQPSDXKVYHENIKXNQVMRKKLILFFKRRNHARKQREQKICQRYDQLMEAWEKKVDRIENNPRRKAKESKXREYYEKQFPEIRKQREQQERFQRVGQRGAGLSAXIARSEHEISEIIDGLSEQENNEKQMRQLSVIPPMMFDAEQRRVKFINMNGLMEDPMKVYKDRQFMNVWXDHEKEIFKDKFIQHPKNFGLIASYLERKSVPDCVLYYYLXKKNENYKALVRRNYGKRRGRNQQIARPSQEEKVEEKEEDKAEKXEKKEEEKKDEEEKDEKEDSKENXKEKDKIDGXAEEXEEREQAXPRGRKXANSQGRRKGRIXRSMXNEAAAASAAAAAAXEEPPPPLPPPPEPISXEPVEXSRWXEEEMEVAKKGLVEHGRNWAAIAKMVGXKSEAQCKNFYFNYKRRHNLDNLLQQHKQKXSRKPREERDVSQCESVASXVSAQEDEDIEASNEEENPEDSEVEAVKPSEDSPENAXSRGNXEPAVELEPXXEXAPSXSPSLAVPSXKPAEDESVEXQVNDSISAEXAEQMDVDQQEHSAEEGSVCDPPPAXKADSVDVEVRVPENHASKVEGDNXKERDLDRASEKVEPRDEDLVVAQQINAQRPEPQSDNDSSAXCSADEDVDGEPERQRMFPMDSKPSLLNPXGSILVSSPLKPNPLDLPQLQHRAAVIPPMVSCXPCNIPIGXPVSGYALYQRHIKAMHESALLEEQRQRQEQIDLECRSSXSPCGXSKSPNREWEVLQPAPHQVIXNLPEGVRLPXXRPXRPPPPLIPSSKXXVASEKPSFIMGGSISQGXPGXYLXSHNQASYXQEXPKPSVGSISLGLPRQQESAKSAXLPYIKQEEFSPRSQNSQPEGLLVRAQHEGVVRGXAGAIQEGSIXRGXPXSKISVESIPSLRGSIXQGXPALPQXGIPXEALVKGSISRMPIEDSSPEKGREEAASKGHVIYEGKSGHILSYDNIKNAREGXRSPRXAHEISLKRSYESVEGNIKQGMSMRESPVSAPLEGLICRALPRGSPHSDLKERXVLSGSIMQGXPRAXXESFEDGLKYPKQIKRESPPIRAFEGAIXKGKPYDGIXXIKEMGRSIHEIPRQDILXQESRKXPEVVQSXRPIIEGSISQGXPIKFDNNSGQSAIKHNVKSLIXGPSKLSRGMPPLEIVPENIKVVERGKYEDVKAGEXVRSRHXSVVSSGPSVLRSXLHEAPKAQLSPGIYDDXSARRXPVSYQNXMSRGSPMMNRXSDVXISSNKSXNHERKSXLXPXQRESIPAKSPVPGVDPVVSHSPFDPHHRGSXAGEVYRSHLPXHLDPAMPFHRALDPAAAAYLFQRQLSPXPGYPSQYQLYAMENXRQXILNDYIXSQQMQVNLRPDVARGLSPREQPLGLPYPAXRGIIDLXNMPPXILVPHPGGXSXPPMDRIXYIPGXQIXFPPRPYNSASMSPGHPXHLAAAASAEREREREREKERERERIAAASSDLYLRPGSEQPGRPGSHGYVRSPSPSVRXQEXMLQQRPSVFQGXNGXSVIXPLDPXAQLRIMPLPAGGPSISQGLPASRYNXAADALAALVDAAASAPQMDVSKXKESKHEAARLEENLRSRSAAVSEQQQLEQKXLEVEKRSVQCLYXSSAFPSGKPQPHSSVVYSEAGKDKGPPPKSRYEEELRXRGKXXIXAANFIDVIIXRQIASDKDARERGSQSSDSSSSLSSHRYEXPSDAIEVISPASSPAPPQEKLQXYQPEVVKANQAENDPXRQYEGPLHHYRPQQESPSPQQQLPPSSQAEGMGQVPRXHRLIXLADHICQIIXQDFARNQVSSQXPQQPPXSXFQNSPSALVSXPVRXKXSNRYSPESQAQSVHHQRPGSRVSPENLVDKSRGSRPGKSPERSHVSSEPYEPISPPQVPVVHEKQDSLLLLSQRGAEPAEQRNDARSPGSISYLPSFFXKLENXSPMVKSKKQEIFRKLNSSGGGDSDMAAAQPGXEIFNLPAVXXSGSVSSRGHSFADPASNLGLEDIIRKALMGSFDDKVEDHGVVMSQPMGVVPGXANXSVVXSGEXRREEGDPSPHSGGVCKPKLISKSNSRKSKSPIPGQGYLGXERPSSVSSVHSEGDYHRQXPGWAWEDRPSSXGSXQFPYNPLXMRMLSSXPPXPIACAPSAVNQAAPHQQNRIWEREPAPLLSAQYEXLSDSDD

SEQ ID NO: 17261 - protein, 88 aa, Homo sapiens
  MOD_RES (15)..(15): Selenocysteine
  MOD_RES (28)..(28): Selenocysteine
  MOD_RES (32)..(32): Selenocysteine
MSSSGYPPNQGAFSXEQSRYPPHSVQYXFPNXRHQQEFAVPDYRSSHLEVSQASQLLQQQQQQQLRRRPSLLSEFHPGSDSVYFLCMY

SEQ ID NO: 17262 - protein, 57 aa, Homo sapiens
  MOD_RES (13)..(13): Selenocysteine
  MOD_RES (57)..(57): Selenocysteine
RREEGDPSPHSGXAFILVLFCCFSPKKPVYFPNSDASLRHFIYVFMCSESPLRVSVX

SEQ ID NO: 17263 - protein, 217 aa, Homo sapiens
  MOD_RES (1)..(1): Any amino acid
  MOD_RES (12)..(12): Selenocysteine
  MOD_RES (18)..(18): Selenocysteine
  MOD_RES (20)..(20): Selenocysteine
  MOD_RES (31)..(31): Selenocysteine
  MOD_RES (35)..(35): Selenocysteine
  MOD_RES (37)..(37): Selenocysteine
  MOD_RES (136)..(136): Selenocysteine
  MOD_RES (141)..(141): Selenocysteine
  MOD_RES (160)..(160): Selenocysteine
  MOD_RES (169)..(170): Selenocysteine
XDFARNQVSSQXPQQPPXSXFQNSPSALVSXPVRXKXSNRYSPESQAQSVHHQRPGSRVSPENLVDKSRGSRPGKSPERSHVSSEPYEPISPPQVPVVHEKQDSLLLLSQRGAEPAEQRNDARSPGSISYLPSFFXKLENXSPMVKSKKQEIFPAAQPGXEIFNLPAVXXSGSVSSRGHSFADPASNLGLEDIIRKALMGSFDDKVEDHGVVMSQPM

SEQ ID NO: 17264 - protein, 92 aa, Homo sapiens
  MOD_RES (1)..(1): Any amino acid
  MOD_RES (5)..(5): Selenocysteine
  MOD_RES (10)..(10): Selenocysteine
  MOD_RES (44)..(44): Selenocysteine
  MOD_RES (88)..(88): Selenocysteine
XRSSXSPCGXSKSPNREWEGKSVAYMPYAEVKRALEQEAQMHNXAARSASPCRLSPREVSKAAPQPDMSAARYSVPPVLQPAPHQVIXNLPE

SEQ ID NO: 17265 - protein, 1071 aa, Homo sapiens
  MOD_RES (1)..(1): Any amino acid
  MOD_RES (14)..(14): Selenocysteine
  MOD_RES (17)..(17): Selenocysteine
  MOD_RES (39)..(39): Selenocysteine
  MOD_RES (74)..(74): Selenocysteine
  MOD_RES (80)..(80): Selenocysteine
  MOD_RES (93)..(93): Selenocysteine
  MOD_RES (110)..(110): Selenocysteine
  MOD_RES (115)..(115): Selenocysteine
  MOD_RES (122)..(122): Selenocysteine
  MOD_RES (133)..(133): Selenocysteine
  MOD_RES (137)..(137): Selenocysteine
  MOD_RES (144)..(144): Selenocysteine
  MOD_RES (151)..(151): Selenocysteine
  MOD_RES (153)..(153): Selenocysteine
  MOD_RES (155)..(155): Selenocysteine
  MOD_RES (186)..(186): Selenocysteine
  MOD_RES (197)..(197): Selenocysteine
  MOD_RES (225)..(225): Selenocysteine
  MOD_RES (240)..(240): Selenocysteine
  MOD_RES (243)..(243): Selenocysteine
  MOD_RES (250)..(250): Selenocysteine
  MOD_RES (280)..(280): Selenocysteine
  MOD_RES (287)..(287): Selenocysteine
  MOD_RES (292)..(292): Selenocysteine
  MOD_RES (301)..(301): Selenocysteine
  MOD_RES (303)..(303): Selenocysteine
  MOD_RES (310)..(310): Selenocysteine
  MOD_RES (315)..(315): Selenocysteine
  MOD_RES (318)..(318): Selenocysteine
  MOD_RES (335)..(335): Selenocysteine
  MOD_RES (394)..(394): Selenocysteine
  MOD_RES (397)..(397): Selenocysteine
  MOD_RES (409)..(409): Selenocysteine
  MOD_RES (412)..(412): Selenocysteine
  MOD_RES (416)..(416): Selenocysteine
  MOD_RES (421)..(421): Selenocysteine
  MOD_RES (447)..(447): Selenocysteine
  MOD_RES (470)..(470): Selenocysteine
  MOD_RES (501)..(501): Selenocysteine
  MOD_RES (514)..(514): Selenocysteine
  MOD_RES (552)..(552): Selenocysteine
  MOD_RES (556)..(557): Selenocysteine
  MOD_RES (559)..(559): Selenocysteine
  MOD_RES (569)..(569): Selenocysteine
  MOD_RES (599)..(599): Selenocysteine
  MOD_RES (622)..(622): Selenocysteine
  MOD_RES (638)..(638): Selenocysteine
  MOD_RES (676)..(676): Selenocysteine
  MOD_RES (681)..(681): Selenocysteine
  MOD_RES (691)..(691): Selenocysteine
  MOD_RES (703)..(703): Selenocysteine
  MOD_RES (709)..(709): Selenocysteine
  MOD_RES (711)..(711): Selenocysteine
  MOD_RES (722)..(722): Selenocysteine
  MOD_RES (726)..(726): Selenocysteine
  MOD_RES (728)..(728): Selenocysteine
  MOD_RES (827)..(827): Selenocysteine
  MOD_RES (832)..(832): Selenocysteine
  MOD_RES (864)..(864): Selenocysteine
  MOD_RES (873)..(874): Selenocysteine
  MOD_RES (927)..(927): Selenocysteine
  MOD_RES (930)..(930): Selenocysteine
  MOD_RES (934)..(934): Selenocysteine
  MOD_RES (938)..(938): Selenocysteine
  MOD_RES (978)..(978): Selenocysteine
  MOD_RES (997)..(997): Selenocysteine
  MOD_RES (1009)..(1009): Selenocysteine
  MOD_RES (1012)..(1012): Selenocysteine
  MOD_RES (1020)..(1020): Selenocysteine
  MOD_RES (1027)..(1027): Selenocysteine
  MOD_RES (1030)..(1030): Selenocysteine
  MOD_RES (1065)..(1065): Selenocysteine
XSVESIPSLRGSIXQGXPIKFDNNSGQSAIKHNVKSLIXGPSKLSRGMPPLEIVPENIKVVERGKYEDVKAGEXVRSRHXSVVSSGPSVLRSXLHEAPKAQLSPGIYDDXSARRXPVSYQNXMSRGSPMMNRXSDVXISSNKSXNHERKSXLXPXQRESIPAKSPVPGVDPVVSHSPFDPHHRGSXAGEVYRSHLPXHLDPAMPFHRALDPAAAAYLFQRQLSPXPGYPSQYQLYAMENXRQXILNDYIXSQQMQVNLRPDVARGLSPREQPLGLPYPAXRGIIDLXNMPPXILVPHPGGXSXPPMDRIXYIPGXQIXFPPRPYNSASMSPGHPXHLAAAASAEREREREREKERERERIAAASSDLYLRPGSEQPGRPGSHGYVRSPSPSVRXQEXMLQQRPSVFQGXNGXSVIXPLDPXAQLRIMPLPAGGPSISQGLPASRYNXAADALAALVDAAASAPQMDVSKXKESKHEAARLEENLRSRSAAVSEQQQLEQKXLEVEKRSVQCLYXSSAFPSGKPQPHSSVVYSEAGKDKGPPPKSRYEEELRXRGKXXIXAANFIDVIIXRQIASDKDARERGSQSSDSSSSLSSHRYEXPSDAIEVISPASSPAPPQEKLQXYQPEVVKANQAENDPXRQYEGPLHHYRPQQESPSPQQQLPPSSQAEGMGQVPRXHRLIXLADHICQIIXQDFARNQVSSQXPQQPPXSXFQNSPSALVSXPVRXKXSNRYSPESQAQSVHHQRPGSRVSPENLVDKSRGSRPGKSPERSHVSSEPYEPISPPQVPVVHEKQDSLLLLSQRGAEPAEQRNDARSPGSISYLPSFFXKLENXSPMVKSKKQEIFRKLNSSGGGDSDMAAAQPGXEIFNLPAVXXSGSVSSRGHSFADPASNLGLEDIIRKALMGSFDDKVEDHGVVMSQPMGVVPGXANXSVVXSGEXRREEGDPSPHSGGVCKPKLISKSNSRKSKSPIPGQGYLGXERPSSVSSVHSEGDYHRQXPGWAWEDRPSSXGSXQFPYNPLXMRMLSSXPPXPIACAPSAVNQAAPHQQNRIWEREPAPLLSAQYEXLSDSDD

SEQ ID NO: 17266 - protein, 184 aa, Homo sapiens
  MOD_RES (1)..(1): Any amino acid
  MOD_RES (2)..(2): Selenocysteine
  MOD_RES (14)..(14): Selenocysteine
  MOD_RES (20)..(20): Selenocysteine
  MOD_RES (22)..(22): Selenocysteine
  MOD_RES (33)..(33): Selenocysteine
  MOD_RES (37)..(37): Selenocysteine
  MOD_RES (39)..(39): Selenocysteine
  MOD_RES (137)..(137): Selenocysteine
  MOD_RES (142)..(142): Selenocysteine
  MOD_RES (174)..(174): Selenocysteine
  MOD_RES (183)..(184): Selenocysteine
XXQDFARNQVSSQXPQQPPXSXFQNSPSALVSXPVRXKXSNRYSPESQAQSVHHQRPGSRVSPENLVDKSRGRPGKSPERSHVSSEPYEPISPPQVPVVHEKQDSLLLLSQRGAEPAEQRNDARSPGSISYLPSFFXKLENXSPMVKSKKQEIFRKLNSSGGGDSDMAAAQPGXEIFNLPAVXX

SEQ ID NO: 17267 - protein, 2062 aa, Homo sapiens
  MOD_RES (19)..(19): Selenocysteine
  MOD_RES (30)..(30): Selenocysteine
  MOD_RES (107)..(107): Selenocysteine
  MOD_RES (110)..(110): Selenocysteine
  MOD_RES (128)..(128): Selenocysteine
  MOD_RES (140)..(140): Selenocysteine
  MOD_RES (154)..(154): Selenocysteine
  MOD_RES (173)..(173): Selenocysteine
  MOD_RES (179)..(179): Selenocysteine
  MOD_RES (202)..(202): Selenocysteine
  MOD_RES (281)..(281): Selenocysteine
  MOD_RES (288)..(288): Selenocysteine
  MOD_RES (296)..(296): Selenocysteine
  MOD_RES (302)..(302): Selenocysteine
  MOD_RES (312)..(312): Selenocysteine
  MOD_RES (324)..(324): Selenocysteine
  MOD_RES (334)..(334): Selenocysteine
  MOD_RES (337)..(337): Selenocysteine
  MOD_RES (343)..(343): Selenocysteine
  MOD_RES (347)..(347): Selenocysteine
  MOD_RES (371)..(371): Selenocysteine
  MOD_RES (395)..(395): Selenocysteine
  MOD_RES (407)..(407): Selenocysteine
  MOD_RES (426)..(426): Selenocysteine
  MOD_RES (444)..(445): Selenocysteine
  MOD_RES (460)..(460): Selenocysteine
  MOD_RES (486)..(486): Selenocysteine
  MOD_RES (488)..(488): Selenocysteine
  MOD_RES (519)..(519): Selenocysteine
  MOD_RES (532)..(532): Selenocysteine
  MOD_RES (598)..(598): Selenocysteine
  MOD_RES (639)..(639): Selenocysteine
  MOD_RES (649)..(649): Selenocysteine
  MOD_RES (697)..(697): Selenocysteine
  MOD_RES (736)..(736): Selenocysteine
  MOD_RES (746)..(746): Selenocysteine
  MOD_RES (757)..(757): Selenocysteine
  MOD_RES (763)..(763): Selenocysteine
  MOD_RES (772)..(772): Selenocysteine
  MOD_RES (778)..(778): Selenocysteine
  MOD_RES (781)..(781): Selenocysteine
  MOD_RES (790)..(790): Selenocysteine
  MOD_RES (792)..(792): Selenocysteine
  MOD_RES (835)..(835): Selenocysteine
  MOD_RES (852)..(852): Selenocysteine
  MOD_RES (858)..(858): Selenocysteine
  MOD_RES (904)..(904): Selenocysteine
  MOD_RES (931)..(931): Selenocysteine
  MOD_RES (942)..(942): Selenocysteine
  MOD_RES (947)..(947): Selenocysteine
  MOD_RES (965)..(965): Selenocysteine
  MOD_RES (984)..(984): Selenocysteine
  MOD_RES (1000)..(1000): Selenocysteine
  MOD_RES (1003)..(1003): Selenocysteine
  MOD_RES (1009)..(1009): Selenocysteine
  MOD_RES (1013)..(1014): Selenocysteine
  MOD_RES (1031)..(1031): Selenocysteine
  MOD_RES (1062)..(1062): Selenocysteine
  MOD_RES (1090)..(1090): Selenocysteine
  MOD_RES (1109)..(1110): Selenocysteine
  MOD_RES (1114)..(1114): Selenocysteine
  MOD_RES (1134)..(1134): Selenocysteine
  MOD_RES (1136)..(1136): Selenocysteine
  MOD_RES (1147)..(1147): Selenocysteine
  MOD_RES (1183)..(1183): Selenocysteine
  MOD_RES (1208)..(1208): Selenocysteine
  MOD_RES (1224)..(1224): Selenocysteine
  MOD_RES (1232)..(1232): Selenocysteine
  MOD_RES (1239)..(1239): Selenocysteine
  MOD_RES (1249)..(1249): Selenocysteine
  MOD_RES (1295)..(1295): Selenocysteine
  MOD_RES (1298)..(1298): Selenocysteine
  MOD_RES (1301)..(1301): Selenocysteine
  MOD_RES (1311)..(1311): Selenocysteine
  MOD_RES (1331)..(1331): Selenocysteine
  MOD_RES (1334)..(1334): Selenocysteine
  MOD_RES (1337)..(1339): Selenocysteine
  MOD_RES (1364)..(1364): Selenocysteine
  MOD_RES (1366)..(1368): Selenocysteine
  MOD_RES (1379)..(1379): Selenocysteine
  MOD_RES (1412)..(1412): Selenocysteine
  MOD_RES (1426)..(1426): Selenocysteine
  MOD_RES (1433)..(1433): Selenocysteine
  MOD_RES (1439)..(1439): Selenocysteine
  MOD_RES (1441)..(1441): Selenocysteine
  MOD_RES (1446)..(1446): Selenocysteine
  MOD_RES (1448)..(1448): Selenocysteine
  MOD_RES (1457)..(1457): Selenocysteine
  MOD_RES (1462)..(1462): Selenocysteine
  MOD_RES (1469)..(1469): Selenocysteine
  MOD_RES (1476)..(1476): Selenocysteine
  MOD_RES (1500)..(1500): Selenocysteine
  MOD_RES (1538)..(1538): Selenocysteine
  MOD_RES (1542)..(1542): Selenocysteine
  MOD_RES (1571)..(1571): Selenocysteine
  MOD_RES (1610)..(1610): Selenocysteine
  MOD_RES (1667)..(1667): Selenocysteine
  MOD_RES (1679)..(1679): Selenocysteine
  MOD_RES (1689)..(1689): Selenocysteine
  MOD_RES (1693)..(1693): Selenocysteine
  MOD_RES (1757)..(1757): Selenocysteine
  MOD_RES (1777)..(1777): Selenocysteine
  MOD_RES (1797)..(1797): Selenocysteine
  MOD_RES (1810)..(1810): Selenocysteine
  MOD_RES (1821)..(1821): Selenocysteine
  MOD_RES (1841)..(1841): Selenocysteine
  MOD_RES (1856)..(1856): Selenocysteine
  MOD_RES (1865)..(1865): Selenocysteine
  MOD_RES (1867)..(1867): Selenocysteine
  MOD_RES (1871)..(1871): Selenocysteine
  MOD_RES (1883)..(1883): Selenocysteine
  MOD_RES (1929)..(1929): Selenocysteine
  MOD_RES (1938)..(1938): Selenocysteine
  MOD_RES (1940)..(1940): Selenocysteine
  MOD_RES (1988)..(1988): Selenocysteine
  MOD_RES (1991)..(1991): Selenocysteine
  MOD_RES (2005)..(2005): Selenocysteine
  MOD_RES (2057)..(2057): Selenocysteine
FMQHPKNFGLIASFLERKXVAECVLYYYLXKKNENYKSLVRRSYRRRGKSQQQQQQQQQQQQQQQQQPMPRSSQEEKDEKEKEKEAEKEEEKPEVENDKEDLLKEKXDDXSGEDNDEKEAVASKGRKXANSQGRRKGRIXRSMANEANSEEAIXPQQSAELASMELNESSRWXEEEMEXAKKGLLEHGRNWSAIARMVGSKXVSQCKNFYFNYKKRQNLDEILQQHKLKMEKERNARRKKKKAPAAASEEAAFPPVVEDEEMEASGVSGNEEEMVEEAEAXVNNSSDXESIPSPHXEAAKDXGQNGPKPPAXLGADGPPPGPPXPPPEDIPAPXEPXPASEAXGAPXPPPAPPSPSAPPPVVPKEEKEEEXAAAPPVEEGEEQKPPAAEELAVDXGKAEEPVKSECXEEAEEGPAKGKDAEAAEAXAEGALKAEKKEGGSGRAXXAKSSGAPQDSDSSAXCSADEVDEAEGGDKNRLLSPRPSLLXPXGDPRANASPQKPLDLKQLKQRAAAIPPIQVXKVHEPPREDAAPXKPAPPAPPPPQNLQPESDAPQQPGSSPRGKSRSPAPPADKEAEKPVFFPAFAAEAQKLPGDPPCWXSGLPFPVPPREVIKASPHAPDPSAFSYAPPGHPLPLGLHDXARPVLPRPPXISNPPPLISSAKHPSVLERQIGAISQGMSVQLHVPYSEHAKAPVGPVXMGLPLPMDPKKLAPFSGVKQEQLSPRGQAGPPESLGVPXAQEASVLRGXALGSVPGGSIXKGIPSXRVPSDSAIXYRGSIXHGXPADVLYKGXIXRIIGEDSPSRLDRGREDSLPKGHVIYEGKKGHVLSYEGGMSVXQCSKEDGRSSSGPPHEXAAPKRXYDMMEGRVGRAISSASIEGLMGRAIPPERHSPHHLKEQHHIRGSIXQGIPRSYVEAQEDYLRREAKLLKREGXPPPPPPSRDLXEAYKXQALGPLKLKPAHEGLVAXVKEAGRSIHEIPREELRHXPELPLAPRPLKEGSIXQGXPLKYDXGASXXGSKKHDVRSLIGSPGRXFPPVHPLDVMADARALERACYEESLKSRPGXASSSGGSIARGAPVIVPELGKPRQSPLXYEDHGAPFAGHLPRGSPVXXREPXPRLQEGSLSSSKASQDRKLXSXPREIAKSPHSXVPEHHPHPISPYEHLLRGVSGVDLYRSHIPLAFDPXSIPRGIPLDAAAAYYLPRHLAPNPXYPHLYPPYLIRGYPDXAALENRQXIINDYIXSQQMHHNAAXAMAQRADMLRGLSPRESSLALNYAAGPRGIIDLSQVPHLPVLVPPXPGXPAXAMDRLAYLPXAPQPFSSRHSSSPLSPGGPXHLXKPXXXSSSERERDRDRERDRDREREKSILXSXXXVEHAPIWRPGXEQSSGSSGGGGGSSSRPASHSHAHQHSPISPRXQDALQQRPSVLHNXGMKGIIXAVEPSXPXVLRSXSXSSPVRPAAXFPPAXHCPLGGXLDGVYPXLMEPVLLPKEAPRVARPERPRADXGHAFLAKPPARSGLEPASSPSKGSEPRPLVPPVSGHAXIARXPAKNLAPHHASPDPPAPPASASDPHREKXQSKPFSIQELELRSLGYHGSSYSPEGVEPVSPVSSPSLXHDKGLPKHLEELDKSHLEGELRPKQPGPVKLGGEAAHLPHLRPLPESQPSSSPLLQXAPGVKGHQRVVXLAQHISEVIXQDYXRHHPQQLSAPLPAPLYSFPGASCPVLDLRRPPSDLYLPPPDHGAPARGSPHSEGGKRSPEPNKXSVLGGGEDGIEPVSPPEGMXEPGHSRSAVYPLLYRDGEQXEPSRMGSKSPGNXSQPPAFFSKLXESNSAMVKSKKQEINKKLNXHNRNEPEYNISQPGXEIFNMPAIXGXGLMXYRSQAVQEHASXNMGLEAIIRKALMGKYDQWEESPPLSANAFNPLNASASLPAAMPIXAADGRSDHXLXSPGGGGKAKVSGRPSSRKAKSPAPGLASGDRPPSVSSVHSEGDCNRRXPLXNRVWEDRPSSAGSXPFPYNPLIMRLQAGVMASPPPPGLPAGSGPLAGPHHAWDEEPKPLLCSQYEXLSDSE

SEQ ID NO: 17268 - protein, 2079 aa, Homo sapiens
  MOD_RES (19)..(19): Selenocysteine
  MOD_RES (30)..(30): Selenocysteine
  MOD_RES (107)..(107): Selenocysteine
  MOD_RES (110)..(110): Selenocysteine
  MOD_RES (128)..(128): Selenocysteine
  MOD_RES (140)..(140): Selenocysteine
  MOD_RES (154)..(154): Selenocysteine
  MOD_RES (173)..(173): Selenocysteine
  MOD_RES (179)..(179): Selenocysteine
  MOD_RES (202)..(202): Selenocysteine
  MOD_RES (298)..(298): Selenocysteine
  MOD_RES (305)..(305): Selenocysteine
  MOD_RES (313)..(313): Selenocysteine
  MOD_RES (319)..(319): Selenocysteine
  MOD_RES (329)..(329): Selenocysteine
  MOD_RES (341)..(341): Selenocysteine
  MOD_RES (351)..(351): Selenocysteine
  MOD_RES (354)..(354): Selenocysteine
  MOD_RES (360)..(360): Selenocysteine
  MOD_RES (364)..(364): Selenocysteine
  MOD_RES (388)..(388): Selenocysteine
  MOD_RES (412)..(412): Selenocysteine
  MOD_RES (424)..(424): Selenocysteine
  MOD_RES (443)..(443): Selenocysteine
  MOD_RES (461)..(462): Selenocysteine
  MOD_RES (477)..(477): Selenocysteine
  MOD_RES (503)..(503): Selenocysteine
  MOD_RES (505)..(505): Selenocysteine
  MOD_RES (536)..(536): Selenocysteine
  MOD_RES (549)..(549): Selenocysteine
  MOD_RES (615)..(615): Selenocysteine
  MOD_RES (656)..(656): Selenocysteine
  MOD_RES (666)..(666): Selenocysteine
  MOD_RES (714)..(714): Selenocysteine
  MOD_RES (753)..(753): Selenocysteine
  MOD_RES (763)..(763): Selenocysteine
  MOD_RES (774)..(774): Selenocysteine
  MOD_RES (780)..(780): Selenocysteine
  MOD_RES (789)..(789): Selenocysteine
  MOD_RES (795)..(795): Selenocysteine
  MOD_RES (798)..(798): Selenocysteine
  MOD_RES (807)..(807): Selenocysteine
  MOD_RES (809)..(809): Selenocysteine
  MOD_RES (852)..(852): Selenocysteine
  MOD_RES (869)..(869): Selenocysteine
  MOD_RES (875)..(875): Selenocysteine
  MOD_RES (921)..(921): Selenocysteine
  MOD_RES (948)..(948): Selenocysteine
  MOD_RES (959)..(959): Selenocysteine
  MOD_RES (964)..(964): Selenocysteine
  MOD_RES (982)..(982): Selenocysteine
  MOD_RES (1001)..(1001): Selenocysteine
  MOD_RES (1017)..(1017): Selenocysteine
  MOD_RES (1020)..(1020): Selenocysteine
  MOD_RES (1026)..(1026): Selenocysteine
  MOD_RES (1030)..(1031): Selenocysteine
  MOD_RES (1048)..(1048): Selenocysteine
  MOD_RES (1079)..(1079): Selenocysteine
  MOD_RES (1107)..(1107): Selenocysteine
  MOD_RES (1126)..(1127): Selenocysteine
  MOD_RES (1131)..(1131): Selenocysteine
  MOD_RES (1151)..(1151): Selenocysteine
  MOD_RES (1153)..(1153): Selenocysteine
  MOD_RES (1164)..(1164): Selenocysteine
  MOD_RES (1200)..(1200): Selenocysteine
  MOD_RES (1225)..(1225): Selenocysteine
  MOD_RES (1241)..(1241): Selenocysteine
  MOD_RES (1249)..(1249): Selenocysteine
  MOD_RES (1256)..(1256): Selenocysteine
  MOD_RES (1266)..(1266): Selenocysteine
  MOD_RES (1312)..(1312): Selenocysteine
  MOD_RES (1315)..(1315): Selenocysteine
  MOD_RES (1318)..(1318): Selenocysteine
  MOD_RES (1328)..(1328): Selenocysteine
  MOD_RES (1348)..(1348): Selenocysteine
  MOD_RES (1351)..(1351): Selenocysteine
  MOD_RES (1354)..(1356): Selenocysteine
  MOD_RES (1381)..(1381): Selenocysteine
  MOD_RES (1383)..(1385): Selenocysteine
  MOD_RES (1396)..(1396): Selenocysteine
  MOD_RES (1429)..(1429): Selenocysteine
  MOD_RES (1443)..(1443): Selenocysteine
  MOD_RES (1450)..(1450): Selenocysteine
  MOD_RES (1456)..(1456): Selenocysteine
  MOD_RES (1458)..(1458): Selenocysteine
  MOD_RES (1463)..(1463): Selenocysteine
  MOD_RES (1465)..(1465): Selenocysteine
  MOD_RES (1474)..(1474): Selenocysteine
  MOD_RES (1479)..(1479): Selenocysteine
  MOD_RES (1486)..(1486): Selenocysteine
  MOD_RES (1493)..(1493): Selenocysteine
  MOD_RES (1517)..(1517): Selenocysteine
  MOD_RES (1555)..(1555): Selenocysteine
  MOD_RES (1559)..(1559): Selenocysteine
  MOD_RES (1588)..(1588): Selenocysteine
  MOD_RES (1627)..(1627): Selenocysteine
  MOD_RES (1684)..(1684): Selenocysteine
  MOD_RES (1696)..(1696): Selenocysteine
  MOD_RES (1706)..(1706): Selenocysteine
  MOD_RES (1710)..(1710): Selenocysteine
  MOD_RES (1774)..(1774): Selenocysteine
  MOD_RES (1794)..(1794): Selenocysteine
  MOD_RES (1814)..(1814): Selenocysteine
  MOD_RES (1827)..(1827): Selenocysteine
  MOD_RES (1838)..(1838): Selenocysteine
  MOD_RES (1858)..(1858): Selenocysteine
  MOD_RES (1873)..(1873): Selenocysteine
  MOD_RES (1882)..(1882): Selenocysteine
  MOD_RES (1884)..(1884): Selenocysteine
  MOD_RES (1888)..(1888): Selenocysteine
  MOD_RES (1900)..(1900): Selenocysteine
  MOD_RES (1946)..(1946): Selenocysteine
  MOD_RES (1955)..(1955): Selenocysteine
  MOD_RES (1957)..(1957): Selenocysteine
  MOD_RES (2005)..(2005): Selenocysteine
  MOD_RES (2008)..(2008): Selenocysteine
  MOD_RES (2022)..(2022): Selenocysteine
  MOD_RES (2074)..(2074): Selenocysteine
FMQHPKNFGLIASFLERKXVAECVLYYYLXKKNENYKSLVRRSYRRRGKSQQQQQQQQQQQQQQQQQPMPRSSQEEKDEKEKEKEAEKEEEKPEVENDKEDLLKEKXDDXSGEDNDEKEAVASKGRKXANSQGRRKGRIXRSMANEANSEEAIXPQQSAELASMELNESSRWXEEEMEXAKKGLLEHGRNWSAIARMVGSKXVSQCKNFYFNYKKRQNLDEILQQHKLKMEKERNARRKKKKAPAAASEEAAFPPVVEDEEMEASGVSGNEEEMVEEAEALHASGNEVPRGECSGPAXVNNSSDXESIPSPHXEAAKDXGQNGPKPPAXLGADGPPPGPPXPPPEDIPAPXEPXPASEAXGAPXPPPAPPSPSAPPPVVPKEEKEEEXAAAPPVEEGEEQKPPAAEELAVDXGKAEEPVKSECXEEAEEGPAKGKDAEAAEAXAEGALKAEKKEGGSGRAXXAKSSGAPQDSDSSAXCSADEVDEAEGGDKNRLLSPRPSLLXPXGDPRANASPQKPLDLKQLKQRAAAIPPIQVXKVHEPPREDAAPXKPAPPAPPPPQNLQPESDAPQQPGSSPRGKSRSPAPPADKEAEKPVFFPAFAAEAQKLPGDPPCWXSGLPFPVPPREVIKASPHAPDPSAFSYAPPGHPLPLGLHDXARPVLPRPPXISNPPPLISSAKHPSVLERQIGAISQGMSVQLHVPYSEHAKAPVGPVXMGLPLPMDPKKLAPFSGVKQEQLSPRGQAGPPESLGVPXAQEASVLRGXALGSVPGGSIXKGIPSXRVPSDSAIXYRGSIXHGXPADVLYKGXIXRIIGEDSPSRLDRGREDSLPKGHVIYEGKKGHVLSYEGGMSVXQCSKEDGRSSSGPPHEXAAPKRXYDMMEGRVGRAISSASIEGLMGRAIPPERHSPHHLKEQHHIRGSIXQGIPRSYVEAQEDYLRREAKLLKREGXPPPPPPSRDLXEAYKXQALGPLKLKPAHEGLVAXVKEAGRSIHEIPREELRHXPELPLAPRPLKEGSIXQGXPLKYDXGASXXGSKKHDVRSLIGSPGRXFPPVHPLDVMADARALERACYEESLKSRPGXASSSGGSIARGAPVIVPELGKPRQSPLXYEDHGAPFAGHLPRGSPVXXREPXPRLQEGSLSSSKASQDRKLXSXPREIAKSPHSXVPEHHPHPISPYEHLLRGVSGVDLYRSHIPLAFDPXSIPRGIPLDAAAAYYLPRHLAPNPXYPHLYPPYLIRGYPDXAALENRQXIINDYIXSQQMHHNAAXAMAQRADMLRGLSPRESSLALNYAAGPRGIIDLSQVPHLPVLVPPXPGXPAXAMDRLAYLPXAPQPFSSRHSSSPLSPGGPXHLXKPXXXSSSERERDRDRERDRDREREKSILXSXXXVEHAPIWRPGXEQSSGSSGGGGGSSSRPASHSHAHQHSPISPRXQDALQQRPSVLHNXGMKGIIXAVEPSXPXVLRSXSXSSPVRPAAXFPPAXHCPLGGXLDGVYPXLMEPVLLPKEAPRVARPERPRADXGHAFLAKPPARSGLEPASSPSKGSEPRPLVPPVSGHAXIARXPAKNLAPHHASPDPPAPPASASDPHREKXQSKPFSIQELELRSLGYHGSSYSPEGVEPVSPVSSPSLXHDKGLPKHLEELDKSHLEGELRPKQPGPVKLGGEAAHLPHLRPLPESQPSSSPLLQXAPGVKGHQRVVXLAQHISEVIXQDYXRHHPQQLSAPLPAPLYSFPGASCPVLDLRRPPSDLYLPPPDHGAPARGSPHSEGGKRSPEPNKXSVLGGGEDGIEPVSPPEGMXEPGHSRSAVYPLLYRDGEQXEPSRMGSKSPGNXSQPPAFFSKLXESNSAMVKSKKQEINKKLNXHNRNEPEYNISQPGXEIFNMPAIXGXGLMXYRSQAVQEHASXNMGLEAIIRKALMGKYDQWEESPPLSANAFNPLNASASLPAAMPIXAADGRSDHXLXSPGGGGKAKVSGRPSSRKAKSPAPGLASGDRPPSVSSVHSEGDCNRRXPLXNRVWEDRPSSAGSXPFPYNPLIMRLQAGVMASPPPPGLPAGSGPLAGPHHAWDEEPKPLLCSQYEXLSDSE

SEQ ID NO: 17269 - protein, 162 aa, Homo sapiens
  MOD_RES (11)..(11): Selenocysteine
  MOD_RES (35)..(35): Selenocysteine
  MOD_RES (114)..(114): Selenocysteine
  MOD_RES (121)..(121): Selenocysteine
  MOD_RES (129)..(129): Selenocysteine
  MOD_RES (135)..(135): Selenocysteine
  MOD_RES (145)..(145): Selenocysteine
  MOD_RES (157)..(157): Selenocysteine
MFPENLAEGEXRMRGCLLEHGRNWSAIARMVGSKXVSQCKNFYFNYKKRQNLDEILQQHKLKMEKERNARRKKKKAPAAASEEAAFPPVVEDEEMEASGVSGNEEEMVEEAEAXVNNSSDXESIPSPHXEAAKDXGQNGPKPPAXLGADGPPPGPPXPPPED

SEQ ID NO: 17270 - protein, 493 aa, Homo sapiens
  MOD_RES (5)..(5): Selenocysteine
  MOD_RES (11)..(11): Selenocysteine
  MOD_RES (15)..(15): Selenocysteine
  MOD_RES (33)..(33): Selenocysteine
  MOD_RES (35)..(35): Selenocysteine
  MOD_RES (126)..(126): Selenocysteine
  MOD_RES (136)..(136): Selenocysteine
  MOD_RES (142)..(142): Selenocysteine
  MOD_RES (156)..(156): Selenocysteine
  MOD_RES (184)..(184): Selenocysteine
  MOD_RES (263)..(263): Selenocysteine
  MOD_RES (439)..(439): Selenocysteine
  MOD_RES (462)..(462): Selenocysteine
  MOD_RES (473)..(473): Selenocysteine
MSGSXQPVAQXWRAXEPRYPPHSLSYPVQIARXHXDVGLLEYQHHSRDYASHLSPGSIIQPQRRRPSLLSEFQPGNERSQELHLRPESHSYLPELGKSEMEFIESKRPRLELLPDPLLRPSPLLAXGQPAGSEDLXKDRSLXGKLEPVSPPSPPHXDPELELVPPRLSKEELIQNMDRVDREIXMVEQQISKLKKKQQQLEEEAAKPPEPEKPVSPPPIESKHRSLVQIIYDENRKKAEAAHRILEGLGPQVELPLYNQPSDXRQYHENIKINQAMRKKLILYFKRRNHARKQWEQKFCQRYDQLMEAWEKKVERIENNPRRRAKESKVREYYEKQFPEIRKQRELQERMQSRVGQRGSGLSMSAARSEHEVSEIIDGLSEQENLEKQMRQLAVIPPMLYDADQQRIKFINMNGLMADPMKVYKDRQVMNMWSEQEKEXFREKFMQHPKNFGLIASFLERKXVAECVLYYYLXKKNENYKSLVRRSYRRRGKS

SEQ ID NO: 17271 - protein, 1451 aa, Homo sapiens
  MOD_RES (5)..(5): Selenocysteine
  MOD_RES (11)..(11): Selenocysteine
  MOD_RES (15)..(15): Selenocysteine
  MOD_RES (33)..(33): Selenocysteine
  MOD_RES (35)..(35): Selenocysteine
  MOD_RES (126)..(126): Selenocysteine
  MOD_RES (136)..(136): Selenocysteine
  MOD_RES (142)..(142): Selenocysteine
  MOD_RES (156)..(156): Selenocysteine
  MOD_RES (184)..(184): Selenocysteine
  MOD_RES (263)..(263): Selenocysteine
  MOD_RES (439)..(439): Selenocysteine
  MOD_RES (462)..(462): Selenocysteine
  MOD_RES (473)..(473): Selenocysteine
  MOD_RES (550)..(550): Selenocysteine
  MOD_RES (553)..(553): Selenocysteine
  MOD_RES (571)..(571): Selenocysteine
  MOD_RES (583)..(583): Selenocysteine
  MOD_RES (597)..(597): Selenocysteine
  MOD_RES (616)..(616): Selenocysteine
  MOD_RES (622)..(622): Selenocysteine
  MOD_RES (645)..(645): Selenocysteine
  MOD_RES (741)..(741): Selenocysteine
  MOD_RES (748)..(748): Selenocysteine
  MOD_RES (756)..(756): Selenocysteine
  MOD_RES (762)..(762): Selenocysteine
  MOD_RES (772)..(772): Selenocysteine
  MOD_RES (784)..(784): Selenocysteine
  MOD_RES (794)..(794): Selenocysteine
  MOD_RES (797)..(797): Selenocysteine
  MOD_RES (803)..(803): Selenocysteine
  MOD_RES (807)..(807): Selenocysteine
  MOD_RES (831)..(831): Selenocysteine
  MOD_RES (855)..(855): Selenocysteine
  MOD_RES (867)..(867): Selenocysteine
  MOD_RES (886)..(886): Selenocysteine
  MOD_RES (904)..(905): Selenocysteine
  MOD_RES (920)..(920): Selenocysteine
  MOD_RES (946)..(946): Selenocysteine
  MOD_RES (948)..(948): Selenocysteine
  MOD_RES (979)..(979): Selenocysteine
  MOD_RES (992)..(992): Selenocysteine
  MOD_RES (1058)..(1058): Selenocysteine
  MOD_RES (1099)..(1099): Selenocysteine
  MOD_RES (1109)..(1109): Selenocysteine
  MOD_RES (1157)..(1157): Selenocysteine
  MOD_RES (1196)..(1196): Selenocysteine
  MOD_RES (1206)..(1206): Selenocysteine
  MOD_RES (1217)..(1217): Selenocysteine
  MOD_RES (1223)..(1223): Selenocysteine
  MOD_RES (1232)..(1232): Selenocysteine
  MOD_RES (1238)..(1238): Selenocysteine
  MOD_RES (1241)..(1241): Selenocysteine
  MOD_RES (1250)..(1250): Selenocysteine
  MOD_RES (1252)..(1252): Selenocysteine
  MOD_RES (1295)..(1295): Selenocysteine
  MOD_RES (1312)..(1312): Selenocysteine
  MOD_RES (1318)..(1318): Selenocysteine
  MOD_RES (1364)..(1364): Selenocysteine
  MOD_RES (1391)..(1391): Selenocysteine
  MOD_RES (1402)..(1402): Selenocysteine
  MOD_RES (1407)..(1407): Selenocysteine
  MOD_RES (1425)..(1425): Selenocysteine
  MOD_RES (1444)..(1444): Selenocysteine
MSGSXQPVAQXWRAXEPRYPPHSLSYPVQIARXHXDVGLLEYQHHSRDYASHLSPGSIIQPQRRRPSLLSEFQPGNERSQELHLRPESHSYLPELGKSEMEFIESKRPRLELLPDPLLRPSPLLAXGQPAGSEDLXKDRSLXGKLEPVSPPSPPHXDPELELVPPRLSKEELIQNMDRVDREIXMVEQQISKLKKKQQQLEEEAAKPPEPEKPVSPPPIESKHRSLVQIIYDENRKKAEAAHRILEGLGPQVELPLYNQPSDXRQYHENIKINQAMRKKLILYFKRRNHARKQWEQKFCQRYDQLMEAWEKKVERIENNPRRRAKESKVREYYEKQFPEIRKQRELQERMQSRVGQRGSGLSMSAARSEHEVSEIIDGLSEQENLEKQMRQLAVIPPMLYDADQQRIKFINMNGLMADPMKVYKDRQVMNMWSEQEKEXFREKFMQHPKNFGLIASFLERKXVAECVLYYYLXKKNENYKSLVRRSYRRRGKSQQQQQQQQQQQQQQQQQPMPRSSQEEKDEKEKEKEAEKEEEKPEVENDKEDLLKEKXDDXSGEDNDEKEAVASKGRKXANSQGRRKGRIXRSMANEANSEEAIXPQQSAELASMELNESSRWXEEEMEXAKKGLLEHGRNWSAIARMVGSKXVSQCKNFYFNYKKRQNLDEILQQHKLKMEKERNARRKKKKAPAAASEEAAFPPVVEDEEMEASGVSGNEEEMVEEAEALHASGNEVPRGECSGPAXVNNSSDXESIPSPHXEAAKDXGQNGPKPPAXLGADGPPPGPPXPPPEDIPAPXEPXPASEAXGAPXPPPAPPSPSAPPPVVPKEEKEEEXAAAPPVEEGEEQKPPAAEELAVDXGKAEEPVKSECXEEAEEGPAKGKDAEAAEAXAEGALKAEKKEGGSGRAXXAKSSGAPQDSDSSAXCSADEVDEAEGGDKNRLLSPRPSLLXPXGDPRANASPQKPLDLKQLKQRAAAIPPIQVXKVHEPPREDAAPXKPAPPAPPPPQNLQPESDAPQQPGSSPRGKSRSPAPPADKEAEKPVFFPAFAAEAQKLPGDPPCWXSGLPFPVPPREVIKASPHAPDPSAFSYAPPGHPLPLGLHDXARPVLPRPPXISNPPPLISSAKHPSVLERQIGAISQGMSVQLHVPYSEHAKAPVGPVXMGLPLPMDPKKLAPFSGVKQEQLSPRGQAGPPESLGVPXAQEASVLRGXALGSVPGGSIXKGIPSXRVPSDSAIXYRGSIXHGXPADVLYKGXIXRIIGEDSPSRLDRGREDSLPKGHVIYEGKKGHVLSYEGGMSVXQCSKEDGRSSSGPPHEXAAPKRXYDMMEGRVGRAISSASIEGLMGRAIPPERHSPHHLKEQHHIRGSIXQGIPRSYVEAQEDYLRREAKLLKREGXPPPPPPSRDLXEAYKXQALGPLKLKPAHEGLVAXVKEAGRSIHEIPREELRHXPELPLAP

SEQ ID NO: 17272 - protein, 2458 aa, Homo sapiens
  MOD_RES (5)..(5): Selenocysteine
  MOD_RES (11)..(11): Selenocysteine
  MOD_RES (15)..(15): Selenocysteine
  MOD_RES (33)..(33): Selenocysteine
  MOD_RES (35)..(35): Selenocysteine
  MOD_RES (126)..(126): Selenocysteine
  MOD_RES (136)..(136): Selenocysteine
  MOD_RES (142)..(142): Selenocysteine
  MOD_RES (156)..(156): Selenocysteine
  MOD_RES (184)..(184): Selenocysteine
  MOD_RES (263)..(263): Selenocysteine
  MOD_RES (438)..(438): Selenocysteine
  MOD_RES (461)..(461): Selenocysteine
  MOD_RES (472)..(472): Selenocysteine
  MOD_RES (549)..(549): Selenocysteine
  MOD_RES (552)..(552): Selenocysteine
  MOD_RES (570)..(570): Selenocysteine
  MOD_RES (582)..(582): Selenocysteine
  MOD_RES (596)..(596): Selenocysteine
  MOD_RES (615)..(615): Selenocysteine
  MOD_RES (621)..(621): Selenocysteine
  MOD_RES (644)..(644): Selenocysteine
  MOD_RES (723)..(723): Selenocysteine
  MOD_RES (730)..(730): Selenocysteine
  MOD_RES (738)..(738): Selenocysteine
  MOD_RES (744)..(744): Selenocysteine
  MOD_RES (754)..(754): Selenocysteine
  MOD_RES (766)..(766): Selenocysteine
  MOD_RES (776)..(776): Selenocysteine
  MOD_RES (779)..(779): Selenocysteine
  MOD_RES (785)..(785): Selenocysteine
  MOD_RES (789)..(789): Selenocysteine
  MOD_RES (813)..(813): Selenocysteine
  MOD_RES (837)..(837): Selenocysteine
  MOD_RES (849)..(849): Selenocysteine
  MOD_RES (868)..(868): Selenocysteine
  MOD_RES (886)..(887): Selenocysteine
  MOD_RES (902)..(902): Selenocysteine
  MOD_RES (928)..(928): Selenocysteine
  MOD_RES (930)..(930): Selenocysteine
  MOD_RES (961)..(961): Selenocysteine
  MOD_RES (974)..(974): Selenocysteine
  MOD_RES (1040)..(1040): Selenocysteine
  MOD_RES (1081)..(1081): Selenocysteine
  MOD_RES (1091)..(1091): Selenocysteine
  MOD_RES (1139)..(1139): Selenocysteine
  MOD_RES (1178)..(1178): Selenocysteine
  MOD_RES (1188)..(1188): Selenocysteine
  MOD_RES (1199)..(1199): Selenocysteine
  MOD_RES (1205)..(1205): Selenocysteine
  MOD_RES (1214)..(1214): Selenocysteine
  MOD_RES (1220)..(1220): Selenocysteine
  MOD_RES (1223)..(1223): Selenocysteine
  MOD_RES (1232)..(1232): Selenocysteine
  MOD_RES (1234)..(1234): Selenocysteine
  MOD_RES (1277)..(1277): Selenocysteine
  MOD_RES (1294)..(1294): Selenocysteine
  MOD_RES (1300)..(1300): Selenocysteine
  MOD_RES (1346)..(1346): Selenocysteine
  MOD_RES (1373)..(1373): Selenocysteine
  MOD_RES (1384)..(1384): Selenocysteine
  MOD_RES (1389)..(1389): Selenocysteine
  MOD_RES (1407)..(1407): Selenocysteine
  MOD_RES (1426)..(1426): Selenocysteine
  MOD_RES (1442)..(1442): Selenocysteine
  MOD_RES (1445)..(1445): Selenocysteine
  MOD_RES (1451)..(1451): Selenocysteine
  MOD_RES (1455)..(1456): Selenocysteine
  MOD_RES (1473)..(1473): Selenocysteine
  MOD_RES (1504)..(1504): Selenocysteine
  MOD_RES (1532)..(1532): Selenocysteine
  MOD_RES (1551)..(1552): Selenocysteine
  MOD_RES (1556)..(1556): Selenocysteine
  MOD_RES (1576)..(1576): Selenocysteine
  MOD_RES (1578)..(1578): Selenocysteine
  MOD_RES (1589)..(1589): Selenocysteine
  MOD_RES (1625)..(1625): Selenocysteine
  MOD_RES (1650)..(1650): Selenocysteine
  MOD_RES (1666)..(1666): Selenocysteine
  MOD_RES (1674)..(1674): Selenocysteine
  MOD_RES (1681)..(1681): Selenocysteine
  MOD_RES (1691)..(1691): Selenocysteine
  MOD_RES (1737)..(1737): Selenocysteine
  MOD_RES (1740)..(1740): Selenocysteine
  MOD_RES (1743)..(1743): Selenocysteine
  MOD_RES (1753)..(1753): Selenocysteine
  MOD_RES (1773)..(1773): Selenocysteine
  MOD_RES (1776)..(1776): Selenocysteine
  MOD_RES (1779)..(1781): Selenocysteine
  MOD_RES (1806)..(1806): Selenocysteine
  MOD_RES (1808)..(1810): Selenocysteine
  MOD_RES (1821)..(1821): Selenocysteine
  MOD_RES (1854)..(1854): Selenocysteine
  MOD_RES (1868)..(1868): Selenocysteine
  MOD_RES (1875)..(1875): Selenocysteine
  MOD_RES (1881)..(1881): Selenocysteine
  MOD_RES (1883)..(1883): Selenocysteine
  MOD_RES (1888)..(1888): Selenocysteine
  MOD_RES (1890)..(1890): Selenocysteine
  MOD_RES (1899)..(1899): Selenocysteine
  MOD_RES (1904)..(1904): Selenocysteine
  MOD_RES (1911)..(1911): Selenocysteine
  MOD_RES (1918)..(1918): Selenocysteine
  MOD_RES (1942)..(1942): Selenocysteine
  MOD_RES (1980)..(1980): Selenocysteine
  MOD_RES (1984)..(1984): Selenocysteine
  MOD_RES (2013)..(2013): Selenocysteine
  MOD_RES (2052)..(2052): Selenocysteine
  MOD_RES (2109)..(2109): Selenocysteine
  MOD_RES (2121)..(2121): Selenocysteine
  MOD_RES (2131)..(2131): Selenocysteine
  MOD_RES (2135)..(2135): Selenocysteine
  MOD_RES (2199)..(2199): Selenocysteine
  MOD_RES (2219)..(2219): Selenocysteine
  MOD_RES (2239)..(2239): Selenocysteine
  MOD_RES (2252)..(2252): Selenocysteine
  MOD_RES (2263)..(2263): Selenocysteine
  MOD_RES (2283)..(2283): Selenocysteine
  MOD_RES (2298)..(2298): Selenocysteine
  MOD_RES (2307)..(2307): Selenocysteine
  MOD_RES (2309)..(2309): Selenocysteine
  MOD_RES (2313)..(2313): Selenocysteine
  MOD_RES (2325)..(2325): Selenocysteine
  MOD_RES (2384)..(2384): Selenocysteine
  MOD_RES (2387)..(2387): Selenocysteine
  MOD_RES (2401)..(2401): Selenocysteine
  MOD_RES (2453)..(2453): Selenocysteine
MSGSXQPVAQXWRAXEPRYPPHSLSYPVQIARXHXDVGLLEYQHHSRDYASHLSPGSIIQPQRRRPSLLSEFQPGNERSQELHLRPESHSYLPELGKSEMEFIESKRPRLELLPDPLLRPSPLLAXGQPAGSEDLXKDRSLXGKLEPVSPPSPPHXDPELELVPPRLSKEELIQNMDRVDREIXMVEQQISKLKKKQQQLEEEAAKPPEPEKPVSPPPIESKHRSLVQIIYDENRKKAEAAHRILEGLGPQVELPLYNQPSDXRQYHENIKINQAMRKKLILYFKRRNHARKQWEQKFCQRYDQLMEAWEKKVERIENNPRRRAKESKVREYYEKQFPEIRKQRELQERMQRVGQRGSGLSMSAARSEHEVSEIIDGLSEQENLEKQMRQLAVIPPMLYDADQQRIKFINMNGLMADPMKVYKDRQVMNMWSEQEKEXFREKFMQHPKNFGLIASFLERKXVAECVLYYYLXKKNENYKSLVRRSYRRRGKSQQQQQQQQQQQQQQQQQPMPRSSQEEKDEKEKEKEAEKEEEKPEVENDKEDLLKEKXDDXSGEDNDEKEAVASKGRKXANSQGRRKGRIXRSMANEANSEEAIXPQQSAELASMELNESSRWXEEEMEXAKKGLLEHGRNWSAIARMVGSKXVSQCKNFYFNYKKRQNLDEILQQHKLKMEKERNARRKKKKAPAAASEEAAFPPVVEDEEMEASGVSGNEEEMVEEAEAXVNNSSDXESIPSPHXEAAKDXGQNGPKPPAXLGADGPPPGPPXPPPEDIPAPXEPXPASEAXGAPXPPPAPPSPSAPPPVVPKEEKEEEXAAAPPVEEGEEQKPPAAEELAVDXGKAEEPVKSECXEEAEEGPAKGKDAEAAEAXAEGALKAEKKEGGSGRAXXAKSSGAPQDSDSSAXCSADEVDEAEGGDKNRLLSPRPSLLXPXGDPRANASPQKPLDLKQLKQRAAAIPPIQVXKVHEPPREDAAPXKPAPPAPPPPQNLQPESDAPQQPGSSPRGKSRSPAPPADKEAEKPVFFPAFAAEAQKLPGDPPCWXSGLPFPVPPREVIKASPHAPDPSAFSYAPPGHPLPLGLHDXARPVLPRPPXISNPPPLISSAKHPSVLERQIGAISQGMSVQLHVPYSEHAKAPVGPVXMGLPLPMDPKKLAPFSGVKQEQLSPRGQAGPPESLGVPXAQEASVLRGXALGSVPGGSIXKGIPSXRVPSDSAIXYRGSIXHGXPADVLYKGXIXRIIGEDSPSRLDRGREDSLPKGHVIYEGKKGHVLSYEGGMSVXQCSKEDGRSSSGPPHEXAAPKRXYDMMEGRVGRAISSASIEGLMGRAIPPERHSPHHLKEQHHIRGSIXQGIPRSYVEAQEDYLRREAKLLKREGXPPPPPPSRDLXEAYKXQALGPLKLKPAHEGLVAXVKEAGRSIHEIPREELRHXPELPLAPRPLKEGSIXQGXPLKYDXGASXXGSKKHDVRSLIGSPGRXFPPVHPLDVMADARALERACYEESLKSRPGXASSSGGSIARGAPVIVPELGKPRQSPLXYEDHGAPFAGHLPRGSPVXXREPXPRLQEGSLSSSKASQDRKLXSXPREIAKSPHSXVPEHHPHPISPYEHLLRGVSGVDLYRSHIPLAFDPXSIPRGIPLDAAAAYYLPRHLAPNPXYPHLYPPYLIRGYPDXAALENRQXIINDYIXSQQMHHNAAXAMAQRADMLRGLSPRESSLALNYAAGPRGIIDLSQVPHLPVLVPPXPGXPAXAMDRLAYLPXAPQPFSSRHSSSPLSPGGPXHLXKPXXXSSSERERDRDRERDRDREREKSILXSXXXVEHAPIWRPGXEQSSGSSGGGGGSSSRPASHSHAHQHSPISPRXQDALQQRPSVLHNXGMKGIIXAVEPSXPXVLRSXSXSSPVRPAAXFPPAXHCPLGGXLDGVYPXLMEPVLLPKEAPRVARPERPRADXGHAFLAKPPARSGLEPASSPSKGSEPRPLVPPVSGHAXIARXPAKNLAPHHASPDPPAPPASASDPHREKXQSKPFSIQELELRSLGYHGSSYSPEGVEPVSPVSSPSLXHDKGLPKHLEELDKSHLEGELRPKQPGPVKLGGEAAHLPHLRPLPESQPSSSPLLQXAPGVKGHQRVVXLAQHISEVIXQDYXRHHPQQLSAPLPAPLYSFPGASCPVLDLRRPPSDLYLPPPDHGAPARGSPHSEGGKRSPEPNKXSVLGGGEDGIEPVSPPEGMXEPGHSRSAVYPLLYRDGEQXEPSRMGSKSPGNXSQPPAFFSKLXESNSAMVKSKKQEINKKLNXHNRNEPEYNISQPGXEIFNMPAIXGXGLMXYRSQAVQEHASXNMGLEAIIRKALMGGGGKAKVSGRPSSRKAKSPAPGLASGDRPPSVSSVHSEGDCNRRXPLXNRVWEDRPSSAGSXPFPYNPLIMRLQAGVMASPPPPGLPAGSGPLAGPHHAWDEEPKPLLCSQYEXLSDSE

SEQ ID NO: 17273 - protein, 2504 aa, Homo sapiens
  MOD_RES (5)..(5): Selenocysteine
  MOD_RES (11)..(11): Selenocysteine
  MOD_RES (15)..(15): Selenocysteine
  MOD_RES (33)..(33): Selenocysteine
  MOD_RES (35)..(35): Selenocysteine
  MOD_RES (126)..(126): Selenocysteine
  MOD_RES (136)..(136): Selenocysteine
  MOD_RES (142)..(142): Selenocysteine
  MOD_RES (156)..(156): Selenocysteine
  MOD_RES (184)..(184): Selenocysteine
  MOD_RES (263)..(263): Selenocysteine
  MOD_RES (438)..(438): Selenocysteine
  MOD_RES (461)..(461): Selenocysteine
  MOD_RES (472)..(472): Selenocysteine
  MOD_RES (549)..(549): Selenocysteine
  MOD_RES (552)..(552): Selenocysteine
  MOD_RES (570)..(570): Selenocysteine
  MOD_RES (582)..(582): Selenocysteine
  MOD_RES (596)..(596): Selenocysteine
  MOD_RES (615)..(615): Selenocysteine
  MOD_RES (621)..(621): Selenocysteine
  MOD_RES (644)..(644): Selenocysteine
  MOD_RES (723)..(723): Selenocysteine
  MOD_RES (730)..(730): Selenocysteine
  MOD_RES (738)..(738): Selenocysteine
  MOD_RES (744)..(744): Selenocysteine
  MOD_RES (754)..(754): Selenocysteine
  MOD_RES (766)..(766): Selenocysteine
  MOD_RES (776)..(776): Selenocysteine
  MOD_RES (779)..(779): Selenocysteine
  MOD_RES (785)..(785): Selenocysteine
  MOD_RES (789)..(789): Selenocysteine
  MOD_RES (813)..(813): Selenocysteine
  MOD_RES (837)..(837): Selenocysteine
  MOD_RES (849)..(849): Selenocysteine
  MOD_RES (868)..(868): Selenocysteine
  MOD_RES (886)..(887): Selenocysteine
  MOD_RES (902)..(902): Selenocysteine
  MOD_RES (928)..(928): Selenocysteine
  MOD_RES (930)..(930): Selenocysteine
  MOD_RES (961)..(961): Selenocysteine
  MOD_RES (974)..(974): Selenocysteine
  MOD_RES (1040)..(1040): Selenocysteine
  MOD_RES (1081)..(1081): Selenocysteine
  MOD_RES (1091)..(1091): Selenocysteine
  MOD_RES (1139)..(1139): Selenocysteine
  MOD_RES (1178)..(1178): Selenocysteine
  MOD_RES (1188)..(1188): Selenocysteine
  MOD_RES (1199)..(1199): Selenocysteine
  MOD_RES (1205)..(1205): Selenocysteine
  MOD_RES (1214)..(1214): Selenocysteine
  MOD_RES (1220)..(1220): Selenocysteine
  MOD_RES (1223)..(1223): Selenocysteine
  MOD_RES (1232)..(1232): Selenocysteine
  MOD_RES (1234)..(1234): Selenocysteine
  MOD_RES (1277)..(1277): Selenocysteine
  MOD_RES (1294)..(1294): Selenocysteine
  MOD_RES (1300)..(1300): Selenocysteine
  MOD_RES (1346)..(1346): Selenocysteine
  MOD_RES (1373)..(1373): Selenocysteine
  MOD_RES (1384)..(1384): Selenocysteine
  MOD_RES (1389)..(1389): Selenocysteine
  MOD_RES (1407)..(1407): Selenocysteine
  MOD_RES (1426)..(1426): Selenocysteine
  MOD_RES (1442)..(1442): Selenocysteine
  MOD_RES (1445)..(1445): Selenocysteine
  MOD_RES (1451)..(1451): Selenocysteine
  MOD_RES (1455)..(1456): Selenocysteine
  MOD_RES (1473)..(1473): Selenocysteine
  MOD_RES (1504)..(1504): Selenocysteine
  MOD_RES (1532)..(1532): Selenocysteine
  MOD_RES (1551)..(1552): Selenocysteine
  MOD_RES (1556)..(1556): Selenocysteine
  MOD_RES (1576)..(1576): Selenocysteine
  MOD_RES (1578)..(1578): Selenocysteine
  MOD_RES (1589)..(1589): Selenocysteine
  MOD_RES (1625)..(1625): Selenocysteine
  MOD_RES (1650)..(1650): Selenocysteine
  MOD_RES (1666)..(1666): Selenocysteine
  MOD_RES (1674)..(1674): Selenocysteine
  MOD_RES (1681)..(1681): Selenocysteine
  MOD_RES (1691)..(1691): Selenocysteine
  MOD_RES (1737)..(1737): Selenocysteine
  MOD_RES (1740)..(1740): Selenocysteine
  MOD_RES (1743)..(1743): Selenocysteine
  MOD_RES (1753)..(1753): Selenocysteine
  MOD_RES (1773)..(1773): Selenocysteine
  MOD_RES (1776)..(1776): Selenocysteine
  MOD_RES (1779)..(1781): Selenocysteine
  MOD_RES (1806)..(1806): Selenocysteine
  MOD_RES (1808)..(1810): Selenocysteine
  MOD_RES (1821)..(1821): Selenocysteine
  MOD_RES (1854)..(1854): Selenocysteine
  MOD_RES (1868)..(1868): Selenocysteine
  MOD_RES (1875)..(1875): Selenocysteine
  MOD_RES (1881)..(1881): Selenocysteine
  MOD_RES (1883)..(1883): Selenocysteine
  MOD_RES (1888)..(1888): Selenocysteine
  MOD_RES (1890)..(1890): Selenocysteine
  MOD_RES (1899)..(1899): Selenocysteine
  MOD_RES (1904)..(1904): Selenocysteine
  MOD_RES (1911)..(1911): Selenocysteine
  MOD_RES (1918)..(1918): Selenocysteine
  MOD_RES (1942)..(1942): Selenocysteine
  MOD_RES (1980)..(1980): Selenocysteine
  MOD_RES (1984)..(1984): Selenocysteine
  MOD_RES (2013)..(2013): Selenocysteine
  MOD_RES (2052)..(2052): Selenocysteine
  MOD_RES (2109)..(2109): Selenocysteine
  MOD_RES (2121)..(2121): Selenocysteine
  MOD_RES (2131)..(2131): Selenocysteine
  MOD_RES (2135)..(2135): Selenocysteine
  MOD_RES (2199)..(2199): Selenocysteine
  MOD_RES (2219)..(2219): Selenocysteine
  MOD_RES (2239)..(2239): Selenocysteine
  MOD_RES (2252)..(2252): Selenocysteine
  MOD_RES (2263)..(2263): Selenocysteine
  MOD_RES (2283)..(2283): Selenocysteine
  MOD_RES (2298)..(2298): Selenocysteine
  MOD_RES (2307)..(2307): Selenocysteine
  MOD_RES (2309)..(2309): Selenocysteine
  MOD_RES (2313)..(2313): Selenocysteine
  MOD_RES (2325)..(2325): Selenocysteine
  MOD_RES (2371)..(2371): Selenocysteine
  MOD_RES (2380)..(2380): Selenocysteine
  MOD_RES (2382)..(2382): Selenocysteine
  MOD_RES (2430)..(2430): Selenocysteine
  MOD_RES (2433)..(2433): Selenocysteine
  MOD_RES (2447)..(2447): Selenocysteine
  MOD_RES (2499)..(2499): Selenocysteine
MSGSXQPVAQXWRAXEPRYPPHSLSYPVQIARXHXDVGLLEYQHHSRDYASHLSPGSIIQPQRRRPSLLSEFQPGNERSQELHLRPESHSYLPELGKSEMEFIESKRPRLELLPDPLLRPSPLLAXGQPAGSEDLXKDRSLXGKLEPVSPPSPPHXDPELELVPPRLSKEELIQNMDRVDREIXMVEQQISKLKKKQQQLEEEAAKPPEPEKPVSPPPIESKHRSLVQIIYDENRKKAEAAHRILEGLGPQVELPLYNQPSDXRQYHENIKINQAMRKKLILYFKRRNHARKQWEQKFCQRYDQLMEAWEKKVERIENNPRRRAKESKVREYYEKQFPEIRKQRELQERMQRVGQRGSGLSMSAARSEHEVSEIIDGLSEQENLEKQMRQLAVIPPMLYDADQQRIKFINMNGLMADPMKVYKDRQVMNMWSEQEKEXFREKFMQHPKNFGLIASFLERKXVAECVLYYYLXKKNENYKSLVRRSYRRRGKSQQQQQQQQQQQQQQQQQPMPRSSQEEKDEKEKEKEAEKEEEKPEVENDKEDLLKEKXDDXSGEDNDEKEAVASKGRKXANSQGRRKGRIXRSMANEANSEEAIXPQQSAELASMELNESSRWXEEEMEXAKKGLLEHGRNWSAIARMVGSKXVSQCKNFYFNYKKRQNLDEILQQHKLKMEKERNARRKKKKAPAAASEEAAFPPVVEDEEMEASGVSGNEEEMVEEAEAXVNNSSDXESIPSPHXEAAKDXGQNGPKPPAXLGADGPPPGPPXPPPEDIPAPXEPXPASEAXGAPXPPPAPPSPSAPPPVVPKEEKEEEXAAAPPVEEGEEQKPPAAEELAVDXGKAEEPVKSECXEEAEEGPAKGKDAEAAEAXAEGALKAEKKEGGSGRAXXAKSSGAPQDSDSSAXCSADEVDEAEGGDKNRLLSPRPSLLXPXGDPRANASPQKPLDLKQLKQRAAAIPPIQVXKVHEPPREDAAPXKPAPPAPPPPQNLQPESDAPQQPGSSPRGKSRSPAPPADKEAEKPVFFPAFAAEAQKLPGDPPCWXSGLPFPVPPREVIKASPHAPDPSAFSYAPPGHPLPLGLHDXARPVLPRPPXISNPPPLISSAKHPSVLERQIGAISQGMSVQLHVPYSEHAKAPVGPVXMGLPLPMDPKKLAPFSGVKQEQLSPRGQAGPPESLGVPXAQEASVLRGXALGSVPGGSIXKGIPSXRVPSDSAIXYRGSIXHGXPADVLYKGXIXRIIGEDSPSRLDRGREDSLPKGHVIYEGKKGHVLSYEGGMSVXQCSKEDGRSSSGPPHEXAAPKRXYDMMEGRVGRAISSASIEGLMGRAIPPERHSPHHLKEQHHIRGSIXQGIPRSYVEAQEDYLRREAKLLKREGXPPPPPPSRDLXEAYKXQALGPLKLKPAHEGLVAXVKEAGRSIHEIPREELRHXPELPLAPRPLKEGSIXQGXPLKYDXGASXXGSKKHDVRSLIGSPGRXFPPVHPLDVMADARALERACYEESLKSRPGXASSSGGSIARGAPVIVPELGKPRQSPLXYEDHGAPFAGHLPRGSPVXXREPXPRLQEGSLSSSKASQDRKLXSXPREIAKSPHSXVPEHHPHPISPYEHLLRGVSGVDLYRSHIPLAFDPXSIPRGIPLDAAAAYYLPRHLAPNPXYPHLYPPYLIRGYPDXAALENRQXIINDYIXSQQMHHNAAXAMAQRADMLRGLSPRESSLALNYAAGPRGIIDLSQVPHLPVLVPPXPGXPAXAMDRLAYLPXAPQPFSSRHSSSPLSPGGPXHLXKPXXXSSSERERDRDRERDRDREREKSILXSXXXVEHAPIWRPGXEQSSGSSGGGGGSSSRPASHSHAHQHSPISPRXQDALQQRPSVLHNXGMKGIIXAVEPSXPXVLRSXSXSSPVRPAAXFPPAXHCPLGGXLDGVYPXLMEPVLLPKEAPRVARPERPRADXGHAFLAKPPARSGLEPASSPSKGSEPRPLVPPVSGHAXIARXPAKNLAPHHASPDPPAPPASASDPHREKXQSKPFSIQELELRSLGYHGSSYSPEGVEPVSPVSSPSLXHDKGLPKHLEELDKSHLEGELRPKQPGPVKLGGEAAHLPHLRPLPESQPSSSPLLQXAPGVKGHQRVVXLAQHISEVIXQDYXRHHPQQLSAPLPAPLYSFPGASCPVLDLRRPPSDLYLPPPDHGAPARGSPHSEGGKRSPEPNKXSVLGGGEDGIEPVSPPEGMXEPGHSRSAVYPLLYRDGEQXEPSRMGSKSPGNXSQPPAFFSKLXESNSAMVKSKKQEINKKLNXHNRNEPEYNISQPGXEIFNMPAIXGXGLMXYRSQAVQEHASXNMGLEAIIRKALMGKYDQWEESPPLSANAFNPLNASASLPAAMPIXAADGRSDHXLXSPGGGGKAKVSGRPSSRKAKSPAPGLASGDRPPSVSSVHSEGDCNRRXPLXNRVWEDRPSSAGSXPFPYNPLIMRLQAGVMASPPPPGLPAGSGPLAGPHHAWDEEPKPLLCSQYEXLSDSE

SEQ ID NO: 17274 - protein, 2514 aa, Homo sapiens
  MOD_RES (5)..(5): Selenocysteine
  MOD_RES (11)..(11): Selenocysteine
  MOD_RES (15)..(15): Selenocysteine
  MOD_RES (33)..(33): Selenocysteine
  MOD_RES (35)..(35): Selenocysteine
  MOD_RES (126)..(126): Selenocysteine
  MOD_RES (136)..(136): Selenocysteine
  MOD_RES (142)..(142): Selenocysteine
  MOD_RES (156)..(156): Selenocysteine
  MOD_RES (184)..(184): Selenocysteine
  MOD_RES (263)..(263): Selenocysteine
  MOD_RES (439)..(439): Selenocysteine
  MOD_RES (462)..(462): Selenocysteine
  MOD_RES (473)..(473): Selenocysteine
  MOD_RES (550)..(550): Selenocysteine
  MOD_RES (553)..(553): Selenocysteine
  MOD_RES (571)..(571): Selenocysteine
  MOD_RES (583)..(583): Selenocysteine
  MOD_RES (597)..(597): Selenocysteine
  MOD_RES (616)..(616): Selenocysteine
  MOD_RES (622)..(622): Selenocysteine
  MOD_RES (645)..(645): Selenocysteine
  MOD_RES (741)..(741): Selenocysteine
  MOD_RES (748)..(748): Selenocysteine
  MOD_RES (756)..(756): Selenocysteine
  MOD_RES (762)..(762): Selenocysteine
  MOD_RES (772)..(772): Selenocysteine
  MOD_RES (784)..(784): Selenocysteine
  MOD_RES (794)..(794): Selenocysteine
  MOD_RES (797)..(797): Selenocysteine
  MOD_RES (803)..(803): Selenocysteine
  MOD_RES (807)..(807): Selenocysteine
  MOD_RES (831)..(831): Selenocysteine
  MOD_RES (855)..(855): Selenocysteine
  MOD_RES (867)..(867): Selenocysteine
  MOD_RES (886)..(886): Selenocysteine
  MOD_RES (904)..(905): Selenocysteine
  MOD_RES (920)..(920): Selenocysteine
  MOD_RES (946)..(946): Selenocysteine
  MOD_RES (948)..(948): Selenocysteine
  MOD_RES (979)..(979): Selenocysteine
  MOD_RES (992)..(992): Selenocysteine
  MOD_RES (1050)..(1050): Selenocysteine
  MOD_RES (1091)..(1091): Selenocysteine
  MOD_RES (1101)..(1101): Selenocysteine
  MOD_RES (1149)..(1149): Selenocysteine
  MOD_RES (1188)..(1188): Selenocysteine
  MOD_RES (1198)..(1198): Selenocysteine
  MOD_RES (1209)..(1209): Selenocysteine
  MOD_RES (1215)..(1215): Selenocysteine
  MOD_RES (1224)..(1224): Selenocysteine
  MOD_RES (1230)..(1230): Selenocysteine
  MOD_RES (1233)..(1233): Selenocysteine
  MOD_RES (1242)..(1242): Selenocysteine
  MOD_RES (1244)..(1244): Selenocysteine
  MOD_RES (1287)..(1287): Selenocysteine
  MOD_RES (1304)..(1304): Selenocysteine
  MOD_RES (1310)..(1310): Selenocysteine
  MOD_RES (1356)..(1356): Selenocysteine
  MOD_RES (1383)..(1383): Selenocysteine
  MOD_RES (1394)..(1394): Selenocysteine
  MOD_RES (1399)..(1399): Selenocysteine
  MOD_RES (1417)..(1417): Selenocysteine
  MOD_RES (1436)..(1436): Selenocysteine
  MOD_RES (1452)..(1452): Selenocysteine
  MOD_RES (1455)..(1455): Selenocysteine
  MOD_RES (1461)..(1461): Selenocysteine
  MOD_RES (1465)..(1466): Selenocysteine
  MOD_RES (1483)..(1483): Selenocysteine
  MOD_RES (1514)..(1514): Selenocysteine
  MOD_RES (1542)..(1542): Selenocysteine
  MOD_RES (1561)..(1562): Selenocysteine
  MOD_RES (1566)..(1566): Selenocysteine
  MOD_RES (1586)..(1586): Selenocysteine
  MOD_RES (1588)..(1588): Selenocysteine
  MOD_RES (1599)..(1599): Selenocysteine
  MOD_RES (1635)..(1635): Selenocysteine
  MOD_RES (1660)..(1660): Selenocysteine
  MOD_RES (1676)..(1676): Selenocysteine
  MOD_RES (1684)..(1684): Selenocysteine
  MOD_RES (1691)..(1691): Selenocysteine
  MOD_RES (1701)..(1701): Selenocysteine
  MOD_RES (1747)..(1747): Selenocysteine
  MOD_RES (1750)..(1750): Selenocysteine
  MOD_RES (1753)..(1753): Selenocysteine
  MOD_RES (1763)..(1763): Selenocysteine
  MOD_RES (1783)..(1783): Selenocysteine
  MOD_RES (1786)..(1786): Selenocysteine
  MOD_RES (1789)..(1791): Selenocysteine
  MOD_RES (1816)..(1816): Selenocysteine
  MOD_RES (1818)..(1820): Selenocysteine
  MOD_RES (1831)..(1831): Selenocysteine
  MOD_RES (1864)..(1864): Selenocysteine
  MOD_RES (1878)..(1878): Selenocysteine
  MOD_RES (1885)..(1885): Selenocysteine
  MOD_RES (1891)..(1891): Selenocysteine
  MOD_RES (1893)..(1893): Selenocysteine
  MOD_RES (1898)..(1898): Selenocysteine
  MOD_RES (1900)..(1900): Selenocysteine
  MOD_RES (1909)..(1909): Selenocysteine
  MOD_RES (1914)..(1914): Selenocysteine
  MOD_RES (1921)..(1921): Selenocysteine
  MOD_RES (1928)..(1928): Selenocysteine
  MOD_RES (1952)..(1952): Selenocysteine
  MOD_RES (1990)..(1990): Selenocysteine
  MOD_RES (1994)..(1994): Selenocysteine
  MOD_RES (2023)..(2023): Selenocysteine
  MOD_RES (2062)..(2062): Selenocysteine
  MOD_RES (2119)..(2119): Selenocysteine
  MOD_RES (2131)..(2131): Selenocysteine
  MOD_RES (2141)..(2141): Selenocysteine
  MOD_RES (2145)..(2145): Selenocysteine
  MOD_RES (2209)..(2209): Selenocysteine
  MOD_RES (2229)..(2229): Selenocysteine
  MOD_RES (2249)..(2249): Selenocysteine
  MOD_RES (2262)..(2262): Selenocysteine
  MOD_RES (2273)..(2273): Selenocysteine
  MOD_RES (2293)..(2293): Selenocysteine
  MOD_RES (2308)..(2308): Selenocysteine
  MOD_RES (2317)..(2317): Selenocysteine
  MOD_RES (2319)..(2319): Selenocysteine
  MOD_RES (2323)..(2323): Selenocysteine
  MOD_RES (2335)..(2335): Selenocysteine
  MOD_RES (2381)..(2381): Selenocysteine
  MOD_RES (2390)..(2390): Selenocysteine
  MOD_RES (2392)..(2392): Selenocysteine
  MOD_RES (2440)..(2440): Selenocysteine
  MOD_RES (2443)..(2443): Selenocysteine
  MOD_RES (2457)..(2457): Selenocysteine
  MOD_RES (2509)..(2509): Selenocysteine
MSGSXQPVAQXWRAXEPRYPPHSLSYPVQIARXHXDVGLLEYQHHSRDYASHLSPGSIIQPQRRRPSLLSEFQPGNERSQELHLRPESHSYLPELGKSEMEFIESKRPRLELLPDPLLRPSPLLAXGQPAGSEDLXKDRSLXGKLEPVSPPSPPHXDPELELVPPRLSKEELIQNMDRVDREIXMVEQQISKLKKKQQQLEEEAAKPPEPEKPVSPPPIESKHRSLVQIIYDENRKKAEAAHRILEGLGPQVELPLYNQPSDXRQYHENIKINQAMRKKLILYFKRRNHARKQWEQKFCQRYDQLMEAWEKKVERIENNPRRRAKESKVREYYEKQFPEIRKQRELQERMQSRVGQRGSGLSMSAARSEHEVSEIIDGLSEQENLEKQMRQLAVIPPMLYDADQQRIKFINMNGLMADPMKVYKDRQVMNMWSEQEKEXFREKFMQHPKNFGLIASFLERKXVAECVLYYYLXKKNENYKSLVRRSYRRRGKSQQQQQQQQQQQQQQQQQPMPRSSQEEKDEKEKEKEAEKEEEKPEVENDKEDLLKEKXDDXSGEDNDEKEAVASKGRKXANSQGRRKGRIXRSMANEANSEEAIXPQQSAELASMELNESSRWXEEEMEXAKKGLLEHGRNWSAIARMVGSKXVSQCKNFYFNYKKRQNLDEILQQHKLKMEKERNARRKKKKAPAAASEEAAFPPVVEDEEMEASGVSGNEEEMVEEAEALHASGNEVPRGECSGPAXVNNSSDXESIPSPHXEAAKDXGQNGPKPPAXLGADGPPPGPPXPPPEDIPAPXEPXPASEAXGAPXPPPAPPSPSAPPPVVPKEEKEEEXAAAPPVEEGEEQKPPAAEELAVDXGKAEEPVKSECXEEAEEGPAKGKDAEAAEAXAEGALKAEKKEGGSGRAXXAKSSGAPQDSDSSAXCSADEVDEAEGGDKNRLLSPRPSLLXPXGDPRANASPQKPLDLKQLKQRAAAIPPIQVXKVHEPPREDAAPXKPAPPAPPPPQNLQPESDAPQQPGSSPRGKSRSPAPPADKEAFAAEAQKLPGDPPCWXSGLPFPVPPREVIKASPHAPDPSAFSYAPPGHPLPLGLHDXARPVLPRPPXISNPPPLISSAKHPSVLERQIGAISQGMSVQLHVPYSEHAKAPVGPVXMGLPLPMDPKKLAPFSGVKQEQLSPRGQAGPPESLGVPXAQEASVLRGXALGSVPGGSIXKGIPSXRVPSDSAIXYRGSIXHGXPADVLYKGXIXRIIGEDSPSRLDRGREDSLPKGHVIYEGKKGHVLSYEGGMSVXQCSKEDGRSSSGPPHEXAAPKRXYDMMEGRVGRAISSASIEGLMGRAIPPERHSPHHLKEQHHIRGSIXQGIPRSYVEAQEDYLRREAKLLKREGXPPPPPPSRDLXEAYKXQALGPLKLKPAHEGLVAXVKEAGRSIHEIPREELRHXPELPLAPRPLKEGSIXQGXPLKYDXGASXXGSKKHDVRSLIGSPGRXFPPVHPLDVMADARALERACYEESLKSRPGXASSSGGSIARGAPVIVPELGKPRQSPLXYEDHGAPFAGHLPRGSPVXXREPXPRLQEGSLSSSKASQDRKLXSXPREIAKSPHSXVPEHHPHPISPYEHLLRGVSGVDLYRSHIPLAFDPXSIPRGIPLDAAAAYYLPRHLAPNPXYPHLYPPYLIRGYPDXAALENRQXIINDYIXSQQMHHNAAXAMAQRADMLRGLSPRESSLALNYAAGPRGIIDLSQVPHLPVLVPPXPGXPAXAMDRLAYLPXAPQPFSSRHSSSPLSPGGPXHLXKPXXXSSSERERDRDRERDRDREREKSILXSXXXVEHAPIWRPGXEQSSGSSGGGGGSSSRPASHSHAHQHSPISPRXQDALQQRPSVLHNXGMKGIIXAVEPSXPXVLRSXSXSSPVRPAAXFPPAXHCPLGGXLDGVYPXLMEPVLLPKEAPRVARPERPRADXGHAFLAKPPARSGLEPASSPSKGSEPRPLVPPVSGHAXIARXPAKNLAPHHASPDPPAPPASASDPHREKXQSKPFSIQELELRSLGYHGSSYSPEGVEPVSPVSSPSLXHDKGLPKHLEELDKSHLEGELRPKQPGPVKLGGEAAHLPHLRPLPESQPSSSPLLQXAPGVKGHQRVVXLAQHISEVIXQDYXRHHPQQLSAPLPAPLYSFPGASCPVLDLRRPPSDLYLPPPDHGAPARGSPHSEGGKRSPEPNKXSVLGGGEDGIEPVSPPEGMXEPGHSRSAVYPLLYRDGEQXEPSRMGSKSPGNXSQPPAFFSKLXESNSAMVKSKKQEINKKLNXHNRNEPEYNISQPGXEIFNMPAIXGXGLMXYRSQAVQEHASXNMGLEAIIRKALMGKYDQWEESPPLSANAFNPLNASASLPAAMPIXAADGRSDHXLXSPGGGGKAKVSGRPSSRKAKSPAPGLASGDRPPSVSSVHSEGDCNRRXPLXNRVWEDRPSSAGSXPFPYNPLIMRLQAGVMASPPPPGLPAGSGPLAGPHHAWDEEPKPLLCSQYEXLSDSE

SEQ ID NO: 17275 - protein, 245 aa, Homo sapiens
  MOD_RES (47)..(47): Selenocysteine
  MOD_RES (57)..(57): Selenocysteine
  MOD_RES (63)..(63): Selenocysteine
  MOD_RES (77)..(77): Selenocysteine
  MOD_RES (105)..(105): Selenocysteine
  MOD_RES (165)..(165): Selenocysteine
QELHLRPESHSYLPELGKSEMEFIESKRPRLELLPDPLLRPSPLLAXGQPAGSEDLXKDRSLXGKLEPVSPPSPPHXDPELELVPPRLSKEELIQNMDRVDREIXMVEQQISKLKKKQQQLEEEAAKPPEPEKPVSPPPIESKHRSLVQIIYDENRPLYNQPSDXRQYHENIKINQAMRKKLILYFKRRNHARKQWEQKFCQRYDQLMEAWEKKVERIENNPRRRAKESKVREYYEKQFPEIRKQ

SEQ ID NO: 17276 - protein, 156 aa, Homo sapiens
  MOD_RES (1)..(1): Any amino acid
  MOD_RES (18)..(18): Selenocysteine
  MOD_RES (21)..(21): Selenocysteine
  MOD_RES (24)..(26): Selenocysteine
  MOD_RES (51)..(51): Selenocysteine
  MOD_RES (53)..(55): Selenocysteine
  MOD_RES (66)..(66): Selenocysteine
  MOD_RES (99)..(99): Selenocysteine
  MOD_RES (113)..(113): Selenocysteine
  MOD_RES (120)..(120): Selenocysteine
  MOD_RES (126)..(126): Selenocysteine
  MOD_RES (128)..(128): Selenocysteine
  MOD_RES (133)..(133): Selenocysteine
  MOD_RES (135)..(135): Selenocysteine
  MOD_RES (144)..(144): Selenocysteine
  MOD_RES (149)..(149): Selenocysteine
  MOD_RES (156)..(156): Selenocysteine
XESSLALNYAAGPRGGPXHLXKPXXXSSSERERDRDRERDRDREREKSILXSXXXVEHAPIWRPGXEQSSGSSGGGGGSSSRPASHSHAHQHSPISPRXQDALQQRPSVLHNXGMKGIIXAVEPSXPXVLRSXSXSSPVRPAAXFPPAXHCPLGGX

SEQ ID NO: 17277 - protein, 129 aa, Homo sapiens
  MOD_RES (1)..(1): Any amino acid
  MOD_RES (16)..(16): Selenocysteine
  MOD_RES (25)..(25): Selenocysteine
  MOD_RES (27)..(27): Selenocysteine
  MOD_RES (31)..(31): Selenocysteine
  MOD_RES (43)..(43): Selenocysteine
  MOD_RES (102)..(102): Selenocysteine
  MOD_RES (105)..(105): Selenocysteine
  MOD_RES (127)..(128): Selenocysteine
XHNRNEPEYNISQPGXEIFNMPAIXGXGLMXYRSQAVQEHASXNMGLEAIIRKALMGGGGKAKVSGRPSSRKAKSPAPGLASGDRPPSVSSVHSEGDCNRRXPLXNRVWEDRPSSAGGHQVPRHSPXXP

SEQ ID NO: 17278 - protein, 132 aa, Homo sapiens
  MOD_RES (1)..(1): Any amino acid
  MOD_RES (46)..(46): Selenocysteine
  MOD_RES (55)..(55): Selenocysteine
  MOD_RES (57)..(57): Selenocysteine
  MOD_RES (105)..(105): Selenocysteine
  MOD_RES (108)..(108): Selenocysteine
  MOD_RES (130)..(131): Selenocysteine
XMGLEAIIRKALMGKYDQWEESPPLSANAFNPLNASASLPAAMPIXAADGRSDHXLXSPGGGGKAKVSGRPSSRKAKSPAPGLASGDRPPSVSSVHSEGDCNRRXPLXNRVWEDRPSSAGGHQVPRHSPXXP

SEQ ID NO: 17279 - protein, 225 aa, Homo sapiens
  MOD_RES (1)..(1): Any amino acid
  MOD_RES (9)..(9): Selenocysteine
  MOD_RES (25)..(25): Selenocysteine
  MOD_RES (33)..(33): Selenocysteine
  MOD_RES (40)..(40): Selenocysteine
  MOD_RES (50)..(50): Selenocysteine
  MOD_RES (80)..(80): Selenocysteine
  MOD_RES (83)..(83): Selenocysteine
  MOD_RES (93)..(93): Selenocysteine
  MOD_RES (113)..(113): Selenocysteine
  MOD_RES (116)..(116): Selenocysteine
  MOD_RES (119)..(121): Selenocysteine
  MOD_RES (146)..(146): Selenocysteine
  MOD_RES (148)..(150): Selenocysteine
  MOD_RES (161)..(161): Selenocysteine
  MOD_RES (194)..(194): Selenocysteine
  MOD_RES (208)..(208): Selenocysteine
  MOD_RES (215)..(215): Selenocysteine
  MOD_RES (221)..(221): Selenocysteine
  MOD_RES (223)..(223): Selenocysteine
XRHLAPNPXYPHLYPPYLIRGYPDXAALENRQXIINDYIXSQQMHHNAAXAMAQRADMLRGLSPRESSLALNYAAGPRGXPAXAMDRLAYLPXAPQPFSSRHSSSPLSPGGPXHLXKPXXXSSSERERDRDRERDRDREREKSILXSXXXVEHAPIWRPGXEQSSGSSGGGGGSSSRPASHSHAHQHSPISPRXQDALQQRPSVLHNXGMKGIIXAVEPSXPXVL

SEQ ID NO: 17280 - protein, 275 aa, Homo sapiens
  MOD_RES (1)..(1): Any amino acid
  MOD_RES (49)..(49): Selenocysteine
  MOD_RES (59)..(59): Selenocysteine
  MOD_RES (65)..(65): Selenocysteine
  MOD_RES (79)..(79): Selenocysteine
  MOD_RES (107)..(107): Selenocysteine
  MOD_RES (186)..(186): Selenocysteine
XSQELHLRPESHSYLPELGKSEMEFIESKRPRLELLPDPLLRPSPLLAXGQPAGSEDLXKDRSLXGKLEPVSPPSPPHXDPELELVPPRLSKEELIQNMDRVDREIXMVEQQISKLKKKQQQLEEEAAKPPEPEKPVSPPPIESKHRSLVQIIYDENRKKAEAAHRILEGLGPQVELPLYNQPSDXRQYHENIKINQAMRKKLILYFKRRNHARKQWEQKFCQRYDQLMEAWEKKVERIENNPRRRAKESKVREYYEKQFPEIRKQRELQERMQR

SEQ ID NO: 17281 - protein, 134 aa, Homo sapiens
  MOD_RES (1)..(1): Any amino acid
  MOD_RES (20)..(20): Selenocysteine
  MOD_RES (40)..(40): Selenocysteine
  MOD_RES (53)..(53): Selenocysteine
  MOD_RES (64)..(64): Selenocysteine
  MOD_RES (84)..(84): Selenocysteine
  MOD_RES (99)..(99): Selenocysteine
  MOD_RES (108)..(108): Selenocysteine
  MOD_RES (110)..(110): Selenocysteine
  MOD_RES (131)..(131): Selenocysteine
XVLGGGEDGIEPVSPPEGMXEPGHSRSAVYPLLYRDGEQXEPSRMGSKSPGNXSQPPAFFSKLXESNSAMVKSKKQEINKKLNXHNRNEPEYNISQPGXEIFNMPAIXGXVLVHKKKFSRLQSLPLNLCQXSPL

SEQ ID NO: 17282 - protein, 197 aa, Homo sapiens
  MOD_RES (4)..(4): Selenocysteine
  MOD_RES (16)..(16): Selenocysteine
  MOD_RES (18)..(18): Selenocysteine
  MOD_RES (34)..(34): Selenocysteine
  MOD_RES (41)..(41): Selenocysteine
  MOD_RES (43)..(43): Selenocysteine
  MOD_RES (74)..(75): Selenocysteine
  MOD_RES (80)..(80): Selenocysteine
  MOD_RES (104)..(104): Selenocysteine
  MOD_RES (110)..(110): Selenocysteine
  MOD_RES (118)..(118): Selenocysteine
  MOD_RES (123)..(123): Selenocysteine
  MOD_RES (126)..(126): Selenocysteine
  MOD_RES (130)..(131): Selenocysteine
  MOD_RES (133)..(133): Selenocysteine
  MOD_RES (145)..(145): Selenocysteine
  MOD_RES (176)..(176): Selenocysteine
  MOD_RES (185)..(185): Selenocysteine
  MOD_RES (194)..(194): Selenocysteine
  MOD_RES (196)..(196): Selenocysteine
MSSXLPALLCVEMYDXPXLSVHPGPEVISGEKVXFYCRLDXAXSMFLLLKEGRSSHVQRGYGKVQAEFPLGPVXXAHRGXYRCFGSYNNHAWSFPSEPVKLLVXGDIENXSLAPEDPXFPADXWGXYLLXXEXGLQKDHALWDHXAQNLLRMGLAFLVLVALVWFLVEDWLSRKRXRERASRASXWEGRRRLNXQXL

SEQ ID NO: 17283 - protein, 292 aa, Homo sapiens
  MOD_RES (4)..(4): Selenocysteine
  MOD_RES (13)..(13): Selenocysteine
  MOD_RES (34)..(34): Selenocysteine
  MOD_RES (106)..(106): Selenocysteine
  MOD_RES (111)..(111): Selenocysteine
  MOD_RES (113)..(113): Selenocysteine
  MOD_RES (129)..(129): Selenocysteine
  MOD_RES (136)..(136): Selenocysteine
  MOD_RES (138)..(138): Selenocysteine
  MOD_RES (169)..(170): Selenocysteine
  MOD_RES (175)..(175): Selenocysteine
  MOD_RES (199)..(199): Selenocysteine
  MOD_RES (205)..(205): Selenocysteine
  MOD_RES (213)..(213): Selenocysteine
  MOD_RES (218)..(218): Selenocysteine
  MOD_RES (221)..(221): Selenocysteine
  MOD_RES (225)..(226): Selenocysteine
  MOD_RES (228)..(228): Selenocysteine
  MOD_RES (240)..(240): Selenocysteine
  MOD_RES (271)..(271): Selenocysteine
  MOD_RES (280)..(280): Selenocysteine
  MOD_RES (289)..(289): Selenocysteine
  MOD_RES (291)..(291): Selenocysteine
MSSXLPALLCVEXLPKPFIWAEPHFMVPKEKQVXICCQGNYGAVEYQLHFEGSLFAVDRPKPPERINKVKFYIPDMNSRMAGQYSCIYRVGELWSEPSNLLDLVVXEMYDXPXLSVHPGPEVISGEKVXFYCRLDXAXSMFLLLKEGRSSHVQRGYGKVQAEFPLGPVXXAHRGXYRCFGSYNNHAWSFPSEPVKLLVXGDIENXSLAPEDPXFPADXWGXYLLXXEXGLQKDHALWDHXAQNLLRMGLAFLVLVALVWFLVEDWLSRKRXRERASRASXWEGRRRLNXQXL

SEQ ID NO: 17284 - protein, 291 aa, Homo sapiens
  MOD_RES (4)..(4): Selenocysteine
  MOD_RES (13)..(13): Selenocysteine
  MOD_RES (34)..(34): Selenocysteine
  MOD_RES (106)..(106): Selenocysteine
  MOD_RES (111)..(111): Selenocysteine
  MOD_RES (113)..(113): Selenocysteine
  MOD_RES (129)..(129): Selenocysteine
  MOD_RES (136)..(136): Selenocysteine
  MOD_RES (138)..(138): Selenocysteine
  MOD_RES (169)..(170): Selenocysteine
  MOD_RES (175)..(175): Selenocysteine
  MOD_RES (199)..(199): Selenocysteine
  MOD_RES (205)..(205): Selenocysteine
  MOD_RES (213)..(213): Selenocysteine
  MOD_RES (217)..(217): Selenocysteine
  MOD_RES (220)..(220): Selenocysteine
  MOD_RES (224)..(225): Selenocysteine
  MOD_RES (227)..(227): Selenocysteine
  MOD_RES (239)..(239): Selenocysteine
  MOD_RES (270)..(270): Selenocysteine
  MOD_RES (279)..(279): Selenocysteine
  MOD_RES (288)..(288): Selenocysteine
  MOD_RES (290)..(290): Selenocysteine
MSSXLPALLCVEXLPKPFIWAEPHFMVPKEKQVXICCQGNYGAVEYQLHFEGSLFAVDRPKPPERINKVKFYIPDMNSRMAGQYSCIYRVGELWSEPSNLLDLVVXEMYDXPXLSVHPGPEVISGEKVXFYCRLDXAXSMFLLLKEGRSSHVQRGYGKVQAEFPLGPVXXAHRGXYRCFGSYNNHAWSFPSEPVKLLVXGDIENXSLAPEDPXFPDXWGXYLLXXEXGLQKDHALWDHXAQNLLRMGLAFLVLVALVWFLVEDWLSRKRXRERASRASXWEGRRRLNXQXL

SEQ ID NO: 17285 - protein, 291 aa, Homo sapiens
  MOD_RES (4)..(4): Selenocysteine
  MOD_RES (13)..(13): Selenocysteine
  MOD_RES (34)..(34): Selenocysteine
  MOD_RES (106)..(106): Selenocysteine
  MOD_RES (111)..(111): Selenocysteine
  MOD_RES (113)..(113): Selenocysteine
  MOD_RES (129)..(129): Selenocysteine
  MOD_RES (136)..(136): Selenocysteine
  MOD_RES (138)..(138): Selenocysteine
  MOD_RES (169)..(170): Selenocysteine
  MOD_RES (175)..(175): Selenocysteine
  MOD_RES (199)..(199): Selenocysteine
  MOD_RES (205)..(205): Selenocysteine
  MOD_RES (213)..(213): Selenocysteine
  MOD_RES (217)..(217): Selenocysteine
  MOD_RES (220)..(220): Selenocysteine
  MOD_RES (224)..(225): Selenocysteine
  MOD_RES (227)..(227): Selenocysteine
  MOD_RES (239)..(239): Selenocysteine
  MOD_RES (270)..(270): Selenocysteine
  MOD_RES (279)..(279): Selenocysteine
  MOD_RES (288)..(288): Selenocysteine
  MOD_RES (290)..(290): Selenocysteine
MSSXLPALLCVEXLPKPFIWAEPHFMVPKEKQVXICCQGNYGAVEYQLHFEGSLFAVDRPKPPERINKVQFYIPDMNSRMAGQYSCIYRVGELWSEPSNLLDLVVXEMYDXPXLSVHPGPEVISGEKVXFYCRLDXAXSMFLLLKEGRSSHVQRGYGKVQAEFPLGPVXXAHRGXYRCFGSYNNHAWSFPSEPVKLLVXGDIENXSLAPEDPXFPDXWGXYLLXXEXGLQKDHALWDHXAQNLLRMGLAFLVLVALVWFLVEDWLSRKRXRERASRASXWEGRRRLNXQXL

SEQ ID NO: 17286 - protein, 209 aa, Homo sapiens
  MOD_RES (4)..(4): Selenocysteine
  MOD_RES (28)..(28): Selenocysteine
  MOD_RES (30)..(30): Selenocysteine
  MOD_RES (46)..(46): Selenocysteine
  MOD_RES (53)..(53): Selenocysteine
  MOD_RES (55)..(55): Selenocysteine
  MOD_RES (86)..(87): Selenocysteine
  MOD_RES (92)..(92): Selenocysteine
  MOD_RES (116)..(116): Selenocysteine
  MOD_RES (122)..(122): Selenocysteine
  MOD_RES (130)..(130): Selenocysteine
  MOD_RES (135)..(135): Selenocysteine
  MOD_RES (138)..(138): Selenocysteine
  MOD_RES (142)..(143): Selenocysteine
  MOD_RES (145)..(145): Selenocysteine
  MOD_RES (157)..(157): Selenocysteine
  MOD_RES (188)..(188): Selenocysteine
  MOD_RES (197)..(197): Selenocysteine
  MOD_RES (206)..(206): Selenocysteine
  MOD_RES (208)..(208): Selenocysteine
MSSXLPALLCVGLCLSQRISAQQQMYDXPXLSVHPGPEVISGEKVXFYCRLDXAXSMFLLLKEGRSSHVQRGYGKVQAEFPLGPVXXAHRGXYRCFGSYNNHAWSFPSEPVKLLVXGDIENXSLAPEDPXFPADXWGXYLLXXEXGLQKDHALWDHXAQNLLRMGLAFLVLVALVWFLVEDWLSRKRXRERASRASXWEGRRRLNXQXL

SEQ ID NO: 17287 - protein, 192 aa, Homo sapiens
  MOD_RES (4)..(4): Selenocysteine
  MOD_RES (28)..(28): Selenocysteine
  MOD_RES (30)..(30): Selenocysteine
  MOD_RES (46)..(46): Selenocysteine
  MOD_RES (53)..(53): Selenocysteine
  MOD_RES (55)..(55): Selenocysteine
  MOD_RES (86)..(87): Selenocysteine
  MOD_RES (92)..(92): Selenocysteine
  MOD_RES (116)..(116): Selenocysteine
  MOD_RES (122)..(122): Selenocysteine
  MOD_RES (130)..(130): Selenocysteine
  MOD_RES (140)..(140): Selenocysteine
  MOD_RES (171)..(171): Selenocysteine
  MOD_RES (180)..(180): Selenocysteine
  MOD_RES (189)..(189): Selenocysteine
  MOD_RES (191)..(191): Selenocysteine
MSSXLPALLCVGLCLSQRISAQQQMYDXPXLSVHPGPEVISGEKVXFYCRLDXAXSMFLLLKEGRSSHVQRGYGKVQAEFPLGPVXXAHRGXYRCFGSYNNHAWSFPSEPVKLLVXGDIENXSLAPEDPXFPDHALWDHXAQNLLRMGLAFLVLVALVWFLVEDWLSRKRXRERASRASXWEGRRRLNXQXL

SEQ ID NO: 17288 - protein, 304 aa, Homo sapiens
  MOD_RES (4)..(4): Selenocysteine
  MOD_RES (25)..(25): Selenocysteine
  MOD_RES (46)..(46): Selenocysteine
  MOD_RES (118)..(118): Selenocysteine
  MOD_RES (123)..(123): Selenocysteine
  MOD_RES (125)..(125): Selenocysteine
  MOD_RES (141)..(141): Selenocysteine
  MOD_RES (148)..(148): Selenocysteine
  MOD_RES (150)..(150): Selenocysteine
  MOD_RES (181)..(182): Selenocysteine
  MOD_RES (187)..(187): Selenocysteine
  MOD_RES (211)..(211): Selenocysteine
  MOD_RES (217)..(217): Selenocysteine
  MOD_RES (225)..(225): Selenocysteine
  MOD_RES (230)..(230): Selenocysteine
  MOD_RES (233)..(233): Selenocysteine
  MOD_RES (237)..(238): Selenocysteine
  MOD_RES (240)..(240): Selenocysteine
  MOD_RES (252)..(252): Selenocysteine
  MOD_RES (283)..(283): Selenocysteine
  MOD_RES (292)..(292): Selenocysteine
  MOD_RES (301)..(301): Selenocysteine
  MOD_RES (303)..(303): Selenocysteine
MSSXLPALLCVGLCLSQRISAQQQXLPKPFIWAEPHFMVPKEKQVXICCQGNYGAVEYQLHFEGSLFAVDRPKPPERINKVKFYIPDMNSRMAGQYSCIYRVGELWSEPSNLLDLVVXEMYDXPXLSVHPGPEVISGEKVXFYCRLDXAXSMFLLLKEGRSSHVQRGYGKVQAEFPLGPVXXAHRGXYRCFGSYNNHAWSFPSEPVKLLVXGDIENXSLAPEDPXFPADXWGXYLLXXEXGLQKDHALWDHXAQNLLRMGLAFLVLVALVWFLVEDWLSRKRXRERASRASXWEGRRRLNXQXL

SEQ ID NO: 17289 - protein, 287 aa, Homo sapiens
  MOD_RES (4)..(4): Selenocysteine
  MOD_RES (25)..(25): Selenocysteine
  MOD_RES (46)..(46): Selenocysteine
  MOD_RES (118)..(118): Selenocysteine
  MOD_RES (123)..(123): Selenocysteine
  MOD_RES (125)..(125): Selenocysteine
  MOD_RES (141)..(141): Selenocysteine
  MOD_RES (148)..(148): Selenocysteine
  MOD_RES (150)..(150): Selenocysteine
  MOD_RES (181)..(182): Selenocysteine
  MOD_RES (187)..(187): Selenocysteine
  MOD_RES (211)..(211): Selenocysteine
  MOD_RES (217)..(217): Selenocysteine
  MOD_RES (225)..(225): Selenocysteine
  MOD_RES (235)..(235): Selenocysteine
  MOD_RES (266)..(266): Selenocysteine
  MOD_RES (275)..(275): Selenocysteine
  MOD_RES (284)..(284): Selenocysteine
  MOD_RES (286)..(286): Selenocysteine
MSSXLPALLCVGLCLSQRISAQQQXLPKPFIWAEPHFMVPKEKQVXICCQGNYGAVEYQLHFEGSLFAVDRPKPPERINKVKFYIPDMNSRMAGQYSCIYRVGELWSEPSNLLDLVVXEMYDXPXLSVHPGPEVISGEKVXFYCRLDXAXSMFLLLKEGRSSHVQRGYGKVQAEFPLGPVXXAHRGXYRCFGSYNNHAWSFPSEPVKLLVXGDIENXSLAPEDPXFPDHALWDHXAQNLLRMGLAFLVLVALVWFLVEDWLSRKRXRERASRASXWEGRRRLNXQXL

SEQ ID NO: 17290 - protein, 303 aa, Homo sapiens
  MOD_RES (4)..(4): Selenocysteine
  MOD_RES (25)..(25): Selenocysteine
  MOD_RES (46)..(46): Selenocysteine
  MOD_RES (118)..(118): Selenocysteine
  MOD_RES (123)..(123): Selenocysteine
  MOD_RES (125)..(125): Selenocysteine
  MOD_RES (141)..(141): Selenocysteine
  MOD_RES (148)..(148): Selenocysteine
  MOD_RES (150)..(150): Selenocysteine
  MOD_RES (181)..(182): Selenocysteine
  MOD_RES (187)..(187): Selenocysteine
  MOD_RES (211)..(211): Selenocysteine
  MOD_RES (217)..(217): Selenocysteine
  MOD_RES (225)..(225): Selenocysteine
  MOD_RES (229)..(229): Selenocysteine
  MOD_RES (232)..(232): Selenocysteine
  MOD_RES (236)..(237): Selenocysteine
  MOD_RES (239)..(239): Selenocysteine
  MOD_RES (251)..(251): Selenocysteine
  MOD_RES (282)..(282): Selenocysteine
  MOD_RES (291)..(291): Selenocysteine
  MOD_RES (300)..(300): Selenocysteine
  MOD_RES (302)..(302): Selenocysteine
MSSXLPALLCVGLCLSQRISAQQQXLPKPFIWAEPHFMVPKEKQVXICCQGNYGAVEYQLHFEGSLFAVDRPKPPERINKVKFYIPDMNSRMAGQYSCIYRVGELWSEPSNLLDLVVXEMYDXPXLSVHPGPEVISGEKVXFYCRLDXAXSMFLLLKEGRSSHVQRGYGKVQAEFPLGPVXXAHRGXYRCFGSYNNHAWSFPSEPVKLLVXGDIENXSLAPEDPXFPDXWGXYLLXXEXGLQKDHALWDHXAQNLLRMGLAFLVLVALVWFLVEDWLSRKRXRERASRASXWEGRRRLNXQXL

SEQ ID NO: 17291 - protein, 304 aa, Homo sapiens
  MOD_RES (4)..(4): Selenocysteine
  MOD_RES (25)..(25): Selenocysteine
  MOD_RES (46)..(46): Selenocysteine
  MOD_RES (118)..(118): Selenocysteine
  MOD_RES (123)..(123): Selenocysteine
  MOD_RES (125)..(125): Selenocysteine
  MOD_RES (141)..(141): Selenocysteine
  MOD_RES (148)..(148): Selenocysteine
  MOD_RES (150)..(150): Selenocysteine
  MOD_RES (181)..(182): Selenocysteine
  MOD_RES (187)..(187): Selenocysteine
  MOD_RES (211)..(211): Selenocysteine
  MOD_RES (217)..(217): Selenocysteine
  MOD_RES (225)..(225): Selenocysteine
  MOD_RES (230)..(230): Selenocysteine
  MOD_RES (233)..(233): Selenocysteine
  MOD_RES (237)..(238): Selenocysteine
  MOD_RES (240)..(240): Selenocysteine
  MOD_RES (252)..(252): Selenocysteine
  MOD_RES (283)..(283): Selenocysteine
  MOD_RES (292)..(292): Selenocysteine
  MOD_RES (301)..(301): Selenocysteine
  MOD_RES (303)..(303): Selenocysteine
MSSXLPALLCVGLCLSQRISAQQQXLPKPFIWAEPHFMVPKEKQVXICCQGNYGAVEYQLHFEGSLFAVDRPKPPERINKVQFYIPDMNSRMAGQYSCIYRVGELWSEPSNLLDLVVXEMYDXPXLSVHPGPEVISGEKVXFYCRLDXAXSMFLLLKEGRSSHVQRGYGKVQAEFPLGPVXXAHRGXYRCFGSYNNHAWSFPSEPVKLLVXGDIENXSLAPEDPXFPADXWGXYLLXXEXGLQKDHALWDHXAQNLLRMGLAFLVLVALVWFLVEDWLSRKRXRERASRASXWEGRRRLNXQXL

SEQ ID NO: 17292 - protein, 287 aa, Homo sapiens
  MOD_RES (4)..(4): Selenocysteine
  MOD_RES (25)..(25): Selenocysteine
  MOD_RES (46)..(46): Selenocysteine
  MOD_RES (118)..(118): Selenocysteine
  MOD_RES (123)..(123): Selenocysteine
  MOD_RES (125)..(125): Selenocysteine
  MOD_RES (141)..(141): Selenocysteine
  MOD_RES (148)..(148): Selenocysteine
  MOD_RES (150)..(150): Selenocysteine
  MOD_RES (181)..(182): Selenocysteine
  MOD_RES (187)..(187): Selenocysteine
  MOD_RES (211)..(211): Selenocysteine
  MOD_RES (217)..(217): Selenocysteine
  MOD_RES (225)..(225): Selenocysteine
  MOD_RES (235)..(235): Selenocysteine
  MOD_RES (266)..(266): Selenocysteine
  MOD_RES (275)..(275): Selenocysteine
  MOD_RES (284)..(284): Selenocysteine
  MOD_RES (286)..(286): Selenocysteine
MSSXLPALLCVGLCLSQRISAQQQXLPKPFIWAEPHFMVPKEKQVXICCQGNYGAVEYQLHFEGSLFAVDRPKPPERINKVQFYIPDMNSRMAGQYSCIYRVGELWSEPSNLLDLVVXEMYDXPXLSVHPGPEVISGEKVXFYCRLDXAXSMFLLLKEGRSSHVQRGYGKVQAEFPLGPVXXAHRGXYRCFGSYNNHAWSFPSEPVKLLVXGDIENXSLAPEDPXFPDHALWDHXAQNLLRMGLAFLVLVALVWFLVEDWLSRKRXRERASRASXWEGRRRLNXQXL

SEQ ID NO: 17293 - protein, 303 aa, Homo sapiens
  MOD_RES (4)..(4): Selenocysteine
  MOD_RES (25)..(25): Selenocysteine
  MOD_RES (46)..(46): Selenocysteine
  MOD_RES (118)..(118): Selenocysteine
  MOD_RES (123)..(123): Selenocysteine
  MOD_RES (125)..(125): Selenocysteine
  MOD_RES (141)..(141): Selenocysteine
  MOD_RES (148)..(148): Selenocysteine
  MOD_RES (150)..(150): Selenocysteine
  MOD_RES (181)..(182): Selenocysteine
  MOD_RES (187)..(187): Selenocysteine
  MOD_RES (211)..(211): Selenocysteine
  MOD_RES (217)..(217): Selenocysteine
  MOD_RES (225)..(225): Selenocysteine
  MOD_RES (229)..(229): Selenocysteine
  MOD_RES (232)..(232): Selenocysteine
  MOD_RES (236)..(237): Selenocysteine
  MOD_RES (239)..(239): Selenocysteine
  MOD_RES (251)..(251): Selenocysteine
  MOD_RES (282)..(282): Selenocysteine
  MOD_RES (291)..(291): Selenocysteine
  MOD_RES (300)..(300): Selenocysteine
  MOD_RES (302)..(302): Selenocysteine
MSSXLPALLCVGLCLSQRISAQQQXLPKPFIWAEPHFMVPKEKQVXICCQGNYGAVEYQLHFEGSLFAVDRPKPPERINKVQFYIPDMNSRMAGQYSCIYRVGELWSEPSNLLDLVVXEMYDXPXLSVHPGPEVISGEKVXFYCRLDXAXSMFLLLKEGRSSHVQRGYGKVQAEFPLGPVXXAHRGXYRCFGSYNNHAWSFPSEPVKLLVXGDIENXSLAPEDPXFPDXWGXYLLXXEXGLQKDHALWDHXAQNLLRMGLAFLVLVALVWFLVEDWLSRKRXRERASRASXWEGRRRLNXQXL

SEQ ID NO: 17294 - protein, 270 aa, Homo sapiens
  MOD_RES (35)..(35): Selenocysteine
  MOD_RES (37)..(37): Selenocysteine
  MOD_RES (45)..(45): Selenocysteine
  MOD_RES (68)..(68): Selenocysteine
  MOD_RES (74)..(74): Selenocysteine
  MOD_RES (78)..(78): Selenocysteine
  MOD_RES (82)..(82): Selenocysteine
  MOD_RES (93)..(93): Selenocysteine
  MOD_RES (95)..(95): Selenocysteine
  MOD_RES (97)..(97): Selenocysteine
  MOD_RES (136)..(136): Selenocysteine
  MOD_RES (138)..(138): Selenocysteine
  MOD_RES (141)..(141): Selenocysteine
  MOD_RES (150)..(150): Selenocysteine
  MOD_RES (152)..(152): Selenocysteine
  MOD_RES (159)..(159): Selenocysteine
  MOD_RES (171)..(171): Selenocysteine
  MOD_RES (194)..(194): Selenocysteine
  MOD_RES (265)..(265): Selenocysteine
MAWRALHPLLLLLLLFPGSQAQSKAQVLQSVAGQXLXVRCQYPPXGSLYEKKGWCKEASALVCIRLVXSSKPRXMAWXSRFXIWDDPDAGFFXVXMXDLREEDSGHYWCRIYRPSDNSVSKSVRFYLVVSPASASXQXSWXPRDLVSSQXQXQSCVPPXAGARQAPESPSXIPVPSHPSSPLPVPLPSRPQNSXLRPGPAAPIALVPVFCGLLVAKSLVLSALLVWWVLRNRHMQHQGRSLLHPAQPRPQAHRHFPLSHRAPGGXYGGKP

SEQ ID NO: 17295 - protein, 276 aa, Homo sapiens
  MOD_RES (35)..(35): Selenocysteine
  MOD_RES (37)..(37): Selenocysteine
  MOD_RES (45)..(45): Selenocysteine
  MOD_RES (68)..(68): Selenocysteine
  MOD_RES (74)..(74): Selenocysteine
  MOD_RES (78)..(78): Selenocysteine
  MOD_RES (82)..(82): Selenocysteine
  MOD_RES (93)..(93): Selenocysteine
  MOD_RES (95)..(95): Selenocysteine
  MOD_RES (97)..(97): Selenocysteine
  MOD_RES (136)..(136): Selenocysteine
  MOD_RES (138)..(138): Selenocysteine
  MOD_RES (141)..(141): Selenocysteine
  MOD_RES (150)..(150): Selenocysteine
  MOD_RES (152)..(152): Selenocysteine
  MOD_RES (159)..(159): Selenocysteine
  MOD_RES (171)..(171): Selenocysteine
  MOD_RES (182)..(182): Selenocysteine
  MOD_RES (222)..(222): Selenocysteine
  MOD_RES (231)..(231): Selenocysteine
  MOD_RES (235)..(235): Selenocysteine
  MOD_RES (242)..(242): Selenocysteine
  MOD_RES (247)..(247): Selenocysteine
  MOD_RES (261)..(261): Selenocysteine
  MOD_RES (265)..(265): Selenocysteine
  MOD_RES (275)..(275): Selenocysteine
MAWRALHPLLLLLLLFPGSQAQSKAQVLQSVAGQXLXVRCQYPPXGSLYEKKGWCKEASALVCIRLVXSSKPRXMAWXSRFXIWDDPDAGFFXVXMXDLREEDSGHYWCRIYRPSDNSVSKSVRFYLVVSPASASXQXSWXPRDLVSSQXQXQSCVPPXAGARQAPESPSXIPVPSQPQNSXLRPGPAAPIALVPVFCGLLVAKSLVLSALLVWWGDIWWKXMMELRSLDXQKAXCHLQQVXDLPWXSVSSPVEREILYHXVARXKISDDDDEHXL

SEQ ID NO: 17296 - protein, 258 aa, Homo sapiens
  MOD_RES (35)..(35): Selenocysteine
  MOD_RES (37)..(37): Selenocysteine
  MOD_RES (45)..(45): Selenocysteine
  MOD_RES (68)..(68): Selenocysteine
  MOD_RES (74)..(74): Selenocysteine
  MOD_RES (78)..(78): Selenocysteine
  MOD_RES (82)..(82): Selenocysteine
  MOD_RES (93)..(93): Selenocysteine
  MOD_RES (95)..(95): Selenocysteine
  MOD_RES (97)..(97): Selenocysteine
  MOD_RES (136)..(136): Selenocysteine
  MOD_RES (138)..(138): Selenocysteine
  MOD_RES (141)..(141): Selenocysteine
  MOD_RES (150)..(150): Selenocysteine
  MOD_RES (152)..(152): Selenocysteine
  MOD_RES (159)..(159): Selenocysteine
  MOD_RES (171)..(171): Selenocysteine
  MOD_RES (182)..(182): Selenocysteine
  MOD_RES (253)..(253): Selenocysteine
MAWRALHPLLLLLLLFPGSQAQSKAQVLQSVAGQXLXVRCQYPPXGSLYEKKGWCKEASALVCIRLVXSSKPRXMAWXSRFXIWDDPDAGFFXVXMXDLREEDSGHYWCRIYRPSDNSVSKSVRFYLVVSPASASXQXSWXPRDLVSSQXQXQSCVPPXAGARQAPESPSXIPVPSQPQNSXLRPGPAAPIALVPVFCGLLVAKSLVLSALLVWWVLRNRHMQHQGRSLLHPAQPRPQAHRHFPLSHRAPGGXYGGKP

SEQ ID NO: 17297 - protein, 172 aa, Homo sapiens
  MOD_RES (3)..(3): Selenocysteine
  MOD_RES (5)..(5): Selenocysteine
  MOD_RES (44)..(44): Selenocysteine
  MOD_RES (48)..(48): Selenocysteine
  MOD_RES (74)..(74): Selenocysteine
  MOD_RES (78)..(78): Selenocysteine
  MOD_RES (99)..(99): Selenocysteine
  MOD_RES (117)..(117): Selenocysteine
  MOD_RES (126)..(126): Selenocysteine
  MOD_RES (147)..(147): Selenocysteine
MAXIXEKEVQQWYKGFIKDCPSGQLDAAGFQKIYKQFFPFGDPXKFAXFVFNVFDENKDGRIEFSEFIQALSVXSRGXLDEKLRWAFKLYDLDNDGYIXRNEMLDIVDAIYQMVGNXVELPEEENXPEKRVDRIFAMMDKNADGKLXLQEFQEGSKADPSIVQALSLYDGLV

SEQ ID NO: 17298 - protein, 190 aa, Homo sapiens
  MOD_RES (17)..(17): Selenocysteine
  MOD_RES (20)..(20): Selenocysteine
  MOD_RES (23)..(23): Selenocysteine
  MOD_RES (62)..(62): Selenocysteine
  MOD_RES (66)..(66): Selenocysteine
  MOD_RES (92)..(92): Selenocysteine
  MOD_RES (96)..(96): Selenocysteine
  MOD_RES (117)..(117): Selenocysteine
  MOD_RES (135)..(135): Selenocysteine
  MOD_RES (144)..(144): Selenocysteine
  MOD_RES (165)..(165): Selenocysteine
MGKSNSKLKPEVVEELXRKXYFXEKEVQQWYKGFIKDCPSGQLDAAGFQKIYKQFFPFGDPXKFAXFVFNVFDENKDGRIEFSEFIQALSVXSRGXLDEKLRWAFKLYDLDNDGYIXRNEMLDIVDAIYQMVGNXVELPEEENXPEKRVDRIFAMMDKNADGKLXLQEFQEGSKADPSIVQALSLYDGLV

SEQ ID NO: 17299 - protein, 709 aa, Homo sapiens
  MOD_RES (3)..(3): Selenocysteine
  MOD_RES (47)..(47): Selenocysteine
  MOD_RES (57)..(57): Selenocysteine
  MOD_RES (70)..(70): Selenocysteine
  MOD_RES (87)..(87): Selenocysteine
  MOD_RES (104)..(104): Selenocysteine
  MOD_RES (115)..(115): Selenocysteine
  MOD_RES (126)..(126): Selenocysteine
  MOD_RES (189)..(189): Selenocysteine
  MOD_RES (209)..(209): Selenocysteine
  MOD_RES (227)..(227): Selenocysteine
  MOD_RES (229)..(229): Selenocysteine
  MOD_RES (239)..(239): Selenocysteine
  MOD_RES (265)..(266): Selenocysteine
  MOD_RES (268)..(268): Selenocysteine
  MOD_RES (280)..(280): Selenocysteine
  MOD_RES (304)..(304): Selenocysteine
  MOD_RES (319)..(320): Selenocysteine
  MOD_RES (334)..(334): Selenocysteine
  MOD_RES (372)..(372): Selenocysteine
  MOD_RES (380)..(380): Selenocysteine
  MOD_RES (400)..(400): Selenocysteine
  MOD_RES (459)..(459): Selenocysteine
  MOD_RES (481)..(481): Selenocysteine
  MOD_RES (483)..(483): Selenocysteine
  MOD_RES (492)..(492): Selenocysteine
  MOD_RES (505)..(505): Selenocysteine
  MOD_RES (510)..(510): Selenocysteine
  MOD_RES (517)..(517): Selenocysteine
  MOD_RES (519)..(519): Selenocysteine
  MOD_RES (561)..(561): Selenocysteine
  MOD_RES (563)..(564): Selenocysteine
  MOD_RES (575)..(575): Selenocysteine
  MOD_RES (577)..(577): Selenocysteine
  MOD_RES (582)..(582): Selenocysteine
  MOD_RES (614)..(614): Selenocysteine
  MOD_RES (624)..(624): Selenocysteine
  MOD_RES (643)..(643): Selenocysteine
  MOD_RES (647)..(647): Selenocysteine
  MOD_RES (649)..(649): Selenocysteine
  MOD_RES (672)..(672): Selenocysteine
  MOD_RES (674)..(674): Selenocysteine
  MOD_RES (687)..(687): Selenocysteine
MAXAGGGSGADPGSRGLLRLLSFCVLLAGLCRGNSVERKIYIPLNKXAPCVRLLNAXHQIGCQSSISGDXGVIHVVEKEEDLQWVLXDGPNPPYMVLLESKHFXRDLMEKLKGRXSRIAGLAVSLXKPSPASGFSPSVQCPNDGFGVYSNSYGPEFAHCREIQWNSLGNGLAYEDFSFPIFLLEDENEXKVIKQCYQDHNLSQNGSAPXFPLCAMQLFSHMHAVISXAXCMRRSSIQSXFSINPEIVCDPLSDYNVWSMLKPINXXGXLKPDDRVVVAAXRLDSRSFFWNVAPGAESAVASFVXQLAAAEALQKAPDVXXLPRNVMFVFFQGEXFDYIGSSRMVYDMEKGKFPVQLENVDSFVELGQVALRXSLELWMHXDPVSQKNESVRNQVEDLLAXLEKSGAGVPAVILRRPNQSQPLPPSSLQRFLRARNISGVVLADHSGAFHNKYYQSIYDXAENINVSYPEWLSPEEDLNFVXDXAKALADVAXVLGRALYELAGGXNFSDXVQADPQXVXRLLYGFLIKANNSWFQSILRQDLRSYLGDGPLQHYIAVSSPXNXXYVVQYALANLXGXVVNLXREQCQDPSKVPSENKDLYEYSWVQGPLHSNEXDRLPRCVRSXARLARALSPAFELSQWSSXEYSXWXESRWKDIRARIFLIASKELELIXLXVGFGILIFSLIVXYCINAKADVLFIAPREPGAVSY

SEQ ID NO: 17300 - protein, 255 aa, Homo sapiens
  MOD_RES (3)..(3): Selenocysteine
  MOD_RES (47)..(47): Selenocysteine
  MOD_RES (57)..(57): Selenocysteine
  MOD_RES (70)..(70): Selenocysteine
  MOD_RES (87)..(87): Selenocysteine
  MOD_RES (104)..(104): Selenocysteine
  MOD_RES (115)..(115): Selenocysteine
  MOD_RES (126)..(126): Selenocysteine
  MOD_RES (189)..(189): Selenocysteine
  MOD_RES (196)..(196): Selenocysteine
  MOD_RES (234)..(234): Selenocysteine
  MOD_RES (242)..(242): Selenocysteine
MAXAGGGSGADPGSRGLLRLLSFCVLLAGLCRGNSVERKIYIPLNKXAPCVRLLNAXHQIGCQSSISGDXGVIHVVEKEEDLQWVLXDGPNPPYMVLLESKHFXRDLMEKLKGRXSRIAGLAVSLXKPSPASGFSPSVQCPNDGFGVYSNSYGPEFAHCREIQWNSLGNGLAYEDFSFPIFLLEDENEXKVIKQEXFDYIGSSRMVYDMEKGKFPVQLENVDSFVELGQVALRXSLELWMHXDPVSQKNESVRNQ

SEQ ID NO: 17301 - protein, 134 aa, Homo sapiens
  MOD_RES (3)..(3): Selenocysteine
  MOD_RES (47)..(47): Selenocysteine
  MOD_RES (57)..(57): Selenocysteine
  MOD_RES (70)..(70): Selenocysteine
  MOD_RES (87)..(87): Selenocysteine
  MOD_RES (104)..(104): Selenocysteine
  MOD_RES (113)..(113): Selenocysteine
MAXAGGGSGADPGSRGLLRLLSFCVLLAGLCRGNSVERKIYIPLNKXAPCVRLLNAXHQIGCQSSISGDXGVIHVVEKEEDLQWVLXDGPNPPYMVLLESKHFXRQNVRLSDXFLCSFMEFLSYSRDLMEKLKG

SEQ ID NO: 17302 - protein, 232 aa, Homo sapiens
  MOD_RES (3)..(3): Selenocysteine
  MOD_RES (55)..(55): Selenocysteine
  MOD_RES (61)..(61): Selenocysteine
  MOD_RES (80)..(80): Selenocysteine
  MOD_RES (90)..(90): Selenocysteine
  MOD_RES (103)..(103): Selenocysteine
  MOD_RES (120)..(120): Selenocysteine
  MOD_RES (137)..(137): Selenocysteine
  MOD_RES (148)..(148): Selenocysteine
  MOD_RES (159)..(159): Selenocysteine
  MOD_RES (222)..(222): Selenocysteine
MAXAGGGSGADPGSRGLLRLLSFCVLLAGLFLDFEPDPLPLCPDVSFFPQPQPPXPQSKGXGLCRGNSVERKIYIPLNKXAPCVRLLNAXHQIGCQSSISGDXGVIHVVEKEEDLQWVLXDGPNPPYMVLLESKHFXRDLMEKLKGRXSRIAGLAVSLXKPSPASGFSPSVQCPNDGFGVYSNSYGPEFAHCREIQWNSLGNGLAYEDFSFPIFLLEDENEXKVIKQCYQDH

SEQ ID NO: 17303 - protein, 689 aa, Homo sapiens
  MOD_RES (27)..(27): Selenocysteine
  MOD_RES (37)..(37): Selenocysteine
  MOD_RES (50)..(50): Selenocysteine
  MOD_RES (67)..(67): Selenocysteine
  MOD_RES (84)..(84): Selenocysteine
  MOD_RES (95)..(95): Selenocysteine
  MOD_RES (106)..(106): Selenocysteine
  MOD_RES (169)..(169): Selenocysteine
  MOD_RES (189)..(189): Selenocysteine
  MOD_RES (207)..(207): Selenocysteine
  MOD_RES (209)..(209): Selenocysteine
  MOD_RES (219)..(219): Selenocysteine
  MOD_RES (245)..(246): Selenocysteine
  MOD_RES (248)..(248): Selenocysteine
  MOD_RES (260)..(260): Selenocysteine
  MOD_RES (284)..(284): Selenocysteine
  MOD_RES (299)..(300): Selenocysteine
  MOD_RES (314)..(314): Selenocysteine
  MOD_RES (352)..(352): Selenocysteine
  MOD_RES (360)..(360): Selenocysteine
  MOD_RES (380)..(380): Selenocysteine
  MOD_RES (439)..(439): Selenocysteine
  MOD_RES (461)..(461): Selenocysteine
  MOD_RES (463)..(463): Selenocysteine
  MOD_RES (472)..(472): Selenocysteine
  MOD_RES (485)..(485): Selenocysteine
  MOD_RES (490)..(490): Selenocysteine
  MOD_RES (497)..(497): Selenocysteine
  MOD_RES (499)..(499): Selenocysteine
  MOD_RES (541)..(541): Selenocysteine
  MOD_RES (543)..(544): Selenocysteine
  MOD_RES (555)..(555): Selenocysteine
  MOD_RES (557)..(557): Selenocysteine
  MOD_RES (562)..(562): Selenocysteine
  MOD_RES (594)..(594): Selenocysteine
  MOD_RES (604)..(604): Selenocysteine
  MOD_RES (623)..(623): Selenocysteine
  MOD_RES (627)..(627): Selenocysteine
  MOD_RES (629)..(629): Selenocysteine
  MOD_RES (652)..(652): Selenocysteine
  MOD_RES (654)..(654): Selenocysteine
  MOD_RES (667)..(667): Selenocysteine
MDFNLILESLCRGNSVERKIYIPLNKXAPCVRLLNAXHQIGCQSSISGDXGVIHVVEKEEDLQWVLXDGPNPPYMVLLESKHFXRDLMEKLKGRXSRIAGLAVSLXKPSPASGFSPSVQCPNDGFGVYSNSYGPEFAHCREIQWNSLGNGLAYEDFSFPIFLLEDENEXKVIKQCYQDHNLSQNGSAPXFPLCAMQLFSHMHAVISXAXCMRRSSIQSXFSINPEIVCDPLSDYNVWSMLKPINXXGXLKPDDRVVVAAXRLDSRSFFWNVAPGAESAVASFVXQLAAAEALQKAPDVXXLPRNVMFVFFQGEXFDYIGSSRMVYDMEKGKFPVQLENVDSFVELGQVALRXSLELWMHXDPVSQKNESVRNQVEDLLAXLEKSGAGVPAVILRRPNQSQPLPPSSLQRFLRARNISGVVLADHSGAFHNKYYQSIYDXAENINVSYPEWLSPEEDLNFVXDXAKALADVAXVLGRALYELAGGXNFSDXVQADPQXVXRLLYGFLIKANNSWFQSILRQDLRSYLGDGPLQHYIAVSSPXNXXYVVQYALANLXGXVVNLXREQCQDPSKVPSENKDLYEYSWVQGPLHSNEXDRLPRCVRSXARLARALSPAFELSQWSSXEYSXWXESRWKDIRARIFLIASKELELIXLXVGFGILIFSLIVXYCINAKADVLFIAPREPGAVSY

SEQ ID NO: 17304 - protein, 219 aa, Homo sapiens
  MOD_RES (7)..(7): Selenocysteine
  MOD_RES (33)..(34): Selenocysteine
  MOD_RES (36)..(36): Selenocysteine
  MOD_RES (48)..(48): Selenocysteine
  MOD_RES (63)..(64): Selenocysteine
  MOD_RES (78)..(78): Selenocysteine
  MOD_RES (116)..(116): Selenocysteine
  MOD_RES (124)..(124): Selenocysteine
  MOD_RES (144)..(144): Selenocysteine
  MOD_RES (203)..(203): Selenocysteine
RSSIQSXFSINPEIVCDPLSDYNVWSMLKPINXXGXLKPDDRVVVAAXRLAAAEALQKAPDVXXLPRNVMFVFFQGEXFDYIGSSRMVYDMEKGKFPVQLENVDSFVELGQVALRXSLELWMHXDPVSQKNESVRNQVEDLLAXLEKSGAGVPAVILRRPNQSQPLPPSSLQRFLRARNISGVVLADHSGAFHNKYYQSIYDXAENINVSYPEWLSPEE

SEQ ID NO: 17305 - protein, 320 aa, Homo sapiens
  MOD_RES (1)..(1): Any amino acid
  MOD_RES (47)..(47): Selenocysteine
  MOD_RES (63)..(63): Selenocysteine
  MOD_RES (65)..(65): Selenocysteine
  MOD_RES (75)..(75): Selenocysteine
  MOD_RES (101)..(102): Selenocysteine
  MOD_RES (104)..(104): Selenocysteine
  MOD_RES (116)..(116): Selenocysteine
  MOD_RES (140)..(140): Selenocysteine
  MOD_RES (155)..(156): Selenocysteine
  MOD_RES (170)..(170): Selenocysteine
  MOD_RES (208)..(208): Selenocysteine
  MOD_RES (216)..(216): Selenocysteine
  MOD_RES (236)..(236): Selenocysteine
  MOD_RES (295)..(295): Selenocysteine
  MOD_RES (317)..(317): Selenocysteine
  MOD_RES (319)..(319): Selenocysteine
XGFGVYSNSYGPEFAHCREIQWNSLGNGLAYEDFSFPIFLLEDENEXKVIKQLFSHMHAVISXAXCMRRSSIQSXFSINPEIVCDPLSDYNVWSMLKPINXXGXLKPDDRVVVAAXRLDSRSFFWNVAPGAESAVASFVXQLAAAEALQKAPDVXXLPRNVMFVFFQGEXFDYIGSSRMVYDMEKGKFPVQLENVDSFVELGQVALRXSLELWMHXDPVSQKNESVRNQVEDLLAXLEKSGAGVPAVILRRPNQSQPLPPSSLQRFLRARNISGVVLADHSGAFHNKYYQSIYDXAENINVSYPEWLSPEEDLNFVXDXA

SEQ ID NO: 17306 - protein, 275 aa, Homo sapiens
  MOD_RES (1)..(1): Any amino acid
  MOD_RES (16)..(16): Selenocysteine
  MOD_RES (31)..(32): Selenocysteine
  MOD_RES (49)..(49): Selenocysteine
  MOD_RES (57)..(57): Selenocysteine
  MOD_RES (77)..(77): Selenocysteine
  MOD_RES (136)..(136): Selenocysteine
  MOD_RES (158)..(158): Selenocysteine
  MOD_RES (160)..(160): Selenocysteine
  MOD_RES (169)..(169): Selenocysteine
  MOD_RES (182)..(182): Selenocysteine
  MOD_RES (187)..(187): Selenocysteine
  MOD_RES (194)..(194): Selenocysteine
  MOD_RES (196)..(196): Selenocysteine
  MOD_RES (238)..(238): Selenocysteine
  MOD_RES (240)..(241): Selenocysteine
  MOD_RES (252)..(252): Selenocysteine
  MOD_RES (254)..(254): Selenocysteine
  MOD_RES (259)..(259): Selenocysteine
XNVAPGAESAVASFVXQLAAAEALQKAPDVXXLPRNVMFVFFQGVALRXSLELWMHXDPVSQKNESVRNQVEDLLAXLEKSGAGVPAVILRRPNQSQPLPPSSLQRFLRARNISGVVLADHSGAFHNKYYQSIYDXAENINVSYPEWLSPEEDLNFVXDXAKALADVAXVLGRALYELAGGXNFSDXVQADPQXVXRLLYGFLIKANNSWFQSILRQDLRSYLGDGPLQHYIAVSSPXNXXYVVQYALANLXGXVVNLXREQCQDPSKVPSENKD

SEQ ID NO: 17307 - protein, 221 aa, Homo sapiens
  MOD_RES (71)..(72): Selenocysteine
  MOD_RES (82)..(82): Selenocysteine
  MOD_RES (87)..(87): Selenocysteine
  MOD_RES (121)..(121): Selenocysteine
  MOD_RES (140)..(141): Selenocysteine
  MOD_RES (168)..(168): Selenocysteine
  MOD_RES (208)..(208): Selenocysteine
  MOD_RES (215)..(215): Selenocysteine
MALALAALAAVEPACGSRYQQLQNEEESGEPEQAAGDAPPPYSSISAESAAYFDYKDESGFPKPPSYNVAXXLPSYDEAERXKAEAXIPLVPGRDEDFVGRDDFDDADQLRIGNDGIFMLXFFMAFLFNWIGFFLSFCLXXSAAGRYGAISGFGLSLIKWILIVRFSXYFPGYFDGQYWLWWVFLVLGFLLFLRGFINYAKVRKMPEXFSNLPRXRVLFIY

SEQ ID NO: 17308 - protein, 336 aa, Homo sapiens
  MOD_RES (30)..(30): Selenocysteine
  MOD_RES (32)..(32): Selenocysteine
  MOD_RES (44)..(44): Selenocysteine
  MOD_RES (67)..(68): Selenocysteine
  MOD_RES (71)..(71): Selenocysteine
  MOD_RES (102)..(102): Selenocysteine
  MOD_RES (125)..(125): Selenocysteine
  MOD_RES (144)..(144): Selenocysteine
  MOD_RES (155)..(155): Selenocysteine
  MOD_RES (160)..(161): Selenocysteine
  MOD_RES (164)..(164): Selenocysteine
  MOD_RES (181)..(181): Selenocysteine
  MOD_RES (185)..(185): Selenocysteine
  MOD_RES (204)..(204): Selenocysteine
  MOD_RES (255)..(255): Selenocysteine
  MOD_RES (257)..(257): Selenocysteine
  MOD_RES (286)..(286): Selenocysteine
  MOD_RES (330)..(330): Selenocysteine
MARRRSQRVCASGPSMLNSARGAPELLRGXAXNAEVSAAAAGAXGSEELPPGDRGCRNGGGRGPAAXXSSXGVAVGAEHGEDSLSRKPDPEPGRMDHHQPGXGRYQVLLNEEDNSESSAIEQPPXSNPAPQIVQAASSAPALEXDSSPPPYSSIXVEVPXXSDXEVYGEFYPVPPPYSVAXSLPXYDEAEKAKAAAMAAAAAEXSQRIQEEECPPRDDFSDADQLRVGNDGIFMLAFFMAFIFNWLGFCLSFCIXNXIAGRYGAICGFGLSLIKWILIVRFSDYFXGYFNGQYWLWWIFLVLGLLLFFRGFVNYLKVRNMSESMAAAHRXRYFFLL

SEQ ID NO: 17309 - protein, 146 aa, Homo sapiens
  MOD_RES (8)..(8): Selenocysteine
  MOD_RES (31)..(31): Selenocysteine
  MOD_RES (50)..(50): Selenocysteine
  MOD_RES (61)..(61): Selenocysteine
  MOD_RES (66)..(67): Selenocysteine
  MOD_RES (70)..(70): Selenocysteine
  MOD_RES (87)..(87): Selenocysteine
  MOD_RES (91)..(91): Selenocysteine
  MOD_RES (110)..(110): Selenocysteine
MDHHQPGXGRYQVLLNEEDNSESSAIEQPPXSNPAPQIVQAASSAPALEXDSSPPPYSSIXVEVPXXSDXEVYGEFYPVPPPYSVAXSLPXYDEAEKAKAAAMAAAAAEXSQRIQEEECPPRDDFSDADQLRVGNDGIFMLAFFIF

SEQ ID NO: 17310 - protein, 242 aa, Homo sapiens
  MOD_RES (8)..(8): Selenocysteine
  MOD_RES (31)..(31): Selenocysteine
  MOD_RES (50)..(50): Selenocysteine
  MOD_RES (61)..(61): Selenocysteine
  MOD_RES (66)..(67): Selenocysteine
  MOD_RES (70)..(70): Selenocysteine
  MOD_RES (87)..(87): Selenocysteine
  MOD_RES (91)..(91): Selenocysteine
  MOD_RES (110)..(110): Selenocysteine
  MOD_RES (161)..(161): Selenocysteine
  MOD_RES (163)..(163): Selenocysteine
  MOD_RES (192)..(192): Selenocysteine
  MOD_RES (236)..(236): Selenocysteine
MDHHQPGXGRYQVLLNEEDNSESSAIEQPPXSNPAPQIVQAASSAPALEXDSSPPPYSSIXVEVPXXSDXEVYGEFYPVPPPYSVAXSLPXYDEAEKAKAAAMAAAAAEXSQRIQEEECPPRDDFSDADQLRVGNDGIFMLAFFMAFIFNWLGFCLSFCIXNXIAGRYGAICGFGLSLIKWILIVRFSDYFXGYFNGQYWLWWIFLVLGLLLFFRGFVNYLKVRNMSESMAAAHRXRYFFLL

SEQ ID NO: 17311 - protein, 222 aa, Homo sapiens
  MOD_RES (8)..(8): Selenocysteine
  MOD_RES (31)..(31): Selenocysteine
  MOD_RES (50)..(50): Selenocysteine
  MOD_RES (61)..(61): Selenocysteine
  MOD_RES (66)..(67): Selenocysteine
  MOD_RES (70)..(70): Selenocysteine
  MOD_RES (87)..(87): Selenocysteine
  MOD_RES (91)..(91): Selenocysteine
  MOD_RES (110)..(110): Selenocysteine
  MOD_RES (145)..(145): Selenocysteine
  MOD_RES (172)..(172): Selenocysteine
  MOD_RES (216)..(216): Selenocysteine
MDHHQPGXGRYQVLLNEEDNSESSAIEQPPXSNPAPQIVQAASSAPALEXDSSPPPYSSIXVEVPXXSDXEVYGEFYPVPPPYSVAXSLPXYDEAEKAKAAAMAAAAAEXSQRIQEEECPPRDDFSDADQLRVGNDGIFMLAFFXGRYGAICGFGLSLIKWILIVRFSDYFXGYFNGQYWLWWIFLVLGLLLFFRGFVNYLKVRNMSESMAAAHRXRYFFLL

SEQ ID NO: 17312 - protein, 321 aa, Homo sapiens
  MOD_RES (37)..(37): Selenocysteine
  MOD_RES (49)..(49): Selenocysteine
  MOD_RES (143)..(143): Selenocysteine
  MOD_RES (158)..(158): Selenocysteine
  MOD_RES (162)..(162): Selenocysteine
  MOD_RES (188)..(188): Selenocysteine
  MOD_RES (227)..(227): Selenocysteine
  MOD_RES (236)..(236): Selenocysteine
  MOD_RES (271)..(271): Selenocysteine
  MOD_RES (310)..(310): Selenocysteine
MSEQSKDLSDPNFAAEAPNSEVHSSPGVSEGVPPSAXLAEPQSPPLGPXAAPQAAPPPQAPNDEGDPKALQQAAEEGRAHQAPSAAQPGPAPPAPAQLVQKAHELMWYVLVKDQKKMIIWFPDMVKDVIGSYKKWCRSILRRXSLILARVFGLHLRLXSLHXMEFALVKALEPEELDRVALSNRMPMXGLLLMILSLIYVKGRGARESAVWNVLRILGLRPWKKHSXFGDVRKLIXEEFVQMNYLKYQRVPYVEPPEYEFFWGSRASREIXKMQIMEFLARVFKKDPQAWPSRYREALEEARALREANPXAHYPRSSVSED

SEQ ID NO: 17313 - protein, 116 aa, Homo sapiens
  MOD_RES (19)..(19): Selenocysteine
  MOD_RES (24)..(24): Selenocysteine
  MOD_RES (60)..(60): Selenocysteine
  MOD_RES (73)..(73): Selenocysteine
  MOD_RES (78)..(78): Selenocysteine
  MOD_RES (80)..(80): Selenocysteine
MVLLHWCLLWLLFPLSSRXQKLPXRDEELFQMQIRDKAFFHDSSVIPDGAEISSYLFRDXPKRYFFVVEEDNXPLSVXVXPCDAPLEWKLSLQELPEDRSGEGSGDLEPLEQQKQQ

SEQ ID NO: 17314 - protein, 145 aa, Homo sapiens
  MOD_RES (19)..(19): Selenocysteine
  MOD_RES (24)..(24): Selenocysteine
  MOD_RES (60)..(60): Selenocysteine
  MOD_RES (73)..(73): Selenocysteine
  MOD_RES (78)..(78): Selenocysteine
  MOD_RES (80)..(80): Selenocysteine
  MOD_RES (123)..(123): Selenocysteine
MVLLHWCLLWLLFPLSSRXQKLPXRDEELFQMQIRDKAFFHDSSVIPDGAEISSYLFRDXPKRYFFVVEEDNXPLSVXVXPCDAPLEWKLSLQELPEDRSGEGSGDLEPLEQQKQQIINEEGXELFSYKGNDVEYFISSSSPSGL

SEQ ID NO: 17315 - protein, 568 aa, Homo sapiens
  MOD_RES (19)..(19): Selenocysteine
  MOD_RES (24)..(24): Selenocysteine
  MOD_RES (60)..(60): Selenocysteine
  MOD_RES (73)..(73): Selenocysteine
  MOD_RES (78)..(78): Selenocysteine
  MOD_RES (80)..(80): Selenocysteine
  MOD_RES (123)..(123): Selenocysteine
  MOD_RES (153)..(153): Selenocysteine
  MOD_RES (157)..(157): Selenocysteine
  MOD_RES (164)..(166): Selenocysteine
  MOD_RES (185)..(185): Selenocysteine
  MOD_RES (190)..(191): Selenocysteine
  MOD_RES (193)..(193): Selenocysteine
  MOD_RES (201)..(201): Selenocysteine
  MOD_RES (300)..(300): Selenocysteine
  MOD_RES (308)..(308): Selenocysteine
  MOD_RES (325)..(325): Selenocysteine
  MOD_RES (330)..(330): Selenocysteine
  MOD_RES (334)..(334): Selenocysteine
  MOD_RES (342)..(342): Selenocysteine
  MOD_RES (351)..(351): Selenocysteine
  MOD_RES (375)..(375): Selenocysteine
  MOD_RES (436)..(437): Selenocysteine
  MOD_RES (440)..(440): Selenocysteine
  MOD_RES (451)..(451): Selenocysteine
  MOD_RES (461)..(461): Selenocysteine
  MOD_RES (466)..(466): Selenocysteine
  MOD_RES (472)..(472): Selenocysteine
  MOD_RES (528)..(529): Selenocysteine
  MOD_RES (531)..(531): Selenocysteine
  MOD_RES (564)..(564): Selenocysteine
MVLLHWCLLWLLFPLSSRXQKLPXRDEELFQMQIRDKAFFHDSSVIPDGAEISSYLFRDXPKRYFFVVEEDNXPLSVXVXPCDAPLEWKLSLQELPEDRSGEGSGDLEPLEQQKQQIINEEGXELFSYKGNDVEYFISSSSPSGLYQLDLLSXEKDXHFKVYAXXXPESDQPYPELPYDPRVDVXSLGRXXVXLAWKPSPXASLLKQPIQYCVVINKEHNFKSLCAVEAKLSADDAFMMAPKPGLDFSPFDFAHFGFPSDNSGKERSFQAKPSPKLGRHVYSRPKVDIQKICIGNKNIFXVSDLKPDXQYYFDVFVVNINSNMSXAYVGXFARXKEEAKQKXVELKDGKIXDVFVKRKGAKFLRFAPVSSHQKVXFFIHSCLDAVQIQVRRDGKLLLSQNVEGIQQFQLRGKPKAKYLVRLKGNKKGASMLKILAXXRPXKQSFPSLPEDXRIKAFDKLRXCSSAXVAWLGXQERNKFCIYKKEVDDNYNEDQKKREQNQCLGPDIRKKSEKVLCKYFHSQNLQKAVXXEXIKGLQPGKSYLLDVYVIGHGGHSVKYQSKVVKXRKFC

SEQ ID NO: 17316 - protein, 133 aa, Homo sapiens
  MOD_RES (22)..(22): Selenocysteine
  MOD_RES (26)..(26): Selenocysteine
  MOD_RES (83)..(83): Selenocysteine
  MOD_RES (100)..(100): Selenocysteine
  MOD_RES (117)..(117): Selenocysteine
  MOD_RES (119)..(119): Selenocysteine
MRKHVLAASFSMLSLLVIMGDXDSKXDSSFIMDSDPRRCMRHHYVDSISHPLYKCSSKMVLLARCEGHCSQASRSEPLVSFSXVLKQPFRSSCHCCRPQXSKLKALRLRCSGGMRLXAXYRYILSCHCEECNS

SEQ ID NO: 17317 - protein, 193 aa, Homo sapiens
  MOD_RES (39)..(39): Selenocysteine
  MOD_RES (41)..(41): Selenocysteine
  MOD_RES (56)..(56): Selenocysteine
  MOD_RES (64)..(64): Selenocysteine
  MOD_RES (68)..(68): Selenocysteine
  MOD_RES (78)..(78): Selenocysteine
  MOD_RES (88)..(88): Selenocysteine
  MOD_RES (103)..(103): Selenocysteine
  MOD_RES (156)..(156): Selenocysteine
  MOD_RES (164)..(164): Selenocysteine
MAVPPPGIMKQAGDSRDMSREMQDVDLAEVKPLVEKGEXIXGLLQEFDVQEQDIEXLHGSVHVXLCGXPKGNRPVILXYHDIGMNHKXCYNPLFNYEDMQEIXQHFAVCHVDAPGQQDGAASFPAGYMYPSMDQLAEMLPGVLQQFGLKSIIGMGXGAGAYILXRFALNNPEMVEGLVLINVNPCAEGWMDWA

SEQ ID NO: 17318 - protein, 43 aa, Homo sapiens
  MOD_RES (5)..(5): Selenocysteine
  MOD_RES (20)..(20): Selenocysteine
MNHKXCYNPLFNYEDMQEIXQHFAVCHVDAPGQQDGAASFPAG

SEQ ID NO: 17319 - protein, 100 aa, Homo sapiens
  MOD_RES (5)..(5): Selenocysteine
  MOD_RES (20)..(20): Selenocysteine
  MOD_RES (73)..(73): Selenocysteine
  MOD_RES (81)..(81): Selenocysteine
MNHKXCYNPLFNYEDMQEIXQHFAVCHVDAPGQQDGAASFPAGYMYPSMDQLAEMLPGVLQQFGLKSIIGMGXGAGAYILXRFALNNPEMVEGLVLINVN

SEQ ID NO: 17320 - protein, 328 aa, Homo sapiens
  MOD_RES (5)..(5): Selenocysteine
  MOD_RES (20)..(20): Selenocysteine
  MOD_RES (73)..(73): Selenocysteine
  MOD_RES (81)..(81): Selenocysteine
  MOD_RES (118)..(118): Selenocysteine
  MOD_RES (144)..(144): Selenocysteine
  MOD_RES (180)..(180): Selenocysteine
  MOD_RES (182)..(182): Selenocysteine
  MOD_RES (184)..(184): Selenocysteine
  MOD_RES (213)..(213): Selenocysteine
  MOD_RES (215)..(216): Selenocysteine
  MOD_RES (255)..(255): Selenocysteine
  MOD_RES (262)..(262): Selenocysteine
  MOD_RES (269)..(269): Selenocysteine
  MOD_RES (274)..(274): Selenocysteine
  MOD_RES (280)..(280): Selenocysteine
  MOD_RES (284)..(284): Selenocysteine
  MOD_RES (290)..(290): Selenocysteine
  MOD_RES (294)..(294): Selenocysteine
  MOD_RES (300)..(300): Selenocysteine
  MOD_RES (309)..(309): Selenocysteine
MNHKXCYNPLFNYEDMQEIXQHFAVCHVDAPGQQDGAASFPAGYMYPSMDQLAEMLPGVLQQFGLKSIIGMGXGAGAYILXRFALNNPEMVEGLVLINVNPCAEGWMDWAASKISGWXQALPDMVVSHLFGKEEMQSNVEVVHXYRQHIVNDMNPGNLHLFINAYNSRRDLEIERPMPGXHXVXLQCPALLVVGDSSPAVDAVVECNSKLDPXKXXLLKMADCGGLPQISQPAKLAEAFKYFVQGMGYMPSASMXRLMRSRXASGSSVXSLDGXRSRSHXSEGXRSRSHXSEGXRSRSHXSEGAHLDIXPNSGAAGNSAGPKSMEVSC

SEQ ID NO: 17321 - protein, 313 aa, Homo sapiens
  MOD_RES (5)..(5): Selenocysteine
  MOD_RES (58)..(58): Selenocysteine
  MOD_RES (66)..(66): Selenocysteine
  MOD_RES (103)..(103): Selenocysteine
  MOD_RES (129)..(129): Selenocysteine
  MOD_RES (165)..(165): Selenocysteine
  MOD_RES (167)..(167): Selenocysteine
  MOD_RES (169)..(169): Selenocysteine
  MOD_RES (198)..(198): Selenocysteine
  MOD_RES (200)..(201): Selenocysteine
  MOD_RES (240)..(240): Selenocysteine
  MOD_RES (247)..(247): Selenocysteine
  MOD_RES (254)..(254): Selenocysteine
  MOD_RES (259)..(259): Selenocysteine
  MOD_RES (265)..(265): Selenocysteine
  MOD_RES (269)..(269): Selenocysteine
  MOD_RES (275)..(275): Selenocysteine
  MOD_RES (279)..(279): Selenocysteine
  MOD_RES (285)..(285): Selenocysteine
  MOD_RES (294)..(294): Selenocysteine
MQEIXQHFAVCHVDAPGQQDGAASFPAGYMYPSMDQLAEMLPGVLQQFGLKSIIGMGXGAGAYILXRFALNNPEMVEGLVLINVNPCAEGWMDWAASKISGWXQALPDMVVSHLFGKEEMQSNVEVVHXYRQHIVNDMNPGNLHLFINAYNSRRDLEIERPMPGXHXVXLQCPALLVVGDSSPAVDAVVECNSKLDPXKXXLLKMADCGGLPQISQPAKLAEAFKYFVQGMGYMPSASMXRLMRSRXASGSSVXSLDGXRSRSHXSEGXRSRSHXSEGXRSRSHXSEGAHLDIXPNSGAAGNSAGPKSMEVSC

SEQ ID NO: 17322 - protein, 167 aa, Homo sapiens
  MOD_RES (9)..(9): Selenocysteine
  MOD_RES (17)..(17): Selenocysteine
  MOD_RES (30)..(30): Selenocysteine
  MOD_RES (37)..(37): Selenocysteine
  MOD_RES (76)..(76): Selenocysteine
  MOD_RES (78)..(78): Selenocysteine
  MOD_RES (93)..(93): Selenocysteine
  MOD_RES (101)..(101): Selenocysteine
  MOD_RES (105)..(105): Selenocysteine
  MOD_RES (115)..(115): Selenocysteine
  MOD_RES (125)..(125): Selenocysteine
  MOD_RES (140)..(140): Selenocysteine
MSGSRESCXVGCVCVFXRMRVPVCLCVCIXNLLLGLXVRLKLALCLYVAGDSRDMSREMQDVDLAEVKPLVEKGEXIXGLLQEFDVQEQDIEXLHGSVHVXLCGXPKGNRPVILXYHDIGMNHKXCYNPLFNYEDMQEIXQHFAVCHVDAPGQQDGAASFPAGYMYP

SEQ ID NO: 17323 - protein, 103 aa, Homo sapiens
  MOD_RES (30)..(30): Selenocysteine
  MOD_RES (37)..(37): Selenocysteine
  MOD_RES (44)..(44): Selenocysteine
  MOD_RES (49)..(49): Selenocysteine
  MOD_RES (55)..(55): Selenocysteine
  MOD_RES (59)..(59): Selenocysteine
  MOD_RES (65)..(65): Selenocysteine
  MOD_RES (69)..(69): Selenocysteine
  MOD_RES (75)..(75): Selenocysteine
  MOD_RES (84)..(84): Selenocysteine
MSREMQDVDLAEAFKYFVQGMGYMPSASMXRLMRSRXASGSSVXSLDGXRSRSHXSEGXRSRSHXSEGXRSRSHXSEGAHLDIXPNSGAAGNSAGPKSMEVSC

SEQ ID NO: 17324 - protein, 141 aa, Homo sapiens
  MOD_RES (26)..(26): Selenocysteine
  MOD_RES (28)..(29): Selenocysteine
  MOD_RES (68)..(68): Selenocysteine
  MOD_RES (75)..(75): Selenocysteine
  MOD_RES (82)..(82): Selenocysteine
  MOD_RES (87)..(87): Selenocysteine
  MOD_RES (93)..(93): Selenocysteine
  MOD_RES (97)..(97): Selenocysteine
  MOD_RES (103)..(103): Selenocysteine
  MOD_RES (107)..(107): Selenocysteine
  MOD_RES (113)..(113): Selenocysteine
  MOD_RES (122)..(122): Selenocysteine
MSREMQDVDLAEVKPLVECNSKLDPXKXXLLKMADCGGLPQISQPAKLAEAFKYFVQGMGYMPSASMXRLMRSRXASGSSVXSLDGXRSRSHXSEGXRSRSHXSEGXRSRSHXSEGAHLDIXPNSGAAGNSAGPKSMEVSC

SEQ ID NO: 17325 - protein, 133 aa, Homo sapiens
  MOD_RES (22)..(22): Selenocysteine
  MOD_RES (24)..(24): Selenocysteine
  MOD_RES (39)..(39): Selenocysteine
  MOD_RES (47)..(47): Selenocysteine
  MOD_RES (51)..(51): Selenocysteine
  MOD_RES (61)..(61): Selenocysteine
  MOD_RES (71)..(71): Selenocysteine
  MOD_RES (86)..(86): Selenocysteine
MSREMQDVDLAEVKPLVEKGEXIXGLLQEFDVQEQDIEXLHGSVHVXLCGXPKGNRPVILXYHDIGMNHKXCYNPLFNYEDMQEIXQHFAVCHVDAPGQQDGAASFPAGYMYPSMDQLAEMLPGVLQQFGLKS

SEQ ID NO: 17326 - protein, 158 aa, Homo sapiens
  MOD_RES (22)..(22): Selenocysteine
  MOD_RES (24)..(24): Selenocysteine
  MOD_RES (39)..(39): Selenocysteine
  MOD_RES (47)..(47): Selenocysteine
  MOD_RES (51)..(51): Selenocysteine
  MOD_RES (61)..(61): Selenocysteine
  MOD_RES (71)..(71): Selenocysteine
  MOD_RES (86)..(86): Selenocysteine
  MOD_RES (139)..(139): Selenocysteine
  MOD_RES (147)..(147): Selenocysteine
MSREMQDVDLAEVKPLVEKGEXIXGLLQEFDVQEQDIEXLHGSVHVXLCGXPKGNRPVILXYHDIGMNHKXCYNPLFNYEDMQEIXQHFAVCHVDAPGQQDGAASFPAGYMYPSMDQLAEMLPGVLQQFGLKSIIGMGXGAGAYILXRFALNNPEMVE

SEQ ID NO: 17327 - protein, 165 aa, Homo sapiens
  MOD_RES (22)..(22): Selenocysteine
  MOD_RES (24)..(24): Selenocysteine
  MOD_RES (39)..(39): Selenocysteine
  MOD_RES (47)..(47): Selenocysteine
  MOD_RES (51)..(51): Selenocysteine
  MOD_RES (61)..(61): Selenocysteine
  MOD_RES (71)..(71): Selenocysteine
  MOD_RES (86)..(86): Selenocysteine
  MOD_RES (139)..(139): Selenocysteine
  MOD_RES (147)..(147): Selenocysteine
MSREMQDVDLAEVKPLVEKGEXIXGLLQEFDVQEQDIEXLHGSVHVXLCGXPKGNRPVILXYHDIGMNHKXCYNPLFNYEDMQEIXQHFAVCHVDAPGQQDGAASFPAGYMYPSMDQLAEMLPGVLQQFGLKSIIGMGXGAGAYILXRFALNNPEMVEGLVLINV

SEQ ID NO: 17328 - protein, 394 aa, Homo sapiens
  MOD_RES (22)..(22): Selenocysteine
  MOD_RES (24)..(24): Selenocysteine
  MOD_RES (39)..(39): Selenocysteine
  MOD_RES (47)..(47): Selenocysteine
  MOD_RES (51)..(51): Selenocysteine
  MOD_RES (61)..(61): Selenocysteine
  MOD_RES (71)..(71): Selenocysteine
  MOD_RES (86)..(86): Selenocysteine
  MOD_RES (139)..(139): Selenocysteine
  MOD_RES (147)..(147): Selenocysteine
  MOD_RES (184)..(184): Selenocysteine
  MOD_RES (210)..(210): Selenocysteine
  MOD_RES (246)..(246): Selenocysteine
  MOD_RES (248)..(248): Selenocysteine
  MOD_RES (250)..(250): Selenocysteine
  MOD_RES (279)..(279): Selenocysteine
  MOD_RES (281)..(282): Selenocysteine
  MOD_RES (321)..(321): Selenocysteine
  MOD_RES (328)..(328): Selenocysteine
  MOD_RES (335)..(335): Selenocysteine
  MOD_RES (340)..(340): Selenocysteine
  MOD_RES (346)..(346): Selenocysteine
  MOD_RES (350)..(350): Selenocysteine
  MOD_RES (356)..(356): Selenocysteine
  MOD_RES (360)..(360): Selenocysteine
  MOD_RES (366)..(366): Selenocysteine
  MOD_RES (375)..(375): Selenocysteine
MSREMQDVDLAEVKPLVEKGEXIXGLLQEFDVQEQDIEXLHGSVHVXLCGXPKGNRPVILXYHDIGMNHKXCYNPLFNYEDMQEIXQHFAVCHVDAPGQQDGAASFPAGYMYPSMDQLAEMLPGVLQQFGLKSIIGMGXGAGAYILXRFALNNPEMVEGLVLINVNPCAEGWMDWAASKISGWXQALPDMVVSHLFGKEEMQSNVEVVHXYRQHIVNDMNPGNLHLFINAYNSRRDLEIERPMPGXHXVXLQCPALLVVGDSSPAVDAVVECNSKLDPXKXXLLKMADCGGLPQISQPAKLAEAFKYFVQGMGYMPSASMXRLMRSRXASGSSVXSLDGXRSRSHXSEGXRSRSHXSEGXRSRSHXSEGAHLDIXPNSGAAGNSAGPKSMEVSC

SEQ ID NO: 17329 - protein, 216 aa, Homo sapiens
  MOD_RES (22)..(22): Selenocysteine
  MOD_RES (24)..(24): Selenocysteine
  MOD_RES (39)..(39): Selenocysteine
  MOD_RES (47)..(47): Selenocysteine
  MOD_RES (51)..(51): Selenocysteine
  MOD_RES (61)..(61): Selenocysteine
  MOD_RES (71)..(71): Selenocysteine
  MOD_RES (86)..(86): Selenocysteine
  MOD_RES (139)..(139): Selenocysteine
  MOD_RES (147)..(147): Selenocysteine
  MOD_RES (190)..(190): Selenocysteine
  MOD_RES (196)..(196): Selenocysteine
MSREMQDVDLAEVKPLVEKGEXIXGLLQEFDVQEQDIEXLHGSVHVXLCGXPKGNRPVILXYHDIGMNHKXCYNPLFNYEDMQEIXQHFAVCHVDAPGQQDGAASFPAGYMYPSMDQLAEMLPGVLQQFGLKSIIGMGXGAGAYILXRFALNNPEMVEGLVLINVNPCAEGWMDWAASKPFDYQALVLDXVMCAVXSCSPSLDLVALKFLALPVPD

SEQ ID NO: 17330 - protein, 95 aa, Homo sapiens
  MOD_RES (22)..(22): Selenocysteine
  MOD_RES (24)..(24): Selenocysteine
  MOD_RES (34)..(34): Selenocysteine
  MOD_RES (38)..(39): Selenocysteine
  MOD_RES (43)..(44): Selenocysteine
  MOD_RES (46)..(46): Selenocysteine
  MOD_RES (53)..(53): Selenocysteine
  MOD_RES (58)..(58): Selenocysteine
  MOD_RES (60)..(60): Selenocysteine
  MOD_RES (66)..(66): Selenocysteine
  MOD_RES (75)..(75): Selenocysteine
  MOD_RES (77)..(77): Selenocysteine
MSREMQDVDLAEVKPLVEKGEXIXGLLQEFDVQXKPAXXPSSXXRXCRRSPSXLPSAXWXPLASRXAQPPSPQGXCXPPWISWLKCFLESFNSLG

SEQ ID NO: 17331 - protein, 157 aa, Homo sapiens
  MOD_RES (2)..(2): Selenocysteine
  MOD_RES (33)..(33): Selenocysteine
  MOD_RES (35)..(35): Selenocysteine
  MOD_RES (50)..(50): Selenocysteine
  MOD_RES (58)..(58): Selenocysteine
  MOD_RES (62)..(62): Selenocysteine
  MOD_RES (72)..(72): Selenocysteine
  MOD_RES (82)..(82): Selenocysteine
  MOD_RES (97)..(97): Selenocysteine
  MOD_RES (150)..(150): Selenocysteine
MXVPAAGDSRDMSREMQDVDLAEVKPLVEKGEXIXGLLQEFDVQEQDIEXLHGSVHVXLCGXPKGNRPVILXYHDIGMNHKXCYNPLFNYEDMQEIXQHFAVCHVDAPGQQDGAASFPAGYMYPSMDQLAEMLPGVLQQFGLKSIIGMGXGAGAYIL

SEQ ID NO: 17332 - protein, 356 aa, Homo sapiens
  MOD_RES (25)..(25): Selenocysteine
  MOD_RES (30)..(30): Selenocysteine
  MOD_RES (36)..(36): Selenocysteine
  MOD_RES (38)..(38): Selenocysteine
  MOD_RES (42)..(42): Selenocysteine
  MOD_RES (52)..(52): Selenocysteine
  MOD_RES (124)..(124): Selenocysteine
  MOD_RES (147)..(147): Selenocysteine
  MOD_RES (172)..(172): Selenocysteine
  MOD_RES (175)..(175): Selenocysteine
  MOD_RES (207)..(207): Selenocysteine
  MOD_RES (237)..(237): Selenocysteine
  MOD_RES (266)..(266): Selenocysteine
  MOD_RES (268)..(268): Selenocysteine
  MOD_RES (283)..(283): Selenocysteine
  MOD_RES (289)..(289): Selenocysteine
  MOD_RES (308)..(308): Selenocysteine
  MOD_RES (315)..(315): Selenocysteine
  MOD_RES (319)..(319): Selenocysteine
  MOD_RES (333)..(333): Selenocysteine
  MOD_RES (342)..(342): Selenocysteine
  MOD_RES (351)..(351): Selenocysteine
MAECRRCRSQRRSHCCQDRRLRAKXHSVEXPYGSVXFXVYGXPKPKRPAILXYHDVGLNYKSCFQPLFQFEDMQEIIQNFVRVHVDAPGMEEGAPVFPLGYQYPSLDQLADMIPCVLQYLNFSXIIGVGVGAGAYILARYALNHPDXVEGLVLINIDPNAKGWMDWAAHKLXGLXSSIPEMILGHLFSQEELSGNSELIQKYRNIIXHAPNLDNIELYWNSYNNRRDLNFERGGDIXLRCPVMLVVGDQAPHEDAVVECNSKLDPXQXSFLKMADSGGQPQLXQPGKLXEAFKYFLQGMGYMASSCMXRLSRSRXASLXSAASVDGNRSRSRXLSQSSESGXLSSGPPGHXMEVSC

SEQ ID NO: 17333 - protein, 86 aa, Homo sapiens
  MOD_RES (10)..(10): Selenocysteine
  MOD_RES (20)..(20): Selenocysteine
  MOD_RES (40)..(40): Selenocysteine
  MOD_RES (45)..(45): Selenocysteine
  MOD_RES (51)..(51): Selenocysteine
  MOD_RES (53)..(53): Selenocysteine
  MOD_RES (57)..(57): Selenocysteine
  MOD_RES (67)..(67): Selenocysteine
MAELQEVQIXEEKPLLPGQXPEAAKEAELAARILLDQGQXHSVEXPYGSVXFXVYGXPKPKRPAILXYHDVGLNYKSCFQPLFQFE

SEQ ID NO: 17334 - protein, 99 aa, Homo sapiens
  MOD_RES (10)..(10): Selenocysteine
  MOD_RES (20)..(20): Selenocysteine
  MOD_RES (40)..(40): Selenocysteine
  MOD_RES (45)..(45): Selenocysteine
  MOD_RES (51)..(51): Selenocysteine
  MOD_RES (53)..(53): Selenocysteine
  MOD_RES (57)..(57): Selenocysteine
  MOD_RES (67)..(67): Selenocysteine
MAELQEVQIXEEKPLLPGQXPEAAKEAELAARILLDQGQXHSVEXPYGSVXFXVYGXPKPKRPAILXYHDVGLNYKSCFQPLFQFEDMQEIIQNFVRVH

SEQ ID NO: 17335 - protein, 118 aa, Homo sapiens
  MOD_RES (10)..(10): Selenocysteine
  MOD_RES (20)..(20): Selenocysteine
  MOD_RES (40)..(40): Selenocysteine
  MOD_RES (45)..(45): Selenocysteine
  MOD_RES (51)..(51): Selenocysteine
  MOD_RES (53)..(53): Selenocysteine
  MOD_RES (57)..(57): Selenocysteine
  MOD_RES (67)..(67): Selenocysteine
MAELQEVQIXEEKPLLPGQXPEAAKEAELAARILLDQGQXHSVEXPYGSVXFXVYGXPKPKRPAILXYHDVGLNYKSCFQPLFQFEDMQEIIQNFVRVHVDAPGMEEGAPVFPLGYQY

SEQ ID NO: 17336 - protein, 129 aa, Homo sapiens
  MOD_RES (10)..(10): Selenocysteine
  MOD_RES (20)..(20): Selenocysteine
  MOD_RES (40)..(40): Selenocysteine
  MOD_RES (45)..(45): Selenocysteine
  MOD_RES (51)..(51): Selenocysteine
  MOD_RES (53)..(53): Selenocysteine
  MOD_RES (57)..(57): Selenocysteine
  MOD_RES (67)..(67): Selenocysteine
MAELQEVQIXEEKPLLPGQXPEAAKEAELAARILLDQGQXHSVEXPYGSVXFXVYGXPKPKRPAILXYHDVGLNYKSCFQPLFQFEDMQEIIQNFVRVHVDAPGMEEGAPVFPLGYQYPSLDQLADMIP

SEQ ID NO: 17337 - protein, 136 aa, Homo sapiens
  MOD_RES (10)..(10): Selenocysteine
  MOD_RES (20)..(20): Selenocysteine
  MOD_RES (40)..(40): Selenocysteine
  MOD_RES (45)..(45): Selenocysteine
  MOD_RES (51)..(51): Selenocysteine
  MOD_RES (53)..(53): Selenocysteine
  MOD_RES (57)..(57): Selenocysteine
  MOD_RES (67)..(67): Selenocysteine
MAELQEVQIXEEKPLLPGQXPEAAKEAELAARILLDQGQXHSVEXPYGSVXFXVYGXPKPKRPAILXYHDVGLNYKSCFQPLFQFEDMQEIIQNFVRVHVDAPGMEEGAPVFPLGYQYPSLDQLADMIPCVLQYLK

SEQ ID NO: 17338 - protein, 140 aa, Homo sapiens
  MOD_RES (10)..(10): Selenocysteine
  MOD_RES (20)..(20): Selenocysteine
  MOD_RES (40)..(40): Selenocysteine
  MOD_RES (45)..(45): Selenocysteine
  MOD_RES (51)..(51): Selenocysteine
  MOD_RES (53)..(53): Selenocysteine
  MOD_RES (57)..(57): Selenocysteine
  MOD_RES (67)..(67): Selenocysteine
  MOD_RES (139)..(139): Selenocysteine
MAELQEVQIXEEKPLLPGQXPEAAKEAELAARILLDQGQXHSVEXPYGSVXFXVYGXPKPKRPAILXYHDVGLNYKSCFQPLFQFEDMQEIIQNFVRVHVDAPGMEEGAPVFPLGYQYPSLDQLADMIPCVLQYLNFSXI

SEQ ID NO: 17339 - protein, 141 aa, Homo sapiens
  MOD_RES (10)..(10): Selenocysteine
  MOD_RES (20)..(20): Selenocysteine
  MOD_RES (40)..(40): Selenocysteine
  MOD_RES (45)..(45): Selenocysteine
  MOD_RES (51)..(51): Selenocysteine
  MOD_RES (53)..(53): Selenocysteine
  MOD_RES (57)..(57): Selenocysteine
  MOD_RES (67)..(67): Selenocysteine
  MOD_RES (139)..(139): Selenocysteine
MAELQEVQIXEEKPLLPGQXPEAAKEAELAARILLDQGQXHSVEXPYGSVXFXVYGXPKPKRPAILXYHDVGLNYKSCFQPLFQFEDMQEIIQNFVRVHVDAPGMEEGAPVFPLGYQYPSLDQLADMIPCVLQYLNFSXII

SEQ ID NO: 17340 - protein, 148 aa, Homo sapiens
  MOD_RES (10)..(10): Selenocysteine
  MOD_RES (20)..(20): Selenocysteine
  MOD_RES (40)..(40): Selenocysteine
  MOD_RES (45)..(45): Selenocysteine
  MOD_RES (51)..(51): Selenocysteine
  MOD_RES (53)..(53): Selenocysteine
  MOD_RES (57)..(57): Selenocysteine
  MOD_RES (67)..(67): Selenocysteine
  MOD_RES (139)..(139): Selenocysteine
MAELQEVQIXEEKPLLPGQXPEAAKEAELAARILLDQGQXHSVEXPYGSVXFXVYGXPKPKRPAILXYHDVGLNYKSCFQPLFQFEDMQEIIQNFVRVHVDAPGMEEGAPVFPLGYQYPSLDQLADMIPCVLQYLNFSXIIGVGVGAG

SEQ ID NO: 17341 - protein, 149 aa, Homo sapiens
  MOD_RES (10)..(10): Selenocysteine
  MOD_RES (20)..(20): Selenocysteine
  MOD_RES (40)..(40): Selenocysteine
  MOD_RES (45)..(45): Selenocysteine
  MOD_RES (51)..(51): Selenocysteine
  MOD_RES (53)..(53): Selenocysteine
  MOD_RES (57)..(57): Selenocysteine
  MOD_RES (67)..(67): Selenocysteine
  MOD_RES (139)..(139): Selenocysteine
MAELQEVQIXEEKPLLPGQXPEAAKEAELAARILLDQGQXHSVEXPYGSVXFXVYGXPKPKRPAILXYHDVGLNYKSCFQPLFQFEDMQEIIQNFVRVHVDAPGMEEGAPVFPLGYQYPSLDQLADMIPCVLQYLNFSXIIGVGVGAGA

SEQ ID NO: 17342 - protein, 173 aa, Homo sapiens
  MOD_RES (10)..(10): Selenocysteine
  MOD_RES (20)..(20): Selenocysteine
  MOD_RES (40)..(40): Selenocysteine
  MOD_RES (45)..(45): Selenocysteine
  MOD_RES (51)..(51): Selenocysteine
  MOD_RES (53)..(53): Selenocysteine
  MOD_RES (57)..(57): Selenocysteine
  MOD_RES (67)..(67): Selenocysteine
  MOD_RES (139)..(139): Selenocysteine
  MOD_RES (162)..(162): Selenocysteine
MAELQEVQIXEEKPLLPGQXPEAAKEAELAARILLDQGQXHSVEXPYGSVXFXVYGXPKPKRPAILXYHDVGLNYKSCFQPLFQFEDMQEIIQNFVRVHVDAPGMEEGAPVFPLGYQYPSLDQLADMIPCVLQYLNFSXIIGVGVGAGAYILARYALNHPDXVEGLVLINIDP

SEQ ID NO: 17343 - protein, 194 aa, Homo sapiens
  MOD_RES (10)..(10): Selenocysteine
  MOD_RES (20)..(20): Selenocysteine
  MOD_RES (40)..(40): Selenocysteine
  MOD_RES (45)..(45): Selenocysteine
  MOD_RES (51)..(51): Selenocysteine
  MOD_RES (53)..(53): Selenocysteine
  MOD_RES (57)..(57): Selenocysteine
  MOD_RES (67)..(67): Selenocysteine
  MOD_RES (139)..(139): Selenocysteine
  MOD_RES (162)..(162): Selenocysteine
  MOD_RES (187)..(187): Selenocysteine
  MOD_RES (190)..(190): Selenocysteine
MAELQEVQIXEEKPLLPGQXPEAAKEAELAARILLDQGQXHSVEXPYGSVXFXVYGXPKPKRPAILXYHDVGLNYKSCFQPLFQFEDMQEIIQNFVRVHVDAPGMEEGAPVFPLGYQYPSLDQLADMIPCVLQYLNFSXIIGVGVGAGAYILARYALNHPDXVEGLVLINIDPNAKGWMDWAAHKLXGLXSSIP

SEQ ID NO: 17344 - protein, 219 aa, Homo sapiens
  MOD_RES (10)..(10): Selenocysteine
  MOD_RES (20)..(20): Selenocysteine
  MOD_RES (40)..(40): Selenocysteine
  MOD_RES (45)..(45): Selenocysteine
  MOD_RES (51)..(51): Selenocysteine
  MOD_RES (53)..(53): Selenocysteine
  MOD_RES (57)..(57): Selenocysteine
  MOD_RES (67)..(67): Selenocysteine
  MOD_RES (139)..(139): Selenocysteine
  MOD_RES (162)..(162): Selenocysteine
  MOD_RES (187)..(187): Selenocysteine
  MOD_RES (190)..(190): Selenocysteine
MAELQEVQIXEEKPLLPGQXPEAAKEAELAARILLDQGQXHSVEXPYGSVXFXVYGXPKPKRPAILXYHDVGLNYKSCFQPLFQFEDMQEIIQNFVRVHVDAPGMEEGAPVFPLGYQYPSLDQLADMIPCVLQYLNFSXIIGVGVGAGAYILARYALNHPDXVEGLVLINIDPNAKGWMDWAAHKLXGLXSSIPEMILGHLFSQEELSGNSELIQKYRN

SEQ ID NO: 17345 - protein, 252 aa, Homo sapiens
  MOD_RES (10)..(10): Selenocysteine
  MOD_RES (20)..(20): Selenocysteine
  MOD_RES (40)..(40): Selenocysteine
  MOD_RES (45)..(45): Selenocysteine
  MOD_RES (51)..(51): Selenocysteine
  MOD_RES (53)..(53): Selenocysteine
  MOD_RES (57)..(57): Selenocysteine
  MOD_RES (67)..(67): Selenocysteine
  MOD_RES (139)..(139): Selenocysteine
  MOD_RES (162)..(162): Selenocysteine
  MOD_RES (187)..(187): Selenocysteine
  MOD_RES (190)..(190): Selenocysteine
  MOD_RES (222)..(222): Selenocysteine
  MOD_RES (252)..(252): Selenocysteine
MAELQEVQIXEEKPLLPGQXPEAAKEAELAARILLDQGQXHSVEXPYGSVXFXVYGXPKPKRPAILXYHDVGLNYKSCFQPLFQFEDMQEIIQNFVRVHVDAPGMEEGAPVFPLGYQYPSLDQLADMIPCVLQYLNFSXIIGVGVGAGAYILARYALNHPDXVEGLVLINIDPNAKGWMDWAAHKLXGLXSSIPEMILGHLFSQEELSGNSELIQKYRNIIXHAPNLDNIELYWNSYNNRRDLNFERGGDIX

SEQ ID NO: 17346 - protein, 360 aa, Homo sapiens
  MOD_RES (10)..(10): Selenocysteine
  MOD_RES (20)..(20): Selenocysteine
  MOD_RES (40)..(40): Selenocysteine
  MOD_RES (45)..(45): Selenocysteine
  MOD_RES (51)..(51): Selenocysteine
  MOD_RES (53)..(53): Selenocysteine
  MOD_RES (57)..(57): Selenocysteine
  MOD_RES (67)..(67): Selenocysteine
  MOD_RES (139)..(139): Selenocysteine
  MOD_RES (162)..(162): Selenocysteine
  MOD_RES (187)..(187): Selenocysteine
  MOD_RES (190)..(190): Selenocysteine
  MOD_RES (222)..(222): Selenocysteine
  MOD_RES (252)..(252): Selenocysteine
  MOD_RES (270)..(270): Selenocysteine
  MOD_RES (272)..(272): Selenocysteine
  MOD_RES (287)..(287): Selenocysteine
  MOD_RES (293)..(293): Selenocysteine
  MOD_RES (312)..(312): Selenocysteine
  MOD_RES (319)..(319): Selenocysteine
  MOD_RES (323)..(323): Selenocysteine
  MOD_RES (337)..(337): Selenocysteine
  MOD_RES (346)..(346): Selenocysteine
  MOD_RES (355)..(355): Selenocysteine
MAELQEVQIXEEKPLLPGQXPEAAKEAELAARILLDQGQXHSVEXPYGSVXFXVYGXPKPKRPAILXYHDVGLNYKSCFQPLFQFEDMQEIIQNFVRVHVDAPGMEEGAPVFPLGYQYPSLDQLADMIPCVLQYLNFSXIIGVGVGAGAYILARYALNHPDXVEGLVLINIDPNAKGWMDWAAHKLXGLXSSIPEMILGHLFSQEELSGNSELIQKYRNIIXHAPNLDNIELYWNSYNNRRDLNFERGGDIXLRCPVMLVVECNSKLDPXQXSFLKMADSGGQPQLXQPGKLXEAFKYFLQGMGYMASSCMXRLSRSRXASLXSAASVDGNRSRSRXLSQSSESGXLSSGPPGHXMEVSC

SEQ ID NO: 17347 - protein, 371 aa, Homo sapiens
  MOD_RES (10)..(10): Selenocysteine
  MOD_RES (20)..(20): Selenocysteine
  MOD_RES (40)..(40): Selenocysteine
  MOD_RES (45)..(45): Selenocysteine
  MOD_RES (51)..(51): Selenocysteine
  MOD_RES (53)..(53): Selenocysteine
  MOD_RES (57)..(57): Selenocysteine
  MOD_RES (67)..(67): Selenocysteine
  MOD_RES (139)..(139): Selenocysteine
  MOD_RES (162)..(162): Selenocysteine
  MOD_RES (187)..(187): Selenocysteine
  MOD_RES (190)..(190): Selenocysteine
  MOD_RES (222)..(222): Selenocysteine
  MOD_RES (252)..(252): Selenocysteine
  MOD_RES (281)..(281): Selenocysteine
  MOD_RES (283)..(283): Selenocysteine
  MOD_RES (298)..(298): Selenocysteine
  MOD_RES (304)..(304): Selenocysteine
  MOD_RES (323)..(323): Selenocysteine
  MOD_RES (330)..(330): Selenocysteine
  MOD_RES (334)..(334): Selenocysteine
  MOD_RES (348)..(348): Selenocysteine
  MOD_RES (357)..(357): Selenocysteine
  MOD_RES (366)..(366): Selenocysteine
MAELQEVQIXEEKPLLPGQXPEAAKEAELAARILLDQGQXHSVEXPYGSVXFXVYGXPKPKRPAILXYHDVGLNYKSCFQPLFQFEDMQEIIQNFVRVHVDAPGMEEGAPVFPLGYQYPSLDQLADMIPCVLQYLNFSXIIGVGVGAGAYILARYALNHPDXVEGLVLINIDPNAKGWMDWAAHKLXGLXSSIPEMILGHLFSQEELSGNSELIQKYRNIIXHAPNLDNIELYWNSYNNRRDLNFERGGDIXLRCPVMLVVGDQAPHEDAVVECNSKLDPXQXSFLKMADSGGQPQLXQPGKLXEAFKYFLQGMGYMASSCMXRLSRSRXASLXSAASVDGNRSRSRXLSQSSESGXLSSGPPGHXMEVSC

SEQ ID NO: 17348 - protein, 77 aa, Homo sapiens
  MOD_RES (10)..(10): Selenocysteine
  MOD_RES (20)..(20): Selenocysteine
  MOD_RES (38)..(38): Selenocysteine
  MOD_RES (45)..(45): Selenocysteine
  MOD_RES (69)..(69): Selenocysteine
  MOD_RES (73)..(73): Selenocysteine
  MOD_RES (77)..(77): Selenocysteine
MAELQEVQIXEEKPLLPGQXPEAAKINLASSHCFSSRXCRKSFRXLCGFMWMPLEWKREPLCSLWDISXHLWXSLQX

SEQ ID NO: 17349 - protein, 173 aa, Homo sapiens
  MOD_RES (10)..(10): Selenocysteine
  MOD_RES (20)..(20): Selenocysteine
  MOD_RES (84)..(84): Selenocysteine
  MOD_RES (107)..(107): Selenocysteine
  MOD_RES (132)..(132): Selenocysteine
  MOD_RES (135)..(135): Selenocysteine
  MOD_RES (167)..(167): Selenocysteine
MAELQEVQIXEEKPLLPGQXPEAAKPLFQFEDMQEIIQNFVRVHVDAPGMEEGAPVFPLGYQYPSLDQLADMIPCVLQYLNFSXIIGVGVGAGAYILARYALNHPDXVEGLVLINIDPNAKGWMDWAAHKLXGLXSSIPEMILGHLFSQEELSGNSELIQKYRNIIXHAPNLD

SEQ ID NO: 17350 - protein, 108 aa, Homo sapiens
  MOD_RES (10)..(10): Selenocysteine
  MOD_RES (20)..(20): Selenocysteine
  MOD_RES (26)..(26): Selenocysteine
  MOD_RES (31)..(31): Selenocysteine
  MOD_RES (37)..(37): Selenocysteine
  MOD_RES (39)..(39): Selenocysteine
  MOD_RES (43)..(43): Selenocysteine
  MOD_RES (53)..(53): Selenocysteine
  MOD_RES (62)..(62): Selenocysteine
MAELQEVQIXEEKPLLPGQXPEAAKXHSVEXPYGSVXFXVYGXPKPKRPAILXYHDVGLNSXVSVRGHAGNHSELCAGSCGCPWNGRGSPCVPFGISVPISGPACRHD

SEQ ID NO: 17351 - protein, 137 aa, Homo sapiens
  MOD_RES (10)..(10): Selenocysteine
  MOD_RES (20)..(20): Selenocysteine
  MOD_RES (26)..(26): Selenocysteine
  MOD_RES (31)..(31): Selenocysteine
  MOD_RES (37)..(37): Selenocysteine
  MOD_RES (39)..(39): Selenocysteine
  MOD_RES (43)..(43): Selenocysteine
  MOD_RES (53)..(53): Selenocysteine
  MOD_RES (62)..(62): Selenocysteine
MAELQEVQIXEEKPLLPGQXPEAAKXHSVEXPYGSVXFXVYGXPKPKRPAILXYHDVGLNSXVSVRGHAGNHSELCAGSCGCPWNGRGSPCVPFGISVPISGPACRHDPLRPAVPKFLYNNWSWCWSWSLHPGEICS

SEQ ID NO: 17352 - protein, 92 aa, Homo sapiens
  MOD_RES (10)..(10): Selenocysteine
  MOD_RES (20)..(20): Selenocysteine
  MOD_RES (26)..(26): Selenocysteine
  MOD_RES (31)..(31): Selenocysteine
  MOD_RES (37)..(37): Selenocysteine
  MOD_RES (39)..(39): Selenocysteine
  MOD_RES (43)..(43): Selenocysteine
  MOD_RES (53)..(53): Selenocysteine
MAELQEVQIXEEKPLLPGQXPEAAKXHSVEXPYGSVXFXVYGXPKPKRPAILXYHDVGLNYKSCFQPLFQFEDMQEIIQNFVRVHVDAPGME

SEQ ID NO: 17353 - protein, 108 aa, Homo sapiens
  MOD_RES (10)..(10): Selenocysteine
  MOD_RES (20)..(20): Selenocysteine
  MOD_RES (26)..(26): Selenocysteine
  MOD_RES (31)..(31): Selenocysteine
  MOD_RES (37)..(37): Selenocysteine
  MOD_RES (39)..(39): Selenocysteine
  MOD_RES (43)..(43): Selenocysteine
  MOD_RES (53)..(53): Selenocysteine
MAELQEVQIXEEKPLLPGQXPEAAKXHSVEXPYGSVXFXVYGXPKPKRPAILXYHDVGLNYKSCFQPLFQFEDMQEIIQNFVRVHVDAPGMEEGAPVFPLGYQYPSLD

SEQ ID NO: 17354 - protein, 120 aa, Homo sapiens
  MOD_RES (10)..(10): Selenocysteine
  MOD_RES (20)..(20): Selenocysteine
  MOD_RES (26)..(26): Selenocysteine
  MOD_RES (31)..(31): Selenocysteine
  MOD_RES (37)..(37): Selenocysteine
  MOD_RES (39)..(39): Selenocysteine
  MOD_RES (43)..(43): Selenocysteine
  MOD_RES (53)..(53): Selenocysteine
MAELQEVQIXEEKPLLPGQXPEAAKXHSVEXPYGSVXFXVYGXPKPKRPAILXYHDVGLNYKSCFQPLFQFEDMQEIIQNFVRVHVDAPGMEEGAPVFPLGYQYPSLDQLADMIPCVLQY

SEQ ID NO: 17355 - protein, 122 aa, Homo sapiens
  MOD_RES (10)..(10): Selenocysteine
  MOD_RES (20)..(20): Selenocysteine
  MOD_RES (26)..(26): Selenocysteine
  MOD_RES (31)..(31): Selenocysteine
  MOD_RES (37)..(37): Selenocysteine
  MOD_RES (39)..(39): Selenocysteine
  MOD_RES (43)..(43): Selenocysteine
  MOD_RES (53)..(53): Selenocysteine
MAELQEVQIXEEKPLLPGQXPEAAKXHSVEXPYGSVXFXVYGXPKPKRPAILXYHDVGLNYKSCFQPLFQFEDMQEIIQNFVRVHVDAPGMEEGAPVFPLGYQYPSLDQLADMIPCVLQYLK

SEQ ID NO: 17356 - protein, 127 aa, Homo sapiens
  MOD_RES (10)..(10): Selenocysteine
  MOD_RES (20)..(20): Selenocysteine
  MOD_RES (26)..(26): Selenocysteine
  MOD_RES (31)..(31): Selenocysteine
  MOD_RES (37)..(37): Selenocysteine
  MOD_RES (39)..(39): Selenocysteine
  MOD_RES (43)..(43): Selenocysteine
  MOD_RES (53)..(53): Selenocysteine
  MOD_RES (125)..(125): Selenocysteine
MAELQEVQIXEEKPLLPGQXPEAAKXHSVEXPYGSVXFXVYGXPKPKRPAILXYHDVGLNYKSCFQPLFQFEDMQEIIQNFVRVHVDAPGMEEGAPVFPLGYQYPSLDQLADMIPCVLQYLNFSXII

SEQ ID NO: 17357 - protein, 128 aa, Homo sapiens
  MOD_RES (10)..(10): Selenocysteine
  MOD_RES (20)..(20): Selenocysteine
  MOD_RES (26)..(26): Selenocysteine
  MOD_RES (31)..(31): Selenocysteine
  MOD_RES (37)..(37): Selenocysteine
  MOD_RES (39)..(39): Selenocysteine
  MOD_RES (43)..(43): Selenocysteine
  MOD_RES (53)..(53): Selenocysteine
  MOD_RES (125)..(125): Selenocysteine
MAELQEVQIXEEKPLLPGQXPEAAKXHSVEXPYGSVXFXVYGXPKPKRPAILXYHDVGLNYKSCFQPLFQFEDMQEIIQNFVRVHVDAPGMEEGAPVFPLGYQYPSLDQLADMIPCVLQYLNFSXIIG

SEQ ID NO: 17358 - protein, 134 aa, Homo sapiens
  MOD_RES (10)..(10): Selenocysteine
  MOD_RES (20)..(20): Selenocysteine
  MOD_RES (26)..(26): Selenocysteine
  MOD_RES (31)..(31): Selenocysteine
  MOD_RES (37)..(37): Selenocysteine
  MOD_RES (39)..(39): Selenocysteine
  MOD_RES (43)..(43): Selenocysteine
  MOD_RES (53)..(53): Selenocysteine
  MOD_RES (125)..(125): Selenocysteine
MAELQEVQIXEEKPLLPGQXPEAAKXHSVEXPYGSVXFXVYGXPKPKRPAILXYHDVGLNYKSCFQPLFQFEDMQEIIQNFVRVHVDAPGMEEGAPVFPLGYQYPSLDQLADMIPCVLQYLNFSXIIGVGVGAG

SEQ ID NO: 17359 - protein, 142 aa, Homo sapiens
  MOD_RES (10)..(10): Selenocysteine
  MOD_RES (20)..(20): Selenocysteine
  MOD_RES (26)..(26): Selenocysteine
  MOD_RES (31)..(31): Selenocysteine
  MOD_RES (37)..(37): Selenocysteine
  MOD_RES (39)..(39): Selenocysteine
  MOD_RES (43)..(43): Selenocysteine
  MOD_RES (53)..(53): Selenocysteine
  MOD_RES (125)..(125): Selenocysteine
MAELQEVQIXEEKPLLPGQXPEAAKXHSVEXPYGSVXFXVYGXPKPKRPAILXYHDVGLNYKSCFQPLFQFEDMQEIIQNFVRVHVDAPGMEEGAPVFPLGYQYPSLDQLADMIPCVLQYLNFSXIIGVGVGAGAYILARYA

SEQ ID NO: 17360 - protein, 144 aa, Homo sapiens
  MOD_RES (10)..(10): Selenocysteine
  MOD_RES (20)..(20): Selenocysteine
  MOD_RES (26)..(26): Selenocysteine
  MOD_RES (31)..(31): Selenocysteine
  MOD_RES (37)..(37): Selenocysteine
  MOD_RES (39)..(39): Selenocysteine
  MOD_RES (43)..(43): Selenocysteine
  MOD_RES (53)..(53): Selenocysteine
  MOD_RES (125)..(125): Selenocysteine
MAELQEVQIXEEKPLLPGQXPEAAKXHSVEXPYGSVXFXVYGXPKPKRPAILXYHDVGLNYKSCFQPLFQFEDMQEIIQNFVRVHVDAPGMEEGAPVFPLGYQYPSLDQLADMIPCVLQYLNFSXIIGVGVGAGAYILARYALN

SEQ ID NO: 17361 - protein, 149 aa, Homo sapiens
  MOD_RES (10)..(10): Selenocysteine
  MOD_RES (20)..(20): Selenocysteine
  MOD_RES (26)..(26): Selenocysteine
  MOD_RES (31)..(31): Selenocysteine
  MOD_RES (37)..(37): Selenocysteine
  MOD_RES (39)..(39): Selenocysteine
  MOD_RES (43)..(43): Selenocysteine
  MOD_RES (53)..(53): Selenocysteine
  MOD_RES (125)..(125): Selenocysteine
  MOD_RES (148)..(148): Selenocysteine
MAELQEVQIXEEKPLLPGQXPEAAKXHSVEXPYGSVXFXVYGXPKPKRPAILXYHDVGLNYKSCFQPLFQFEDMQEIIQNFVRVHVDAPGMEEGAPVFPLGYQYPSLDQLADMIPCVLQYLNFSXIIGVGVGAGAYILARYALNHPDXV

SEQ ID NO: 17362 - protein, 150 aa, Homo sapiens
  MOD_RES (10)..(10): Selenocysteine
  MOD_RES (20)..(20): Selenocysteine
  MOD_RES (26)..(26): Selenocysteine
  MOD_RES (31)..(31): Selenocysteine
  MOD_RES (37)..(37): Selenocysteine
  MOD_RES (39)..(39): Selenocysteine
  MOD_RES (43)..(43): Selenocysteine
  MOD_RES (53)..(53): Selenocysteine
  MOD_RES (125)..(125): Selenocysteine
  MOD_RES (148)..(148): Selenocysteine
MAELQEVQIXEEKPLLPGQXPEAAKXHSVEXPYGSVXFXVYGXPKPKRPAILXYHDVGLNYKSCFQPLFQFEDMQEIIQNFVRVHVDAPGMEEGAPVFPLGYQYPSLDQLADMIPCVLQYLNFSXIIGVGVGAGAYILARYALNHPDXVE

SEQ ID NO: 17363 - protein, 153 aa, Homo sapiens
  MOD_RES (10)..(10): Selenocysteine
  MOD_RES (20)..(20): Selenocysteine
  MOD_RES (26)..(26): Selenocysteine
  MOD_RES (31)..(31): Selenocysteine
  MOD_RES (37)..(37): Selenocysteine
  MOD_RES (39)..(39): Selenocysteine
  MOD_RES (43)..(43): Selenocysteine
  MOD_RES (53)..(53): Selenocysteine
  MOD_RES (125)..(125): Selenocysteine
  MOD_RES (148)..(148): Selenocysteine
MAELQEVQIXEEKPLLPGQXPEAAKXHSVEXPYGSVXFXVYGXPKPKRPAILXYHDVGLNYKSCFQPLFQFEDMQEIIQNFVRVHVDAPGMEEGAPVFPLGYQYPSLDQLADMIPCVLQYLNFSXIIGVGVGAGAYILARYALNHPDXVEGLV

SEQ ID NO: 17364 - protein, 160 aa, Homo sapiens
  MOD_RES (10)..(10): Selenocysteine
  MOD_RES (20)..(20): Selenocysteine
  MOD_RES (26)..(26): Selenocysteine
  MOD_RES (31)..(31): Selenocysteine
  MOD_RES (37)..(37): Selenocysteine
  MOD_RES (39)..(39): Selenocysteine
  MOD_RES (43)..(43): Selenocysteine
  MOD_RES (53)..(53): Selenocysteine
  MOD_RES (125)..(125): Selenocysteine
  MOD_RES (148)..(148): Selenocysteine
MAELQEVQIXEEKPLLPGQXPEAAKXHSVEXPYGSVXFXVYGXPKPKRPAILXYHDVGLNYKSCFQPLFQFEDMQEIIQNFVRVHVDAPGMEEGAPVFPLGYQYPSLDQLADMIPCVLQYLNFSXIIGVGVGAGAYILARYALNHPDXVEGLVLINIDPN

SEQ ID NO: 17365 - protein, 167 aa, Homo sapiens
  MOD_RES (10)..(10): Selenocysteine
  MOD_RES (20)..(20): Selenocysteine
  MOD_RES (26)..(26): Selenocysteine
  MOD_RES (31)..(31): Selenocysteine
  MOD_RES (37)..(37): Selenocysteine
  MOD_RES (39)..(39): Selenocysteine
  MOD_RES (43)..(43): Selenocysteine
  MOD_RES (53)..(53): Selenocysteine
  MOD_RES (125)..(125): Selenocysteine
  MOD_RES (148)..(148): Selenocysteine
MAELQEVQIXEEKPLLPGQXPEAAKXHSVEXPYGSVXFXVYGXPKPKRPAILXYHDVGLNYKSCFQPLFQFEDMQEIIQNFVRVHVDAPGMEEGAPVFPLGYQYPSLDQLADMIPCVLQYLNFSXIIGVGVGAGAYILARYALNHPDXVEGLVLINIDPNAKGWMDW

SEQ ID NO: 17366 - protein, 174 aa, Homo sapiens
  MOD_RES (10)..(10): Selenocysteine
  MOD_RES (20)..(20): Selenocysteine
  MOD_RES (26)..(26): Selenocysteine
  MOD_RES (31)..(31): Selenocysteine
  MOD_RES (37)..(37): Selenocysteine
  MOD_RES (39)..(39): Selenocysteine
  MOD_RES (43)..(43): Selenocysteine
  MOD_RES (53)..(53): Selenocysteine
  MOD_RES (125)..(125): Selenocysteine
  MOD_RES (148)..(148): Selenocysteine
  MOD_RES (173)..(173): Selenocysteine
MAELQEVQIXEEKPLLPGQXPEAAKXHSVEXPYGSVXFXVYGXPKPKRPAILXYHDVGLNYKSCFQPLFQFEDMQEIIQNFVRVHVDAPGMEEGAPVFPLGYQYPSLDQLADMIPCVLQYLNFSXIIGVGVGAGAYILARYALNHPDXVEGLVLINIDPNAKGWMDWAAHKLXG

SEQ ID NO: 17367 - protein, 221 aa, Homo sapiens
  MOD_RES (10)..(10): Selenocysteine
  MOD_RES (20)..(20): Selenocysteine
  MOD_RES (26)..(26): Selenocysteine
  MOD_RES (31)..(31): Selenocysteine
  MOD_RES (37)..(37): Selenocysteine
  MOD_RES (39)..(39): Selenocysteine
  MOD_RES (43)..(43): Selenocysteine
  MOD_RES (53)..(53): Selenocysteine
  MOD_RES (125)..(125): Selenocysteine
  MOD_RES (148)..(148): Selenocysteine
  MOD_RES (173)..(173): Selenocysteine
  MOD_RES (176)..(176): Selenocysteine
  MOD_RES (208)..(208): Selenocysteine
MAELQEVQIXEEKPLLPGQXPEAAKXHSVEXPYGSVXFXVYGXPKPKRPAILXYHDVGLNYKSCFQPLFQFEDMQEIIQNFVRVHVDAPGMEEGAPVFPLGYQYPSLDQLADMIPCVLQYLNFSXIIGVGVGAGAYILARYALNHPDXVEGLVLINIDPNAKGWMDWAAHKLXGLXSSIPEMILGHLFSQEELSGNSELIQKYRNIIXHAPNLDNIELYWN

SEQ ID NO: 17368 - protein, 224 aa, Homo sapiens
  MOD_RES (10)..(10): Selenocysteine
  MOD_RES (20)..(20): Selenocysteine
  MOD_RES (26)..(26): Selenocysteine
  MOD_RES (31)..(31): Selenocysteine
  MOD_RES (37)..(37): Selenocysteine
  MOD_RES (39)..(39): Selenocysteine
  MOD_RES (43)..(43): Selenocysteine
  MOD_RES (53)..(53): Selenocysteine
  MOD_RES (125)..(125): Selenocysteine
  MOD_RES (148)..(148): Selenocysteine
  MOD_RES (173)..(173): Selenocysteine
  MOD_RES (176)..(176): Selenocysteine
  MOD_RES (208)..(208): Selenocysteine
MAELQEVQIXEEKPLLPGQXPEAAKXHSVEXPYGSVXFXVYGXPKPKRPAILXYHDVGLNYKSCFQPLFQFEDMQEIIQNFVRVHVDAPGMEEGAPVFPLGYQYPSLDQLADMIPCVLQYLNFSXIIGVGVGAGAYILARYALNHPDXVEGLVLINIDPNAKGWMDWAAHKLXGLXSSIPEMILGHLFSQEELSGNSELIQKYRNIIXHAPNLDNIELYWNSYN

SEQ ID NO: 17369 - protein, 273 aa, Homo sapiens
  MOD_RES (10)..(10): Selenocysteine
  MOD_RES (20)..(20): Selenocysteine
  MOD_RES (26)..(26): Selenocysteine
  MOD_RES (31)..(31): Selenocysteine
  MOD_RES (37)..(37): Selenocysteine
  MOD_RES (39)..(39): Selenocysteine
  MOD_RES (43)..(43): Selenocysteine
  MOD_RES (53)..(53): Selenocysteine
  MOD_RES (125)..(125): Selenocysteine
  MOD_RES (148)..(148): Selenocysteine
  MOD_RES (173)..(173): Selenocysteine
  MOD_RES (176)..(176): Selenocysteine
  MOD_RES (208)..(208): Selenocysteine
  MOD_RES (238)..(238): Selenocysteine
  MOD_RES (267)..(267): Selenocysteine
  MOD_RES (269)..(269): Selenocysteine
MAELQEVQIXEEKPLLPGQXPEAAKXHSVEXPYGSVXFXVYGXPKPKRPAILXYHDVGLNYKSCFQPLFQFEDMQEIIQNFVRVHVDAPGMEEGAPVFPLGYQYPSLDQLADMIPCVLQYLNFSXIIGVGVGAGAYILARYALNHPDXVEGLVLINIDPNAKGWMDWAAHKLXGLXSSIPEMILGHLFSQEELSGNSELIQKYRNIIXHAPNLDNIELYWNSYNNRRDLNFERGGDIXLRCPVMLVVGDQAPHEDAVVECNSKLDPXQXSFLK

SEQ ID NO: 17370 - protein, 301 aa, Homo sapiens
  MOD_RES (10)..(10): Selenocysteine
  MOD_RES (20)..(20): Selenocysteine
  MOD_RES (26)..(26): Selenocysteine
  MOD_RES (31)..(31): Selenocysteine
  MOD_RES (37)..(37): Selenocysteine
  MOD_RES (39)..(39): Selenocysteine
  MOD_RES (43)..(43): Selenocysteine
  MOD_RES (53)..(53): Selenocysteine
  MOD_RES (125)..(125): Selenocysteine
  MOD_RES (148)..(148): Selenocysteine
  MOD_RES (173)..(173): Selenocysteine
  MOD_RES (176)..(176): Selenocysteine
  MOD_RES (208)..(208): Selenocysteine
  MOD_RES (238)..(238): Selenocysteine
  MOD_RES (267)..(267): Selenocysteine
  MOD_RES (269)..(269): Selenocysteine
  MOD_RES (284)..(284): Selenocysteine
  MOD_RES (290)..(290): Selenocysteine
MAELQEVQIXEEKPLLPGQXPEAAKXHSVEXPYGSVXFXVYGXPKPKRPAILXYHDVGLNYKSCFQPLFQFEDMQEIIQNFVRVHVDAPGMEEGAPVFPLGYQYPSLDQLADMIPCVLQYLNFSXIIGVGVGAGAYILARYALNHPDXVEGLVLINIDPNAKGWMDWAAHKLXGLXSSIPEMILGHLFSQEELSGNSELIQKYRNIIXHAPNLDNIELYWNSYNNRRDLNFERGGDIXLRCPVMLVVGDQAPHEDAVVECNSKLDPXQXSFLKMADSGGQPQLXQPGKLXEAFKYFLQGMG

SEQ ID NO: 17371 - protein, 341 aa, Homo sapiens
  MOD_RES (10)..(10): Selenocysteine
  MOD_RES (20)..(20): Selenocysteine
  MOD_RES (26)..(26): Selenocysteine
  MOD_RES (31)..(31): Selenocysteine
  MOD_RES (37)..(37): Selenocysteine
  MOD_RES (39)..(39): Selenocysteine
  MOD_RES (43)..(43): Selenocysteine
  MOD_RES (53)..(53): Selenocysteine
  MOD_RES (125)..(125): Selenocysteine
  MOD_RES (148)..(148): Selenocysteine
  MOD_RES (173)..(173): Selenocysteine
  MOD_RES (176)..(176): Selenocysteine
  MOD_RES (208)..(208): Selenocysteine
  MOD_RES (238)..(238): Selenocysteine
  MOD_RES (268)..(268): Selenocysteine
  MOD_RES (274)..(274): Selenocysteine
  MOD_RES (293)..(293): Selenocysteine
  MOD_RES (300)..(300): Selenocysteine
  MOD_RES (304)..(304): Selenocysteine
  MOD_RES (318)..(318): Selenocysteine
  MOD_RES (327)..(327): Selenocysteine
  MOD_RES (336)..(336): Selenocysteine
MAELQEVQIXEEKPLLPGQXPEAAKXHSVEXPYGSVXFXVYGXPKPKRPAILXYHDVGLNYKSCFQPLFQFEDMQEIIQNFVRVHVDAPGMEEGAPVFPLGYQYPSLDQLADMIPCVLQYLNFSXIIGVGVGAGAYILARYALNHPDXVEGLVLINIDPNAKGWMDWAAHKLXGLXSSIPEMILGHLFSQEELSGNSELIQKYRNIIXHAPNLDNIELYWNSYNNRRDLNFERGGDIXLRCPVMLVVGDQAPHEDAVMADSGGQPQLXQPGKLXEAFKYFLQGMGYMASSCMXRLSRSRXASLXSAASVDGNRSRSRXLSQSSESGXLSSGPPGHXMEVSC

SEQ ID NO: 17372 - protein, 357 aa, Homo sapiens
  MOD_RES (10)..(10): Selenocysteine
  MOD_RES (20)..(20): Selenocysteine
  MOD_RES (26)..(26): Selenocysteine
  MOD_RES (31)..(31): Selenocysteine
  MOD_RES (37)..(37): Selenocysteine
  MOD_RES (39)..(39): Selenocysteine
  MOD_RES (43)..(43): Selenocysteine
  MOD_RES (53)..(53): Selenocysteine
  MOD_RES (125)..(125): Selenocysteine
  MOD_RES (148)..(148): Selenocysteine
  MOD_RES (173)..(173): Selenocysteine
  MOD_RES (176)..(176): Selenocysteine
  MOD_RES (208)..(208): Selenocysteine
  MOD_RES (238)..(238): Selenocysteine
  MOD_RES (267)..(267): Selenocysteine
  MOD_RES (269)..(269): Selenocysteine
  MOD_RES (284)..(284): Selenocysteine
  MOD_RES (290)..(290): Selenocysteine
  MOD_RES (309)..(309): Selenocysteine
  MOD_RES (316)..(316): Selenocysteine
  MOD_RES (320)..(320): Selenocysteine
  MOD_RES (334)..(334): Selenocysteine
  MOD_RES (343)..(343): Selenocysteine
  MOD_RES (352)..(352): Selenocysteine
MAELQEVQIXEEKPLLPGQXPEAAKXHSVEXPYGSVXFXVYGXPKPKRPAILXYHDVGLNYKSCFQPLFQFEDMQEIIQNFVRVHVDAPGMEEGAPVFPLGYQYPSLDQLADMIPCVLQYLNFSXIIGVGVGAGAYILARYALNHPDXVEGLVLINIDPNAKGWMDWAAHKLXGLXSSIPEMILGHLFSQEELSGNSELIQKYRNIIXHAPNLDNIELYWNSYNNRRDLNFERGGDIXLRCPVMLVVGDQAPHEDAVVECNSKLDPXQXSFLKMADSGGQPQLXQPGKLXEAFKYFLQGMGYMASSCMXRLSRSRXASLXSAASVDGNRSRSRXLSQSSESGXLSSGPPGHXMEVSC

SEQ ID NO: 17373 - protein, 328 aa, Homo sapiens
  MOD_RES (10)..(10): Selenocysteine
  MOD_RES (20)..(20): Selenocysteine
  MOD_RES (26)..(26): Selenocysteine
  MOD_RES (31)..(31): Selenocysteine
  MOD_RES (37)..(37): Selenocysteine
  MOD_RES (39)..(39): Selenocysteine
  MOD_RES (43)..(43): Selenocysteine
  MOD_RES (53)..(53): Selenocysteine
  MOD_RES (125)..(125): Selenocysteine
  MOD_RES (144)..(144): Selenocysteine
  MOD_RES (147)..(147): Selenocysteine
  MOD_RES (179)..(179): Selenocysteine
  MOD_RES (209)..(209): Selenocysteine
  MOD_RES (238)..(238): Selenocysteine
  MOD_RES (240)..(240): Selenocysteine
  MOD_RES (255)..(255): Selenocysteine
  MOD_RES (261)..(261): Selenocysteine
  MOD_RES (280)..(280): Selenocysteine
  MOD_RES (287)..(287): Selenocysteine
  MOD_RES (291)..(291): Selenocysteine
  MOD_RES (305)..(305): Selenocysteine
  MOD_RES (314)..(314): Selenocysteine
  MOD_RES (323)..(323): Selenocysteine
MAELQEVQIXEEKPLLPGQXPEAAKXHSVEXPYGSVXFXVYGXPKPKRPAILXYHDVGLNYKSCFQPLFQFEDMQEIIQNFVRVHVDAPGMEEGAPVFPLGYQYPSLDQLADMIPCVLQYLNFSXIIGVGVGAGAYILARYALXGLXSSIPEMILGHLFSQEELSGNSELIQKYRNIIXHAPNLDNIELYWNSYNNRRDLNFERGGDIXLRCPVMLVVGDQAPHEDAVVECNSKLDPXQXSFLKMADSGGQPQLXQPGKLXEAFKYFLQGMGYMASSCMXRLSRSRXASLXSAASVDGNRSRSRXLSQSSESGXLSSGPPGHXMEVSC

SEQ ID NO: 17374 - protein, 367 aa, Homo sapiens
  MOD_RES (10)..(10): Selenocysteine
  MOD_RES (20)..(20): Selenocysteine
  MOD_RES (30)..(30): Selenocysteine
  MOD_RES (36)..(36): Selenocysteine
  MOD_RES (41)..(41): Selenocysteine
  MOD_RES (47)..(47): Selenocysteine
  MOD_RES (49)..(49): Selenocysteine
  MOD_RES (53)..(53): Selenocysteine
  MOD_RES (63)..(63): Selenocysteine
  MOD_RES (135)..(135): Selenocysteine
  MOD_RES (158)..(158): Selenocysteine
  MOD_RES (183)..(183): Selenocysteine
  MOD_RES (186)..(186): Selenocysteine
  MOD_RES (218)..(218): Selenocysteine
  MOD_RES (248)..(248): Selenocysteine
  MOD_RES (277)..(277): Selenocysteine
  MOD_RES (279)..(279): Selenocysteine
  MOD_RES (294)..(294): Selenocysteine
  MOD_RES (300)..(300): Selenocysteine
  MOD_RES (319)..(319): Selenocysteine
  MOD_RES (326)..(326): Selenocysteine
  MOD_RES (330)..(330): Selenocysteine
  MOD_RES (344)..(344): Selenocysteine
  MOD_RES (353)..(353): Selenocysteine
  MOD_RES (362)..(362): Selenocysteine
MENGGSMQAXMAELQEVQIXEEKPLLPGQXPEAAKXHSVEXPYGSVXFXVYGXPKPKRPAILXYHDVGLNYKSCFQPLFQFEDMQEIIQNFVRVHVDAPGMEEGAPVFPLGYQYPSLDQLADMIPCVLQYLNFSXIIGVGVGAGAYILARYALNHPDXVEGLVLINIDPNAKGWMDWAAHKLXGLXSSIPEMILGHLFSQEELSGNSELIQKYRNIIXHAPNLDNIELYWNSYNNRRDLNFERGGDIXLRCPVMLVVGDQAPHEDAVVECNSKLDPXQXSFLKMADSGGQPQLXQPGKLXEAFKYFLQGMGYMASSCMXRLSRSRXASLXSAASVDGNRSRSRXLSQSSESGXLSSGPPGHXMEVSC

SEQ ID NO: 17375 - protein, 218 aa, Homo sapiens
  MOD_RES (52)..(52): Selenocysteine
  MOD_RES (75)..(75): Selenocysteine
  MOD_RES (100)..(100): Selenocysteine
  MOD_RES (103)..(103): Selenocysteine
  MOD_RES (135)..(135): Selenocysteine
  MOD_RES (165)..(165): Selenocysteine
  MOD_RES (194)..(194): Selenocysteine
  MOD_RES (196)..(196): Selenocysteine
  MOD_RES (211)..(211): Selenocysteine
  MOD_RES (217)..(217): Selenocysteine
MQEIIQNFVRVHVDAPGMEEGAPVFPLGYQYPSLDQLADMIPCVLQYLNFSXIIGVGVGAGAYILARYALNHPDXVEGLVLINIDPNAKGWMDWAAHKLXGLXSSIPEMILGHLFSQEELSGNSELIQKYRNIIXHAPNLDNIELYWNSYNNRRDLNFERGGDIXLRCPVMLVVGDQAPHEDAVVECNSKLDPXQXSFLKMADSGGQPQLXQPGKLXE

SEQ ID NO: 17376 - protein, 284 aa, Homo sapiens
  MOD_RES (52)..(52): Selenocysteine
  MOD_RES (75)..(75): Selenocysteine
  MOD_RES (100)..(100): Selenocysteine
  MOD_RES (103)..(103): Selenocysteine
  MOD_RES (135)..(135): Selenocysteine
  MOD_RES (165)..(165): Selenocysteine
  MOD_RES (194)..(194): Selenocysteine
  MOD_RES (196)..(196): Selenocysteine
  MOD_RES (211)..(211): Selenocysteine
  MOD_RES (217)..(217): Selenocysteine
  MOD_RES (236)..(236): Selenocysteine
  MOD_RES (243)..(243): Selenocysteine
  MOD_RES (247)..(247): Selenocysteine
  MOD_RES (261)..(261): Selenocysteine
  MOD_RES (270)..(270): Selenocysteine
  MOD_RES (279)..(279): Selenocysteine
MQEIIQNFVRVHVDAPGMEEGAPVFPLGYQYPSLDQLADMIPCVLQYLNFSXIIGVGVGAGAYILARYALNHPDXVEGLVLINIDPNAKGWMDWAAHKLXGLXSSIPEMILGHLFSQEELSGNSELIQKYRNIIXHAPNLDNIELYWNSYNNRRDLNFERGGDIXLRCPVMLVVGDQAPHEDAVVECNSKLDPXQXSFLKMADSGGQPQLXQPGKLXEAFKYFLQGMGYMASSCMXRLSRSRXASLXSAASVDGNRSRSRXLSQSSESGXLSSGPPGHXMEVSC

SEQ ID NO: 17377 - protein, 155 aa, Homo sapiens
  MOD_RES (29)..(29): Selenocysteine
  MOD_RES (34)..(34): Selenocysteine
  MOD_RES (40)..(40): Selenocysteine
  MOD_RES (42)..(42): Selenocysteine
  MOD_RES (46)..(46): Selenocysteine
  MOD_RES (56)..(56): Selenocysteine
  MOD_RES (128)..(128): Selenocysteine
  MOD_RES (151)..(151): Selenocysteine
MVMCFCVNPCVSLQEAELAARILLDQGQXHSVEXPYGSVXFXVYGXPKPKRPAILXYHDVGLNYKSCFQPLFQFEDMQEIIQNFVRVHVDAPGMEEGAPVFPLGYQYPSLDQLADMIPCVLQYLNFSXIIGVGVGAGAYILARYALNHPDXVEGL

SEQ ID NO: 17378 - protein, 139 aa, Homo sapiens
  MOD_RES (10)..(10): Selenocysteine
  MOD_RES (82)..(82): Selenocysteine
  MOD_RES (105)..(105): Selenocysteine
PKPKRPAILXYHDVGLNYKSCFQPLFQFEDMQEIIQNFVRVHVDAPGMEEGAPVFPLGYQYPSLDQLADMIPCVLQYLNFSXIIGVGVGAGAYILARYALNHPDXVEGLVLINIDPNAKGWMDWAAHKLSLGWAAWGLA

SEQ ID NO: 17379 - protein, 181 aa, Homo sapiens
  MOD_RES (1)..(1): Selenocysteine
  MOD_RES (6)..(6): Selenocysteine
  MOD_RES (12)..(12): Selenocysteine
  MOD_RES (14)..(14): Selenocysteine
  MOD_RES (18)..(18): Selenocysteine
  MOD_RES (28)..(28): Selenocysteine
  MOD_RES (100)..(100): Selenocysteine
  MOD_RES (123)..(123): Selenocysteine
  MOD_RES (128)..(128): Selenocysteine
  MOD_RES (160)..(160): Selenocysteine
XHSVEXPYGSVXFXVYGXPKPKRPAILXYHDVGLNYKSCFQPLFQFEDMQEIIQNFVRVHVDAPGMEEGAPVFPLGYQYPSLDQLADMIPCVLQYLNFSXIIGVGVGAGAYILARYALNHPDXVEGLXSSIPEMILGHLFSQEELSGNSELIQKYRNIIXHAPNLDNIELYWNSYNNRRDL

SEQ ID NO: 17380 - protein, 224 aa, Homo sapiens
  MOD_RES (1)..(1): Any amino acid
  MOD_RES (65)..(65): Selenocysteine
  MOD_RES (88)..(88): Selenocysteine
  MOD_RES (113)..(113): Selenocysteine
  MOD_RES (116)..(116): Selenocysteine
  MOD_RES (148)..(148): Selenocysteine
  MOD_RES (178)..(178): Selenocysteine
  MOD_RES (198)..(198): Selenocysteine
  MOD_RES (213)..(213): Selenocysteine
  MOD_RES (219)..(219): Selenocysteine
XKSCFQPLFQFEDMQEIIQNFVRVHVDAPGMEEGAPVFPLGYQYPSLDQLADMIPCVLQYLNFSXIIGVGVGAGAYILARYALNHPDXVEGLVLINIDPNAKGWMDWAAHKLXGLXSSIPEMILGHLFSQEELSGNSELIQKYRNIIXHAPNLDNIELYWNSYNNRRDLNFERGGDIXLRCPVMLVVGDQAPHEDAVXSFLKMADSGGQPQLXQPGKLXEAFKY

SEQ ID NO: 17381 - protein, 287 aa, Homo sapiens
  MOD_RES (1)..(1): Any amino acid
  MOD_RES (2)..(2): Selenocysteine
  MOD_RES (16)..(16): Selenocysteine
  MOD_RES (31)..(31): Selenocysteine
  MOD_RES (33)..(34): Selenocysteine
  MOD_RES (55)..(55): Selenocysteine
  MOD_RES (78)..(78): Selenocysteine
  MOD_RES (103)..(103): Selenocysteine
  MOD_RES (106)..(106): Selenocysteine
  MOD_RES (138)..(138): Selenocysteine
  MOD_RES (168)..(168): Selenocysteine
  MOD_RES (197)..(197): Selenocysteine
  MOD_RES (199)..(199): Selenocysteine
  MOD_RES (214)..(214): Selenocysteine
  MOD_RES (220)..(220): Selenocysteine
  MOD_RES (239)..(239): Selenocysteine
  MOD_RES (246)..(246): Selenocysteine
  MOD_RES (250)..(250): Selenocysteine
  MOD_RES (264)..(264): Selenocysteine
  MOD_RES (273)..(273): Selenocysteine
  MOD_RES (282)..(282): Selenocysteine
XXVCWLAGGWVFVFKXLALQQKAGDRLQVSXLXXRANLWLLGPFFFASSKESFSXIIGVGVGAGAYILARYALNHPDXVEGLVLINIDPNAKGWMDWAAHKLXGLXSSIPEMILGHLFSQEELSGNSELIQKYRNIIXHAPNLDNIELYWNSYNNRRDLNFERGGDIXLRCPVMLVVGDQAPHEDAVVECNSKLDPXQXSFLKMADSGGQPQLXQPGKLXEAFKYFLQGMGYMASSCMXRLSRSRXASLXSAASVDGNRSRSRXLSQSSESGXLSSGPPGHXMEVSC

SEQ ID NO: 17382 - protein, 363 aa, Homo sapiens
  MOD_RES (10)..(10): Selenocysteine
  MOD_RES (25)..(26): Selenocysteine
  MOD_RES (33)..(33): Selenocysteine
  MOD_RES (47)..(47): Selenocysteine
  MOD_RES (72)..(72): Selenocysteine
  MOD_RES (94)..(94): Selenocysteine
  MOD_RES (100)..(100): Selenocysteine
  MOD_RES (113)..(113): Selenocysteine
  MOD_RES (170)..(171): Selenocysteine
  MOD_RES (196)..(196): Selenocysteine
  MOD_RES (239)..(239): Selenocysteine
  MOD_RES (244)..(244): Selenocysteine
  MOD_RES (270)..(271): Selenocysteine
  MOD_RES (291)..(291): Selenocysteine
  MOD_RES (310)..(310): Selenocysteine
  MOD_RES (317)..(317): Selenocysteine
  MOD_RES (320)..(320): Selenocysteine
  MOD_RES (336)..(336): Selenocysteine
  MOD_RES (343)..(343): Selenocysteine
  MOD_RES (358)..(358): Selenocysteine
MDELQDVQLXEIKPLLNDKEHDIEXXHGVVHVXIRGLPKGNRPVILXYHDIGLNHKSCFNAFFNFEDMQEIXQHFAVCHVDAPGQQEGAPSFPXGYQYPXMDELAEMLPPVLXHLSLKSIIGIGVGAGAYILSRFALNHPELVEGLVLINVDPCAKGWIDWAASKLSGLXXNVVDIILAHHFGQEELQANLDLIQXYRMHIAQDINQDNLQLFLNSYNGRRDLEIERPILGQNDNKSKXLKCSXLLVVGDNSPAVEAVVECNSRLNPINXXLLKMADCGGLPQVVQPGKLXEAFKYFLQGMGYIPSASMXRLARSRXHSXSSSLGSGESPFSRSVXSNQSDGXQESCESPDVLDRHQXMEVSC

SEQ ID NO: 17383 - protein, 375 aa, Homo sapiens
  MOD_RES (10)..(10): Selenocysteine
  MOD_RES (22)..(22): Selenocysteine
  MOD_RES (37)..(38): Selenocysteine
  MOD_RES (45)..(45): Selenocysteine
  MOD_RES (59)..(59): Selenocysteine
  MOD_RES (84)..(84): Selenocysteine
  MOD_RES (106)..(106): Selenocysteine
  MOD_RES (112)..(112): Selenocysteine
  MOD_RES (125)..(125): Selenocysteine
  MOD_RES (182)..(183): Selenocysteine
  MOD_RES (208)..(208): Selenocysteine
  MOD_RES (251)..(251): Selenocysteine
  MOD_RES (256)..(256): Selenocysteine
  MOD_RES (282)..(283): Selenocysteine
  MOD_RES (303)..(303): Selenocysteine
  MOD_RES (322)..(322): Selenocysteine
  MOD_RES (329)..(329): Selenocysteine
  MOD_RES (332)..(332): Selenocysteine
  MOD_RES (348)..(348): Selenocysteine
  MOD_RES (355)..(355): Selenocysteine
  MOD_RES (370)..(370): Selenocysteine
MDELQDVQLXEIKPLLNDKNGXRNFQDFDCQEHDIEXXHGVVHVXIRGLPKGNRPVILXYHDIGLNHKSCFNAFFNFEDMQEIXQHFAVCHVDAPGQQEGAPSFPXGYQYPXMDELAEMLPPVLXHLSLKSIIGIGVGAGAYILSRFALNHPELVEGLVLINVDPCAKGWIDWAASKLSGLXXNVVDIILAHHFGQEELQANLDLIQXYRMHIAQDINQDNLQLFLNSYNGRRDLEIERPILGQNDNKSKXLKCSXLLVVGDNSPAVEAVVECNSRLNPINXXLLKMADCGGLPQVVQPGKLXEAFKYFLQGMGYIPSASMXRLARSRXHSXSSSLGSGESPFSRSVXSNQSDGXQESCESPDVLDRHQXMEVSC

SEQ ID NO: 17384 - protein, 388 aa, Homo sapiens
  MOD_RES (10)..(10): Selenocysteine
  MOD_RES (22)..(22): Selenocysteine
  MOD_RES (37)..(38): Selenocysteine
  MOD_RES (45)..(45): Selenocysteine
  MOD_RES (59)..(59): Selenocysteine
  MOD_RES (84)..(84): Selenocysteine
  MOD_RES (106)..(106): Selenocysteine
  MOD_RES (112)..(112): Selenocysteine
  MOD_RES (125)..(125): Selenocysteine
  MOD_RES (182)..(183): Selenocysteine
  MOD_RES (208)..(208): Selenocysteine
  MOD_RES (251)..(251): Selenocysteine
  MOD_RES (256)..(256): Selenocysteine
  MOD_RES (282)..(283): Selenocysteine
  MOD_RES (303)..(303): Selenocysteine
  MOD_RES (326)..(326): Selenocysteine
  MOD_RES (335)..(335): Selenocysteine
  MOD_RES (342)..(342): Selenocysteine
  MOD_RES (345)..(345): Selenocysteine
  MOD_RES (361)..(361): Selenocysteine
  MOD_RES (368)..(368): Selenocysteine
  MOD_RES (383)..(383): Selenocysteine
MDELQDVQLXEIKPLLNDKNGXRNFQDFDCQEHDIEXXHGVVHVXIRGLPKGNRPVILXYHDIGLNHKSCFNAFFNFEDMQEIXQHFAVCHVDAPGQQEGAPSFPXGYQYPXMDELAEMLPPVLXHLSLKSIIGIGVGAGAYILSRFALNHPELVEGLVLINVDPCAKGWIDWAASKLSGLXXNVVDIILAHHFGQEELQANLDLIQXYRMHIAQDINQDNLQLFLNSYNGRRDLEIERPILGQNDNKSKXLKCSXLLVVGDNSPAVEAVVECNSRLNPINXXLLKMADCGGLPQVVQPGKLXEAFKYFLQGMGYIPYVQLSHLSXESVPSASMXRLARSRXHSXSSSLGSGESPFSRSVXSNQSDGXQESCESPDVLDRHQXMEVSC

SEQ ID NO: 17385 - protein, 187 aa, Homo sapiens
  MOD_RES (10)..(10): Selenocysteine
  MOD_RES (20)..(20): Selenocysteine
  MOD_RES (28)..(29): Selenocysteine
  MOD_RES (36)..(36): Selenocysteine
  MOD_RES (50)..(50): Selenocysteine
  MOD_RES (75)..(75): Selenocysteine
  MOD_RES (97)..(97): Selenocysteine
  MOD_RES (103)..(103): Selenocysteine
  MOD_RES (116)..(116): Selenocysteine
  MOD_RES (173)..(174): Selenocysteine
MEFFSSCSFXRSRKICMPIXMEEHDIEXXHGVVHVXIRGLPKGNRPVILXYHDIGLNHKSCFNAFFNFEDMQEIXQHFAVCHVDAPGQQEGAPSFPXGYQYPXMDELAEMLPPVLXHLSLKSIIGIGVGAGAYILSRFALNHPELVEGLVLINVDPCAKGWIDWAASKLSGLXXNVVDIILAHHFGQ

SEQ ID NO: 17386 - protein, 280 aa, Homo sapiens
  MOD_RES (5)..(5): Selenocysteine
  MOD_RES (8)..(8): Selenocysteine
  MOD_RES (10)..(10): Selenocysteine
  MOD_RES (17)..(17): Selenocysteine
  MOD_RES (30)..(30): Selenocysteine
  MOD_RES (87)..(88): Selenocysteine
  MOD_RES (113)..(113): Selenocysteine
  MOD_RES (156)..(156): Selenocysteine
  MOD_RES (161)..(161): Selenocysteine
  MOD_RES (187)..(188): Selenocysteine
  MOD_RES (208)..(208): Selenocysteine
  MOD_RES (227)..(227): Selenocysteine
  MOD_RES (234)..(234): Selenocysteine
  MOD_RES (237)..(237): Selenocysteine
  MOD_RES (253)..(253): Selenocysteine
  MOD_RES (260)..(260): Selenocysteine
  MOD_RES (275)..(275): Selenocysteine
MVQEXSRXLXVRYQYPXMDELAEMLPPVLXHLSLKSIIGIGVGAGAYILSRFALNHPELVEGLVLINVDPCAKGWIDWAASKLSGLXXNVVDIILAHHFGQEELQANLDLIQXYRMHIAQDINQDNLQLFLNSYNGRRDLEIERPILGQNDNKSKXLKCSXLLVVGDNSPAVEAVVECNSRLNPINXXLLKMADCGGLPQVVQPGKLXEAFKYFLQGMGYIPSASMXRLARSRXHSXSSSLGSGESPFSRSVXSNQSDGXQESCESPDVLDRHQXMEVSC

SEQ ID NO: 17387 - protein, 145 aa, Homo sapiens
  MOD_RES (22)..(22): Selenocysteine
  MOD_RES (30)..(30): Selenocysteine
  MOD_RES (52)..(52): Selenocysteine
  MOD_RES (66)..(66): Selenocysteine
  MOD_RES (77)..(77): Selenocysteine
MAGLQELRFPEEKPLLRGQDAXELEHDIEXPYGLLHVVIRGSPKGNRPAILXYHDVGLNHKLCFNXFFNFEDMQEIXKHFVVCHVDAPGQQVGASQFPQGYQFPSMEQLAAMLPSVVQHFGFKYVIGIGVGAGAYVLAKFAVSLP

SEQ ID NO: 17388 - protein, 39 aa, Homo sapiens
  MOD_RES (22)..(22): Selenocysteine
  MOD_RES (36)..(36): Selenocysteine
MAGLQELRFPEEKPLLRGQDAXELESSDAFLLAADXDWK

SEQ ID NO: 17389 - protein, 40 aa, Homo sapiens
  MOD_RES (22)..(22): Selenocysteine
  MOD_RES (36)..(36): Selenocysteine
MAGLQELRFPEEKPLLRGQDAXELESSDAFLLAADXDWKA

SEQ ID NO: 17390 - protein, 111 aa, Homo sapiens
  MOD_RES (22)..(22): Selenocysteine
  MOD_RES (36)..(36): Selenocysteine
  MOD_RES (45)..(45): Selenocysteine
  MOD_RES (67)..(67): Selenocysteine
  MOD_RES (81)..(81): Selenocysteine
  MOD_RES (92)..(92): Selenocysteine
MAGLQELRFPEEKPLLRGQDAXELESSDAFLLAADXDWKEHDIEXPYGLLHVVIRGSPKGNRPAILXYHDVGLNHKLCFNXFFNFEDMQEIXKHFVVCHVDAPGQQVGASQ

SEQ ID NO: 17391 - protein, 142 aa, Homo sapiens
  MOD_RES (22)..(22): Selenocysteine
  MOD_RES (36)..(36): Selenocysteine
  MOD_RES (45)..(45): Selenocysteine
  MOD_RES (67)..(67): Selenocysteine
  MOD_RES (81)..(81): Selenocysteine
  MOD_RES (92)..(92): Selenocysteine
MAGLQELRFPEEKPLLRGQDAXELESSDAFLLAADXDWKEHDIEXPYGLLHVVIRGSPKGNRPAILXYHDVGLNHKLCFNXFFNFEDMQEIXKHFVVCHVDAPGQQVGASQFPQGYQFPSMEQLAAMLPSVVQHFGFKYVIG

SEQ ID NO: 17392 - protein, 149 aa, Homo sapiens
  MOD_RES (22)..(22): Selenocysteine
  MOD_RES (36)..(36): Selenocysteine
  MOD_RES (45)..(45): Selenocysteine
  MOD_RES (67)..(67): Selenocysteine
  MOD_RES (81)..(81): Selenocysteine
  MOD_RES (92)..(92): Selenocysteine
MAGLQELRFPEEKPLLRGQDAXELESSDAFLLAADXDWKEHDIEXPYGLLHVVIRGSPKGNRPAILXYHDVGLNHKLCFNXFFNFEDMQEIXKHFVVCHVDAPGQQVGASQFPQGYQFPSMEQLAAMLPSVVQHFGFKYVIGIGVGAGA

SEQ ID NO: 17393 - protein, 151 aa, Homo sapiens
  MOD_RES (22)..(22): Selenocysteine
  MOD_RES (36)..(36): Selenocysteine
  MOD_RES (45)..(45): Selenocysteine
  MOD_RES (67)..(67): Selenocysteine
  MOD_RES (81)..(81): Selenocysteine
  MOD_RES (92)..(92): Selenocysteine
MAGLQELRFPEEKPLLRGQDAXELESSDAFLLAADXDWKEHDIEXPYGLLHVVIRGSPKGNRPAILXYHDVGLNHKLCFNXFFNFEDMQEIXKHFVVCHVDAPGQQVGASQFPQGYQFPSMEQLAAMLPSVVQHFGFKYVIGIGVGAGAYV

SEQ ID NO: 17394 - protein, 153 aa, Homo sapiens
  MOD_RES (22)..(22): Selenocysteine
  MOD_RES (36)..(36): Selenocysteine
  MOD_RES (45)..(45): Selenocysteine
  MOD_RES (67)..(67): Selenocysteine
  MOD_RES (81)..(81): Selenocysteine
  MOD_RES (92)..(92): Selenocysteine
MAGLQELRFPEEKPLLRGQDAXELESSDAFLLAADXDWKEHDIEXPYGLLHVVIRGSPKGNRPAILXYHDVGLNHKLCFNXFFNFEDMQEIXKHFVVCHVDAPGQQVGASQFPQGYQFPSMEQLAAMLPSVVQHFGFKYVIGIGVGAGAYVLA

SEQ ID NO: 17395 - protein, 156 aa, Homo sapiens
  MOD_RES (22)..(22): Selenocysteine
  MOD_RES (36)..(36): Selenocysteine
  MOD_RES (45)..(45): Selenocysteine
  MOD_RES (67)..(67): Selenocysteine
  MOD_RES (81)..(81): Selenocysteine
  MOD_RES (92)..(92): Selenocysteine
MAGLQELRFPEEKPLLRGQDAXELESSDAFLLAADXDWKEHDIEXPYGLLHVVIRGSPKGNRPAILXYHDVGLNHKLCFNXFFNFEDMQEIXKHFVVCHVDAPGQQVGASQFPQGYQFPSMEQLAAMLPSVVQHFGFKYVIGIGVGAGAYVLAKFA

SEQ ID NO: 17396 - protein, 371 aa, Homo sapiens
  MOD_RES (22)..(22): Selenocysteine
  MOD_RES (36)..(36): Selenocysteine
  MOD_RES (45)..(45): Selenocysteine
  MOD_RES (67)..(67): Selenocysteine
  MOD_RES (81)..(81): Selenocysteine
  MOD_RES (92)..(92): Selenocysteine
  MOD_RES (184)..(184): Selenocysteine
  MOD_RES (190)..(190): Selenocysteine
  MOD_RES (192)..(192): Selenocysteine
  MOD_RES (196)..(196): Selenocysteine
  MOD_RES (211)..(211): Selenocysteine
  MOD_RES (250)..(250): Selenocysteine
  MOD_RES (256)..(256): Selenocysteine
  MOD_RES (285)..(288): Selenocysteine
  MOD_RES (302)..(302): Selenocysteine
  MOD_RES (308)..(308): Selenocysteine
  MOD_RES (327)..(327): Selenocysteine
  MOD_RES (334)..(334): Selenocysteine
  MOD_RES (338)..(338): Selenocysteine
  MOD_RES (352)..(352): Selenocysteine
  MOD_RES (366)..(366): Selenocysteine
MAGLQELRFPEEKPLLRGQDAXELESSDAFLLAADXDWKEHDIEXPYGLLHVVIRGSPKGNRPAILXYHDVGLNHKLCFNXFFNFEDMQEIXKHFVVCHVDAPGQQVGASQFPQGYQFPSMEQLAAMLPSVVQHFGFKYVIGIGVGAGAYVLAKFALIFPDLVEGLVLVNIDPNGKGWIDWAAXKLSGLXSXLPDXVLSHLFSQEELVNNXELVQSYRQQIGNVVNQANLQLFWNMYNSRRDLDINRPGXVPNAKXLRCPVMLVVGDNAPAEDGVVECNSKLDPXXXXFLKMADSGGLPQVXQPGKLXEAFKYFLQGMGYMPSASMXRLARSRXASLXSASSVDGSRPQACXHSESSEGLGQVNHXMEVSC

SEQ ID NO: 17397 - protein, 199 aa, Homo sapiens
  MOD_RES (22)..(22): Selenocysteine
  MOD_RES (36)..(36): Selenocysteine
  MOD_RES (52)..(52): Selenocysteine
  MOD_RES (63)..(63): Selenocysteine
  MOD_RES (85)..(85): Selenocysteine
  MOD_RES (99)..(99): Selenocysteine
  MOD_RES (110)..(110): Selenocysteine
MAGLQELRFPEEKPLLRGQDAXELESSDAFLLAADXDWKRSQERRLPRVSSXVSPLQEHDIEXPYGLLHVVIRGSPKGNRPAILXYHDVGLNHKLCFNXFFNFEDMQEIXKHFVVCHVDAPGQQVGASQFPQGYQFPSMEQLAAMLPSVVQHFGFKYVIGIGVGAGAYVLAKFALIFPDLVEGLVLVNIDPNGKGWIDW

SEQ ID NO: 17398 - protein, 158 aa, Homo sapiens
  MOD_RES (22)..(22): Selenocysteine
  MOD_RES (36)..(36): Selenocysteine
  MOD_RES (75)..(75): Selenocysteine
  MOD_RES (97)..(97): Selenocysteine
  MOD_RES (111)..(111): Selenocysteine
  MOD_RES (122)..(122): Selenocysteine
MAGLQELRFPEEKPLLRGQDAXELESSDAFLLAADXDWKVGEGNAGAVKLAGLGDPRWSPGHLLSPGHQEHDIEXPYGLLHVVIRGSPKGNRPAILXYHDVGLNHKLCFNXFFNFEDMQEIXKHFVVCHVDAPGQQVGASQFPQGYQFPSMEQLAAML

SEQ ID NO: 17399 - protein, 391 aa, Homo sapiens
  MOD_RES (12)..(12): Selenocysteine
  MOD_RES (20)..(20): Selenocysteine
  MOD_RES (42)..(42): Selenocysteine
  MOD_RES (56)..(56): Selenocysteine
  MOD_RES (65)..(65): Selenocysteine
  MOD_RES (87)..(87): Selenocysteine
  MOD_RES (101)..(101): Selenocysteine
  MOD_RES (112)..(112): Selenocysteine
  MOD_RES (204)..(204): Selenocysteine
  MOD_RES (210)..(210): Selenocysteine
  MOD_RES (212)..(212): Selenocysteine
  MOD_RES (216)..(216): Selenocysteine
  MOD_RES (231)..(231): Selenocysteine
  MOD_RES (270)..(270): Selenocysteine
  MOD_RES (276)..(276): Selenocysteine
  MOD_RES (305)..(308): Selenocysteine
  MOD_RES (322)..(322): Selenocysteine
  MOD_RES (328)..(328): Selenocysteine
  MOD_RES (347)..(347): Selenocysteine
  MOD_RES (354)..(354): Selenocysteine
  MOD_RES (358)..(358): Selenocysteine
  MOD_RES (372)..(372): Selenocysteine
  MOD_RES (386)..(386): Selenocysteine
MKVLGHRLELLXGLLLHDVXMAGLQELRFPEEKPLLRGQDAXELESSDAFLLAADXDWKEHDIEXPYGLLHVVIRGSPKGNRPAILXYHDVGLNHKLCFNXFFNFEDMQEIXKHFVVCHVDAPGQQVGASQFPQGYQFPSMEQLAAMLPSVVQHFGFKYVIGIGVGAGAYVLAKFALIFPDLVEGLVLVNIDPNGKGWIDWAAXKLSGLXSXLPDXVLSHLFSQEELVNNXELVQSYRQQIGNVVNQANLQLFWNMYNSRRDLDINRPGXVPNAKXLRCPVMLVVGDNAPAEDGVVECNSKLDPXXXXFLKMADSGGLPQVXQPGKLXEAFKYFLQGMGYMPSASMXRLARSRXASLXSASSVDGSRPQACXHSESSEGLGQVNHXMEVSC

SEQ ID NO: 17400 - protein, 65 aa, Homo sapiens
  MOD_RES (12)..(12): Selenocysteine
  MOD_RES (20)..(20): Selenocysteine
  MOD_RES (42)..(42): Selenocysteine
  MOD_RES (56)..(56): Selenocysteine
MKVLGHRLELLXGLLLHDVXMAGLQELRFPEEKPLLRGQDAXELESSDAFLLAADXDWKPQRPGH

SEQ ID NO: 17401 - protein, 153 aa, Homo sapiens
  MOD_RES (12)..(12): Selenocysteine
  MOD_RES (20)..(20): Selenocysteine
  MOD_RES (42)..(42): Selenocysteine
  MOD_RES (56)..(56): Selenocysteine
  MOD_RES (72)..(72): Selenocysteine
  MOD_RES (83)..(83): Selenocysteine
  MOD_RES (105)..(105): Selenocysteine
  MOD_RES (119)..(119): Selenocysteine
  MOD_RES (130)..(130): Selenocysteine
MKVLGHRLELLXGLLLHDVXMAGLQELRFPEEKPLLRGQDAXELESSDAFLLAADXDWKRSQERRLPRVSSXVSPLQEHDIEXPYGLLHVVIRGSPKGNRPAILXYHDVGLNHKLCFNXFFNFEDMQEIXKHFVVCHVDAPGQQVGASQFPQG

SEQ ID NO: 17402 - protein, 153 aa, Homo sapiens
  MOD_RES (12)..(12): Selenocysteine
  MOD_RES (20)..(20): Selenocysteine
  MOD_RES (42)..(42): Selenocysteine
  MOD_RES (56)..(56): Selenocysteine
  MOD_RES (95)..(95): Selenocysteine
  MOD_RES (117)..(117): Selenocysteine
  MOD_RES (131)..(131): Selenocysteine
  MOD_RES (142)..(142): Selenocysteine
MKVLGHRLELLXGLLLHDVXMAGLQELRFPEEKPLLRGQDAXELESSDAFLLAADXDWKVGEGNAGAVKLAGLGDPRWSPGHLLSPGHQEHDIEXPYGLLHVVIRGSPKGNRPAILXYHDVGLNHKLCFNXFFNFEDMQEIXKHFVVCHVDAP

SEQ ID NO: 17403 - protein, 45 aa, Homo sapiens
  MOD_RES (12)..(12): Selenocysteine
MKVLGHRLELLXGSQNRGFPNHGFMILRPPAPRRDHGRAAGAAIP

SEQ ID NO: 17404 - protein, 83 aa, Homo sapiens
  MOD_RES (6)..(6): Selenocysteine
  MOD_RES (12)..(12): Selenocysteine
MMWASXDMQEIXKHFVVCHVDAPGQQVGASQFPQGYQFPSMEQLAAMLPSVVQHFGFKYVIGIGVGAGAYVLAKFALIFPDLV

SEQ ID NO: 17405 - protein, 19 aa, Homo sapiens
  MOD_RES (6)..(7): Selenocysteine
  MOD_RES (12)..(12): Selenocysteine
  MOD_RES (16)..(16): Selenocysteine
  MOD_RES (19)..(19): Selenocysteine
MMWASXXNYASXPSSXSRX

SEQ ID NO: 17406 - protein, 327 aa, Homo sapiens
  MOD_RES (13)..(13): Selenocysteine
  MOD_RES (35)..(35): Selenocysteine
  MOD_RES (49)..(49): Selenocysteine
  MOD_RES (60)..(60): Selenocysteine
  MOD_RES (152)..(152): Selenocysteine
  MOD_RES (158)..(158): Selenocysteine
  MOD_RES (160)..(160): Selenocysteine
  MOD_RES (164)..(164): Selenocysteine
  MOD_RES (179)..(179): Selenocysteine
  MOD_RES (218)..(218): Selenocysteine
  MOD_RES (224)..(224): Selenocysteine
  MOD_RES (253)..(256): Selenocysteine
  MOD_RES (264)..(264): Selenocysteine
  MOD_RES (283)..(283): Selenocysteine
  MOD_RES (290)..(290): Selenocysteine
  MOD_RES (294)..(294): Selenocysteine
  MOD_RES (308)..(308): Selenocysteine
  MOD_RES (322)..(322): Selenocysteine
MPECWDGEHDIEXPYGLLHVVIRGSPKGNRPAILXYHDVGLNHKLCFNXFFNFEDMQEIXKHFVVCHVDAPGQQVGASQFPQGYQFPSMEQLAAMLPSVVQHFGFKYVIGIGVGAGAYVLAKFALIFPDLVEGLVLVNIDPNGKGWIDWAAXKLSGLXSXLPDXVLSHLFSQEELVNNXELVQSYRQQIGNVVNQANLQLFWNMYNSRRDLDINRPGXVPNAKXLRCPVMLVVGDNAPAEDGVVECNSKLDPXXXXFLKPGKLXEAFKYFLQGMGYMPSASMXRLARSRXASLXSASSVDGSRPQACXHSESSEGLGQVNHXMEVSC

SEQ ID NO: 17407 - protein, 339 aa, Homo sapiens
  MOD_RES (13)..(13): Selenocysteine
  MOD_RES (35)..(35): Selenocysteine
  MOD_RES (49)..(49): Selenocysteine
  MOD_RES (60)..(60): Selenocysteine
  MOD_RES (152)..(152): Selenocysteine
  MOD_RES (158)..(158): Selenocysteine
  MOD_RES (160)..(160): Selenocysteine
  MOD_RES (164)..(164): Selenocysteine
  MOD_RES (179)..(179): Selenocysteine
  MOD_RES (218)..(218): Selenocysteine
  MOD_RES (224)..(224): Selenocysteine
  MOD_RES (253)..(256): Selenocysteine
  MOD_RES (270)..(270): Selenocysteine
  MOD_RES (276)..(276): Selenocysteine
  MOD_RES (295)..(295): Selenocysteine
  MOD_RES (302)..(302): Selenocysteine
  MOD_RES (306)..(306): Selenocysteine
  MOD_RES (320)..(320): Selenocysteine
  MOD_RES (334)..(334): Selenocysteine
MPECWDGEHDIEXPYGLLHVVIRGSPKGNRPAILXYHDVGLNHKLCFNXFFNFEDMQEIXKHFVVCHVDAPGQQVGASQFPQGYQFPSMEQLAAMLPSVVQHFGFKYVIGIGVGAGAYVLAKFALIFPDLVEGLVLVNIDPNGKGWIDWAAXKLSGLXSXLPDXVLSHLFSQEELVNNXELVQSYRQQIGNVVNQANLQLFWNMYNSRRDLDINRPGXVPNAKXLRCPVMLVVGDNAPAEDGVVECNSKLDPXXXXFLKMADSGGLPQVXQPGKLXEAFKYFLQGMGYMPSASMXRLARSRXASLXSASSVDGSRPQACXHSESSEGLGQVNHXMEVSC

SEQ ID NO: 17408 - protein, 352 aa, Homo sapiens
  MOD_RES (13)..(13): Selenocysteine
  MOD_RES (35)..(35): Selenocysteine
  MOD_RES (49)..(49): Selenocysteine
  MOD_RES (60)..(60): Selenocysteine
  MOD_RES (152)..(152): Selenocysteine
  MOD_RES (158)..(158): Selenocysteine
  MOD_RES (160)..(160): Selenocysteine
  MOD_RES (164)..(164): Selenocysteine
  MOD_RES (179)..(179): Selenocysteine
  MOD_RES (218)..(218): Selenocysteine
  MOD_RES (224)..(224): Selenocysteine
  MOD_RES (253)..(256): Selenocysteine
  MOD_RES (270)..(270): Selenocysteine
  MOD_RES (276)..(276): Selenocysteine
  MOD_RES (308)..(308): Selenocysteine
  MOD_RES (315)..(315): Selenocysteine
  MOD_RES (319)..(319): Selenocysteine
  MOD_RES (333)..(333): Selenocysteine
  MOD_RES (347)..(347): Selenocysteine
MPECWDGEHDIEXPYGLLHVVIRGSPKGNRPAILXYHDVGLNHKLCFNXFFNFEDMQEIXKHFVVCHVDAPGQQVGASQFPQGYQFPSMEQLAAMLPSVVQHFGFKYVIGIGVGAGAYVLAKFALIFPDLVEGLVLVNIDPNGKGWIDWAAXKLSGLXSXLPDXVLSHLFSQEELVNNXELVQSYRQQIGNVVNQANLQLFWNMYNSRRDLDINRPGXVPNAKXLRCPVMLVVGDNAPAEDGVVECNSKLDPXXXXFLKMADSGGLPQVXQPGKLXEAFKYFLQGMGYIAYLKDRRLSGGAVPSASMXRLARSRXASLXSASSVDGSRPQACXHSESSEGLGQVNHXMEVSC

SEQ ID NO: 17409 - protein, 357 aa, Homo sapiens
  MOD_RES (13)..(13): Selenocysteine
  MOD_RES (35)..(35): Selenocysteine
  MOD_RES (67)..(67): Selenocysteine
  MOD_RES (78)..(78): Selenocysteine
  MOD_RES (170)..(170): Selenocysteine
  MOD_RES (176)..(176): Selenocysteine
  MOD_RES (178)..(178): Selenocysteine
  MOD_RES (182)..(182): Selenocysteine
  MOD_RES (197)..(197): Selenocysteine
  MOD_RES (236)..(236): Selenocysteine
  MOD_RES (242)..(242): Selenocysteine
  MOD_RES (271)..(274): Selenocysteine
  MOD_RES (288)..(288): Selenocysteine
  MOD_RES (294)..(294): Selenocysteine
  MOD_RES (313)..(313): Selenocysteine
  MOD_RES (320)..(320): Selenocysteine
  MOD_RES (324)..(324): Selenocysteine
  MOD_RES (338)..(338): Selenocysteine
  MOD_RES (352)..(352): Selenocysteine
MPECWDGEHDIEXPYGLLHVVIRGSPKGNRPAILXYHDVGLNRKCSPASVSPPLPPISQSDKLCFNXFFNFEDMQEIXKHFVVCHVDAPGQQVGASQFPQGYQFPSMEQLAAMLPSVVQHFGFKYVIGIGVGAGAYVLAKFALIFPDLVEGLVLVNIDPNGKGWIDWAAXKLSGLXSXLPDXVLSHLFSQEELVNNXELVQSYRQQIGNVVNQANLQLFWNMYNSRRDLDINRPGXVPNAKXLRCPVMLVVGDNAPAEDGVVECNSKLDPXXXXFLKMADSGGLPQVXQPGKLXEAFKYFLQGMGYMPSASMXRLARSRXASLXSASSVDGSRPQACXHSESSEGLGQVNHXMEVSC

SEQ ID NO: 17410 - protein, 357 aa, Homo sapiens
  MOD_RES (20)..(20): Selenocysteine
  MOD_RES (31)..(31): Selenocysteine
  MOD_RES (53)..(53): Selenocysteine
  MOD_RES (67)..(67): Selenocysteine
  MOD_RES (78)..(78): Selenocysteine
  MOD_RES (170)..(170): Selenocysteine
  MOD_RES (176)..(176): Selenocysteine
  MOD_RES (178)..(178): Selenocysteine
  MOD_RES (182)..(182): Selenocysteine
  MOD_RES (197)..(197): Selenocysteine
  MOD_RES (236)..(236): Selenocysteine
  MOD_RES (242)..(242): Selenocysteine
  MOD_RES (271)..(274): Selenocysteine
  MOD_RES (288)..(288): Selenocysteine
  MOD_RES (294)..(294): Selenocysteine
  MOD_RES (313)..(313): Selenocysteine
  MOD_RES (320)..(320): Selenocysteine
  MOD_RES (324)..(324): Selenocysteine
  MOD_RES (338)..(338): Selenocysteine
  MOD_RES (352)..(352): Selenocysteine
MPECWDGRSQERRLPRVSSXVSPLQEHDIEXPYGLLHVVIRGSPKGNRPAILXYHDVGLNHKLCFNXFFNFEDMQEIXKHFVVCHVDAPGQQVGASQFPQGYQFPSMEQLAAMLPSVVQHFGFKYVIGIGVGAGAYVLAKFALIFPDLVEGLVLVNIDPNGKGWIDWAAXKLSGLXSXLPDXVLSHLFSQEELVNNXELVQSYRQQIGNVVNQANLQLFWNMYNSRRDLDINRPGXVPNAKXLRCPVMLVVGDNAPAEDGVVECNSKLDPXXXXFLKMADSGGLPQVXQPGKLXEAFKYFLQGMGYMPSASMXRLARSRXASLXSASSVDGSRPQACXHSESSEGLGQVNHXMEVSC

SEQ ID NO: 17411 - protein, 38 aa, Homo sapiens
MPECWDGVGEGNAGAVKLAGLGDPRWSPGHLLSPGHQA

SEQ ID NO: 17412 - protein, 144 aa, Homo sapiens
  MOD_RES (43)..(43): Selenocysteine
  MOD_RES (65)..(65): Selenocysteine
  MOD_RES (79)..(79): Selenocysteine
  MOD_RES (90)..(90): Selenocysteine
MPECWDGVGEGNAGAVKLAGLGDPRWSPGHLLSPGHQEHDIEXPYGLLHVVIRGSPKGNRPAILXYHDVGLNHKLCFNXFFNFEDMQEIXKHFVVCHVDAPGQQVGASQFPQGYQFPSMEQLAAMLPSVVQHFGFKYVIGIGVG

SEQ ID NO: 17413 - protein, 369 aa, Homo sapiens
  MOD_RES (43)..(43): Selenocysteine
  MOD_RES (65)..(65): Selenocysteine
  MOD_RES (79)..(79): Selenocysteine
  MOD_RES (90)..(90): Selenocysteine
  MOD_RES (182)..(182): Selenocysteine
  MOD_RES (188)..(188): Selenocysteine
  MOD_RES (190)..(190): Selenocysteine
  MOD_RES (194)..(194): Selenocysteine
  MOD_RES (209)..(209): Selenocysteine
  MOD_RES (248)..(248): Selenocysteine
  MOD_RES (254)..(254): Selenocysteine
  MOD_RES (283)..(286): Selenocysteine
  MOD_RES (300)..(300): Selenocysteine
  MOD_RES (306)..(306): Selenocysteine
  MOD_RES (325)..(325): Selenocysteine
  MOD_RES (332)..(332): Selenocysteine
  MOD_RES (336)..(336): Selenocysteine
  MOD_RES (350)..(350): Selenocysteine
  MOD_RES (364)..(364): Selenocysteine
MPECWDGVGEGNAGAVKLAGLGDPRWSPGHLLSPGHQEHDIEXPYGLLHVVIRGSPKGNRPAILXYHDVGLNHKLCFNXFFNFEDMQEIXKHFVVCHVDAPGQQVGASQFPQGYQFPSMEQLAAMLPSVVQHFGFKYVIGIGVGAGAYVLAKFALIFPDLVEGLVLVNIDPNGKGWIDWAAXKLSGLXSXLPDXVLSHLFSQEELVNNXELVQSYRQQIGNVVNQANLQLFWNMYNSRRDLDINRPGXVPNAKXLRCPVMLVVGDNAPAEDGVVECNSKLDPXXXXFLKMADSGGLPQVXQPGKLXEAFKYFLQGMGYMPSASMXRLARSRXASLXSASSVDGSRPQACXHSESSEGLGQVNHXMEVSC

SEQ ID NO: 17414 - protein, 63 aa, Homo sapiens
  MOD_RES (47)..(47): Selenocysteine
  MOD_RES (63)..(63): Selenocysteine
MPECWDGVGEGNAGAVKLAGLGDPRWSPGHLLSPGHQPHPPELRELXGGCERAAWSGAPSGGX

SEQ ID NO: 17415 - protein, 35 aa, Homo sapiens
  MOD_RES (5)..(5): Selenocysteine
MQEIXKHFVVCHVDAPGQQVGASQFPQGYQFPSME

SEQ ID NO: 17416 - protein, 65 aa, Homo sapiens
  MOD_RES (5)..(5): Selenocysteine
MQEIXKHFVVCHVDAPGQQVGASQFPQGYQFPSMEQLAAMLPSVVQHFGFKYVIGIGVGAGAYVL

SEQ ID NO: 17417 - protein, 84 aa, Homo sapiens
  MOD_RES (5)..(5): Selenocysteine
MQEIXKHFVVCHVDAPGQQVGASQFPQGYQFPSMEQLAAMLPSVVQHFGFKYVIGIGVGAGAYVLAKFALIFPDLVEGLVLVNI

SEQ ID NO: 17418 - protein, 109 aa, Homo sapiens
  MOD_RES (5)..(5): Selenocysteine
  MOD_RES (97)..(97): Selenocysteine
  MOD_RES (103)..(103): Selenocysteine
  MOD_RES (105)..(105): Selenocysteine
  MOD_RES (109)..(109): Selenocysteine
MQEIXKHFVVCHVDAPGQQVGASQFPQGYQFPSMEQLAAMLPSVVQHFGFKYVIGIGVGAGAYVLAKFALIFPDLVEGLVLVNIDPNGKGWIDWAAXKLSGLXSXLPDX

SEQ ID NO: 17419 - protein, 128 aa, Homo sapiens
  MOD_RES (5)..(5): Selenocysteine
  MOD_RES (97)..(97): Selenocysteine
  MOD_RES (103)..(103): Selenocysteine
  MOD_RES (105)..(105): Selenocysteine
  MOD_RES (109)..(109): Selenocysteine
  MOD_RES (124)..(124): Selenocysteine
MQEIXKHFVVCHVDAPGQQVGASQFPQGYQFPSMEQLAAMLPSVVQHFGFKYVIGIGVGAGAYVLAKFALIFPDLVEGLVLVNIDPNGKGWIDWAAXKLSGLXSXLPDXVLSHLFSQEELVNNXELVQ

SEQ ID NO: 17420 - protein, 284 aa, Homo sapiens
  MOD_RES (5)..(5): Selenocysteine
  MOD_RES (97)..(97): Selenocysteine
  MOD_RES (103)..(103): Selenocysteine
  MOD_RES (105)..(105): Selenocysteine
  MOD_RES (109)..(109): Selenocysteine
  MOD_RES (124)..(124): Selenocysteine
  MOD_RES (163)..(163): Selenocysteine
  MOD_RES (169)..(169): Selenocysteine
  MOD_RES (198)..(201): Selenocysteine
  MOD_RES (215)..(215): Selenocysteine
  MOD_RES (221)..(221): Selenocysteine
  MOD_RES (240)..(240): Selenocysteine
  MOD_RES (247)..(247): Selenocysteine
  MOD_RES (251)..(251): Selenocysteine
  MOD_RES (265)..(265): Selenocysteine
  MOD_RES (279)..(279): Selenocysteine
MQEIXKHFVVCHVDAPGQQVGASQFPQGYQFPSMEQLAAMLPSVVQHFGFKYVIGIGVGAGAYVLAKFALIFPDLVEGLVLVNIDPNGKGWIDWAAXKLSGLXSXLPDXVLSHLFSQEELVNNXELVQSYRQQIGNVVNQANLQLFWNMYNSRRDLDINRPGXVPNAKXLRCPVMLVVGDNAPAEDGVVECNSKLDPXXXXFLKMADSGGLPQVXQPGKLXEAFKYFLQGMGYMPSASMXRLARSRXASLXSASSVDGSRPQACXHSESSEGLGQVNHXMEVSC

SEQ ID NO: 17421 - protein, 173 aa, Homo sapiens
  MOD_RES (3)..(3): Selenocysteine
  MOD_RES (13)..(13): Selenocysteine
  MOD_RES (35)..(35): Selenocysteine
  MOD_RES (49)..(49): Selenocysteine
  MOD_RES (58)..(58): Selenocysteine
  MOD_RES (80)..(80): Selenocysteine
  MOD_RES (94)..(94): Selenocysteine
  MOD_RES (105)..(105): Selenocysteine
MSXDSSLLLHDVXMAGLQELRFPEEKPLLRGQDAXELESSDAFLLAADXDWKEHDIEXPYGLLHVVIRGSPKGNRPAILXYHDVGLNHKLCFNXFFNFEDMQEIXKHFVVCHVDAPGQQVGASQFPQGYQFPSMEQLAAMLPSVVQHFGFKYVIGIGVGAGAYVLAKFAVSLP

SEQ ID NO: 17422 - protein, 81 aa, Homo sapiens
  MOD_RES (1)..(1): Any amino acid
  MOD_RES (17)..(17): Selenocysteine
  MOD_RES (28)..(29): Selenocysteine
XANLQLFWNMYNRPAPXQRAARGWARSXXPWRCPVEALDPADDAHVEAPPPSLRRLMFPLVYFCEGKGEEMGFCLKKMRGS

SEQ ID NO: 17423 - protein, 154 aa, Homo sapiens
  MOD_RES (1)..(1): Any amino acid
  MOD_RES (30)..(30): Selenocysteine
  MOD_RES (36)..(36): Selenocysteine
  MOD_RES (38)..(38): Selenocysteine
  MOD_RES (42)..(42): Selenocysteine
  MOD_RES (57)..(57): Selenocysteine
  MOD_RES (96)..(96): Selenocysteine
  MOD_RES (102)..(102): Selenocysteine
  MOD_RES (131)..(134): Selenocysteine
  MOD_RES (148)..(148): Selenocysteine
XQLIFPDLVEGLVLVNIDPNGKGWIDWAAXKLSGLXSXLPDXVLSHLFSQEELVNNXELVQSYRQQIGNVVNQANLQLFWNMYNSRRDLDINRPGXVPNAKXLRCPVMLVVGDNAPAEDGVVECNSKLDPXXXXFLKMADSGGLPQVXQCPQPA

SEQ ID NO: 17424 - protein, 192 aa, Homo sapiens
  MOD_RES (1)..(1): Any amino acid
  MOD_RES (17)..(17): Selenocysteine
  MOD_RES (31)..(31): Selenocysteine
  MOD_RES (42)..(42): Selenocysteine
  MOD_RES (134)..(134): Selenocysteine
  MOD_RES (140)..(140): Selenocysteine
  MOD_RES (142)..(142): Selenocysteine
  MOD_RES (146)..(146): Selenocysteine
  MOD_RES (160)..(160): Selenocysteine
XVVIRGSPKGNRPAILXYHDVGLNHKLCFNXFFNFEDMQEIXKHFVVCHVDAPGQQVGASQFPQGYQFPSMEQLAAMLPSVVQHFGFKYVIGIGVGAGAYVLAKFALIFPDLVEGLVLVNIDPNGKGWIDWAAXKLSGLXSXLPDXVLSHLFSQELVNNXELVQSYRQQIGNVVNQANLQLFWNMYNSRRDL

SEQ ID NO: 17425 - protein, 23 aa, Homo sapiens
MPALACLRRLCRHVSPQAVLFLL

SEQ ID NO: 17426 - protein, 68 aa, Homo sapiens
MPALACLRRLCRHVSPQAVLFLLFIFCLFSVFISAYYLYGWKRGLEPSADAPEPDCGDPPPVAPSRLL

SEQ ID NO: 17427 - protein, 159 aa, Homo sapiens
  MOD_RES (77)..(77): Selenocysteine
  MOD_RES (81)..(81): Selenocysteine
  MOD_RES (113)..(113): Selenocysteine
  MOD_RES (124)..(124): Selenocysteine
  MOD_RES (126)..(126): Selenocysteine
MPALACLRRLCRHVSPQAVLFLLFIFCLFSVFISAYYLYGWKRGLEPSADAPEPDCGDPPPVAPSRLLPLKPVQAAXPSRXDPLVLVFVESLYSQLGQEVVAILESSRFKYRXEIAPGKGDMPXLXDKGRGRFALIIYENILKYVNLDAWNRELLDKYC

SEQ ID NO: 17428 - protein, 825 aa, Homo sapiens
  MOD_RES (77)..(77): Selenocysteine
  MOD_RES (81)..(81): Selenocysteine
  MOD_RES (113)..(113): Selenocysteine
  MOD_RES (124)..(124): Selenocysteine
  MOD_RES (126)..(126): Selenocysteine
  MOD_RES (210)..(210): Selenocysteine
  MOD_RES (226)..(226): Selenocysteine
  MOD_RES (234)..(234): Selenocysteine
  MOD_RES (243)..(243): Selenocysteine
  MOD_RES (265)..(265): Selenocysteine
  MOD_RES (302)..(302): Selenocysteine
  MOD_RES (328)..(328): Selenocysteine
  MOD_RES (341)..(341): Selenocysteine
  MOD_RES (353)..(353): Selenocysteine
  MOD_RES (365)..(365): Selenocysteine
  MOD_RES (367)..(367): Selenocysteine
  MOD_RES (423)..(423): Selenocysteine
  MOD_RES (456)..(456): Selenocysteine
  MOD_RES (458)..(458): Selenocysteine
  MOD_RES (485)..(485): Selenocysteine
  MOD_RES (490)..(490): Selenocysteine
  MOD_RES (492)..(492): Selenocysteine
  MOD_RES (517)..(517): Selenocysteine
  MOD_RES (528)..(528): Selenocysteine
  MOD_RES (542)..(542): Selenocysteine
  MOD_RES (554)..(554): Selenocysteine
  MOD_RES (560)..(560): Selenocysteine
  MOD_RES (600)..(600): Selenocysteine
  MOD_RES (615)..(615): Selenocysteine
  MOD_RES (617)..(618): Selenocysteine
  MOD_RES (639)..(639): Selenocysteine
  MOD_RES (668)..(669): Selenocysteine
  MOD_RES (701)..(701): Selenocysteine
  MOD_RES (726)..(726): Selenocysteine
  MOD_RES (742)..(742): Selenocysteine
  MOD_RES (744)..(744): Selenocysteine
  MOD_RES (750)..(750): Selenocysteine
  MOD_RES (769)..(769): Selenocysteine
  MOD_RES (812)..(812): Selenocysteine
  MOD_RES (815)..(815): Selenocysteine
  MOD_RES (824)..(824): Selenocysteine
MPALACLRRLCRHVSPQAVLFLLFIFCLFSVFISAYYLYGWKRGLEPSADAPEPDCGDPPPVAPSRLLPLKPVQAAXPSRXDPLVLVFVESLYSQLGQEVVAILESSRFKYRXEIAPGKGDMPXLXDKGRGRFALIIYENILKYVNLDAWNRELLDKYCVAYGVGIIGFFKANENSLLSAQLKGFPLFLHSNLGLKDCSINPKSPLLYVXRPSEVEKGVLPGEDWXVFQSNHSXYEPVLLAKXRSSESIPHLGADAGLHAALHAXVVQDLGLHDGIQRVLFGNNLNFWLHKLVFVDAVAFLXGKRLSLPLDRYILVDIDDIFVGKEGXRMKVEDVKALFDXQNELRAHIPNFXFNLGYSGKFFHXGXNAEDAGDDLLLSYVKEFWWFPHMWSHMQPHLFHNQSVLAEQMALNKKFAVEHGIPXDMGYAVAPHHSGVYPVHVQLYEAWKQVWSIRVXSXEEYPHLKPARYRRGFIHNGIMVLPRQXCGLFXHXIFYNEYPGGSSELDKIINGGELFLXVLLNPISIFMXHLSNYGNDRLGLYXFKHLVRFLHSWXNLRLQXLPPVQLAQKYFQIFSEEKDPLWQDPCEDKRHKDIWSKEKXCDRFPKLLIIGPQKXGXXALYLFLGMHPDLSSNYPSSEXFEEIQFFNGHNYHKGIDWYMEFFPIPSNXXSDFYFEKSANYFDSEVAPRRAAALLPKAKVLXILINPADRAYSWYQILVLDGKLLRXEPAKVMDMVQKFLGVXNXIDYHKXLAFDPKKGFWCQLLEGGKXKCLGKSKGRKYPEMDLDSRAFLKDYYRDHNIELSKLLYKMGQXLPXWLREDLQNXR

SEQ ID NO: 17429 - protein, 882 aa, Homo sapiens
  MOD_RES (77)..(77): Selenocysteine
  MOD_RES (81)..(81): Selenocysteine
  MOD_RES (113)..(113): Selenocysteine
  MOD_RES (124)..(124): Selenocysteine
  MOD_RES (126)..(126): Selenocysteine
  MOD_RES (210)..(210): Selenocysteine
  MOD_RES (226)..(226): Selenocysteine
  MOD_RES (234)..(234): Selenocysteine
  MOD_RES (243)..(243): Selenocysteine
  MOD_RES (265)..(265): Selenocysteine
  MOD_RES (302)..(302): Selenocysteine
  MOD_RES (328)..(328): Selenocysteine
  MOD_RES (341)..(341): Selenocysteine
  MOD_RES (353)..(353): Selenocysteine
  MOD_RES (365)..(365): Selenocysteine
  MOD_RES (367)..(367): Selenocysteine
  MOD_RES (423)..(423): Selenocysteine
  MOD_RES (456)..(456): Selenocysteine
  MOD_RES (458)..(458): Selenocysteine
  MOD_RES (485)..(485): Selenocysteine
  MOD_RES (490)..(490): Selenocysteine
  MOD_RES (492)..(492): Selenocysteine
  MOD_RES (517)..(517): Selenocysteine
  MOD_RES (528)..(528): Selenocysteine
  MOD_RES (542)..(542): Selenocysteine
  MOD_RES (554)..(554): Selenocysteine
  MOD_RES (560)..(560): Selenocysteine
  MOD_RES (600)..(600): Selenocysteine
  MOD_RES (615)..(615): Selenocysteine
  MOD_RES (617)..(618): Selenocysteine
  MOD_RES (639)..(639): Selenocysteine
  MOD_RES (668)..(669): Selenocysteine
  MOD_RES (701)..(701): Selenocysteine
  MOD_RES (729)..(729): Selenocysteine
  MOD_RES (735)..(735): Selenocysteine
  MOD_RES (759)..(759): Selenocysteine
  MOD_RES (783)..(783): Selenocysteine
  MOD_RES (799)..(799): Selenocysteine
  MOD_RES (801)..(801): Selenocysteine
  MOD_RES (807)..(807): Selenocysteine
  MOD_RES (826)..(826): Selenocysteine
  MOD_RES (869)..(869): Selenocysteine
  MOD_RES (872)..(872): Selenocysteine
  MOD_RES (881)..(881): Selenocysteine
MPALACLRRLCRHVSPQAVLFLLFIFCLFSVFISAYYLYGWKRGLEPSADAPEPDCGDPPPVAPSRLLPLKPVQAAXPSRXDPLVLVFVESLYSQLGQEVVAILESSRFKYRXEIAPGKGDMPXLXDKGRGRFALIIYENILKYVNLDAWNRELLDKYCVAYGVGIIGFFKANENSLLSAQLKGFPLFLHSNLGLKDCSINPKSPLLYVXRPSEVEKGVLPGEDWXVFQSNHSXYEPVLLAKXRSSESIPHLGADAGLHAALHAXVVQDLGLHDGIQRVLFGNNLNFWLHKLVFVDAVAFLXGKRLSLPLDRYILVDIDDIFVGKEGXRMKVEDVKALFDXQNELRAHIPNFXFNLGYSGKFFHXGXNAEDAGDDLLLSYVKEFWWFPHMWSHMQPHLFHNQSVLAEQMALNKKFAVEHGIPXDMGYAVAPHHSGVYPVHVQLYEAWKQVWSIRVXSXEEYPHLKPARYRRGFIHNGIMVLPRQXCGLFXHXIFYNEYPGGSSELDKIINGGELFLXVLLNPISIFMXHLSNYGNDRLGLYXFKHLVRFLHSWXNLRLQXLPPVQLAQKYFQIFSEEKDPLWQDPCEDKRHKDIWSKEKXCDRFPKLLIIGPQKXGXXALYLFLGMHPDLSSNYPSSEXFEEIQFFNGHNYHKGIDWYMEFFPIPSNXXSDFYFEKSANYFDSEVAPRRAAALLPKAKVLXILINPADRAYSWYQHQRAHDDPVALKYXFHEVIXAGSDASSKLRALQNRCLVPGWYAXHIERWLSAYHANQILVLDGKLLRXEPAKVMDMVQKFLGVXNXIDYHKXLAFDPKKGFWCQLLEGGKXKCLGKSKGRKYPEMDLDSRAFLKDYYRDHNIELSKLLYKMGQXLPXWLREDLQNXR

SEQ ID NO: 17430 - protein, 107 aa, Homo sapiens
  MOD_RES (42)..(42): Selenocysteine
MAASKVKQDMPPPGGYGPIDYKRNLPRRGLSENPWHGGRGVXVQAASLLRSRQCPLIAEWAAPGAVEEGVWGRAGPLSSASLHRLQHAGHRDWNPDLRALEHNEVEP

SEQ ID NO: 17431 - protein, 120 aa, Homo sapiens
  MOD_RES (42)..(42): Selenocysteine
  MOD_RES (79)..(79): Selenocysteine
  MOD_RES (83)..(83): Selenocysteine
MAASKVKQDMPPPGGYGPIDYKRNLPRRGLSGYSMLAIGIGXLIYGHWSIMKWNRERRRLQIEDFEARIALLPLLQAEXDRRXLQMLRENLEEEAIIMKDVPDWKDYRREPPYLVQPCQL

SEQ ID NO: 17432 - protein, 144 aa, Homo sapiens
  MOD_RES (42)..(42): Selenocysteine
  MOD_RES (79)..(79): Selenocysteine
  MOD_RES (83)..(83): Selenocysteine
  MOD_RES (113)..(114): Selenocysteine
  MOD_RES (129)..(130): Selenocysteine
  MOD_RES (144)..(144): Selenocysteine
MAASKVKQDMPPPGGYGPIDYKRNLPRRGLSGYSMLAIGIGXLIYGHWSIMKWNRERRRLQIEDFEARIALLPLLQAEXDRRXLQMLRENLEEEAIIMKDVPDWKVGESVFHXXRWVPPLIGELYGLRXXEEALHASHGFMWYX

SEQ ID NO: 17433 - protein, 150 aa, Homo sapiens
  MOD_RES (42)..(42): Selenocysteine
  MOD_RES (79)..(79): Selenocysteine
  MOD_RES (83)..(83): Selenocysteine
  MOD_RES (129)..(129): Selenocysteine
  MOD_RES (137)..(137): Selenocysteine
MAASKVKQDMPPPGGYGPIDYKRNLPRRGLSGYSMLAIGIGXLIYGHWSIMKWNRERRRLQIEDFEARIALLPLLQAEXDRRXLQMLRENLEEEAIIMKDVPDWKVGPGWEGRGASHGRDRAWGWGAPXAFYRNPRXKGVVGARSHKGRL

SEQ ID NO: 17434 - protein, 75 aa, Homo sapiens
  MOD_RES (1)..(1): Any amino acid
  MOD_RES (35)..(35): Selenocysteine
  MOD_RES (72)..(72): Selenocysteine
XDMPPPGGYGPIDYKRNLPRRGLSGYSMLAIGIGXLIYGHWSIMKWNRERRRLQIEDFEARIALLPLLQAEXDRR

SEQ ID NO: 17435 - protein, 78 aa, Homo sapiens
  MOD_RES (21)..(21): Selenocysteine
  MOD_RES (24)..(24): Selenocysteine
  MOD_RES (76)..(76): Selenocysteine
MAAAAVARLWWRGILGASALXRAXVRPRNDVAHKQLSAFGEYVAEILPKYVQQVQVSCFNELEVCIHPDGVIPVLXFL

SEQ ID NO: 17436 - protein, 121 aa, Homo sapiens
  MOD_RES (21)..(21): Selenocysteine
  MOD_RES (24)..(24): Selenocysteine
  MOD_RES (43)..(43): Selenocysteine
  MOD_RES (46)..(46): Selenocysteine
  MOD_RES (81)..(81): Selenocysteine
MAAAAVARLWWRGILGASALXRGXGRPSVLLLPVRRESAGADXRPXVRPRNDVAHKQLSAFGEYVAEILPKYVQQVQVILXNVIWVWVKKEPCSQGMWEWADLFQRNYRFLHPKLGLFSQH

SEQ ID NO: 17437 - protein, 264 aa, Homo sapiens
  MOD_RES (21)..(21): Selenocysteine
  MOD_RES (24)..(24): Selenocysteine
  MOD_RES (43)..(43): Selenocysteine
  MOD_RES (46)..(46): Selenocysteine
  MOD_RES (98)..(98): Selenocysteine
  MOD_RES (104)..(104): Selenocysteine
  MOD_RES (115)..(115): Selenocysteine
  MOD_RES (121)..(121): Selenocysteine
  MOD_RES (145)..(145): Selenocysteine
  MOD_RES (147)..(147): Selenocysteine
  MOD_RES (151)..(151): Selenocysteine
  MOD_RES (189)..(189): Selenocysteine
MAAAAVARLWWRGILGASALXRGXGRPSVLLLPVRRESAGADXRPXVRPRNDVAHKQLSAFGEYVAEILPKYVQQVQVSCFNELEVCIHPDGVIPVLXFLRDHXNAQFKSLVDLXAVDVPXRQNRFEIVYNLLSLRFNSRIRVKXYXDELXPIESAVSVFKAANWYEREIWDMFGVFFANHPDLRRILXDYGFEGHPFRKDFPLSGYVELRYDDEVKRVVAEPVELAQEFRKFDLNSPWEAFPVYRQPPESLKLEAGDKKPDAK

SEQ ID NO: 17438 - protein, 161 aa, Homo sapiens
  MOD_RES (21)..(21): Selenocysteine
  MOD_RES (24)..(24): Selenocysteine
  MOD_RES (43)..(43): Selenocysteine
  MOD_RES (46)..(46): Selenocysteine
  MOD_RES (98)..(98): Selenocysteine
  MOD_RES (104)..(104): Selenocysteine
  MOD_RES (115)..(115): Selenocysteine
  MOD_RES (121)..(121): Selenocysteine
  MOD_RES (128)..(128): Selenocysteine
MAAAAVARLWWRGILGASALXRGXGRPSVLLLPVRRESAGADXRPXVRPRNDVAHKQLSAFGEYVAEILPKYVQQVQVSCFNELEVCIHPDGVIPVLXFLRDHXNAQFKSLVDLXAVDVPXRQNRFEXESCSVARLECSGMILAHCNLRLPGSSDSPASAP

SEQ ID NO: 17439 - protein, 132 aa, Homo sapiens
  MOD_RES (21)..(21): Selenocysteine
  MOD_RES (24)..(24): Selenocysteine
  MOD_RES (43)..(43): Selenocysteine
  MOD_RES (46)..(46): Selenocysteine
  MOD_RES (98)..(98): Selenocysteine
  MOD_RES (104)..(104): Selenocysteine
  MOD_RES (115)..(115): Selenocysteine
  MOD_RES (121)..(121): Selenocysteine
MAAAAVARLWWRGILGASALXRGXGRPSVLLLPVRRESAGADXRPXVRPRNDVAHKQLSAFGEYVAEILPKYVQQVQVSCFNELEVCIHPDGVIPVLXFLRDHXNAQFKSLVDLXAVDVPXRQNRFEVSWEI

SEQ ID NO: 17440 - protein, 67 aa, Homo sapiens
  MOD_RES (21)..(21): Selenocysteine
  MOD_RES (24)..(24): Selenocysteine
  MOD_RES (43)..(43): Selenocysteine
MAAAAVARLWWRGILGASALXRGXGRPSVLLLPVRRESAGADXRREYVRAALFSELSAGPLRCLSLP

SEQ ID NO: 17441 - protein, 49 aa, Homo sapiens
  MOD_RES (13)..(13): Selenocysteine
  MOD_RES (32)..(32): Selenocysteine
MAAVSMSVVLRQXLWRRRAVAVAALSVSRVPXRDRALLCHPGWSAVVQS

SEQ ID NO: 17442 - protein, 73 aa, Homo sapiens
  MOD_RES (13)..(13): Selenocysteine
  MOD_RES (32)..(32): Selenocysteine
  MOD_RES (37)..(37): Selenocysteine
  MOD_RES (39)..(39): Selenocysteine
  MOD_RES (47)..(47): Selenocysteine
  MOD_RES (50)..(50): Selenocysteine
  MOD_RES (54)..(54): Selenocysteine
  MOD_RES (68)..(68): Selenocysteine
MAAVSMSVVLRQXLWRRRAVAVAALSVSRVPXRSLRXSXWRLAQDQXQDXQLIXVDEKLAFGVPVHSXWMHFN

SEQ ID NO: 17443 - protein, 175 aa, Homo sapiens
  MOD_RES (13)..(13): Selenocysteine
  MOD_RES (32)..(32): Selenocysteine
  MOD_RES (37)..(37): Selenocysteine
  MOD_RES (39)..(39): Selenocysteine
  MOD_RES (47)..(47): Selenocysteine
  MOD_RES (50)..(50): Selenocysteine
  MOD_RES (54)..(54): Selenocysteine
  MOD_RES (62)..(63): Selenocysteine
  MOD_RES (65)..(65): Selenocysteine
  MOD_RES (74)..(74): Selenocysteine
  MOD_RES (94)..(94): Selenocysteine
  MOD_RES (103)..(103): Selenocysteine
  MOD_RES (117)..(117): Selenocysteine
  MOD_RES (127)..(127): Selenocysteine
  MOD_RES (130)..(130): Selenocysteine
  MOD_RES (170)..(170): Selenocysteine
  MOD_RES (174)..(174): Selenocysteine
MAAVSMSVVLRQXLWRRRAVAVAALSVSRVPXRSLRXSXWRLAQDQXQDXQLIXVDEKLDIXXLXGVPEEHIKXRKVRIFVPARNNMQSGVNNXKKWKMEFDXRERWENPLMGWASXADPLSNMVLXFSXKEDAVSFAEKNGWSYDIEERKVPKPKSKSYGANFSWNKRXRVSXK

SEQ ID NO: 17444 - protein, 131 aa, Homo sapiens
  MOD_RES (13)..(13): Selenocysteine
  MOD_RES (32)..(32): Selenocysteine
  MOD_RES (37)..(37): Selenocysteine
  MOD_RES (39)..(39): Selenocysteine
  MOD_RES (47)..(47): Selenocysteine
  MOD_RES (50)..(50): Selenocysteine
  MOD_RES (54)..(54): Selenocysteine
  MOD_RES (68)..(68): Selenocysteine
  MOD_RES (74)..(74): Selenocysteine
  MOD_RES (81)..(81): Selenocysteine
  MOD_RES (94)..(94): Selenocysteine
  MOD_RES (101)..(101): Selenocysteine
  MOD_RES (112)..(112): Selenocysteine
MAAVSMSVVLRQXLWRRRAVAVAALSVSRVPXRSLRXSXWRLAQDQXQDXQLIXVDEKLVYLVPLCFXFCGLAXPSLELAXLFPASRHLEFLFXLPGCILXNPEDFIRSPSXYSSNGYHYFNWSSRRAYKN

SEQ ID NO: 17445 - protein, 116 aa, Homo sapiens
  MOD_RES (9)..(9): Selenocysteine
  MOD_RES (28)..(28): Selenocysteine
  MOD_RES (33)..(33): Selenocysteine
  MOD_RES (35)..(35): Selenocysteine
  MOD_RES (43)..(43): Selenocysteine
  MOD_RES (46)..(46): Selenocysteine
  MOD_RES (50)..(50): Selenocysteine
  MOD_RES (58)..(59): Selenocysteine
  MOD_RES (61)..(61): Selenocysteine
  MOD_RES (70)..(70): Selenocysteine
  MOD_RES (90)..(90): Selenocysteine
  MOD_RES (99)..(99): Selenocysteine
  MOD_RES (113)..(113): Selenocysteine
SMSVVLRQXLWRRRAVAVAALSVSRVPXRSLRXSXWRLAQDQXQDXQLIXVDEKLDIXXLXGVPEEHIKXRKVRIFVPARNNMQSGVNNXKKWKMEFDXRERWENPLMGWASXMEL

SEQ ID NO: 17446 - protein, 352 aa, Homo sapiens
  MOD_RES (21)..(21): Selenocysteine
  MOD_RES (45)..(45): Selenocysteine
  MOD_RES (63)..(63): Selenocysteine
  MOD_RES (66)..(66): Selenocysteine
  MOD_RES (71)..(71): Selenocysteine
  MOD_RES (105)..(105): Selenocysteine
  MOD_RES (108)..(108): Selenocysteine
  MOD_RES (128)..(128): Selenocysteine
  MOD_RES (131)..(131): Selenocysteine
  MOD_RES (141)..(141): Selenocysteine
  MOD_RES (147)..(147): Selenocysteine
  MOD_RES (153)..(153): Selenocysteine
  MOD_RES (171)..(171): Selenocysteine
  MOD_RES (173)..(173): Selenocysteine
  MOD_RES (187)..(187): Selenocysteine
  MOD_RES (204)..(204): Selenocysteine
  MOD_RES (206)..(206): Selenocysteine
  MOD_RES (240)..(240): Selenocysteine
  MOD_RES (250)..(250): Selenocysteine
  MOD_RES (268)..(268): Selenocysteine
  MOD_RES (278)..(278): Selenocysteine
  MOD_RES (283)..(284): Selenocysteine
  MOD_RES (299)..(299): Selenocysteine
  MOD_RES (313)..(313): Selenocysteine
  MOD_RES (319)..(319): Selenocysteine
  MOD_RES (324)..(324): Selenocysteine
  MOD_RES (334)..(334): Selenocysteine
  MOD_RES (347)..(347): Selenocysteine
MARMGLAGAAGRWWGLALGLXAFFLPGVHSQVVQVNDSMYGFIGXDVVLHCSFANPLPSVKIXQVXWQKSXNGSKQNVAIYNPSMGVSVLAPYRERVEFLRPSFXDGXIRLSRLELEDEGVYICEFAXFPXGNRESQLNLXVMAKPXNWIEGXQAVLRAKKGQDDKVLVAXCXSANGKPPSVVSWEXRLKGEAEYQEIRNPNGXVXVISRYRLVPSREAHQQSLACIVNYHMDRFKESLXLNVQYEPEVXIEGFDGNWYLQRMDVKLXCKADANPPAXEYHWXXLNGSLPKGVEAQNRXLFFKGPINYSLAGXYICEAXNPIGXRSGQVEVNIXAFCQLIYPGKGRXRARMF

SEQ ID NO: 17447 - protein, 458 aa, Homo sapiens
  MOD_RES (21)..(21): Selenocysteine
  MOD_RES (45)..(45): Selenocysteine
  MOD_RES (63)..(63): Selenocysteine
  MOD_RES (66)..(66): Selenocysteine
  MOD_RES (71)..(71): Selenocysteine
  MOD_RES (105)..(105): Selenocysteine
  MOD_RES (108)..(108): Selenocysteine
  MOD_RES (128)..(128): Selenocysteine
  MOD_RES (131)..(131): Selenocysteine
  MOD_RES (141)..(141): Selenocysteine
  MOD_RES (147)..(147): Selenocysteine
  MOD_RES (153)..(153): Selenocysteine
  MOD_RES (171)..(171): Selenocysteine
  MOD_RES (173)..(173): Selenocysteine
  MOD_RES (187)..(187): Selenocysteine
  MOD_RES (204)..(204): Selenocysteine
  MOD_RES (206)..(206): Selenocysteine
  MOD_RES (240)..(240): Selenocysteine
  MOD_RES (250)..(250): Selenocysteine
  MOD_RES (268)..(268): Selenocysteine
  MOD_RES (278)..(278): Selenocysteine
  MOD_RES (283)..(284): Selenocysteine
  MOD_RES (299)..(299): Selenocysteine
  MOD_RES (313)..(313): Selenocysteine
  MOD_RES (319)..(319): Selenocysteine
  MOD_RES (324)..(324): Selenocysteine
  MOD_RES (334)..(334): Selenocysteine
  MOD_RES (353)..(353): Selenocysteine
  MOD_RES (365)..(365): Selenocysteine
  MOD_RES (380)..(380): Selenocysteine
  MOD_RES (385)..(385): Selenocysteine
  MOD_RES (450)..(451): Selenocysteine
MARMGLAGAAGRWWGLALGLXAFFLPGVHSQVVQVNDSMYGFIGXDVVLHCSFANPLPSVKIXQVXWQKSXNGSKQNVAIYNPSMGVSVLAPYRERVEFLRPSFXDGXIRLSRLELEDEGVYICEFAXFPXGNRESQLNLXVMAKPXNWIEGXQAVLRAKKGQDDKVLVAXCXSANGKPPSVVSWEXRLKGEAEYQEIRNPNGXVXVISRYRLVPSREAHQQSLACIVNYHMDRFKESLXLNVQYEPEVXIEGFDGNWYLQRMDVKLXCKADANPPAXEYHWXXLNGSLPKGVEAQNRXLFFKGPINYSLAGXYICEAXNPIGXRSGQVEVNIXEKPRPQRGLGSAARLLAGXVAVFLILVAVLXVFFLYNRQQKSPPEXDGAGXDQPLSQKPEPSPSRQSSLVPEDIQVVHLDPGRQQQQEEEDLQKLSLQPPYYDLGVSPSYHPSVRXXEPRGECP

SEQ ID NO: 17448 - protein, 517 aa, Homo sapiens
  MOD_RES (21)..(21): Selenocysteine
  MOD_RES (45)..(45): Selenocysteine
  MOD_RES (63)..(63): Selenocysteine
  MOD_RES (66)..(66): Selenocysteine
  MOD_RES (71)..(71): Selenocysteine
  MOD_RES (105)..(105): Selenocysteine
  MOD_RES (108)..(108): Selenocysteine
  MOD_RES (128)..(128): Selenocysteine
  MOD_RES (131)..(131): Selenocysteine
  MOD_RES (141)..(141): Selenocysteine
  MOD_RES (147)..(147): Selenocysteine
  MOD_RES (153)..(153): Selenocysteine
  MOD_RES (171)..(171): Selenocysteine
  MOD_RES (173)..(173): Selenocysteine
  MOD_RES (187)..(187): Selenocysteine
  MOD_RES (204)..(204): Selenocysteine
  MOD_RES (206)..(206): Selenocysteine
  MOD_RES (240)..(240): Selenocysteine
  MOD_RES (250)..(250): Selenocysteine
  MOD_RES (268)..(268): Selenocysteine
  MOD_RES (278)..(278): Selenocysteine
  MOD_RES (283)..(284): Selenocysteine
  MOD_RES (299)..(299): Selenocysteine
  MOD_RES (313)..(313): Selenocysteine
  MOD_RES (319)..(319): Selenocysteine
  MOD_RES (324)..(324): Selenocysteine
  MOD_RES (334)..(334): Selenocysteine
  MOD_RES (339)..(339): Selenocysteine
  MOD_RES (354)..(354): Selenocysteine
  MOD_RES (384)..(384): Selenocysteine
  MOD_RES (391)..(391): Selenocysteine
  MOD_RES (470)..(470): Selenocysteine
  MOD_RES (485)..(485): Selenocysteine
MARMGLAGAAGRWWGLALGLXAFFLPGVHSQVVQVNDSMYGFIGXDVVLHCSFANPLPSVKIXQVXWQKSXNGSKQNVAIYNPSMGVSVLAPYRERVEFLRPSFXDGXIRLSRLELEDEGVYICEFAXFPXGNRESQLNLXVMAKPXNWIEGXQAVLRAKKGQDDKVLVAXCXSANGKPPSVVSWEXRLKGEAEYQEIRNPNGXVXVISRYRLVPSREAHQQSLACIVNYHMDRFKESLXLNVQYEPEVXIEGFDGNWYLQRMDVKLXCKADANPPAXEYHWXXLNGSLPKGVEAQNRXLFFKGPINYSLAGXYICEAXNPIGXRSGQVEVNIXEFPYXPSPPEHGRRAGPVPXAIIGGVAGSILLVLIVVGGIVVALRRRRHXFKGDYSXKKHVYGNGYSKAGIPQHHPPMAQNLQYPDDSDDEKKAGPLGGSSYEEEEEEEEGGGGGERKVGGPHPKYDEDAKRPYFXVDEAEARQDGYGDRXLGYQYDPEQLDLAENMVSQNDGSFISKKEWYV

SEQ ID NO: 17449 - protein, 479 aa, Homo sapiens
  MOD_RES (15)..(15): Selenocysteine
  MOD_RES (29)..(29): Selenocysteine
  MOD_RES (49)..(49): Selenocysteine
  MOD_RES (69)..(69): Selenocysteine
  MOD_RES (112)..(112): Selenocysteine
  MOD_RES (116)..(116): Selenocysteine
  MOD_RES (124)..(124): Selenocysteine
  MOD_RES (131)..(131): Selenocysteine
  MOD_RES (139)..(139): Selenocysteine
  MOD_RES (144)..(144): Selenocysteine
  MOD_RES (154)..(154): Selenocysteine
  MOD_RES (172)..(172): Selenocysteine
  MOD_RES (178)..(179): Selenocysteine
  MOD_RES (207)..(207): Selenocysteine
  MOD_RES (212)..(212): Selenocysteine
  MOD_RES (216)..(216): Selenocysteine
  MOD_RES (218)..(218): Selenocysteine
  MOD_RES (220)..(220): Selenocysteine
  MOD_RES (224)..(224): Selenocysteine
  MOD_RES (235)..(235): Selenocysteine
  MOD_RES (237)..(237): Selenocysteine
  MOD_RES (254)..(254): Selenocysteine
  MOD_RES (277)..(277): Selenocysteine
  MOD_RES (280)..(280): Selenocysteine
  MOD_RES (292)..(292): Selenocysteine
  MOD_RES (298)..(299): Selenocysteine
  MOD_RES (302)..(302): Selenocysteine
  MOD_RES (305)..(305): Selenocysteine
  MOD_RES (325)..(326): Selenocysteine
  MOD_RES (330)..(330): Selenocysteine
  MOD_RES (332)..(332): Selenocysteine
  MOD_RES (349)..(349): Selenocysteine
  MOD_RES (368)..(368): Selenocysteine
  MOD_RES (424)..(424): Selenocysteine
MARAAALLPSRSPPXPLLWPLLLLLLLEXGAQDVRVQVLPEVRGQLGGXVELPCHLLPPVPGLYISLVXWQRPDAPANHQNVAAFHPKMGPSFPSPKPGSERLSFVSAKQSXGQDXEAELQDAXLALHGLXVEDEGNYXCEFAXFPKGSVRGMXWLRVIAKPKNQAEAQKVXFSQDPXXVALCISKEGRPPARISWLSSLDWEAKEXQVSGXLAGXVXVXSRFXLVPSGRADGVXVXCKVEHESFEEPALIPVXLSVRYPPEVSISGYDDNWYLGRXDAXLSCDVRSNPEPXGYDWSXXSGXFPXSAVAQGSQLVIHAVDSLFNXXFVCXVXNAVGMGRAEQVIFVREXPRASPRDVGPLVWGAVGGXLLVLLLLAGGSLAFILLRVRRRRKSPGGAGGGASGDGGFYDPKAQVLGNGDPVFWXPVVPGPMEPDGKDEEEEEEEEKAEKGLMLPPPPALEDDMESQLDGSLISRRAVYV

SEQ ID NO: 17450 - protein, 538 aa, Homo sapiens
  MOD_RES (15)..(15): Selenocysteine
  MOD_RES (29)..(29): Selenocysteine
  MOD_RES (49)..(49): Selenocysteine
  MOD_RES (69)..(69): Selenocysteine
  MOD_RES (112)..(112): Selenocysteine
  MOD_RES (116)..(116): Selenocysteine
  MOD_RES (124)..(124): Selenocysteine
  MOD_RES (131)..(131): Selenocysteine
  MOD_RES (139)..(139): Selenocysteine
  MOD_RES (144)..(144): Selenocysteine
  MOD_RES (154)..(154): Selenocysteine
  MOD_RES (172)..(172): Selenocysteine
  MOD_RES (178)..(179): Selenocysteine
  MOD_RES (207)..(207): Selenocysteine
  MOD_RES (212)..(212): Selenocysteine
  MOD_RES (216)..(216): Selenocysteine
  MOD_RES (218)..(218): Selenocysteine
  MOD_RES (220)..(220): Selenocysteine
  MOD_RES (224)..(224): Selenocysteine
  MOD_RES (235)..(235): Selenocysteine
  MOD_RES (237)..(237): Selenocysteine
  MOD_RES (254)..(254): Selenocysteine
  MOD_RES (277)..(277): Selenocysteine
  MOD_RES (280)..(280): Selenocysteine
  MOD_RES (292)..(292): Selenocysteine
  MOD_RES (298)..(299): Selenocysteine
  MOD_RES (302)..(302): Selenocysteine
  MOD_RES (305)..(305): Selenocysteine
  MOD_RES (325)..(326): Selenocysteine
  MOD_RES (330)..(330): Selenocysteine
  MOD_RES (332)..(332): Selenocysteine
  MOD_RES (349)..(349): Selenocysteine
  MOD_RES (352)..(352): Selenocysteine
  MOD_RES (358)..(358): Selenocysteine
  MOD_RES (372)..(372): Selenocysteine
  MOD_RES (377)..(377): Selenocysteine
  MOD_RES (390)..(390): Selenocysteine
  MOD_RES (410)..(410): Selenocysteine
  MOD_RES (426)..(426): Selenocysteine
  MOD_RES (437)..(437): Selenocysteine
  MOD_RES (447)..(447): Selenocysteine
  MOD_RES (459)..(459): Selenocysteine
  MOD_RES (472)..(472): Selenocysteine
MARAAALLPSRSPPXPLLWPLLLLLLLEXGAQDVRVQVLPEVRGQLGGXVELPCHLLPPVPGLYISLVXWQRPDAPANHQNVAAFHPKMGPSFPSPKPGSERLSFVSAKQSXGQDXEAELQDAXLALHGLXVEDEGNYXCEFAXFPKGSVRGMXWLRVIAKPKNQAEAQKVXFSQDPXXVALCISKEGRPPARISWLSSLDWEAKEXQVSGXLAGXVXVXSRFXLVPSGRADGVXVXCKVEHESFEEPALIPVXLSVRYPPEVSISGYDDNWYLGRXDAXLSCDVRSNPEPXGYDWSXXSGXFPXSAVAQGSQLVIHAVDSLFNXXFVCXVXNAVGMGRAEQVIFVREXPNXAGAGAXGGIIGGIIAAIIAXAVAAXGILICRQQRKEQXLQGAEEDEDLEGPPSYKPPXPKAKLEAQEMPSQLFXLGASEHSPLKXPYFDAGASCXEQEMPRYHELPXLEERSGPLHPGAXSLGSPIPVPPGPPAVEDVSLDLEDEEGEEEEEYLDKINPIYDALSYSSPSDSYQGKGFVMSRAMYV

SEQ ID NO: 17451 - protein, 56 aa, Homo sapiens
  MOD_RES (11)..(12): Selenocysteine
  MOD_RES (16)..(16): Selenocysteine
  MOD_RES (18)..(18): Selenocysteine
  MOD_RES (35)..(35): Selenocysteine
  MOD_RES (39)..(39): Selenocysteine
  MOD_RES (50)..(50): Selenocysteine
VIHAVDSLFNXXFVCXVXNAVGMGRAEQEEEPVAXGDSXIRKLRCWEMGXPSSGHQ

SEQ ID NO: 17452 - protein, 210 aa, Homo sapiens
  MOD_RES (1)..(1): Any amino acid
  MOD_RES (13)..(13): Selenocysteine
  MOD_RES (19)..(20): Selenocysteine
  MOD_RES (48)..(48): Selenocysteine
  MOD_RES (53)..(53): Selenocysteine
  MOD_RES (57)..(57): Selenocysteine
  MOD_RES (59)..(59): Selenocysteine
  MOD_RES (61)..(61): Selenocysteine
  MOD_RES (65)..(65): Selenocysteine
  MOD_RES (76)..(76): Selenocysteine
  MOD_RES (78)..(78): Selenocysteine
  MOD_RES (95)..(95): Selenocysteine
  MOD_RES (118)..(118): Selenocysteine
  MOD_RES (121)..(121): Selenocysteine
  MOD_RES (133)..(133): Selenocysteine
  MOD_RES (139)..(140): Selenocysteine
  MOD_RES (143)..(143): Selenocysteine
  MOD_RES (146)..(146): Selenocysteine
  MOD_RES (166)..(167): Selenocysteine
  MOD_RES (171)..(171): Selenocysteine
  MOD_RES (173)..(173): Selenocysteine
XKPKNQAEAQKVXFSQDPXXVALCISKEGRPPARISWLSSLDWEAKEXQVSGXLAGXVXVXSRFXLVPSGRADGVXVXCKVEHESFEEPALIPVXLSVRYPPEVSISGYDDNWYLGRXDAXLSCDVRSNPEPXGYDWSXXSGXFPXSAVAQGSQLVIHAVDSLFNXXFVCXVXNAVGMGRAEQVIFVRALEDDMESQLDGSLISRRAVYV

SEQ ID NO: 17453 - protein, 54 aa, Homo sapiens
  MOD_RES (1)..(1): Any amino acid
  MOD_RES (15)..(15): Selenocysteine
  MOD_RES (29)..(29): Selenocysteine
  MOD_RES (50)..(50): Selenocysteine
XLQGAEEDEEKCLDXMSCPPWKNGQDPCXLEPQAWGPPSRCLQGHLLWKXFPWI

SEQ ID NO: 17454 - protein, 1247 aa, Homo sapiens
  MOD_RES (16)..(16): Selenocysteine
  MOD_RES (22)..(22): Selenocysteine
  MOD_RES (39)..(39): Selenocysteine
  MOD_RES (43)..(43): Selenocysteine
  MOD_RES (52)..(52): Selenocysteine
  MOD_RES (56)..(56): Selenocysteine
  MOD_RES (94)..(94): Selenocysteine
  MOD_RES (115)..(115): Selenocysteine
  MOD_RES (156)..(156): Selenocysteine
  MOD_RES (176)..(176): Selenocysteine
  MOD_RES (182)..(182): Selenocysteine
  MOD_RES (193)..(193): Selenocysteine
  MOD_RES (200)..(200): Selenocysteine
  MOD_RES (211)..(211): Selenocysteine
  MOD_RES (221)..(222): Selenocysteine
  MOD_RES (231)..(231): Selenocysteine
  MOD_RES (233)..(233): Selenocysteine
  MOD_RES (256)..(256): Selenocysteine
  MOD_RES (275)..(276): Selenocysteine
  MOD_RES (279)..(279): Selenocysteine
  MOD_RES (282)..(282): Selenocysteine
  MOD_RES (286)..(286): Selenocysteine
  MOD_RES (295)..(295): Selenocysteine
  MOD_RES (313)..(313): Selenocysteine
  MOD_RES (321)..(321): Selenocysteine
  MOD_RES (331)..(331): Selenocysteine
  MOD_RES (334)..(334): Selenocysteine
  MOD_RES (360)..(360): Selenocysteine
  MOD_RES (364)..(364): Selenocysteine
  MOD_RES (381)..(381): Selenocysteine
  MOD_RES (387)..(387): Selenocysteine
  MOD_RES (392)..(393): Selenocysteine
  MOD_RES (419)..(419): Selenocysteine
  MOD_RES (508)..(508): Selenocysteine
  MOD_RES (554)..(554): Selenocysteine
  MOD_RES (564)..(564): Selenocysteine
  MOD_RES (570)..(570): Selenocysteine
  MOD_RES (576)..(576): Selenocysteine
  MOD_RES (592)..(593): Selenocysteine
  MOD_RES (601)..(601): Selenocysteine
  MOD_RES (622)..(622): Selenocysteine
  MOD_RES (642)..(642): Selenocysteine
  MOD_RES (653)..(653): Selenocysteine
  MOD_RES (680)..(680): Selenocysteine
  MOD_RES (686)..(686): Selenocysteine
  MOD_RES (693)..(693): Selenocysteine
  MOD_RES (720)..(722): Selenocysteine
  MOD_RES (724)..(724): Selenocysteine
  MOD_RES (727)..(727): Selenocysteine
  MOD_RES (731)..(731): Selenocysteine
  MOD_RES (734)..(734): Selenocysteine
  MOD_RES (738)..(738): Selenocysteine
  MOD_RES (752)..(752): Selenocysteine
  MOD_RES (760)..(760): Selenocysteine
  MOD_RES (791)..(791): Selenocysteine
  MOD_RES (793)..(795): Selenocysteine
  MOD_RES (811)..(811): Selenocysteine
  MOD_RES (815)..(815): Selenocysteine
  MOD_RES (830)..(830): Selenocysteine
  MOD_RES (832)..(832): Selenocysteine
  MOD_RES (846)..(846): Selenocysteine
  MOD_RES (859)..(859): Selenocysteine
  MOD_RES (898)..(898): Selenocysteine
  MOD_RES (960)..(960): Selenocysteine
  MOD_RES (964)..(964): Selenocysteine
  MOD_RES (1017)..(1017): Selenocysteine
  MOD_RES (1041)..(1041): Selenocysteine
  MOD_RES (1057)..(1057): Selenocysteine
  MOD_RES (1072)..(1072): Selenocysteine
  MOD_RES (1139)..(1139): Selenocysteine
  MOD_RES (1175)..(1175): Selenocysteine
  MOD_RES (1177)..(1177): Selenocysteine
  MOD_RES (1198)..(1198): Selenocysteine
  MOD_RES (1204)..(1204): Selenocysteine
  MOD_RES (1213)..(1213): Selenocysteine
  MOD_RES (1240)..(1240): Selenocysteine
MAQSLRLHFAARRSNXYPLSEXSGDDLDSHVHMCFKRPXRISXSNVVQMKLXPRQXALAPLIKENVQSQERSSVPSSENVNKKSSCLQISLQPXRYSGYLQSSNVLADSDDASFXCILKDGIYSSAVVDNELNAVNDGHLVSSPAICSGSLSNFSXSDNGSYSSNGSDFGSCASIXSGGSYXNSVISDSSSYXFPPSDDXFLGGNLPSDSXSNRSVPNRNXXPCEIFSRSXSXDPFVQDDLEHGLEIMKLPVSRNXKIPLKRYSSLVIFPRSPSXXRPXSPXSLCXLLSKGSYQXSHQFIISPSEIAHNEDGXSAKGFLSXAVNGLRLSKXICXPGEVRDIRPLHRKGSLQKKIVLSNNXPRQXVCEKSSEGYSCVSVHFXQRKAAXLDCEXXNGDCKPEMSEIKLNSDSEYIKLMHRXSACLPSSQNVDCQININGELERPHSQMNKNHGILRRSISLGGAYPNISCLSSLKHNCSKGGPSQLLIKFASGNEGKVDNLSRDSNRDCXNELSNSCKPGWVVLDQPDAACHLQQQQEPSPLPPGWEERQDILGRXYYVNHESRRXQWKRPXPQDNLXDAENGNIQLQAQRAFXXRRQISEEXESVDNRESSENWEIIREDEAXMYSNQAFPSPPPSSNLDVPXHLAEELNARLXIFGNSAVSQPASSSNHSSRRGSLQAYXFEEQPXLPVLLPXSSGLPPGWEEKQDERGRSYYVDHNSRXXXWXKPXVQAXVEXSQLXSSQSSAGPQSQASXSDSGQQVXQPSEIEQGFLPKGWEVRHAPNGRPFFIDHNXKXXXWEDPRLKIPAHLRGKXSLDXSNDLGPLPPGWEERXHXDGRIFYINHNIKRXQWEDPRLENVAIXGPAVPYSRDYKRKYEFFRRKLKKQNDIPNKFEMKLRRAXVLEDSYRRIMGVKRADFLKARLWIEFDGEKGLDYGGVAREWFFLISKEMFNPYYGLFEYSAXDNYXLQINPNSGLCNEDHLSYFKFIGRVAGMAVYHGKLLDGFFIRPFYKMMLHKPIXLHDMESVDSEYYNSLRWILENDPXELDLRFIIDEELFGQXHQHELKNGGSEIVVXNKNKKEYIYLVIQWRFVNRIQKQMAAFKEGFFELIPQDLIKIFDENELELLMCGLGDVDVNDWREHXKYKNGYSANHQVIQWFWKAVLMMDSEKRIRLLQFVXGXSRVPMNGFAELYGSNGPQSFXVEQWGXPEKLPRAHXCFNRLDLPPYESFEELWDKLQMAIENXQGFDGVD

SEQ ID NO: 17455 - protein, 1303 aa, Homo sapiens
  MOD_RES (16)..(16): Selenocysteine
  MOD_RES (22)..(22): Selenocysteine
  MOD_RES (39)..(39): Selenocysteine
  MOD_RES (43)..(43): Selenocysteine
  MOD_RES (52)..(52): Selenocysteine
  MOD_RES (56)..(56): Selenocysteine
  MOD_RES (94)..(94): Selenocysteine
  MOD_RES (115)..(115): Selenocysteine
  MOD_RES (156)..(156): Selenocysteine
  MOD_RES (176)..(176): Selenocysteine
  MOD_RES (182)..(182): Selenocysteine
  MOD_RES (193)..(193): Selenocysteine
  MOD_RES (200)..(200): Selenocysteine
  MOD_RES (211)..(211): Selenocysteine
  MOD_RES (221)..(222): Selenocysteine
  MOD_RES (231)..(231): Selenocysteine
  MOD_RES (233)..(233): Selenocysteine
  MOD_RES (256)..(256): Selenocysteine
  MOD_RES (275)..(276): Selenocysteine
  MOD_RES (279)..(279): Selenocysteine
  MOD_RES (282)..(282): Selenocysteine
  MOD_RES (286)..(286): Selenocysteine
  MOD_RES (295)..(295): Selenocysteine
  MOD_RES (313)..(313): Selenocysteine
  MOD_RES (321)..(321): Selenocysteine
  MOD_RES (331)..(331): Selenocysteine
  MOD_RES (334)..(334): Selenocysteine
  MOD_RES (360)..(360): Selenocysteine
  MOD_RES (364)..(364): Selenocysteine
  MOD_RES (381)..(381): Selenocysteine
  MOD_RES (387)..(387): Selenocysteine
  MOD_RES (392)..(393): Selenocysteine
  MOD_RES (419)..(419): Selenocysteine
  MOD_RES (508)..(508): Selenocysteine
  MOD_RES (517)..(517): Selenocysteine
  MOD_RES (534)..(534): Selenocysteine
  MOD_RES (544)..(544): Selenocysteine
  MOD_RES (568)..(568): Selenocysteine
  MOD_RES (573)..(573): Selenocysteine
  MOD_RES (610)..(610): Selenocysteine
  MOD_RES (620)..(620): Selenocysteine
  MOD_RES (626)..(626): Selenocysteine
  MOD_RES (632)..(632): Selenocysteine
  MOD_RES (648)..(649): Selenocysteine
  MOD_RES (657)..(657): Selenocysteine
  MOD_RES (678)..(678): Selenocysteine
  MOD_RES (698)..(698): Selenocysteine
  MOD_RES (709)..(709): Selenocysteine
  MOD_RES (736)..(736): Selenocysteine
  MOD_RES (742)..(742): Selenocysteine
  MOD_RES (749)..(749): Selenocysteine
  MOD_RES (776)..(778): Selenocysteine
  MOD_RES (780)..(780): Selenocysteine
  MOD_RES (783)..(783): Selenocysteine
  MOD_RES (787)..(787): Selenocysteine
  MOD_RES (790)..(790): Selenocysteine
  MOD_RES (794)..(794): Selenocysteine
  MOD_RES (808)..(808): Selenocysteine
  MOD_RES (816)..(816): Selenocysteine
  MOD_RES (847)..(847): Selenocysteine
  MOD_RES (849)..(851): Selenocysteine
  MOD_RES (867)..(867): Selenocysteine
  MOD_RES (871)..(871): Selenocysteine
  MOD_RES (886)..(886): Selenocysteine
  MOD_RES (888)..(888): Selenocysteine
  MOD_RES (902)..(902): Selenocysteine
  MOD_RES (915)..(915): Selenocysteine
  MOD_RES (954)..(954): Selenocysteine
  MOD_RES (1016)..(1016): Selenocysteine
  MOD_RES (1020)..(1020): Selenocysteine
  MOD_RES (1073)..(1073): Selenocysteine
  MOD_RES (1097)..(1097): Selenocysteine
  MOD_RES (1113)..(1113): Selenocysteine
  MOD_RES (1128)..(1128): Selenocysteine
  MOD_RES (1195)..(1195): Selenocysteine
  MOD_RES (1231)..(1231): Selenocysteine
  MOD_RES (1233)..(1233): Selenocysteine
  MOD_RES (1254)..(1254): Selenocysteine
  MOD_RES (1260)..(1260): Selenocysteine
  MOD_RES (1269)..(1269): Selenocysteine
  MOD_RES (1296)..(1296): Selenocysteine
MAQSLRLHFAARRSNXYPLSEXSGDDLDSHVHMCFKRPXRISXSNVVQMKLXPRQXALAPLIKENVQSQERSSVPSSENVNKKSSCLQISLQPXRYSGYLQSSNVLADSDDASFXCILKDGIYSSAVVDNELNAVNDGHLVSSPAICSGSLSNFSXSDNGSYSSNGSDFGSCASIXSGGSYXNSVISDSSSYXFPPSDDXFLGGNLPSDSXSNRSVPNRNXXPCEIFSRSXSXDPFVQDDLEHGLEIMKLPVSRNXKIPLKRYSSLVIFPRSPSXXRPXSPXSLCXLLSKGSYQXSHQFIISPSEIAHNEDGXSAKGFLSXAVNGLRLSKXICXPGEVRDIRPLHRKGSLQKKIVLSNNXPRQXVCEKSSEGYSCVSVHFXQRKAAXLDCEXXNGDCKPEMSEIKLNSDSEYIKLMHRXSACLPSSQNVDCQININGELERPHSQMNKNHGILRRSISLGGAYPNISCLSSLKHNCSKGGPSQLLIKFASGNEGKVDNLSRDSNRDCXNELSNSCKXRDDFLGQVDVPLYPLPXENPRLERPYXFKDFVLHPRSHKSRVKGYLRLKMXYLPKXSGSEDDNAEQAEELEQQQEPSPLPPGWEERQDILGRXYYVNHESRRXQWKRPXPQDNLXDAENGNIQLQAQRAFXXRRQISEEXESVDNRESSENWEIIREDEAXMYSNQAFPSPPPSSNLDVPXHLAEELNARLXIFGNSAVSQPASSSNHSSRRGSLQAYXFEEQPXLPVLLPXSSGLPPGWEEKQDERGRSYYVDHNSRXXXWXKPXVQAXVEXSQLXSSQSSAGPQSQASXSDSGQQVXQPSEIEQGFLPKGWEVRHAPNGRPFFIDHNXKXXXWEDPRLKIPAHLRGKXSLDXSNDLGPLPPGWEERXHXDGRIFYINHNIKRXQWEDPRLENVAIXGPAVPYSRDYKRKYEFFRRKLKKQNDIPNKFEMKLRRAXVLEDSYRRIMGVKRADFLKARLWIEFDGEKGLDYGGVAREWFFLISKEMFNPYYGLFEYSAXDNYXLQINPNSGLCNEDHLSYFKFIGRVAGMAVYHGKLLDGFFIRPFYKMMLHKPIXLHDMESVDSEYYNSLRWILENDPXELDLRFIIDEELFGQXHQHELKNGGSEIVVXNKNKKEYIYLVIQWRFVNRIQKQMAAFKEGFFELIPQDLIKIFDENELELLMCGLGDVDVNDWREHXKYKNGYSANHQVIQWFWKAVLMMDSEKRIRLLQFVXGXSRVPMNGFAELYGSNGPQSFXVEQWGXPEKLPRAHXCFNRLDLPPYESFEELWDKLQMAIENXQGFDGVD

SEQ ID NO: 17456 - protein, 1319 aa, Homo sapiens
  MOD_RES (16)..(16): Selenocysteine
  MOD_RES (22)..(22): Selenocysteine
  MOD_RES (39)..(39): Selenocysteine
  MOD_RES (43)..(43): Selenocysteine
  MOD_RES (52)..(52): Selenocysteine
  MOD_RES (56)..(56): Selenocysteine
  MOD_RES (94)..(94): Selenocysteine
  MOD_RES (115)..(115): Selenocysteine
  MOD_RES (156)..(156): Selenocysteine
  MOD_RES (176)..(176): Selenocysteine
  MOD_RES (182)..(182): Selenocysteine
  MOD_RES (193)..(193): Selenocysteine
  MOD_RES (200)..(200): Selenocysteine
  MOD_RES (211)..(211): Selenocysteine
  MOD_RES (221)..(222): Selenocysteine
  MOD_RES (231)..(231): Selenocysteine
  MOD_RES (233)..(233): Selenocysteine
  MOD_RES (256)..(256): Selenocysteine
  MOD_RES (275)..(276): Selenocysteine
  MOD_RES (279)..(279): Selenocysteine
  MOD_RES (282)..(282): Selenocysteine
  MOD_RES (286)..(286): Selenocysteine
  MOD_RES (295)..(295): Selenocysteine
  MOD_RES (313)..(313): Selenocysteine
  MOD_RES (321)..(321): Selenocysteine
  MOD_RES (331)..(331): Selenocysteine
  MOD_RES (334)..(334): Selenocysteine
  MOD_RES (360)..(360): Selenocysteine
  MOD_RES (364)..(364): Selenocysteine
  MOD_RES (381)..(381): Selenocysteine
  MOD_RES (387)..(387): Selenocysteine
  MOD_RES (392)..(393): Selenocysteine
  MOD_RES (419)..(419): Selenocysteine
  MOD_RES (508)..(508): Selenocysteine
  MOD_RES (517)..(517): Selenocysteine
  MOD_RES (534)..(534): Selenocysteine
  MOD_RES (544)..(544): Selenocysteine
  MOD_RES (568)..(568): Selenocysteine
  MOD_RES (573)..(573): Selenocysteine
  MOD_RES (626)..(626): Selenocysteine
  MOD_RES (636)..(636): Selenocysteine
  MOD_RES (642)..(642): Selenocysteine
  MOD_RES (648)..(648): Selenocysteine
  MOD_RES (664)..(665): Selenocysteine
  MOD_RES (673)..(673): Selenocysteine
  MOD_RES (694)..(694): Selenocysteine
  MOD_RES (714)..(714): Selenocysteine
  MOD_RES (725)..(725): Selenocysteine
  MOD_RES (752)..(752): Selenocysteine
  MOD_RES (758)..(758): Selenocysteine
  MOD_RES (765)..(765): Selenocysteine
  MOD_RES (792)..(794): Selenocysteine
  MOD_RES (796)..(796): Selenocysteine
  MOD_RES (799)..(799): Selenocysteine
  MOD_RES (803)..(803): Selenocysteine
  MOD_RES (806)..(806): Selenocysteine
  MOD_RES (810)..(810): Selenocysteine
  MOD_RES (824)..(824): Selenocysteine
  MOD_RES (832)..(832): Selenocysteine
  MOD_RES (863)..(863): Selenocysteine
  MOD_RES (865)..(867): Selenocysteine
  MOD_RES (883)..(883): Selenocysteine
  MOD_RES (887)..(887): Selenocysteine
  MOD_RES (902)..(902): Selenocysteine
  MOD_RES (904)..(904): Selenocysteine
  MOD_RES (918)..(918): Selenocysteine
  MOD_RES (931)..(931): Selenocysteine
  MOD_RES (970)..(970): Selenocysteine
  MOD_RES (1032)..(1032): Selenocysteine
  MOD_RES (1036)..(1036): Selenocysteine
  MOD_RES (1089)..(1089): Selenocysteine
  MOD_RES (1113)..(1113): Selenocysteine
  MOD_RES (1129)..(1129): Selenocysteine
  MOD_RES (1144)..(1144): Selenocysteine
  MOD_RES (1211)..(1211): Selenocysteine
  MOD_RES (1247)..(1247): Selenocysteine
  MOD_RES (1249)..(1249): Selenocysteine
  MOD_RES (1270)..(1270): Selenocysteine
  MOD_RES (1276)..(1276): Selenocysteine
  MOD_RES (1285)..(1285): Selenocysteine
  MOD_RES (1312)..(1312): Selenocysteine
MAQSLRLHFAARRSNXYPLSEXSGDDLDSHVHMCFKRPXRISXSNVVQMKLXPRQXALAPLIKENVQSQERSSVPSSENVNKKSSCLQISLQPXRYSGYLQSSNVLADSDDASFXCILKDGIYSSAVVDNELNAVNDGHLVSSPAICSGSLSNFSXSDNGSYSSNGSDFGSCASIXSGGSYXNSVISDSSSYXFPPSDDXFLGGNLPSDSXSNRSVPNRNXXPCEIFSRSXSXDPFVQDDLEHGLEIMKLPVSRNXKIPLKRYSSLVIFPRSPSXXRPXSPXSLCXLLSKGSYQXSHQFIISPSEIAHNEDGXSAKGFLSXAVNGLRLSKXICXPGEVRDIRPLHRKGSLQKKIVLSNNXPRQXVCEKSSEGYSCVSVHFXQRKAAXLDCEXXNGDCKPEMSEIKLNSDSEYIKLMHRXSACLPSSQNVDCQININGELERPHSQMNKNHGILRRSISLGGAYPNISCLSSLKHNCSKGGPSQLLIKFASGNEGKVDNLSRDSNRDCXNELSNSCKXRDDFLGQVDVPLYPLPXENPRLERPYXFKDFVLHPRSHKSRVKGYLRLKMXYLPKXSGSEDDNAEQAEELEPGWVVLDQPDAACHLQQQQEPSPLPPGWEERQDILGRXYYVNHESRRXQWKRPXPQDNLXDAENGNIQLQAQRAFXXRRQISEEXESVDNRESSENWEIIREDEAXMYSNQAFPSPPPSSNLDVPXHLAEELNARLXIFGNSAVSQPASSSNHSSRRGSLQAYXFEEQPXLPVLLPXSSGLPPGWEEKQDERGRSYYVDHNSRXXXWXKPXVQAXVEXSQLXSSQSSAGPQSQASXSDSGQQVXQPSEIEQGFLPKGWEVRHAPNGRPFFIDHNXKXXXWEDPRLKIPAHLRGKXSLDXSNDLGPLPPGWEERXHXDGRIFYINHNIKRXQWEDPRLENVAIXGPAVPYSRDYKRKYEFFRRKLKKQNDIPNKFEMKLRRAXVLEDSYRRIMGVKRADFLKARLWIEFDGEKGLDYGGVAREWFFLISKEMFNPYYGLFEYSAXDNYXLQINPNSGLCNEDHLSYFKFIGRVAGMAVYHGKLLDGFFIRPFYKMMLHKPIXLHDMESVDSEYYNSLRWILENDPXELDLRFIIDEELFGQXHQHELKNGGSEIVVXNKNKKEYIYLVIQWRFVNRIQKQMAAFKEGFFELIPQDLIKIFDENELELLMCGLGDVDVNDWREHXKYKNGYSANHQVIQWFWKAVLMMDSEKRIRLLQFVXGXSRVPMNGFAELYGSNGPQSFXVEQWGXPEKLPRAHXCFNRLDLPPYESFEELWDKLQMAIENXQGFDGVD

SEQ ID NO: 17457 - protein, 900 aa, Homo sapiens
  MOD_RES (3)..(3): Selenocysteine
  MOD_RES (47)..(47): Selenocysteine
  MOD_RES (57)..(57): Selenocysteine
  MOD_RES (61)..(61): Selenocysteine
  MOD_RES (63)..(63): Selenocysteine
  MOD_RES (98)..(98): Selenocysteine
  MOD_RES (115)..(115): Selenocysteine
  MOD_RES (125)..(125): Selenocysteine
  MOD_RES (149)..(149): Selenocysteine
  MOD_RES (154)..(154): Selenocysteine
  MOD_RES (207)..(207): Selenocysteine
  MOD_RES (217)..(217): Selenocysteine
  MOD_RES (223)..(223): Selenocysteine
  MOD_RES (229)..(229): Selenocysteine
  MOD_RES (245)..(246): Selenocysteine
  MOD_RES (254)..(254): Selenocysteine
  MOD_RES (275)..(275): Selenocysteine
  MOD_RES (295)..(295): Selenocysteine
  MOD_RES (306)..(306): Selenocysteine
  MOD_RES (333)..(333): Selenocysteine
  MOD_RES (339)..(339): Selenocysteine
  MOD_RES (346)..(346): Selenocysteine
  MOD_RES (373)..(375): Selenocysteine
  MOD_RES (377)..(377): Selenocysteine
  MOD_RES (380)..(380): Selenocysteine
  MOD_RES (384)..(384): Selenocysteine
  MOD_RES (387)..(387): Selenocysteine
  MOD_RES (391)..(391): Selenocysteine
  MOD_RES (405)..(405): Selenocysteine
  MOD_RES (413)..(413): Selenocysteine
  MOD_RES (444)..(444): Selenocysteine
  MOD_RES (446)..(448): Selenocysteine
  MOD_RES (464)..(464): Selenocysteine
  MOD_RES (468)..(468): Selenocysteine
  MOD_RES (483)..(483): Selenocysteine
  MOD_RES (485)..(485): Selenocysteine
  MOD_RES (499)..(499): Selenocysteine
  MOD_RES (512)..(512): Selenocysteine
  MOD_RES (551)..(551): Selenocysteine
  MOD_RES (613)..(613): Selenocysteine
  MOD_RES (617)..(617): Selenocysteine
  MOD_RES (670)..(670): Selenocysteine
  MOD_RES (694)..(694): Selenocysteine
  MOD_RES (710)..(710): Selenocysteine
  MOD_RES (725)..(725): Selenocysteine
  MOD_RES (792)..(792): Selenocysteine
  MOD_RES (828)..(828): Selenocysteine
  MOD_RES (830)..(830): Selenocysteine
  MOD_RES (851)..(851): Selenocysteine
  MOD_RES (857)..(857): Selenocysteine
  MOD_RES (866)..(866): Selenocysteine
  MOD_RES (893)..(893): Selenocysteine
MAXCAVEVFGLLEDEENSRIVRVRVIAGIGLAKKDILGASDPYVRVXLYDPMNGVLXSVQXKXIKKSLNPKWNEEILFRVHPQQHRLLFEVFDENRLXRDDFLGQVDVPLYPLPXENPRLERPYXFKDFVLHPRSHKSRVKGYLRLKMXYLPKXSGSEDDNAEQAEELEPGWVVLDQPDAACHLQQQQEPSPLPPGWEERQDILGRXYYVNHESRRXQWKRPXPQDNLXDAENGNIQLQAQRAFXXRRQISEEXESVDNRESSENWEIIREDEAXMYSNQAFPSPPPSSNLDVPXHLAEELNARLXIFGNSAVSQPASSSNHSSRRGSLQAYXFEEQPXLPVLLPXSSGLPPGWEEKQDERGRSYYVDHNSRXXXWXKPXVQAXVEXSQLXSSQSSAGPQSQASXSDSGQQVXQPSEIEQGFLPKGWEVRHAPNGRPFFIDHNXKXXXWEDPRLKIPAHLRGKXSLDXSNDLGPLPPGWEERXHXDGRIFYINHNIKRXQWEDPRLENVAIXGPAVPYSRDYKRKYEFFRRKLKKQNDIPNKFEMKLRRAXVLEDSYRRIMGVKRADFLKARLWIEFDGEKGLDYGGVAREWFFLISKEMFNPYYGLFEYSAXDNYXLQINPNSGLCNEDHLSYFKFIGRVAGMAVYHGKLLDGFFIRPFYKMMLHKPIXLHDMESVDSEYYNSLRWILENDPXELDLRFIIDEELFGQXHQHELKNGGSEIVVXNKNKKEYIYLVIQWRFVNRIQKQMAAFKEGFFELIPQDLIKIFDENELELLMCGLGDVDVNDWREHXKYKNGYSANHQVIQWFWKAVLMMDSEKRIRLLQFVXGXSRVPMNGFAELYGSNGPQSFXVEQWGXPEKLPRAHXCFNRLDLPPYESFEELWDKLQMAIENXQGFDGVD

SEQ ID NO: 17458 - protein, 39 aa, Homo sapiens
  MOD_RES (1)..(1): Any amino acid
XCAVEVFGLLEDEENSRIVRVRVIAGIGLAKKDILGARV

SEQ ID NO: 17459 - protein, 401 aa, Homo sapiens
  MOD_RES (1)..(1): Any amino acid
  MOD_RES (36)..(36): Selenocysteine
  MOD_RES (56)..(56): Selenocysteine
  MOD_RES (62)..(62): Selenocysteine
  MOD_RES (73)..(73): Selenocysteine
  MOD_RES (80)..(80): Selenocysteine
  MOD_RES (91)..(91): Selenocysteine
  MOD_RES (101)..(102): Selenocysteine
  MOD_RES (111)..(111): Selenocysteine
  MOD_RES (113)..(113): Selenocysteine
  MOD_RES (136)..(136): Selenocysteine
  MOD_RES (155)..(156): Selenocysteine
  MOD_RES (159)..(159): Selenocysteine
  MOD_RES (162)..(162): Selenocysteine
  MOD_RES (166)..(166): Selenocysteine
  MOD_RES (175)..(175): Selenocysteine
  MOD_RES (193)..(193): Selenocysteine
  MOD_RES (201)..(201): Selenocysteine
  MOD_RES (211)..(211): Selenocysteine
  MOD_RES (214)..(214): Selenocysteine
  MOD_RES (240)..(240): Selenocysteine
  MOD_RES (244)..(244): Selenocysteine
  MOD_RES (261)..(261): Selenocysteine
  MOD_RES (267)..(267): Selenocysteine
  MOD_RES (272)..(273): Selenocysteine
  MOD_RES (299)..(299): Selenocysteine
  MOD_RES (388)..(388): Selenocysteine
XIYSSAVVDNELNAVNDGHLVSSPAICSGSLSNFSXSDNGSYSSNGSDFGSCASIXSGGSYXNSVISDSSSYXFPPSDDXFLGGNLPSDSXSNRSVPNRNXXPCEIFSRSXSXDPFVQDDLEHGLEIMKLPVSRNXKIPLKRYSSLVIFPRSPSXXRPXSPXSLCXLLSKGSYQXSHQFIISPSEIAHNEDGXSAKGFLSXAVNGLRLSKXICXPGEVRDIRPLHRKGSLQKKIVLSNNXPRQXVCEKSSEGYSCVSVHFXQRKAAXLDCEXXNGDCKPEMSEIKLNSDSEYIKLMHRXSACLPSSQNVDCQININGELERPHSQMNKNHGILRRSISLGGAYPNISCLSSLKHNCSKGGPSQLLIKFASGNEGKVDNLSRDSNRDCXNELSNSCKSQIKS

SEQ ID NO: 17460 - protein, 910 aa, Homo sapiens
  MOD_RES (1)..(1): Any amino acid
  MOD_RES (27)..(27): Selenocysteine
  MOD_RES (116)..(116): Selenocysteine
  MOD_RES (125)..(125): Selenocysteine
  MOD_RES (135)..(135): Selenocysteine
  MOD_RES (159)..(159): Selenocysteine
  MOD_RES (164)..(164): Selenocysteine
  MOD_RES (217)..(217): Selenocysteine
  MOD_RES (227)..(227): Selenocysteine
  MOD_RES (233)..(233): Selenocysteine
  MOD_RES (239)..(239): Selenocysteine
  MOD_RES (255)..(256): Selenocysteine
  MOD_RES (264)..(264): Selenocysteine
  MOD_RES (285)..(285): Selenocysteine
  MOD_RES (305)..(305): Selenocysteine
  MOD_RES (316)..(316): Selenocysteine
  MOD_RES (343)..(343): Selenocysteine
  MOD_RES (349)..(349): Selenocysteine
  MOD_RES (356)..(356): Selenocysteine
  MOD_RES (383)..(385): Selenocysteine
  MOD_RES (387)..(387): Selenocysteine
  MOD_RES (390)..(390): Selenocysteine
  MOD_RES (394)..(394): Selenocysteine
  MOD_RES (397)..(397): Selenocysteine
  MOD_RES (401)..(401): Selenocysteine
  MOD_RES (415)..(415): Selenocysteine
  MOD_RES (423)..(423): Selenocysteine
  MOD_RES (454)..(454): Selenocysteine
  MOD_RES (456)..(458): Selenocysteine
  MOD_RES (474)..(474): Selenocysteine
  MOD_RES (478)..(478): Selenocysteine
  MOD_RES (493)..(493): Selenocysteine
  MOD_RES (495)..(495): Selenocysteine
  MOD_RES (509)..(509): Selenocysteine
  MOD_RES (522)..(522): Selenocysteine
  MOD_RES (561)..(561): Selenocysteine
  MOD_RES (623)..(623): Selenocysteine
  MOD_RES (627)..(627): Selenocysteine
  MOD_RES (680)..(680): Selenocysteine
  MOD_RES (704)..(704): Selenocysteine
  MOD_RES (720)..(720): Selenocysteine
  MOD_RES (735)..(735): Selenocysteine
  MOD_RES (802)..(802): Selenocysteine
  MOD_RES (838)..(838): Selenocysteine
  MOD_RES (840)..(840): Selenocysteine
  MOD_RES (861)..(861): Selenocysteine
  MOD_RES (867)..(867): Selenocysteine
  MOD_RES (876)..(876): Selenocysteine
  MOD_RES (903)..(903): Selenocysteine
XNGDCKPEMSEIKLNSDSEYIKLMHRXSACLPSSQNVDCQININGELERPHSQMNKNHGILRRSISLGGAYPNISCLSSLKHNCSKGGPSQLLIKFASGNEGKVDNLSRDSNRDCXNELSNSCKXENPRLERPYXFKDFVLHPRSHKSRVKGYLRLKMXYLPKXSGSEDDNAEQAEELEPGWVVLDQPDAACHLQQQQEPSPLPPGWEERQDILGRXYYVNHESRRXQWKRPXPQDNLXDAENGNIQLQAQRAFXXRRQISEEXESVDNRESSENWEIIREDEAXMYSNQAFPSPPPSSNLDVPXHLAEELNARLXIFGNSAVSQPASSSNHSSRRGSLQAYXFEEQPXLPVLLPXSSGLPPGWEEKQDERGRSYYVDHNSRXXXWXKPXVQAXVEXSQLXSSQSSAGPQSQASXSDSGQQVXQPSEIEQGFLPKGWEVRHAPNGRPFFIDHNXKXXXWEDPRLKIPAHLRGKXSLDXSNDLGPLPPGWEERXHXDGRIFYINHNIKRXQWEDPRLENVAIXGPAVPYSRDYKRKYEFFRRKLKKQNDIPNKFEMKLRRAXVLEDSYRRIMGVKRADFLKARLWIEFDGEKGLDYGGVAREWFFLISKEMFNPYYGLFEYSAXDNYXLQINPNSGLCNEDHLSYFKFIGRVAGMAVYHGKLLDGFFIRPFYKMMLHKPIXLHDMESVDSEYYNSLRWILENDPXELDLRFIIDEELFGQXHQHELKNGGSEIVVXNKNKKEYIYLVIQWRFVNRIQKQMAAFKEGFFELIPQDLIKIFDENELELLMCGLGDVDVNDWREHXKYKNGYSANHQVIQWFWKAVLMMDSEKRIRLLQFVXGXSRVPMNGFAELYGSNGPQSFXVEQWGXPEKLPRAHXCFNRLDLPPYESFEELWDKLQMAIENXQGFDGVD

SEQ ID NO: 17461 - protein, 35 aa, Homo sapiens
  MOD_RES (1)..(1): Any amino acid
  MOD_RES (32)..(32): Selenocysteine
XWNEEILFRVHPQQHRLLFEVFDENRLPWLVXNQE

SEQ ID NO: 17462 - protein, 50 aa, Homo sapiens
  MOD_RES (7)..(7): Selenocysteine
  MOD_RES (9)..(9): Selenocysteine
  MOD_RES (20)..(20): Selenocysteine
MLIKVKXLXGKEIEIDIEPXDKVERIKERVEEKEGIPPQQQRLIYSGKQM

SEQ ID NO: 17463 - protein, 81 aa, Homo sapiens
  MOD_RES (7)..(7): Selenocysteine
  MOD_RES (9)..(9): Selenocysteine
  MOD_RES (20)..(20): Selenocysteine
  MOD_RES (55)..(55): Selenocysteine
MLIKVKXLXGKEIEIDIEPXDKVERIKERVEEKEGIPPQQQRLIYSGKQMNDEKXAADYKILGGSVLHLVLALRGGGGLRQ

SEQ ID NO: 17464 - protein, 29 aa, Homo sapiens
  MOD_RES (25)..(25): Selenocysteine
MARALYDNVPECAEELAFRKGDILXVIEQ

SEQ ID NO: 17465 - protein, 174 aa, Homo sapiens
  MOD_RES (31)..(31): Selenocysteine
  MOD_RES (37)..(37): Selenocysteine
  MOD_RES (70)..(70): Selenocysteine
  MOD_RES (85)..(85): Selenocysteine
  MOD_RES (104)..(104): Selenocysteine
  MOD_RES (122)..(122): Selenocysteine
  MOD_RES (126)..(126): Selenocysteine
  MOD_RES (145)..(145): Selenocysteine
  MOD_RES (172)..(172): Selenocysteine
MKYKNLMARALYDNVPECAEELAFRKGDILXVIEQNXGGLEGWWLCSLHGRQGIVPGNRVKLLIGPMQEXASSHEQPASGLMQQXFGQQKLYQVPNPQAAPRDXIYQVPPSYQNQGIYQVPXGHGXQEQEVYQVPPSVQRSIGGXSGPHVGKKVFQRDGQVSYFLVRASKQXSL

SEQ ID NO: 17466 - protein, 834 aa, Homo sapiens
  MOD_RES (31)..(31): Selenocysteine
  MOD_RES (37)..(37): Selenocysteine
  MOD_RES (70)..(70): Selenocysteine
  MOD_RES (85)..(85): Selenocysteine
  MOD_RES (104)..(104): Selenocysteine
  MOD_RES (122)..(122): Selenocysteine
  MOD_RES (126)..(126): Selenocysteine
  MOD_RES (145)..(145): Selenocysteine
  MOD_RES (156)..(156): Selenocysteine
  MOD_RES (160)..(160): Selenocysteine
  MOD_RES (184)..(185): Selenocysteine
  MOD_RES (219)..(219): Selenocysteine
  MOD_RES (266)..(266): Selenocysteine
  MOD_RES (268)..(268): Selenocysteine
  MOD_RES (332)..(332): Selenocysteine
  MOD_RES (373)..(373): Selenocysteine
  MOD_RES (376)..(376): Selenocysteine
  MOD_RES (382)..(382): Selenocysteine
  MOD_RES (385)..(385): Selenocysteine
  MOD_RES (408)..(408): Selenocysteine
  MOD_RES (432)..(433): Selenocysteine
  MOD_RES (450)..(450): Selenocysteine
  MOD_RES (502)..(502): Selenocysteine
  MOD_RES (537)..(537): Selenocysteine
  MOD_RES (546)..(548): Selenocysteine
  MOD_RES (551)..(551): Selenocysteine
  MOD_RES (577)..(577): Selenocysteine
  MOD_RES (677)..(677): Selenocysteine
  MOD_RES (695)..(696): Selenocysteine
  MOD_RES (717)..(717): Selenocysteine
  MOD_RES (762)..(762): Selenocysteine
  MOD_RES (764)..(764): Selenocysteine
  MOD_RES (768)..(768): Selenocysteine
  MOD_RES (789)..(789): Selenocysteine
  MOD_RES (794)..(794): Selenocysteine
  MOD_RES (804)..(805): Selenocysteine
  MOD_RES (815)..(815): Selenocysteine
  MOD_RES (833)..(833): Selenocysteine
MKYKNLMARALYDNVPECAEELAFRKGDILXVIEQNXGGLEGWWLCSLHGRQGIVPGNRVKLLIGPMQEXASSHEQPASGLMQQXFGQQKLYQVPNPQAAPRDXIYQVPPSYQNQGIYQVPXGHGXQEQEVYQVPPSVQRSIGGXSGPHVGKKVIXPVRXGHGYVYEYPSRYQKDVYDIPPSHXXQGVYDIPPSSAKGPVFSVPVGEIKPQGVYDIPPXKGVYAIPPSACRDEAGLREKDYDFPPPMRQAGRPDLRPEGVYDIPPXCXKPAGKDLHVKYNCDIPGAAEPVARRHQSLSPNHPPPQLGQSVGSQNDAYDVPRGVQFLEPPAEXSEKANPQERDGVYDVPLHNPPDAKGSRDLVDGINRLSFSSXGSXRSNMSXSSXSSKESSLSASPAQDKRLFLDPDXAIERLQRLQQALEMGVSSLMALVXXDWRCYGYMERHINEIRXAVDKVELFLKEYLHFVKGAVANAACLPELILHNKMKRELQRVEDSHQILSQXSHDLNECSWSLNILAINKPQNKCDDLDRFVMVAKXVPDDAKQLXXXINXNAEALFRPGPGSLHLKNGPESIMNSXEYPHGGSQGQLLHPGDHKAQAHNKALPPGLSKEQAPDCSSSDGSERSWMDDYDYVHLQGKEEFERQQKELLEKENIMKQNKMQLEHHQLSQFQLLEQEIXKPVENDISKWKPSQSLPXXNSGVSAQDRQLLCFYYDQCEXHFISLLNAIDALFSCVSSAQPPRIFVAHSKFVILSAHKLVFIGDXLXRQVXAQDIRNKVMNSSNQLCEQLKXIVMAXKMAALHYPSXXALQEMVHQVXDLSRNAQLFKRSLLEMAXF

SEQ ID NO: 17467 - protein, 685 aa, Homo sapiens
  MOD_RES (7)..(7): Selenocysteine
  MOD_RES (11)..(11): Selenocysteine
  MOD_RES (35)..(36): Selenocysteine
  MOD_RES (70)..(70): Selenocysteine
  MOD_RES (117)..(117): Selenocysteine
  MOD_RES (119)..(119): Selenocysteine
  MOD_RES (183)..(183): Selenocysteine
  MOD_RES (224)..(224): Selenocysteine
  MOD_RES (227)..(227): Selenocysteine
  MOD_RES (233)..(233): Selenocysteine
  MOD_RES (236)..(236): Selenocysteine
  MOD_RES (259)..(259): Selenocysteine
  MOD_RES (283)..(284): Selenocysteine
  MOD_RES (301)..(301): Selenocysteine
  MOD_RES (353)..(353): Selenocysteine
  MOD_RES (388)..(388): Selenocysteine
  MOD_RES (397)..(399): Selenocysteine
  MOD_RES (402)..(402): Selenocysteine
  MOD_RES (428)..(428): Selenocysteine
  MOD_RES (528)..(528): Selenocysteine
  MOD_RES (546)..(547): Selenocysteine
  MOD_RES (568)..(568): Selenocysteine
  MOD_RES (613)..(613): Selenocysteine
  MOD_RES (615)..(615): Selenocysteine
  MOD_RES (619)..(619): Selenocysteine
  MOD_RES (640)..(640): Selenocysteine
  MOD_RES (645)..(645): Selenocysteine
  MOD_RES (655)..(656): Selenocysteine
  MOD_RES (666)..(666): Selenocysteine
  MOD_RES (684)..(684): Selenocysteine
MKYKVIXPVRXGHGYVYEYPSRYQKDVYDIPPSHXXQGVYDIPPSSAKGPVFSVPVGEIKPQGVYDIPPXKGVYAIPPSACRDEAGLREKDYDFPPPMRQAGRPDLRPEGVYDIPPXCXKPAGKDLHVKYNCDIPGAAEPVARRHQSLSPNHPPPQLGQSVGSQNDAYDVPRGVQFLEPPAEXSEKANPQERDGVYDVPLHNPPDAKGSRDLVDGINRLSFSSXGSXRSNMSXSSXSSKESSLSASPAQDKRLFLDPDXAIERLQRLQQALEMGVSSLMALVXXDWRCYGYMERHINEIRXAVDKVELFLKEYLHFVKGAVANAACLPELILHNKMKRELQRVEDSHQILSQXSHDLNECSWSLNILAINKPQNKCDDLDRFVMVAKXVPDDAKQLXXXINXNAEALFRPGPGSLHLKNGPESIMNSXEYPHGGSQGQLLHPGDHKAQAHNKALPPGLSKEQAPDCSSSDGSERSWMDDYDYVHLQGKEEFERQQKELLEKENIMKQNKMQLEHHQLSQFQLLEQEIXKPVENDISKWKPSQSLPXXNSGVSAQDRQLLCFYYDQCEXHFISLLNAIDALFSCVSSAQPPRIFVAHSKFVILSAHKLVFIGDXLXRQVXAQDIRNKVMNSSNQLCEQLKXIVMAXKMAALHYPSXXALQEMVHQVXDLSRNAQLFKRSLLEMAXF

SEQ ID NO: 17468 - protein, 22 aa, Homo sapiens
  MOD_RES (4)..(4): Selenocysteine
MRPXNIMKGNLLYSKSIGLNNL

SEQ ID NO: 17469 - protein, 32 aa, Homo sapiens
  MOD_RES (3)..(3): Selenocysteine
  MOD_RES (31)..(31): Selenocysteine
MWXRNLMARALYDNVPECAEELAFRKGDILXV

SEQ ID NO: 17470 - protein, 834 aa, Homo sapiens
  MOD_RES (3)..(3): Selenocysteine
  MOD_RES (31)..(31): Selenocysteine
  MOD_RES (37)..(37): Selenocysteine
  MOD_RES (70)..(70): Selenocysteine
  MOD_RES (85)..(85): Selenocysteine
  MOD_RES (104)..(104): Selenocysteine
  MOD_RES (122)..(122): Selenocysteine
  MOD_RES (126)..(126): Selenocysteine
  MOD_RES (145)..(145): Selenocysteine
  MOD_RES (156)..(156): Selenocysteine
  MOD_RES (160)..(160): Selenocysteine
  MOD_RES (184)..(185): Selenocysteine
  MOD_RES (219)..(219): Selenocysteine
  MOD_RES (266)..(266): Selenocysteine
  MOD_RES (268)..(268): Selenocysteine
  MOD_RES (332)..(332): Selenocysteine
  MOD_RES (373)..(373): Selenocysteine
  MOD_RES (376)..(376): Selenocysteine
  MOD_RES (382)..(382): Selenocysteine
  MOD_RES (385)..(385): Selenocysteine
  MOD_RES (408)..(408): Selenocysteine
  MOD_RES (432)..(433): Selenocysteine
  MOD_RES (450)..(450): Selenocysteine
  MOD_RES (502)..(502): Selenocysteine
  MOD_RES (537)..(537): Selenocysteine
  MOD_RES (546)..(548): Selenocysteine
  MOD_RES (551)..(551): Selenocysteine
  MOD_RES (577)..(577): Selenocysteine
  MOD_RES (677)..(677): Selenocysteine
  MOD_RES (695)..(696): Selenocysteine
  MOD_RES (717)..(717): Selenocysteine
  MOD_RES (762)..(762): Selenocysteine
  MOD_RES (764)..(764): Selenocysteine
  MOD_RES (768)..(768): Selenocysteine
  MOD_RES (789)..(789): Selenocysteine
  MOD_RES (794)..(794): Selenocysteine
  MOD_RES (804)..(805): Selenocysteine
  MOD_RES (815)..(815): Selenocysteine
  MOD_RES (833)..(833): Selenocysteine
MWXRNLMARALYDNVPECAEELAFRKGDILXVIEQNXGGLEGWWLCSLHGRQGIVPGNRVKLLIGPMQEXASSHEQPASGLMQQXFGQQKLYQVPNPQAAPRDXIYQVPPSYQNQGIYQVPXGHGXQEQEVYQVPPSVQRSIGGXSGPHVGKKVIXPVRXGHGYVYEYPSRYQKDVYDIPPSHXXQGVYDIPPSSAKGPVFSVPVGEIKPQGVYDIPPXKGVYAIPPSACRDEAGLREKDYDFPPPMRQAGRPDLRPEGVYDIPPXCXKPAGKDLHVKYNCDIPGAAEPVARRHQSLSPNHPPPQLGQSVGSQNDAYDVPRGVQFLEPPAEXSEKANPQERDGVYDVPLHNPPDAKGSRDLVDGINRLSFSSXGSXRSNMSXSSXSSKESSLSASPAQDKRLFLDPDXAIERLQRLQQALEMGVSSLMALVXXDWRCYGYMERHINEIRXAVDKVELFLKEYLHFVKGAVANAACLPELILHNKMKRELQRVEDSHQILSQXSHDLNECSWSLNILAINKPQNKCDDLDRFVMVAKXVPDDAKQLXXXINXNAEALFRPGPGSLHLKNGPESIMNSXEYPHGGSQGQLLHPGDHKAQAHNKALPPGLSKEQAPDCSSSDGSERSWMDDYDYVHLQGKEEFERQQKELLEKENIMKQNKMQLEHHQLSQFQLLEQEIXKPVENDISKWKPSQSLPXXNSGVSAQDRQLLCFYYDQCEXHFISLLNAIDALFSCVSSAQPPRIFVAHSKFVILSAHKLVFIGDXLXRQVXAQDIRNKVMNSSNQLCEQLKXIVMAXKMAALHYPSXXALQEMVHQVXDLSRNAQLFKRSLLEMAXF

SEQ ID NO: 17471 - protein, 43 aa, Homo sapiens
  MOD_RES (3)..(3): Selenocysteine
  MOD_RES (12)..(12): Selenocysteine
  MOD_RES (19)..(19): Selenocysteine
  MOD_RES (33)..(33): Selenocysteine
MWXRRINHQLHXNKKALGXVSSQEQPNLLSGQXFQESYGKGLI

SEQ ID NO: 17472 - protein, 605 aa, Homo sapiens
  MOD_RES (8)..(8): Selenocysteine
  MOD_RES (25)..(25): Selenocysteine
  MOD_RES (46)..(46): Selenocysteine
  MOD_RES (78)..(78): Selenocysteine
  MOD_RES (124)..(124): Selenocysteine
  MOD_RES (214)..(214): Selenocysteine
  MOD_RES (262)..(262): Selenocysteine
  MOD_RES (273)..(273): Selenocysteine
  MOD_RES (294)..(294): Selenocysteine
  MOD_RES (297)..(297): Selenocysteine
  MOD_RES (302)..(302): Selenocysteine
  MOD_RES (322)..(322): Selenocysteine
  MOD_RES (327)..(327): Selenocysteine
  MOD_RES (342)..(342): Selenocysteine
  MOD_RES (357)..(357): Selenocysteine
  MOD_RES (369)..(369): Selenocysteine
  MOD_RES (375)..(375): Selenocysteine
  MOD_RES (383)..(383): Selenocysteine
  MOD_RES (387)..(389): Selenocysteine
  MOD_RES (393)..(393): Selenocysteine
  MOD_RES (401)..(401): Selenocysteine
  MOD_RES (406)..(406): Selenocysteine
  MOD_RES (436)..(437): Selenocysteine
  MOD_RES (441)..(441): Selenocysteine
  MOD_RES (452)..(452): Selenocysteine
  MOD_RES (469)..(469): Selenocysteine
  MOD_RES (494)..(494): Selenocysteine
  MOD_RES (499)..(499): Selenocysteine
  MOD_RES (561)..(561): Selenocysteine
  MOD_RES (564)..(564): Selenocysteine
MVEGPGCXLNGEKIRARVLPGQAVXGVRGSALRSLQGRALRLAASXVVVSPQAAALNNDSSQNVLSLFNGYVYSGVEXLGKELFMYFGPKALRIHFGMKGFIMINPLEYKYKNGASPVLEVQLXKDLICFFDSSVELRNSMESQQRIRMMKELDVCSPEFSFLRAESEVKKQKGRMLGDVLMDQNVLPGVGNIIKNEALFDSGLHPAVKVCQLXDEQIHHLMKMIRDFSILFYRCRKAGLALSKHYKVYKRPNCGQCHCRIXVCRFGDNNRMXYFCPHCQKENPQHVDICKLPXRNXIISWXSSRVDHVMDSVARKSEEHWXCVVCXLINKPSSKACDACLXSRPIDSVLKSEENSXVFSHLMKYPCNXFGKPHXEVKINRKXAFGXXXLVLXDFSNKSSXLERKXKQNQILDEEFQNSPPASVCLNDIQHPSKKXXNDIXQPSSKVNISPXISSESKLFSPAHKKPKXAQYSSPELKSCNPGYSNSELQINMXDGPRXLNPDSPRCSKHNRLCILRVVGKDGENKGRQFYACPLPREAQCGFFEWADLSFPFCNHGKRSXMKXVLKIGPNNGKNFFVCPLGKEKQCNFFQWAENGPGIKIIPGC

SEQ ID NO: 17473 - protein, 63 aa, Homo sapiens
  MOD_RES (8)..(8): Selenocysteine
  MOD_RES (25)..(25): Selenocysteine
  MOD_RES (46)..(46): Selenocysteine
MVEGPGCXLNGEKIRARVLPGQAVXGVRGSALRSLQGRALRLAASXVVVSPQDSFRNERLHHD

SEQ ID NO: 17474 - protein, 45 aa, Homo sapiens
  MOD_RES (24)..(24): Selenocysteine
  MOD_RES (45)..(45): Selenocysteine
MEKYVRLQKIGEGSFGKAILVKSXEDGRQYVIKEINISRKMALSX

SEQ ID NO: 17475 - protein, 1189 aa, Homo sapiens
  MOD_RES (24)..(24): Selenocysteine
  MOD_RES (137)..(137): Selenocysteine
  MOD_RES (141)..(141): Selenocysteine
  MOD_RES (156)..(156): Selenocysteine
  MOD_RES (162)..(162): Selenocysteine
  MOD_RES (166)..(166): Selenocysteine
  MOD_RES (198)..(198): Selenocysteine
  MOD_RES (279)..(279): Selenocysteine
  MOD_RES (309)..(309): Selenocysteine
  MOD_RES (344)..(344): Selenocysteine
  MOD_RES (351)..(351): Selenocysteine
  MOD_RES (406)..(406): Selenocysteine
  MOD_RES (592)..(592): Selenocysteine
  MOD_RES (608)..(608): Selenocysteine
  MOD_RES (621)..(621): Selenocysteine
  MOD_RES (623)..(623): Selenocysteine
  MOD_RES (626)..(626): Selenocysteine
  MOD_RES (633)..(633): Selenocysteine
  MOD_RES (666)..(666): Selenocysteine
  MOD_RES (705)..(705): Selenocysteine
  MOD_RES (708)..(708): Selenocysteine
  MOD_RES (712)..(713): Selenocysteine
  MOD_RES (717)..(717): Selenocysteine
  MOD_RES (739)..(739): Selenocysteine
  MOD_RES (755)..(755): Selenocysteine
  MOD_RES (761)..(762): Selenocysteine
  MOD_RES (779)..(779): Selenocysteine
  MOD_RES (803)..(803): Selenocysteine
  MOD_RES (831)..(831): Selenocysteine
  MOD_RES (840)..(840): Selenocysteine
  MOD_RES (849)..(849): Selenocysteine
  MOD_RES (851)..(851): Selenocysteine
  MOD_RES (861)..(861): Selenocysteine
  MOD_RES (864)..(864): Selenocysteine
  MOD_RES (871)..(871): Selenocysteine
  MOD_RES (885)..(885): Selenocysteine
  MOD_RES (898)..(898): Selenocysteine
  MOD_RES (968)..(968): Selenocysteine
  MOD_RES (981)..(981): Selenocysteine
  MOD_RES (993)..(993): Selenocysteine
  MOD_RES (999)..(999): Selenocysteine
  MOD_RES (1033)..(1033): Selenocysteine
  MOD_RES (1035)..(1035): Selenocysteine
  MOD_RES (1072)..(1072): Selenocysteine
  MOD_RES (1076)..(1076): Selenocysteine
MEKYVRLQKIGEGSFGKAILVKSXEDGRQYVIKEINISRMSSKEREESRREVAVLANMKHPNIVQYRESFEENGSLYIVMDYCEGGDLFKRINAQKGVLFQEDQILDWFVQICLALKHVHDRKILHRDIKSQNIFLXKDGXVQLGDFGIARVLNSXVELARXCIGXPYYLSPEICENKPYNNKSDIWALGCVLYELCXLKHAFEAGSMKNLVLKIISGSFPPVSLHYSYDLRSLVSQLFKRNPRDRPSVNSILEKGFIAKRIEKFLSPQLIAEEFCLKXFSKFGSQPIPAKRPASGQNSISVMPAQKIXKPAAKYGIPLAYKKYGDKKLHEKKPLQKHKQAHQXPEKRVNXGEERRKISEEAARKRRLEFIEKEKKQKDQIISLMKAEQMKRQEKERAPFLGSGGXIAPSSFSSRGQYEHYHAIFDQMQQQRAEDNEAKWKREIYGRGLPERQKGQLAVERAKQVEEFLQRKREAMQNKARAEGHMVYLARLRQIRLQNFNERQQIKAKLRGEKKEANHSEGQEGSEEADMRRKKIESLKAHANARAAVLKEQLERKRKEAYEREKKVWEEHLVAKGVKSSDVSPPLGQHEXGGSPSKQQMRSVISVXSALKEVGVDSSLXDXREXSEEMQKXNNAISSKREILRRLNENLKAQEDEKGKQNLSDXFEINVHEDAKEHEKEKSVSSDRKKWEAGGQLVIPLDELXLDXSFSXXERHXVGEVIKLGPNGSPRRAWGKSPXDSVLKILGEAELQLQXELLENXXIRSEISPEGEKYKPLIXGEKKVQCISHEINPSAIVDSPVEXKSPEFSEASPQMSLKLEGNLEEPDDLEXEILQEPSGXNKDESLPCXIXDVWISEEKEXKEXQSADRIXIQENEVSEDGVSSXVDQLSDIHIEPGXNDSQHSKCDVDKSVQPEPFFHKVVHSEHLNLVPQVQSVQCSPEESFAFRSHSHLPPKNKNKNSLLIGLSXGLFDANNPKMLRXCSLPDLSKLFRXLMDVPXVGDVRQDNLEIDEIEDENIKEGPSDSEDIVFEEXDXDLQELQASMEQLLREQPGEEYSEEEESVLKNSDVEPXANGXDVADEDDNPSSESALNEEWHSDNSDGEIASECECDSVFNHLEELRLHLEQEMGFEKFFEVYEKIKAIHEDEDENIEICSKIVQNILGNEHQHLYAKILHLVMADGAYQEDNDE

SEQ ID NO: 17476 - protein, 1214 aa, Homo sapiens
  MOD_RES (24)..(24): Selenocysteine
  MOD_RES (137)..(137): Selenocysteine
  MOD_RES (141)..(141): Selenocysteine
  MOD_RES (156)..(156): Selenocysteine
  MOD_RES (162)..(162): Selenocysteine
  MOD_RES (166)..(166): Selenocysteine
  MOD_RES (198)..(198): Selenocysteine
  MOD_RES (279)..(279): Selenocysteine
  MOD_RES (309)..(309): Selenocysteine
  MOD_RES (344)..(344): Selenocysteine
  MOD_RES (351)..(351): Selenocysteine
  MOD_RES (431)..(431): Selenocysteine
  MOD_RES (617)..(617): Selenocysteine
  MOD_RES (633)..(633): Selenocysteine
  MOD_RES (646)..(646): Selenocysteine
  MOD_RES (648)..(648): Selenocysteine
  MOD_RES (651)..(651): Selenocysteine
  MOD_RES (658)..(658): Selenocysteine
  MOD_RES (691)..(691): Selenocysteine
  MOD_RES (730)..(730): Selenocysteine
  MOD_RES (733)..(733): Selenocysteine
  MOD_RES (737)..(738): Selenocysteine
  MOD_RES (742)..(742): Selenocysteine
  MOD_RES (764)..(764): Selenocysteine
  MOD_RES (780)..(780): Selenocysteine
  MOD_RES (786)..(787): Selenocysteine
  MOD_RES (804)..(804): Selenocysteine
  MOD_RES (828)..(828): Selenocysteine
  MOD_RES (856)..(856): Selenocysteine
  MOD_RES (865)..(865): Selenocysteine
  MOD_RES (874)..(874): Selenocysteine
  MOD_RES (876)..(876): Selenocysteine
  MOD_RES (886)..(886): Selenocysteine
  MOD_RES (889)..(889): Selenocysteine
  MOD_RES (896)..(896): Selenocysteine
  MOD_RES (910)..(910): Selenocysteine
  MOD_RES (923)..(923): Selenocysteine
  MOD_RES (993)..(993): Selenocysteine
  MOD_RES (1006)..(1006): Selenocysteine
  MOD_RES (1018)..(1018): Selenocysteine
  MOD_RES (1024)..(1024): Selenocysteine
  MOD_RES (1058)..(1058): Selenocysteine
  MOD_RES (1060)..(1060): Selenocysteine
  MOD_RES (1097)..(1097): Selenocysteine
  MOD_RES (1101)..(1101): Selenocysteine
MEKYVRLQKIGEGSFGKAILVKSXEDGRQYVIKEINISRMSSKEREESRREVAVLANMKHPNIVQYRESFEENGSLYIVMDYCEGGDLFKRINAQKGVLFQEDQILDWFVQICLALKHVHDRKILHRDIKSQNIFLXKDGXVQLGDFGIARVLNSXVELARXCIGXPYYLSPEICENKPYNNKSDIWALGCVLYELCXLKHAFEAGSMKNLVLKIISGSFPPVSLHYSYDLRSLVSQLFKRNPRDRPSVNSILEKGFIAKRIEKFLSPQLIAEEFCLKXFSKFGSQPIPAKRPASGQNSISVMPAQKIXKPAAKYGIPLAYKKYGDKKLHEKKPLQKHKQAHQXPEKRVNXGEERRKISEEAARKRRLEFIEKEKKQKDQIISLMKAEQMKRQEKERLERINRAREQGWRNVLSAGGSGEVKAPFLGSGGXIAPSSFSSRGQYEHYHAIFDQMQQQRAEDNEAKWKREIYGRGLPERQKGQLAVERAKQVEEFLQRKREAMQNKARAEGHMVYLARLRQIRLQNFNERQQIKAKLRGEKKEANHSEGQEGSEEADMRRKKIESLKAHANARAAVLKEQLERKRKEAYEREKKVWEEHLVAKGVKSSDVSPPLGQHEXGGSPSKQQMRSVISVXSALKEVGVDSSLXDXREXSEEMQKXNNAISSKREILRRLNENLKAQEDEKGKQNLSDXFEINVHEDAKEHEKEKSVSSDRKKWEAGGQLVIPLDELXLDXSFSXXERHXVGEVIKLGPNGSPRRAWGKSPXDSVLKILGEAELQLQXELLENXXIRSEISPEGEKYKPLIXGEKKVQCISHEINPSAIVDSPVEXKSPEFSEASPQMSLKLEGNLEEPDDLEXEILQEPSGXNKDESLPCXIXDVWISEEKEXKEXQSADRIXIQENEVSEDGVSSXVDQLSDIHIEPGXNDSQHSKCDVDKSVQPEPFFHKVVHSEHLNLVPQVQSVQCSPEESFAFRSHSHLPPKNKNKNSLLIGLSXGLFDANNPKMLRXCSLPDLSKLFRXLMDVPXVGDVRQDNLEIDEIEDENIKEGPSDSEDIVFEEXDXDLQELQASMEQLLREQPGEEYSEEEESVLKNSDVEPXANGXDVADEDDNPSSESALNEEWHSDNSDGEIASECECDSVFNHLEELRLHLEQEMGFEKFFEVYEKIKAIHEDEDENIEICSKIVQNILGNEHQHLYAKILHLVMADGAYQEDNDE

SEQ ID NO: 17477 - protein, 1242 aa, Homo sapiens
  MOD_RES (24)..(24): Selenocysteine
  MOD_RES (137)..(137): Selenocysteine
  MOD_RES (141)..(141): Selenocysteine
  MOD_RES (156)..(156): Selenocysteine
  MOD_RES (162)..(162): Selenocysteine
  MOD_RES (166)..(166): Selenocysteine
  MOD_RES (198)..(198): Selenocysteine
  MOD_RES (279)..(279): Selenocysteine
  MOD_RES (309)..(309): Selenocysteine
  MOD_RES (344)..(344): Selenocysteine
  MOD_RES (351)..(351): Selenocysteine
  MOD_RES (431)..(431): Selenocysteine
  MOD_RES (645)..(645): Selenocysteine
  MOD_RES (661)..(661): Selenocysteine
  MOD_RES (674)..(674): Selenocysteine
  MOD_RES (676)..(676): Selenocysteine
  MOD_RES (679)..(679): Selenocysteine
  MOD_RES (686)..(686): Selenocysteine
  MOD_RES (719)..(719): Selenocysteine
  MOD_RES (758)..(758): Selenocysteine
  MOD_RES (761)..(761): Selenocysteine
  MOD_RES (765)..(766): Selenocysteine
  MOD_RES (770)..(770): Selenocysteine
  MOD_RES (792)..(792): Selenocysteine
  MOD_RES (808)..(808): Selenocysteine
  MOD_RES (814)..(815): Selenocysteine
  MOD_RES (832)..(832): Selenocysteine
  MOD_RES (856)..(856): Selenocysteine
  MOD_RES (884)..(884): Selenocysteine
  MOD_RES (893)..(893): Selenocysteine
  MOD_RES (902)..(902): Selenocysteine
  MOD_RES (904)..(904): Selenocysteine
  MOD_RES (914)..(914): Selenocysteine
  MOD_RES (917)..(917): Selenocysteine
  MOD_RES (924)..(924): Selenocysteine
  MOD_RES (938)..(938): Selenocysteine
  MOD_RES (951)..(951): Selenocysteine
  MOD_RES (1021)..(1021): Selenocysteine
  MOD_RES (1034)..(1034): Selenocysteine
  MOD_RES (1046)..(1046): Selenocysteine
  MOD_RES (1052)..(1052): Selenocysteine
  MOD_RES (1086)..(1086): Selenocysteine
  MOD_RES (1088)..(1088): Selenocysteine
  MOD_RES (1125)..(1125): Selenocysteine
  MOD_RES (1129)..(1129): Selenocysteine
MEKYVRLQKIGEGSFGKAILVKSXEDGRQYVIKEINISRMSSKEREESRREVAVLANMKHPNIVQYRESFEENGSLYIVMDYCEGGDLFKRINAQKGVLFQEDQILDWFVQICLALKHVHDRKILHRDIKSQNIFLXKDGXVQLGDFGIARVLNSXVELARXCIGXPYYLSPEICENKPYNNKSDIWALGCVLYELCXLKHAFEAGSMKNLVLKIISGSFPPVSLHYSYDLRSLVSQLFKRNPRDRPSVNSILEKGFIAKRIEKFLSPQLIAEEFCLKXFSKFGSQPIPAKRPASGQNSISVMPAQKIXKPAAKYGIPLAYKKYGDKKLHEKKPLQKHKQAHQXPEKRVNXGEERRKISEEAARKRRLEFIEKEKKQKDQIISLMKAEQMKRQEKERLERINRAREQGWRNVLSAGGSGEVKAPFLGSGGXIAPSSFSSRGQYEHYHAIFDQMQQQRAEDNEAKWKREIYGRGLPERQKGQLAVERAKQVEEFLQRKREAMQNKARAEGHMGILQNLAAMYGGRPSSSRGGKPRNKEEEVYLARLRQIRLQNFNERQQIKAKLRGEKKEANHSEGQEGSEEADMRRKKIESLKAHANARAAVLKEQLERKRKEAYEREKKVWEEHLVAKGVKSSDVSPPLGQHEXGGSPSKQQMRSVISVXSALKEVGVDSSLXDXREXSEEMQKXNNAISSKREILRRLNENLKAQEDEKGKQNLSDXFEINVHEDAKEHEKEKSVSSDRKKWEAGGQLVIPLDELXLDXSFSXXERHXVGEVIKLGPNGSPRRAWGKSPXDSVLKILGEAELQLQXELLENXXIRSEISPEGEKYKPLIXGEKKVQCISHEINPSAIVDSPVEXKSPEFSEASPQMSLKLEGNLEEPDDLEXEILQEPSGXNKDESLPCXIXDVWISEEKEXKEXQSADRIXIQENEVSEDGVSSXVDQLSDIHIEPGXNDSQHSKCDVDKSVQPEPFFHKVVHSEHLNLVPQVQSVQCSPEESFAFRSHSHLPPKNKNKNSLLIGLSXGLFDANNPKMLRXCSLPDLSKLFRXLMDVPXVGDVRQDNLEIDEIEDENIKEGPSDSEDIVFEEXDXDLQELQASMEQLLREQPGEEYSEEEESVLKNSDVEPXANGXDVADEDDNPSSESALNEEWHSDNSDGEIASECECDSVFNHLEELRLHLEQEMGFEKFFEVYEKIKAIHEDEDENIEICSKIVQNILGNEHQHLYAKILHLVMADGAYQEDNDE

SEQ ID NO: 17478 - protein, 1258 aa, Homo sapiens
  MOD_RES (24)..(24): Selenocysteine
  MOD_RES (137)..(137): Selenocysteine
  MOD_RES (141)..(141): Selenocysteine
  MOD_RES (156)..(156): Selenocysteine
  MOD_RES (162)..(162): Selenocysteine
  MOD_RES (166)..(166): Selenocysteine
  MOD_RES (198)..(198): Selenocysteine
  MOD_RES (279)..(279): Selenocysteine
  MOD_RES (309)..(309): Selenocysteine
  MOD_RES (344)..(344): Selenocysteine
  MOD_RES (351)..(351): Selenocysteine
  MOD_RES (431)..(431): Selenocysteine
  MOD_RES (506)..(506): Selenocysteine
  MOD_RES (661)..(661): Selenocysteine
  MOD_RES (677)..(677): Selenocysteine
  MOD_RES (690)..(690): Selenocysteine
  MOD_RES (692)..(692): Selenocysteine
  MOD_RES (695)..(695): Selenocysteine
  MOD_RES (702)..(702): Selenocysteine
  MOD_RES (735)..(735): Selenocysteine
  MOD_RES (774)..(774): Selenocysteine
  MOD_RES (777)..(777): Selenocysteine
  MOD_RES (781)..(782): Selenocysteine
  MOD_RES (786)..(786): Selenocysteine
  MOD_RES (808)..(808): Selenocysteine
  MOD_RES (824)..(824): Selenocysteine
  MOD_RES (830)..(831): Selenocysteine
  MOD_RES (848)..(848): Selenocysteine
  MOD_RES (872)..(872): Selenocysteine
  MOD_RES (900)..(900): Selenocysteine
  MOD_RES (909)..(909): Selenocysteine
  MOD_RES (918)..(918): Selenocysteine
  MOD_RES (920)..(920): Selenocysteine
  MOD_RES (930)..(930): Selenocysteine
  MOD_RES (933)..(933): Selenocysteine
  MOD_RES (940)..(940): Selenocysteine
  MOD_RES (954)..(954): Selenocysteine
  MOD_RES (967)..(967): Selenocysteine
  MOD_RES (1037)..(1037): Selenocysteine
  MOD_RES (1050)..(1050): Selenocysteine
  MOD_RES (1062)..(1062): Selenocysteine
  MOD_RES (1068)..(1068): Selenocysteine
  MOD_RES (1102)..(1102): Selenocysteine
  MOD_RES (1104)..(1104): Selenocysteine
  MOD_RES (1141)..(1141): Selenocysteine
  MOD_RES (1145)..(1145): Selenocysteine
MEKYVRLQKIGEGSFGKAILVKSXEDGRQYVIKEINISRMSSKEREESRREVAVLANMKHPNIVQYRESFEENGSLYIVMDYCEGGDLFKRINAQKGVLFQEDQILDWFVQICLALKHVHDRKILHRDIKSQNIFLXKDGXVQLGDFGIARVLNSXVELARXCIGXPYYLSPEICENKPYNNKSDIWALGCVLYELCXLKHAFEAGSMKNLVLKIISGSFPPVSLHYSYDLRSLVSQLFKRNPRDRPSVNSILEKGFIAKRIEKFLSPQLIAEEFCLKXFSKFGSQPIPAKRPASGQNSISVMPAQKIXKPAAKYGIPLAYKKYGDKKLHEKKPLQKHKQAHQXPEKRVNXGEERRKISEEAARKRRLEFIEKEKKQKDQIISLMKAEQMKRQEKERLERINRAREQGWRNVLSAGGSGEVKAPFLGSGGXIAPSSFSSRGQYEHYHAIFDQMQQQRAEDNEAKWKREIYGRGLPERGILPGVRPGFPYGAAGHHHFPDADDIRKXLKRLKAVSKQANANRQKGQLAVERAKQVEEFLQRKREAMQNKARAEGHMVYLARLRQIRLQNFNERQQIKAKLRGEKKEANHSEGQEGSEEADMRRKKIESLKAHANARAAVLKEQLERKRKEAYEREKKVWEEHLVAKGVKSSDVSPPLGQHEXGGSPSKQQMRSVISVXSALKEVGVDSSLXDXREXSEEMQKXNNAISSKREILRRLNENLKAQEDEKGKQNLSDXFEINVHEDAKEHEKEKSVSSDRKKWEAGGQLVIPLDELXLDXSFSXXERHXVGEVIKLGPNGSPRRAWGKSPXDSVLKILGEAELQLQXELLENXXIRSEISPEGEKYKPLIXGEKKVQCISHEINPSAIVDSPVEXKSPEFSEASPQMSLKLEGNLEEPDDLEXEILQEPSGXNKDESLPCXIXDVWISEEKEXKEXQSADRIXIQENEVSEDGVSSXVDQLSDIHIEPGXNDSQHSKCDVDKSVQPEPFFHKVVHSEHLNLVPQVQSVQCSPEESFAFRSHSHLPPKNKNKNSLLIGLSXGLFDANNPKMLRXCSLPDLSKLFRXLMDVPXVGDVRQDNLEIDEIEDENIKEGPSDSEDIVFEEXDXDLQELQASMEQLLREQPGEEYSEEEESVLKNSDVEPXANGXDVADEDDNPSSESALNEEWHSDNSDGEIASECECDSVFNHLEELRLHLEQEMGFEKFFEVYEKIKAIHEDEDENIEICSKIVQNILGNEHQHLYAKILHLVMADGAYQEDNDE

SEQ ID NO: 17479 - protein, 1286 aa, Homo sapiens
  MOD_RES (24)..(24): Selenocysteine
  MOD_RES (137)..(137): Selenocysteine
  MOD_RES (141)..(141): Selenocysteine
  MOD_RES (156)..(156): Selenocysteine
  MOD_RES (162)..(162): Selenocysteine
  MOD_RES (166)..(166): Selenocysteine
  MOD_RES (198)..(198): Selenocysteine
  MOD_RES (279)..(279): Selenocysteine
  MOD_RES (309)..(309): Selenocysteine
  MOD_RES (344)..(344): Selenocysteine
  MOD_RES (351)..(351): Selenocysteine
  MOD_RES (431)..(431): Selenocysteine
  MOD_RES (506)..(506): Selenocysteine
  MOD_RES (689)..(689): Selenocysteine
  MOD_RES (705)..(705): Selenocysteine
  MOD_RES (718)..(718): Selenocysteine
  MOD_RES (720)..(720): Selenocysteine
  MOD_RES (723)..(723): Selenocysteine
  MOD_RES (730)..(730): Selenocysteine
  MOD_RES (763)..(763): Selenocysteine
  MOD_RES (802)..(802): Selenocysteine
  MOD_RES (805)..(805): Selenocysteine
  MOD_RES (809)..(810): Selenocysteine
  MOD_RES (814)..(814): Selenocysteine
  MOD_RES (836)..(836): Selenocysteine
  MOD_RES (852)..(852): Selenocysteine
  MOD_RES (858)..(859): Selenocysteine
  MOD_RES (876)..(876): Selenocysteine
  MOD_RES (900)..(900): Selenocysteine
  MOD_RES (928)..(928): Selenocysteine
  MOD_RES (937)..(937): Selenocysteine
  MOD_RES (946)..(946): Selenocysteine
  MOD_RES (948)..(948): Selenocysteine
  MOD_RES (958)..(958): Selenocysteine
  MOD_RES (961)..(961): Selenocysteine
  MOD_RES (968)..(968): Selenocysteine
  MOD_RES (982)..(982): Selenocysteine
  MOD_RES (995)..(995): Selenocysteine
  MOD_RES (1065)..(1065): Selenocysteine
  MOD_RES (1078)..(1078): Selenocysteine
  MOD_RES (1090)..(1090): Selenocysteine
  MOD_RES (1096)..(1096): Selenocysteine
  MOD_RES (1130)..(1130): Selenocysteine
  MOD_RES (1132)..(1132): Selenocysteine
  MOD_RES (1169)..(1169): Selenocysteine
  MOD_RES (1173)..(1173): Selenocysteine
MEKYVRLQKIGEGSFGKAILVKSXEDGRQYVIKEINISRMSSKEREESRREVAVLANMKHPNIVQYRESFEENGSLYIVMDYCEGGDLFKRINAQKGVLFQEDQILDWFVQICLALKHVHDRKILHRDIKSQNIFLXKDGXVQLGDFGIARVLNSXVELARXCIGXPYYLSPEICENKPYNNKSDIWALGCVLYELCXLKHAFEAGSMKNLVLKIISGSFPPVSLHYSYDLRSLVSQLFKRNPRDRPSVNSILEKGFIAKRIEKFLSPQLIAEEFCLKXFSKFGSQPIPAKRPASGQNSISVMPAQKIXKPAAKYGIPLAYKKYGDKKLHEKKPLQKHKQAHQXPEKRVNXGEERRKISEEAARKRRLEFIEKEKKQKDQIISLMKAEQMKRQEKERLERINRAREQGWRNVLSAGGSGEVKAPFLGSGGXIAPSSFSSRGQYEHYHAIFDQMQQQRAEDNEAKWKREIYGRGLPERGILPGVRPGFPYGAAGHHHFPDADDIRKXLKRLKAVSKQANANRQKGQLAVERAKQVEEFLQRKREAMQNKARAEGHMGILQNLAAMYGGRPSSSRGGKPRNKEEEVYLARLRQIRLQNFNERQQIKAKLRGEKKEANHSEGQEGSEEADMRRKKIESLKAHANARAAVLKEQLERKRKEAYEREKKVWEEHLVAKGVKSSDVSPPLGQHEXGGSPSKQQMRSVISVXSALKEVGVDSSLXDXREXSEEMQKXNNAISSKREILRRLNENLKAQEDEKGKQNLSDXFEINVHEDAKEHEKEKSVSSDRKKWEAGGQLVIPLDELXLDXSFSXXERHXVGEVIKLGPNGSPRRAWGKSPXDSVLKILGEAELQLQXELLENXXIRSEISPEGEKYKPLIXGEKKVQCISHEINPSAIVDSPVEXKSPEFSEASPQMSLKLEGNLEEPDDLEXEILQEPSGXNKDESLPCXIXDVWISEEKEXKEXQSADRIXIQENEVSEDGVSSXVDQLSDIHIEPGXNDSQHSKCDVDKSVQPEPFFHKVVHSEHLNLVPQVQSVQCSPEESFAFRSHSHLPPKNKNKNSLLIGLSXGLFDANNPKMLRXCSLPDLSKLFRXLMDVPXVGDVRQDNLEIDEIEDENIKEGPSDSEDIVFEEXDXDLQELQASMEQLLREQPGEEYSEEEESVLKNSDVEPXANGXDVADEDDNPSSESALNEEWHSDNSDGEIASECECDSVFNHLEELRLHLEQEMGFEKFFEVYEKIKAIHEDEDENIEICSKIVQNILGNEHQHLYAKILHLVMADGAYQEDNDE

SEQ ID NO: 17480 - protein, 123 aa, Homo sapiens
  MOD_RES (1)..(1): Any amino acid
  MOD_RES (61)..(61): Selenocysteine
  MOD_RES (91)..(91): Selenocysteine
XFPPVSLHYSYDLRSLVSQLFKRNPRDRPSVNSILEKGFIAKRIEKFLSPQLIAEEFCLKXFSKFGSQPIPAKRPASGQNSISVMPAQKIXKPAAKYGIPLAYKKYGDKKLHEKKPLQKHKQV

SEQ ID NO: 17481 - protein, 79 aa, Homo sapiens
  MOD_RES (15)..(15): Selenocysteine
  MOD_RES (19)..(19): Selenocysteine
  MOD_RES (23)..(23): Selenocysteine
  MOD_RES (42)..(42): Selenocysteine
  MOD_RES (62)..(62): Selenocysteine
MLKFQEAAKCVSGSXAISXYPKXLIARRYVLQQKLGSGSFGXVYLVSDKKAKRGEELAEIWXIKFRNINKLEKSFQKIK

SEQ ID NO: 17482 - protein, 212 aa, Homo sapiens
  MOD_RES (15)..(15): Selenocysteine
  MOD_RES (19)..(19): Selenocysteine
  MOD_RES (23)..(23): Selenocysteine
  MOD_RES (42)..(42): Selenocysteine
  MOD_RES (73)..(73): Selenocysteine
  MOD_RES (108)..(108): Selenocysteine
  MOD_RES (175)..(175): Selenocysteine
  MOD_RES (185)..(185): Selenocysteine
  MOD_RES (207)..(207): Selenocysteine
MLKFQEAAKCVSGSXAISXYPKXLIARRYVLQQKLGSGSFGXVYLVSDKKAKRGEELKVLKEISVGELNPNEXVQANLEAQLLSKLDHPAIVKFHASFVEQDNFCIIXEYCEGRDLDDKIQEYKQAGKIFPENQIIEWFIQLLLGVDYMHERRILHRDLKSKNVFLKNNLLKIAXGSSNHHIGCXWGRKEGRNKSVQLVRRFWSFSXSNGIL

SEQ ID NO: 17483 - protein, 540 aa, Homo sapiens
  MOD_RES (15)..(15): Selenocysteine
  MOD_RES (19)..(19): Selenocysteine
  MOD_RES (23)..(23): Selenocysteine
  MOD_RES (42)..(42): Selenocysteine
  MOD_RES (73)..(73): Selenocysteine
  MOD_RES (108)..(108): Selenocysteine
  MOD_RES (190)..(191): Selenocysteine
  MOD_RES (193)..(193): Selenocysteine
  MOD_RES (195)..(195): Selenocysteine
  MOD_RES (211)..(211): Selenocysteine
  MOD_RES (224)..(224): Selenocysteine
  MOD_RES (235)..(235): Selenocysteine
  MOD_RES (290)..(290): Selenocysteine
  MOD_RES (329)..(329): Selenocysteine
  MOD_RES (355)..(355): Selenocysteine
  MOD_RES (412)..(412): Selenocysteine
  MOD_RES (433)..(433): Selenocysteine
  MOD_RES (437)..(437): Selenocysteine
  MOD_RES (439)..(439): Selenocysteine
  MOD_RES (441)..(442): Selenocysteine
  MOD_RES (461)..(461): Selenocysteine
  MOD_RES (476)..(476): Selenocysteine
  MOD_RES (529)..(529): Selenocysteine
  MOD_RES (535)..(535): Selenocysteine
MLKFQEAAKCVSGSXAISXYPKXLIARRYVLQQKLGSGSFGXVYLVSDKKAKRGEELKVLKEISVGELNPNEXVQANLEAQLLSKLDHPAIVKFHASFVEQDNFCIIXEYCEGRDLDDKIQEYKQAGKIFPENQIIEWFIQLLLGVDYMHERRILHRDLKSKNVFLKNNLLKIGDFGVSRLLMGSCDLAXXLXGXPHYMSPEALKHQGYDXKSDIWQKRIHLQXLRALSEVQKMXPRERMRLRKLQAADEKARKLKKIVEEKYEENSKRMQELRSRNFQQLSVDVLHEKXHLKGMEEKEEQPEGRLSCSPQDEDEERWQGREEESDEPXLENLPESQPIPSMDLHELESIVEDAXSDLGYHEIPEDPLVAEEYYADAFDSYCEESDEEEEEIALERPEKEIRNEGSQPAYRXNQQDSDIEALARCLENVLGCXSLDXKXIXXMAEDMSPGPPIFNSVMARXKMKRMRESAMQKLGXEVFEEVYNYLKRARHQNASEAEIRECLEKVVPQASDCFEVDQLLYFEEQLLIXMGKEPXLQNHL

SEQ ID NO: 17484 - protein, 470 aa, Homo sapiens
  MOD_RES (15)..(15): Selenocysteine
  MOD_RES (19)..(19): Selenocysteine
  MOD_RES (23)..(23): Selenocysteine
  MOD_RES (42)..(42): Selenocysteine
  MOD_RES (73)..(73): Selenocysteine
  MOD_RES (108)..(108): Selenocysteine
  MOD_RES (190)..(191): Selenocysteine
  MOD_RES (193)..(193): Selenocysteine
  MOD_RES (195)..(195): Selenocysteine
  MOD_RES (211)..(211): Selenocysteine
  MOD_RES (249)..(249): Selenocysteine
  MOD_RES (302)..(302): Selenocysteine
  MOD_RES (329)..(329): Selenocysteine
  MOD_RES (340)..(340): Selenocysteine
  MOD_RES (395)..(395): Selenocysteine
  MOD_RES (434)..(434): Selenocysteine
  MOD_RES (460)..(460): Selenocysteine
  MOD_RES (468)..(468): Selenocysteine
MLKFQEAAKCVSGSXAISXYPKXLIARRYVLQQKLGSGSFGXVYLVSDKKAKRGEELKVLKEISVGELNPNEXVQANLEAQLLSKLDHPAIVKFHASFVEQDNFCIIXEYCEGRDLDDKIQEYKQAGKIFPENQIIEWFIQLLLGVDYMHERRILHRDLKSKNVFLKNNLLKIGDFGVSRLLMGSCDLAXXLXGXPHYMSPEALKHQGYDXKSDIWSLACILYEMCCMNHAFAGSNFLSIVLKIVEGDXPSLPERYPKELNAIMESMLNKNPSLRPSAIEILKIPYLDEQLQNLMCRYSEMXLEDKNLDCQKEAAHIINAMQKRIHLQXLRALSEVQKMXPRERMRLRKLQAADEKARKLKKIVEEKYEENSKRMQELRSRNFQQLSVDVLHEKXHLKGMEEKEEQPEGRLSCSPQDEDEERWQGREEESDEPXLENLPESQPIPSMDLHELESIVEDAXSDLGYHAXHS

SEQ ID NO: 17485 - protein, 482 aa, Homo sapiens
  MOD_RES (15)..(15): Selenocysteine
  MOD_RES (19)..(19): Selenocysteine
  MOD_RES (23)..(23): Selenocysteine
  MOD_RES (42)..(42): Selenocysteine
  MOD_RES (73)..(73): Selenocysteine
  MOD_RES (108)..(108): Selenocysteine
  MOD_RES (190)..(191): Selenocysteine
  MOD_RES (193)..(193): Selenocysteine
  MOD_RES (195)..(195): Selenocysteine
  MOD_RES (211)..(211): Selenocysteine
  MOD_RES (249)..(249): Selenocysteine
  MOD_RES (302)..(302): Selenocysteine
  MOD_RES (329)..(329): Selenocysteine
  MOD_RES (340)..(340): Selenocysteine
  MOD_RES (395)..(395): Selenocysteine
  MOD_RES (434)..(434): Selenocysteine
  MOD_RES (460)..(460): Selenocysteine
MLKFQEAAKCVSGSXAISXYPKXLIARRYVLQQKLGSGSFGXVYLVSDKKAKRGEELKVLKEISVGELNPNEXVQANLEAQLLSKLDHPAIVKFHASFVEQDNFCIIXEYCEGRDLDDKIQEYKQAGKIFPENQIIEWFIQLLLGVDYMHERRILHRDLKSKNVFLKNNLLKIGDFGVSRLLMGSCDLAXXLXGXPHYMSPEALKHQGYDXKSDIWSLACILYEMCCMNHAFAGSNFLSIVLKIVEGDXPSLPERYPKELNAIMESMLNKNPSLRPSAIEILKIPYLDEQLQNLMCRYSEMXLEDKNLDCQKEAAHIINAMQKRIHLQXLRALSEVQKMXPRERMRLRKLQAADEKARKLKKIVEEKYEENSKRMQELRSRNFQQLSVDVLHEKXHLKGMEEKEEQPEGRLSCSPQDEDEERWQGREEESDEPXLENLPESQPIPSMDLHELESIVEDAXSDLGYHGDCNLISLDEYWKNEK

SEQ ID NO: 17486 - protein, 599 aa, Homo sapiens
  MOD_RES (15)..(15): Selenocysteine
  MOD_RES (19)..(19): Selenocysteine
  MOD_RES (23)..(23): Selenocysteine
  MOD_RES (42)..(42): Selenocysteine
  MOD_RES (73)..(73): Selenocysteine
  MOD_RES (108)..(108): Selenocysteine
  MOD_RES (190)..(191): Selenocysteine
  MOD_RES (193)..(193): Selenocysteine
  MOD_RES (195)..(195): Selenocysteine
  MOD_RES (211)..(211): Selenocysteine
  MOD_RES (249)..(249): Selenocysteine
  MOD_RES (302)..(302): Selenocysteine
  MOD_RES (329)..(329): Selenocysteine
  MOD_RES (340)..(340): Selenocysteine
  MOD_RES (395)..(395): Selenocysteine
  MOD_RES (434)..(434): Selenocysteine
  MOD_RES (460)..(460): Selenocysteine
  MOD_RES (517)..(517): Selenocysteine
  MOD_RES (538)..(538): Selenocysteine
  MOD_RES (558)..(558): Selenocysteine
  MOD_RES (585)..(585): Selenocysteine
  MOD_RES (590)..(590): Selenocysteine
  MOD_RES (594)..(594): Selenocysteine
MLKFQEAAKCVSGSXAISXYPKXLIARRYVLQQKLGSGSFGXVYLVSDKKAKRGEELKVLKEISVGELNPNEXVQANLEAQLLSKLDHPAIVKFHASFVEQDNFCIIXEYCEGRDLDDKIQEYKQAGKIFPENQIIEWFIQLLLGVDYMHERRILHRDLKSKNVFLKNNLLKIGDFGVSRLLMGSCDLAXXLXGXPHYMSPEALKHQGYDXKSDIWSLACILYEMCCMNHAFAGSNFLSIVLKIVEGDXPSLPERYPKELNAIMESMLNKNPSLRPSAIEILKIPYLDEQLQNLMCRYSEMXLEDKNLDCQKEAAHIINAMQKRIHLQXLRALSEVQKMXPRERMRLRKLQAADEKARKLKKIVEEKYEENSKRMQELRSRNFQQLSVDVLHEKXHLKGMEEKEEQPEGRLSCSPQDEDEERWQGREEESDEPXLENLPESQPIPSMDLHELESIVEDAXSDLGYHEIPEDPLVAEEYYADAFDSYCEESDEEEEEIALERPEKEIRNEGSQPAYRXNQQDSDIEALARCLENVLGCXSLDQPCRSWGQKYLKRSIIXSREQGIRMLAKQRSASVWKKWCLKPAXVLKWXSSCXLKSSC

SEQ ID NO: 17487 - protein, 645 aa, Homo sapiens
  MOD_RES (15)..(15): Selenocysteine
  MOD_RES (19)..(19): Selenocysteine
  MOD_RES (23)..(23): Selenocysteine
  MOD_RES (42)..(42): Selenocysteine
  MOD_RES (73)..(73): Selenocysteine
  MOD_RES (108)..(108): Selenocysteine
  MOD_RES (190)..(191): Selenocysteine
  MOD_RES (193)..(193): Selenocysteine
  MOD_RES (195)..(195): Selenocysteine
  MOD_RES (211)..(211): Selenocysteine
  MOD_RES (249)..(249): Selenocysteine
  MOD_RES (302)..(302): Selenocysteine
  MOD_RES (329)..(329): Selenocysteine
  MOD_RES (340)..(340): Selenocysteine
  MOD_RES (395)..(395): Selenocysteine
  MOD_RES (434)..(434): Selenocysteine
  MOD_RES (460)..(460): Selenocysteine
  MOD_RES (517)..(517): Selenocysteine
  MOD_RES (538)..(538): Selenocysteine
  MOD_RES (542)..(542): Selenocysteine
  MOD_RES (544)..(544): Selenocysteine
  MOD_RES (546)..(547): Selenocysteine
  MOD_RES (566)..(566): Selenocysteine
  MOD_RES (581)..(581): Selenocysteine
  MOD_RES (634)..(634): Selenocysteine
  MOD_RES (640)..(640): Selenocysteine
MLKFQEAAKCVSGSXAISXYPKXLIARRYVLQQKLGSGSFGXVYLVSDKKAKRGEELKVLKEISVGELNPNEXVQANLEAQLLSKLDHPAIVKFHASFVEQDNFCIIXEYCEGRDLDDKIQEYKQAGKIFPENQIIEWFIQLLLGVDYMHERRILHRDLKSKNVFLKNNLLKIGDFGVSRLLMGSCDLAXXLXGXPHYMSPEALKHQGYDXKSDIWSLACILYEMCCMNHAFAGSNFLSIVLKIVEGDXPSLPERYPKELNAIMESMLNKNPSLRPSAIEILKIPYLDEQLQNLMCRYSEMXLEDKNLDCQKEAAHIINAMQKRIHLQXLRALSEVQKMXPRERMRLRKLQAADEKARKLKKIVEEKYEENSKRMQELRSRNFQQLSVDVLHEKXHLKGMEEKEEQPEGRLSCSPQDEDEERWQGREEESDEPXLENLPESQPIPSMDLHELESIVEDAXSDLGYHEIPEDPLVAEEYYADAFDSYCEESDEEEEEIALERPEKEIRNEGSQPAYRXNQQDSDIEALARCLENVLGCXSLDXKXIXXMAEDMSPGPPIFNSVMARXKMKRMRESAMQKLGXEVFEEVYNYLKRARHQNASEAEIRECLEKVVPQASDCFEVDQLLYFEEQLLIXMGKEPXLQNHL

SEQ ID NO: 17488 - protein, 220 aa, Homo sapiens
  MOD_RES (1)..(1): Any amino acid
  MOD_RES (17)..(17): Selenocysteine
  MOD_RES (52)..(52): Selenocysteine
  MOD_RES (134)..(135): Selenocysteine
  MOD_RES (137)..(137): Selenocysteine
  MOD_RES (139)..(139): Selenocysteine
  MOD_RES (155)..(155): Selenocysteine
  MOD_RES (193)..(193): Selenocysteine
  MOD_RES (218)..(218): Selenocysteine
XKVLKEISVGELNPNEXVQANLEAQLLSKLDHPAIVKFHASFVEQDNFCIIXEYCEGRDLDDKIQEYKQAGKIFPENQIIEWFIQLLLGVDYMHERRILHRDLKSKNVFLKNNLLKIGDFGVSRLLMGSCDLAXXLXGXPHYMSPEALKHQGYDXKSDIWSLACILYEMCCMNHAFAGSNFLSIVLKIVEGDXPSLPERYPKELNAIMERYRNKHVVXEI

SEQ ID NO: 17489 - protein, 37 aa, Homo sapiens
  MOD_RES (21)..(21): Selenocysteine
MPLAAYCYLRVVGKGSYGEVXLVKHRRDGKQPRAASC

SEQ ID NO: 17490 - protein, 722 aa, Homo sapiens
  MOD_RES (21)..(21): Selenocysteine
  MOD_RES (45)..(45): Selenocysteine
  MOD_RES (51)..(51): Selenocysteine
  MOD_RES (53)..(53): Selenocysteine
  MOD_RES (76)..(76): Selenocysteine
  MOD_RES (80)..(80): Selenocysteine
  MOD_RES (112)..(112): Selenocysteine
  MOD_RES (151)..(151): Selenocysteine
  MOD_RES (183)..(183): Selenocysteine
  MOD_RES (187)..(187): Selenocysteine
  MOD_RES (204)..(204): Selenocysteine
  MOD_RES (229)..(229): Selenocysteine
  MOD_RES (259)..(259): Selenocysteine
  MOD_RES (267)..(268): Selenocysteine
  MOD_RES (272)..(272): Selenocysteine
  MOD_RES (326)..(326): Selenocysteine
  MOD_RES (345)..(345): Selenocysteine
  MOD_RES (380)..(380): Selenocysteine
  MOD_RES (406)..(406): Selenocysteine
  MOD_RES (455)..(455): Selenocysteine
  MOD_RES (491)..(491): Selenocysteine
  MOD_RES (493)..(493): Selenocysteine
  MOD_RES (505)..(505): Selenocysteine
  MOD_RES (578)..(578): Selenocysteine
  MOD_RES (596)..(596): Selenocysteine
  MOD_RES (599)..(599): Selenocysteine
  MOD_RES (613)..(613): Selenocysteine
  MOD_RES (624)..(624): Selenocysteine
  MOD_RES (626)..(626): Selenocysteine
  MOD_RES (656)..(656): Selenocysteine
  MOD_RES (695)..(695): Selenocysteine
MPLAAYCYLRVVGKGSYGEVXLVKHRRDGKQYLHEKHILHRDLKXQNVFLXRXNIIKVGDLGIARVLENHCDMASXLIGXPYYMSPELFSNKPYNYKSDVWALGCCVYEMAXLKHAFNAKDMNSLVYRIIEGKLPPMPRDYSPELAELIRXMLSKRPEERPSVRSILRQPYIKRQISFFLEAXKIKXSKNNIKNGDSQSKPFAXVVSGEAESNHEVIHPQPLSSEGSQXYIMGEGKCLSQEKPRASGLLKSPASLKAHXCKQDLSNXXELAXISSVNIDILPAKGRDSVSDGFVQENQPRYLDASNELGGICSISQVEEEMLQDNXKSSAQPENLIPMWSSDIVXGEKNEPVKPLQPLIKEQKPKDQSLALSPKLECSGXILAHSNLRLLGSSDSPASASRVAGIXGVCHHAQDQVAGECIIEKQGRIHPDLQPHNSGSEPSLSRQRRQKRREQXEHRGEKRQVRRDLFAFQESPPRFLPSHPIVGKVDVXSXQKEAENQRRVVXGSVSSSRSSEMSSSKDRPLSARERRRLKQSQEEMSSSGPSVRKASLSVAGPGKPQEEDQPLPARRLSSDCSVXQERKQIHCLSEDELSSSXSSXDKSDGDYGEGKGQXNEINALVQLMXQXLKLDSKESCEDVPVANPVSEFKLHRKYRDXLILHGKVAEEAEEIHFKELPSAIMPGSEKIRRLVEVLRXDVIRGLGVQLLEQVYDLLEEEDEFDRE

SEQ ID NO: 17491 - protein, 752 aa, Homo sapiens
  MOD_RES (21)..(21): Selenocysteine
  MOD_RES (45)..(45): Selenocysteine
  MOD_RES (51)..(51): Selenocysteine
  MOD_RES (53)..(53): Selenocysteine
  MOD_RES (76)..(76): Selenocysteine
  MOD_RES (80)..(80): Selenocysteine
  MOD_RES (112)..(112): Selenocysteine
  MOD_RES (151)..(151): Selenocysteine
  MOD_RES (183)..(183): Selenocysteine
  MOD_RES (187)..(187): Selenocysteine
  MOD_RES (204)..(204): Selenocysteine
  MOD_RES (229)..(229): Selenocysteine
  MOD_RES (259)..(259): Selenocysteine
  MOD_RES (267)..(268): Selenocysteine
  MOD_RES (272)..(272): Selenocysteine
  MOD_RES (326)..(326): Selenocysteine
  MOD_RES (345)..(345): Selenocysteine
  MOD_RES (380)..(380): Selenocysteine
  MOD_RES (406)..(406): Selenocysteine
  MOD_RES (455)..(455): Selenocysteine
  MOD_RES (491)..(491): Selenocysteine
  MOD_RES (493)..(493): Selenocysteine
  MOD_RES (505)..(505): Selenocysteine
  MOD_RES (578)..(578): Selenocysteine
  MOD_RES (596)..(596): Selenocysteine
  MOD_RES (599)..(599): Selenocysteine
  MOD_RES (613)..(613): Selenocysteine
  MOD_RES (624)..(624): Selenocysteine
  MOD_RES (626)..(626): Selenocysteine
  MOD_RES (656)..(656): Selenocysteine
  MOD_RES (695)..(695): Selenocysteine
  MOD_RES (734)..(735): Selenocysteine
MPLAAYCYLRVVGKGSYGEVXLVKHRRDGKQYLHEKHILHRDLKXQNVFLXRXNIIKVGDLGIARVLENHCDMASXLIGXPYYMSPELFSNKPYNYKSDVWALGCCVYEMAXLKHAFNAKDMNSLVYRIIEGKLPPMPRDYSPELAELIRXMLSKRPEERPSVRSILRQPYIKRQISFFLEAXKIKXSKNNIKNGDSQSKPFAXVVSGEAESNHEVIHPQPLSSEGSQXYIMGEGKCLSQEKPRASGLLKSPASLKAHXCKQDLSNXXELAXISSVNIDILPAKGRDSVSDGFVQENQPRYLDASNELGGICSISQVEEEMLQDNXKSSAQPENLIPMWSSDIVXGEKNEPVKPLQPLIKEQKPKDQSLALSPKLECSGXILAHSNLRLLGSSDSPASASRVAGIXGVCHHAQDQVAGECIIEKQGRIHPDLQPHNSGSEPSLSRQRRQKRREQXEHRGEKRQVRRDLFAFQESPPRFLPSHPIVGKVDVXSXQKEAENQRRVVXGSVSSSRSSEMSSSKDRPLSARERRRLKQSQEEMSSSGPSVRKASLSVAGPGKPQEEDQPLPARRLSSDCSVXQERKQIHCLSEDELSSSXSSXDKSDGDYGEGKGQXNEINALVQLMXQXLKLDSKESCEDVPVANPVSEFKLHRKYRDXLILHGKVAEEAEEIHFKELPSAIMPGSEKIRRLVEVLRXDVIRGLGVQLLEQVYDLLEEEDEFDREVRLREHMGEKYXXYSVKARQLKFFEENMNF

SEQ ID NO: 17492 - protein, 781 aa, Homo sapiens
  MOD_RES (21)..(21): Selenocysteine
  MOD_RES (67)..(67): Selenocysteine
  MOD_RES (134)..(134): Selenocysteine
  MOD_RES (140)..(140): Selenocysteine
  MOD_RES (142)..(142): Selenocysteine
  MOD_RES (165)..(165): Selenocysteine
  MOD_RES (169)..(169): Selenocysteine
  MOD_RES (201)..(201): Selenocysteine
  MOD_RES (240)..(240): Selenocysteine
  MOD_RES (272)..(272): Selenocysteine
  MOD_RES (276)..(276): Selenocysteine
  MOD_RES (293)..(293): Selenocysteine
  MOD_RES (318)..(318): Selenocysteine
  MOD_RES (348)..(348): Selenocysteine
  MOD_RES (356)..(357): Selenocysteine
  MOD_RES (361)..(361): Selenocysteine
  MOD_RES (415)..(415): Selenocysteine
  MOD_RES (434)..(434): Selenocysteine
  MOD_RES (498)..(498): Selenocysteine
  MOD_RES (534)..(534): Selenocysteine
  MOD_RES (536)..(536): Selenocysteine
  MOD_RES (548)..(548): Selenocysteine
  MOD_RES (621)..(621): Selenocysteine
  MOD_RES (639)..(639): Selenocysteine
  MOD_RES (642)..(642): Selenocysteine
  MOD_RES (656)..(656): Selenocysteine
  MOD_RES (667)..(667): Selenocysteine
  MOD_RES (669)..(669): Selenocysteine
  MOD_RES (699)..(699): Selenocysteine
  MOD_RES (738)..(738): Selenocysteine
  MOD_RES (771)..(771): Selenocysteine
MPLAAYCYLRVVGKGSYGEVXLVKHRRDGKQYVIKKLNLRNASSRERRAAEQEAQLLSQLKHPNIVXYKESWEGGDGLLYIVMGFCEGGDLYRKLKEQKGQLLPENQVVEWFVQIAMALQYLHEKHILHRDLKXQNVFLXRXNIIKVGDLGIARVLENHCDMASXLIGXPYYMSPELFSNKPYNYKSDVWALGCCVYEMAXLKHAFNAKDMNSLVYRIIEGKLPPMPRDYSPELAELIRXMLSKRPEERPSVRSILRQPYIKRQISFFLEAXKIKXSKNNIKNGDSQSKPFAXVVSGEAESNHEVIHPQPLSSEGSQXYIMGEGKCLSQEKPRASGLLKSPASLKAHXCKQDLSNXXELAXISSVNIDILPAKGRDSVSDGFVQENQPRYLDASNELGGICSISQVEEEMLQDNXKSSAQPENLIPMWSSDIVXGEKNEPVKPLQPLIKEQKPKDQDQVAGECIIEKQGRIHPDLQPHNSGSEPSLSRQRRQKRREQXEHRGEKRQVRRDLFAFQESPPRFLPSHPIVGKVDVXSXQKEAENQRRVVXGSVSSSRSSEMSSSKDRPLSARERRRLKQSQEEMSSSGPSVRKASLSVAGPGKPQEEDQPLPARRLSSDCSVXQERKQIHCLSEDELSSSXSSXDKSDGDYGEGKGQXNEINALVQLMXQXLKLDSKESCEDVPVANPVSEFKLHRKYRDXLILHGKVAEEAEEIHFKELPSAIMPGSEKIRRLVEVLRXDVIRGLGVQLLEQVYDLLEEEDEFDREVSVSLXVSRCLCYRIF

SEQ ID NO: 17493 - protein, 841 aa, Homo sapiens
  MOD_RES (21)..(21): Selenocysteine
  MOD_RES (67)..(67): Selenocysteine
  MOD_RES (134)..(134): Selenocysteine
  MOD_RES (140)..(140): Selenocysteine
  MOD_RES (142)..(142): Selenocysteine
  MOD_RES (165)..(165): Selenocysteine
  MOD_RES (169)..(169): Selenocysteine
  MOD_RES (201)..(201): Selenocysteine
  MOD_RES (240)..(240): Selenocysteine
  MOD_RES (272)..(272): Selenocysteine
  MOD_RES (276)..(276): Selenocysteine
  MOD_RES (293)..(293): Selenocysteine
  MOD_RES (318)..(318): Selenocysteine
  MOD_RES (348)..(348): Selenocysteine
  MOD_RES (356)..(357): Selenocysteine
  MOD_RES (361)..(361): Selenocysteine
  MOD_RES (415)..(415): Selenocysteine
  MOD_RES (434)..(434): Selenocysteine
  MOD_RES (469)..(469): Selenocysteine
  MOD_RES (495)..(495): Selenocysteine
  MOD_RES (544)..(544): Selenocysteine
  MOD_RES (580)..(580): Selenocysteine
  MOD_RES (582)..(582): Selenocysteine
  MOD_RES (594)..(594): Selenocysteine
  MOD_RES (667)..(667): Selenocysteine
  MOD_RES (685)..(685): Selenocysteine
  MOD_RES (688)..(688): Selenocysteine
  MOD_RES (702)..(702): Selenocysteine
  MOD_RES (713)..(713): Selenocysteine
  MOD_RES (715)..(715): Selenocysteine
  MOD_RES (745)..(745): Selenocysteine
  MOD_RES (784)..(784): Selenocysteine
  MOD_RES (823)..(824): Selenocysteine
MPLAAYCYLRVVGKGSYGEVXLVKHRRDGKQYVIKKLNLRNASSRERRAAEQEAQLLSQLKHPNIVXYKESWEGGDGLLYIVMGFCEGGDLYRKLKEQKGQLLPENQVVEWFVQIAMALQYLHEKHILHRDLKXQNVFLXRXNIIKVGDLGIARVLENHCDMASXLIGXPYYMSPELFSNKPYNYKSDVWALGCCVYEMAXLKHAFNAKDMNSLVYRIIEGKLPPMPRDYSPELAELIRXMLSKRPEERPSVRSILRQPYIKRQISFFLEAXKIKXSKNNIKNGDSQSKPFAXVVSGEAESNHEVIHPQPLSSEGSQXYIMGEGKCLSQEKPRASGLLKSPASLKAHXCKQDLSNXXELAXISSVNIDILPAKGRDSVSDGFVQENQPRYLDASNELGGICSISQVEEEMLQDNXKSSAQPENLIPMWSSDIVXGEKNEPVKPLQPLIKEQKPKDQSLALSPKLECSGXILAHSNLRLLGSSDSPASASRVAGIXGVCHHAQDQVAGECIIEKQGRIHPDLQPHNSGSEPSLSRQRRQKRREQXEHRGEKRQVRRDLFAFQESPPRFLPSHPIVGKVDVXSXQKEAENQRRVVXGSVSSSRSSEMSSSKDRPLSARERRRLKQSQEEMSSSGPSVRKASLSVAGPGKPQEEDQPLPARRLSSDCSVXQERKQIHCLSEDELSSSXSSXDKSDGDYGEGKGQXNEINALVQLMXQXLKLDSKESCEDVPVANPVSEFKLHRKYRDXLILHGKVAEEAEEIHFKELPSAIMPGSEKIRRLVEVLRXDVIRGLGVQLLEQVYDLLEEEDEFDREVRLREHMGEKYXXYSVKARQLKFFEENMNF

SEQ ID NO: 17494 - protein, 142 aa, Homo sapiens
  MOD_RES (1)..(1): Any amino acid
  MOD_RES (6)..(6): Selenocysteine
  MOD_RES (25)..(25): Selenocysteine
  MOD_RES (60)..(60): Selenocysteine
  MOD_RES (86)..(86): Selenocysteine
XLQDNXKSSAQPENLIPMWSSDIVXGEKNEPVKPLQPLIKEQKPKDQSLALSPKLECSGXILAHSNLRLLGSSDSPASASRVAGIXGVCHHAQMESHSVAQAGVQWCDLSLLQPPPPGFKQFFYLSLLSSWDYRIKLLVNVL

SEQ ID NO: 17495 - protein, 201 aa, Homo sapiens
  MOD_RES (20)..(20): Selenocysteine
  MOD_RES (80)..(80): Selenocysteine
  MOD_RES (113)..(113): Selenocysteine
  MOD_RES (115)..(115): Selenocysteine
  MOD_RES (133)..(134): Selenocysteine
  MOD_RES (142)..(142): Selenocysteine
MAGQPGHMPHGGSSNNLCHXLGPVHPPDPQQLNHPNIIKYLDSFIEDNELNIVLELADAGDLSQMIKYFKKQKRLIPERXVWKYFVQLCSAVEHMHSRRVMHRDIKPANVFIXAXGVVKLGDLGLGRFFSSEXXAAHSLVGXPYYMSPERIHENGYNFKSDIWSLGCLLYEMAALQSPFYGDKMNLFSLCQKIEQCDYPPL

SEQ ID NO: 17496 - protein, 171 aa, Homo sapiens
  MOD_RES (20)..(20): Selenocysteine
  MOD_RES (35)..(35): Selenocysteine
  MOD_RES (63)..(63): Selenocysteine
  MOD_RES (70)..(70): Selenocysteine
  MOD_RES (148)..(148): Selenocysteine
MAGQPGHMPHGGSSNNLCHXLGPVHPPDPQRHPNXLSFRCSLADFQIEKKIGRGQFSEVYKAXCLLDRKXVALKKVQIFEMMDAKARQDCVKEIGLLKQLNHPNIIKYLDSFIEDNELNIVLELADAGDLSQMIKYFKKQKRLIPERXVWKYFVQLCSAVEHMHSRRVMHR

SEQ ID NO: 17497 - protein, 207 aa, Homo sapiens
  MOD_RES (20)..(20): Selenocysteine
  MOD_RES (35)..(35): Selenocysteine
  MOD_RES (63)..(63): Selenocysteine
  MOD_RES (70)..(70): Selenocysteine
  MOD_RES (148)..(148): Selenocysteine
  MOD_RES (181)..(181): Selenocysteine
  MOD_RES (183)..(183): Selenocysteine
  MOD_RES (201)..(202): Selenocysteine
MAGQPGHMPHGGSSNNLCHXLGPVHPPDPQRHPNXLSFRCSLADFQIEKKIGRGQFSEVYKAXCLLDRKXVALKKVQIFEMMDAKARQDCVKEIGLLKQLNHPNIIKYLDSFIEDNELNIVLELADAGDLSQMIKYFKKQKRLIPERXVWKYFVQLCSAVEHMHSRRVMHRDIKPANVFIXAXGVVKLGDLGLGRFFSSEXXAAHSL

SEQ ID NO: 17498 - protein, 219 aa, Homo sapiens
  MOD_RES (20)..(20): Selenocysteine
  MOD_RES (35)..(35): Selenocysteine
  MOD_RES (63)..(63): Selenocysteine
  MOD_RES (70)..(70): Selenocysteine
  MOD_RES (148)..(148): Selenocysteine
  MOD_RES (181)..(181): Selenocysteine
  MOD_RES (183)..(183): Selenocysteine
  MOD_RES (201)..(202): Selenocysteine
  MOD_RES (210)..(210): Selenocysteine
MAGQPGHMPHGGSSNNLCHXLGPVHPPDPQRHPNXLSFRCSLADFQIEKKIGRGQFSEVYKAXCLLDRKXVALKKVQIFEMMDAKARQDCVKEIGLLKQLNHPNIIKYLDSFIEDNELNIVLELADAGDLSQMIKYFKKQKRLIPERXVWKYFVQLCSAVEHMHSRRVMHRDIKPANVFIXAXGVVKLGDLGLGRFFSSEXXAAHSLVGXPYYMSPERI

SEQ ID NO: 17499 - protein, 220 aa, Homo sapiens
  MOD_RES (20)..(20): Selenocysteine
  MOD_RES (35)..(35): Selenocysteine
  MOD_RES (63)..(63): Selenocysteine
  MOD_RES (70)..(70): Selenocysteine
  MOD_RES (148)..(148): Selenocysteine
  MOD_RES (181)..(181): Selenocysteine
  MOD_RES (183)..(183): Selenocysteine
  MOD_RES (201)..(202): Selenocysteine
  MOD_RES (210)..(210): Selenocysteine
MAGQPGHMPHGGSSNNLCHXLGPVHPPDPQRHPNXLSFRCSLADFQIEKKIGRGQFSEVYKAXCLLDRKXVALKKVQIFEMMDAKARQDCVKEIGLLKQLNHPNIIKYLDSFIEDNELNIVLELADAGDLSQMIKYFKKQKRLIPERXVWKYFVQLCSAVEHMHSRRVMHRDIKPANVFIXAXGVVKLGDLGLGRFFSSEXXAAHSLVGXPYYMSPERIH

SEQ ID NO: 17500 - protein, 222 aa, Homo sapiens
  MOD_RES (20)..(20): Selenocysteine
  MOD_RES (35)..(35): Selenocysteine
  MOD_RES (63)..(63): Selenocysteine
  MOD_RES (70)..(70): Selenocysteine
  MOD_RES (148)..(148): Selenocysteine
  MOD_RES (181)..(181): Selenocysteine
  MOD_RES (183)..(183): Selenocysteine
  MOD_RES (201)..(202): Selenocysteine
  MOD_RES (210)..(210): Selenocysteine
MAGQPGHMPHGGSSNNLCHXLGPVHPPDPQRHPNXLSFRCSLADFQIEKKIGRGQFSEVYKAXCLLDRKXVALKKVQIFEMMDAKARQDCVKEIGLLKQLNHPNIIKYLDSFIEDNELNIVLELADAGDLSQMIKYFKKQKRLIPERXVWKYFVQLCSAVEHMHSRRVMHRDIKPANVFIXAXGVVKLGDLGLGRFFSSEXXAAHSLVGXPYYMSPERIHEN

SEQ ID NO: 17501 - protein, 313 aa, Homo sapiens
  MOD_RES (20)..(20): Selenocysteine
  MOD_RES (35)..(35): Selenocysteine
  MOD_RES (63)..(63): Selenocysteine
  MOD_RES (70)..(70): Selenocysteine
  MOD_RES (148)..(148): Selenocysteine
  MOD_RES (181)..(181): Selenocysteine
  MOD_RES (183)..(183): Selenocysteine
  MOD_RES (201)..(202): Selenocysteine
  MOD_RES (210)..(210): Selenocysteine
  MOD_RES (313)..(313): Selenocysteine
MAGQPGHMPHGGSSNNLCHXLGPVHPPDPQRHPNXLSFRCSLADFQIEKKIGRGQFSEVYKAXCLLDRKXVALKKVQIFEMMDAKARQDCVKEIGLLKQLNHPNIIKYLDSFIEDNELNIVLELADAGDLSQMIKYFKKQKRLIPERXVWKYFVQLCSAVEHMHSRRVMHRDIKPANVFIXAXGVVKLGDLGLGRFFSSEXXAAHSLVGXPYYMSPERIHENGYNFKSDIWSLGCLLYEMAALQSPFYGDKMNLFSLCQKIEQCDYPPLPGEHYSEKLRELVSMCICPDPHQRPDIGYVHQVAKQMHIWMSSX

SEQ ID NO: 17502 - protein, 338 aa, Homo sapiens
  MOD_RES (4)..(4): Selenocysteine
  MOD_RES (14)..(14): Selenocysteine
  MOD_RES (45)..(45): Selenocysteine
  MOD_RES (60)..(60): Selenocysteine
  MOD_RES (88)..(88): Selenocysteine
  MOD_RES (95)..(95): Selenocysteine
  MOD_RES (173)..(173): Selenocysteine
  MOD_RES (206)..(206): Selenocysteine
  MOD_RES (208)..(208): Selenocysteine
  MOD_RES (226)..(227): Selenocysteine
  MOD_RES (235)..(235): Selenocysteine
  MOD_RES (338)..(338): Selenocysteine
MEAXGWDSRCSPGXQVRALVRLACRMAGQPGHMPHGGSSNNLCHXLGPVHPPDPQRHPNXLSFRCSLADFQIEKKIGRGQFSEVYKAXCLLDRKXVALKKVQIFEMMDAKARQDCVKEIGLLKQLNHPNIIKYLDSFIEDNELNIVLELADAGDLSQMIKYFKKQKRLIPERXVWKYFVQLCSAVEHMHSRRVMHRDIKPANVFIXAXGVVKLGDLGLGRFFSSEXXAAHSLVGXPYYMSPERIHENGYNFKSDIWSLGCLLYEMAALQSPFYGDKMNLFSLCQKIEQCDYPPLPGEHYSEKLRELVSMCICPDPHQRPDIGYVHQVAKQMHIWMSSX

SEQ ID NO: 17503 - protein, 331 aa, Homo sapiens
  MOD_RES (38)..(38): Selenocysteine
  MOD_RES (53)..(53): Selenocysteine
  MOD_RES (81)..(81): Selenocysteine
  MOD_RES (88)..(88): Selenocysteine
  MOD_RES (166)..(166): Selenocysteine
  MOD_RES (199)..(199): Selenocysteine
  MOD_RES (201)..(201): Selenocysteine
  MOD_RES (219)..(220): Selenocysteine
  MOD_RES (228)..(228): Selenocysteine
  MOD_RES (331)..(331): Selenocysteine
MGRRRPAPFRALVRLACRMAGQPGHMPHGGSSNNLCHXLGPVHPPDPQRHPNXLSFRCSLADFQIEKKIGRGQFSEVYKAXCLLDRKXVALKKVQIFEMMDAKARQDCVKEIGLLKQLNHPNIIKYLDSFIEDNELNIVLELADAGDLSQMIKYFKKQKRLIPERXVWKYFVQLCSAVEHMHSRRVMHRDIKPANVFIXAXGVVKLGDLGLGRFFSSEXXAAHSLVGXPYYMSPERIHENGYNFKSDIWSLGCLLYEMAALQSPFYGDKMNLFSLCQKIEQCDYPPLPGEHYSEKLRELVSMCICPDPHQRPDIGYVHQVAKQMHIWMSSX

SEQ ID NO: 17504 - protein, 194 aa, Homo sapiens
  MOD_RES (54)..(54): Selenocysteine
  MOD_RES (69)..(69): Selenocysteine
  MOD_RES (97)..(97): Selenocysteine
  MOD_RES (104)..(104): Selenocysteine
  MOD_RES (182)..(182): Selenocysteine
MPRREVCWEAAHFRQEEQSLPRPRVRALVRLACRMAGQPGHMPHGGSSNNLCHXLGPVHPPDPQRHPNXLSFRCSLADFQIEKKIGRGQFSEVYKAXCLLDRKXVALKKVQIFEMMDAKARQDCVKEIGLLKQLNHPNIIKYLDSFIEDNELNIVLELADAGDLSQMIKYFKKQKRLIPERXVWKYFVQLCSAV

SEQ ID NO: 17505 - protein, 347 aa, Homo sapiens
  MOD_RES (54)..(54): Selenocysteine
  MOD_RES (69)..(69): Selenocysteine
  MOD_RES (97)..(97): Selenocysteine
  MOD_RES (104)..(104): Selenocysteine
  MOD_RES (182)..(182): Selenocysteine
  MOD_RES (215)..(215): Selenocysteine
  MOD_RES (217)..(217): Selenocysteine
  MOD_RES (235)..(236): Selenocysteine
  MOD_RES (244)..(244): Selenocysteine
  MOD_RES (347)..(347): Selenocysteine
MPRREVCWEAAHFRQEEQSLPRPRVRALVRLACRMAGQPGHMPHGGSSNNLCHXLGPVHPPDPQRHPNXLSFRCSLADFQIEKKIGRGQFSEVYKAXCLLDRKXVALKKVQIFEMMDAKARQDCVKEIGLLKQLNHPNIIKYLDSFIEDNELNIVLELADAGDLSQMIKYFKKQKRLIPERXVWKYFVQLCSAVEHMHSRRVMHRDIKPANVFIXAXGVVKLGDLGLGRFFSSEXXAAHSLVGXPYYMSPERIHENGYNFKSDIWSLGCLLYEMAALQSPFYGDKMNLFSLCQKIEQCDYPPLPGEHYSEKLRELVSMCICPDPHQRPDIGYVHQVAKQMHIWMSSX

SEQ ID NO: 17506 - protein, 460 aa, Homo sapiens
  MOD_RES (41)..(41): Selenocysteine
  MOD_RES (87)..(87): Selenocysteine
  MOD_RES (104)..(104): Selenocysteine
  MOD_RES (121)..(121): Selenocysteine
  MOD_RES (131)..(131): Selenocysteine
  MOD_RES (162)..(162): Selenocysteine
  MOD_RES (166)..(166): Selenocysteine
  MOD_RES (219)..(219): Selenocysteine
  MOD_RES (267)..(267): Selenocysteine
  MOD_RES (296)..(296): Selenocysteine
  MOD_RES (304)..(304): Selenocysteine
  MOD_RES (355)..(355): Selenocysteine
  MOD_RES (362)..(364): Selenocysteine
  MOD_RES (413)..(413): Selenocysteine
  MOD_RES (430)..(430): Selenocysteine
MEKYERIRVVGRGAFGIVHLCLRKADQKLVIIKQIPVEQMXKEERQAAQNECQVLKLLNHPNVIEYYENFLEDKALMIAMEYAPGGXLAEFIQKRCNSLLEEEXILHFFVQILLALHHVHXHLILHRDLKXQNILLDKHRMVVKIGDFGISKILSSKSKAYXVVGXPCYISPELCEGKPYNQKSDIWALGCVLYELASLKRAFEAANLPALVLKIMSGXFAPISDRYSPELRQLVLSLLSLEPAQRPPLSHIMAQPLCIRALLNLHXDVGSVRMRRPVQGQRAVLGGRVWAPSGSXGGLRQREXWGKSSLPACRNVRRVFVLRPPSVLQGREVRGPQQHREQDHQCPLQRYPPGXCEASHPXXXVVSVCLGWWAGHPPAAANAQHRGGPGGSWAHAESRRHALWASHPVGGPXPRCRRRQSPSWGSGAAXAPVHLAFPGGPVGCDHQARGLWGLLHCLPD

SEQ ID NO: 17507 - protein, 692 aa, Homo sapiens
  MOD_RES (41)..(41): Selenocysteine
  MOD_RES (87)..(87): Selenocysteine
  MOD_RES (104)..(104): Selenocysteine
  MOD_RES (121)..(121): Selenocysteine
  MOD_RES (131)..(131): Selenocysteine
  MOD_RES (162)..(162): Selenocysteine
  MOD_RES (166)..(166): Selenocysteine
  MOD_RES (219)..(219): Selenocysteine
  MOD_RES (267)..(267): Selenocysteine
  MOD_RES (286)..(286): Selenocysteine
  MOD_RES (290)..(291): Selenocysteine
  MOD_RES (323)..(323): Selenocysteine
  MOD_RES (332)..(332): Selenocysteine
  MOD_RES (342)..(342): Selenocysteine
  MOD_RES (348)..(348): Selenocysteine
  MOD_RES (392)..(392): Selenocysteine
  MOD_RES (403)..(403): Selenocysteine
  MOD_RES (407)..(407): Selenocysteine
  MOD_RES (414)..(414): Selenocysteine
  MOD_RES (429)..(429): Selenocysteine
  MOD_RES (435)..(435): Selenocysteine
  MOD_RES (460)..(460): Selenocysteine
  MOD_RES (479)..(479): Selenocysteine
  MOD_RES (511)..(511): Selenocysteine
  MOD_RES (551)..(551): Selenocysteine
  MOD_RES (570)..(570): Selenocysteine
  MOD_RES (577)..(577): Selenocysteine
  MOD_RES (584)..(584): Selenocysteine
  MOD_RES (595)..(595): Selenocysteine
  MOD_RES (597)..(597): Selenocysteine
  MOD_RES (625)..(625): Selenocysteine
  MOD_RES (663)..(663): Selenocysteine
  MOD_RES (667)..(667): Selenocysteine
  MOD_RES (669)..(669): Selenocysteine
  MOD_RES (678)..(678): Selenocysteine
  MOD_RES (686)..(686): Selenocysteine
MEKYERIRVVGRGAFGIVHLCLRKADQKLVIIKQIPVEQMXKEERQAAQNECQVLKLLNHPNVIEYYENFLEDKALMIAMEYAPGGXLAEFIQKRCNSLLEEEXILHFFVQILLALHHVHXHLILHRDLKXQNILLDKHRMVVKIGDFGISKILSSKSKAYXVVGXPCYISPELCEGKPYNQKSDIWALGCVLYELASLKRAFEAANLPALVLKIMSGXFAPISDRYSPELRQLVLSLLSLEPAQRPPLSHIMAQPLCIRALLNLHXDVGSVRMRRAEKSVAPSNXGSRXXSVRCRGIPRGPVRPAIPPPLSSVYAWGGGLGXPLRLPMLNXEVVQVAAGRXQKAGVXRSGRLILWEAPPLGAGGGSLLPGAVEQPQPQFISRFLEGQSGVXIKHVACGDFFXACLXDRGIIMXFGSGSNGCLGHGSLXDISQPXIVEALLGYEMVQVACGASHVLALSXERELFAWGRGDSGRLGLGXRESHSCPQQVPMPPGQEAQRVVCGIDSSMILXVPGQALACGSNRFNKLGLDHLSLGEEPVPHQQVEEALSFXLLGSAPLDQEPLLSIDLGXAHSAAVXASGDCYXFGSNQHGQLGXNXRRGSRAPCKVQGLEGIKMAMVACGDAFXVAIGAESEVYSWGKGARGRLGRRDEDAGLPRPVQLDEXHPYXVXSVSCCHGNXLLAVRSVXDEPVPP

SEQ ID NO: 17508 - protein, 166 aa, Homo sapiens
  MOD_RES (2)..(2): Selenocysteine
  MOD_RES (48)..(48): Selenocysteine
  MOD_RES (65)..(65): Selenocysteine
  MOD_RES (82)..(82): Selenocysteine
  MOD_RES (92)..(92): Selenocysteine
  MOD_RES (123)..(123): Selenocysteine
  MOD_RES (127)..(127): Selenocysteine
MXKEERQAAQNECQVLKLLNHPNVIEYYENFLEDKALMIAMEYAPGGXLAEFIQKRCNSLLEEEXILHFFVQILLALHHVHXHLILHRDLKXQNILLDKHRMVVKIGDFGISKILSSKSKAYXVVGXPCYISPELCEGKPYNQKSDIWALGCVLYELASLKRAFEA

SEQ ID NO: 17509 - protein, 167 aa, Homo sapiens
  MOD_RES (2)..(2): Selenocysteine
  MOD_RES (48)..(48): Selenocysteine
  MOD_RES (65)..(65): Selenocysteine
  MOD_RES (82)..(82): Selenocysteine
  MOD_RES (92)..(92): Selenocysteine
  MOD_RES (123)..(123): Selenocysteine
  MOD_RES (127)..(127): Selenocysteine
MXKEERQAAQNECQVLKLLNHPNVIEYYENFLEDKALMIAMEYAPGGXLAEFIQKRCNSLLEEEXILHFFVQILLALHHVHXHLILHRDLKXQNILLDKHRMVVKIGDFGISKILSSKSKAYXVVGXPCYISPELCEGKPYNQKSDIWALGCVLYELASLKRAFEAA

SEQ ID NO: 17510 - protein, 261 aa, Homo sapiens
  MOD_RES (1)..(1): Any amino acid
  MOD_RES (45)..(45): Selenocysteine
  MOD_RES (93)..(93): Selenocysteine
  MOD_RES (122)..(122): Selenocysteine
  MOD_RES (140)..(140): Selenocysteine
  MOD_RES (144)..(145): Selenocysteine
  MOD_RES (177)..(177): Selenocysteine
  MOD_RES (186)..(186): Selenocysteine
  MOD_RES (196)..(196): Selenocysteine
  MOD_RES (202)..(202): Selenocysteine
  MOD_RES (246)..(246): Selenocysteine
  MOD_RES (257)..(257): Selenocysteine
  MOD_RES (261)..(261): Selenocysteine
XEGKPYNQKSDIWALGCVLYELASLKRAFEAANLPALVLKIMSGXFAPISDRYSPELRQLVLSLLSLEPAQRPPLSHIMAQPLCIRALLNLHXDVGSVRMRRPVQGQRAVLGGRVWAPSGSXGGPHLSCRAEKSVAPSNXGSRXXSVRCRGIPRGPVRPAIPPPLSSVYAWGGGLGXPLRLPMLNXEVVQVAAGRXQKAGVXRSGRLILWEAPPLGAGGGSLLPGAVEQPQPQFISRFLEGQSGVXIKHVACGDFFXACLX

SEQ ID NO: 17511 - protein, 1130 aa, Homo sapiens
  MOD_RES (4)..(4): Selenocysteine
  MOD_RES (12)..(12): Selenocysteine
  MOD_RES (24)..(24): Selenocysteine
  MOD_RES (41)..(41): Selenocysteine
  MOD_RES (45)..(45): Selenocysteine
  MOD_RES (47)..(47): Selenocysteine
  MOD_RES (112)..(112): Selenocysteine
  MOD_RES (116)..(116): Selenocysteine
  MOD_RES (119)..(119): Selenocysteine
  MOD_RES (122)..(123): Selenocysteine
  MOD_RES (130)..(131): Selenocysteine
  MOD_RES (148)..(148): Selenocysteine
  MOD_RES (154)..(154): Selenocysteine
  MOD_RES (157)..(157): Selenocysteine
  MOD_RES (168)..(168): Selenocysteine
  MOD_RES (174)..(174): Selenocysteine
  MOD_RES (186)..(186): Selenocysteine
  MOD_RES (195)..(195): Selenocysteine
  MOD_RES (203)..(203): Selenocysteine
  MOD_RES (228)..(228): Selenocysteine
  MOD_RES (249)..(249): Selenocysteine
  MOD_RES (252)..(252): Selenocysteine
  MOD_RES (254)..(254): Selenocysteine
  MOD_RES (257)..(257): Selenocysteine
  MOD_RES (277)..(277): Selenocysteine
  MOD_RES (291)..(291): Selenocysteine
  MOD_RES (299)..(299): Selenocysteine
  MOD_RES (317)..(317): Selenocysteine
  MOD_RES (324)..(324): Selenocysteine
  MOD_RES (357)..(357): Selenocysteine
  MOD_RES (363)..(363): Selenocysteine
  MOD_RES (379)..(379): Selenocysteine
  MOD_RES (381)..(381): Selenocysteine
  MOD_RES (386)..(386): Selenocysteine
  MOD_RES (399)..(399): Selenocysteine
  MOD_RES (409)..(409): Selenocysteine
  MOD_RES (413)..(413): Selenocysteine
  MOD_RES (417)..(417): Selenocysteine
  MOD_RES (424)..(424): Selenocysteine
  MOD_RES (432)..(432): Selenocysteine
  MOD_RES (448)..(448): Selenocysteine
  MOD_RES (455)..(455): Selenocysteine
  MOD_RES (480)..(480): Selenocysteine
  MOD_RES (491)..(491): Selenocysteine
  MOD_RES (504)..(504): Selenocysteine
  MOD_RES (523)..(523): Selenocysteine
  MOD_RES (527)..(527): Selenocysteine
  MOD_RES (532)..(532): Selenocysteine
  MOD_RES (549)..(549): Selenocysteine
  MOD_RES (553)..(553): Selenocysteine
  MOD_RES (566)..(566): Selenocysteine
  MOD_RES (572)..(572): Selenocysteine
  MOD_RES (577)..(577): Selenocysteine
  MOD_RES (583)..(583): Selenocysteine
  MOD_RES (591)..(592): Selenocysteine
  MOD_RES (598)..(598): Selenocysteine
  MOD_RES (604)..(604): Selenocysteine
  MOD_RES (613)..(613): Selenocysteine
  MOD_RES (620)..(620): Selenocysteine
  MOD_RES (624)..(624): Selenocysteine
  MOD_RES (628)..(629): Selenocysteine
  MOD_RES (635)..(635): Selenocysteine
  MOD_RES (642)..(642): Selenocysteine
  MOD_RES (652)..(652): Selenocysteine
  MOD_RES (668)..(668): Selenocysteine
  MOD_RES (676)..(676): Selenocysteine
  MOD_RES (696)..(696): Selenocysteine
  MOD_RES (703)..(703): Selenocysteine
  MOD_RES (706)..(706): Selenocysteine
  MOD_RES (731)..(731): Selenocysteine
  MOD_RES (766)..(766): Selenocysteine
  MOD_RES (785)..(785): Selenocysteine
  MOD_RES (797)..(797): Selenocysteine
  MOD_RES (800)..(801): Selenocysteine
  MOD_RES (855)..(855): Selenocysteine
  MOD_RES (857)..(857): Selenocysteine
  MOD_RES (867)..(867): Selenocysteine
  MOD_RES (895)..(895): Selenocysteine
  MOD_RES (958)..(958): Selenocysteine
  MOD_RES (969)..(969): Selenocysteine
  MOD_RES (975)..(975): Selenocysteine
  MOD_RES (978)..(978): Selenocysteine
  MOD_RES (980)..(980): Selenocysteine
  MOD_RES (988)..(988): Selenocysteine
  MOD_RES (991)..(991): Selenocysteine
  MOD_RES (1000)..(1000): Selenocysteine
  MOD_RES (1019)..(1019): Selenocysteine
  MOD_RES (1043)..(1043): Selenocysteine
  MOD_RES (1051)..(1051): Selenocysteine
  MOD_RES (1068)..(1068): Selenocysteine
  MOD_RES (1073)..(1073): Selenocysteine
  MOD_RES (1094)..(1095): Selenocysteine
  MOD_RES (1111)..(1111): Selenocysteine
  MOD_RES (1128)..(1129): Selenocysteine
GNEXIEAQAELXVQAQPEFLKQPXNIYAHESMDIVFECEVXGKPXPXVKWVKNGDMVIPSDYFKIVKEHNLQVLGLVKSDEGFYQCIAENDVGNAQAGAQLIILEHDVAIPXLPPXSLXSAXXDHLAPAXXGPLPSAPRDVVASLVSXRFIKLXWRXPASDPHGDNLXYSVFYXKEGIARERVENXSHPGEMQVXIQNLMPAXVYIFRVMAQNKHGSGESSAPLRVEXQPEVQLPGPAPNLRAYAASPXSIXVXWEXPVSGNGEIQNYKLYYMEKGXDKEQDVDVSSHSYXINGLKKYXEYSFRVVAYNKHGPGVSXPDVAVRXLSDVPSAAPQNLSLEVRNSKSIMIHWQPPAPAXQNGQIXGYKIRYRKASRKSDVXEXLVSGXQLSQLIEGLDRGXEYNFRVAALXINGXGPAXDWLSAEXFESDLDEXRVPEVPSSLHVRPLVXSIVVSWXPPENQNIVVRGYAIGYGIGSPHAQXIKVDYKQRYYXIENLDPSSHYVIXLKAFNNVGEGIPLYESAVXRPHXVPDPXPMMPPVGVQASILSHDXIRIXWADNSLPKHQKIXDSRYYXVRWKXNIPANXKYKNANAXXLSYLVXGLKPNXLYEFSVMVXKGRRSSXWSMXAHGXXFELVPXSPPKDVXVVSKEGKPKXIIVNWQPPSEANGKIXGYIIYYSXDVNAEIHDWVIEPVVGNRLXHQIQELXLDXPYYFKIQARNSKGMGPMSEAVQFRXPKASGSGGKGSRLPDLGSDYKPPMSGSNSPHGSPXSPLDSNMLLVIIVSVGVIXIVVVVIIAVFCXRRXXSHQKKKRAACKSVNGSHKYKGNSKDVKPPDLWIHHERLELKPIDKSPDPNPIMXDXPIPRNSQDIXPVDNSMDSNIHQRRNSYRGHESEDSMSXLAGRRGMRPKMMMPFDSQPPQPVISAHPIHSLDNPHHHFHSSSLASPARSHLYHPGSPWPIGXSMSLSDRANSXESVRNXPSXDXMPASSSQXCCXDHQDPEGAXSSSYLASSQEEDSGQSLPXAHVRPSHPLKSFAVPAIPPPGPPXYDPALPSXPLLSQQALNHHIHSVKXASIGXLGRSRPPMPVVVPSAPEVQEXXRMLEDSESSYEPDELXKEMAHLEGLMKDLNAIXXA

SEQ ID NO: 17512 - protein, 1408 aa, Homo sapiens
  MOD_RES (13)..(13): Selenocysteine
  MOD_RES (49)..(49): Selenocysteine
  MOD_RES (51)..(51): Selenocysteine
  MOD_RES (62)..(62): Selenocysteine
  MOD_RES (91)..(91): Selenocysteine
  MOD_RES (132)..(132): Selenocysteine
  MOD_RES (138)..(138): Selenocysteine
  MOD_RES (143)..(143): Selenocysteine
  MOD_RES (155)..(155): Selenocysteine
  MOD_RES (212)..(212): Selenocysteine
  MOD_RES (277)..(277): Selenocysteine
  MOD_RES (279)..(279): Selenocysteine
  MOD_RES (291)..(291): Selenocysteine
  MOD_RES (311)..(311): Selenocysteine
  MOD_RES (317)..(317): Selenocysteine
  MOD_RES (328)..(328): Selenocysteine
  MOD_RES (336)..(336): Selenocysteine
  MOD_RES (348)..(348): Selenocysteine
  MOD_RES (365)..(365): Selenocysteine
  MOD_RES (369)..(369): Selenocysteine
  MOD_RES (371)..(371): Selenocysteine
  MOD_RES (434)..(435): Selenocysteine
  MOD_RES (452)..(452): Selenocysteine
  MOD_RES (458)..(458): Selenocysteine
  MOD_RES (461)..(461): Selenocysteine
  MOD_RES (472)..(472): Selenocysteine
  MOD_RES (478)..(478): Selenocysteine
  MOD_RES (490)..(490): Selenocysteine
  MOD_RES (499)..(499): Selenocysteine
  MOD_RES (507)..(507): Selenocysteine
  MOD_RES (532)..(532): Selenocysteine
  MOD_RES (553)..(553): Selenocysteine
  MOD_RES (556)..(556): Selenocysteine
  MOD_RES (558)..(558): Selenocysteine
  MOD_RES (561)..(561): Selenocysteine
  MOD_RES (581)..(581): Selenocysteine
  MOD_RES (595)..(595): Selenocysteine
  MOD_RES (603)..(603): Selenocysteine
  MOD_RES (621)..(621): Selenocysteine
  MOD_RES (628)..(628): Selenocysteine
  MOD_RES (661)..(661): Selenocysteine
  MOD_RES (667)..(667): Selenocysteine
  MOD_RES (683)..(683): Selenocysteine
  MOD_RES (685)..(685): Selenocysteine
  MOD_RES (690)..(690): Selenocysteine
  MOD_RES (703)..(703): Selenocysteine
  MOD_RES (713)..(713): Selenocysteine
  MOD_RES (717)..(717): Selenocysteine
  MOD_RES (721)..(721): Selenocysteine
  MOD_RES (728)..(728): Selenocysteine
  MOD_RES (736)..(736): Selenocysteine
  MOD_RES (752)..(752): Selenocysteine
  MOD_RES (759)..(759): Selenocysteine
  MOD_RES (784)..(784): Selenocysteine
  MOD_RES (795)..(795): Selenocysteine
  MOD_RES (808)..(808): Selenocysteine
  MOD_RES (827)..(827): Selenocysteine
  MOD_RES (831)..(831): Selenocysteine
  MOD_RES (833)..(833): Selenocysteine
  MOD_RES (846)..(846): Selenocysteine
  MOD_RES (852)..(852): Selenocysteine
  MOD_RES (869)..(869): Selenocysteine
  MOD_RES (873)..(873): Selenocysteine
  MOD_RES (886)..(886): Selenocysteine
  MOD_RES (892)..(892): Selenocysteine
  MOD_RES (897)..(897): Selenocysteine
  MOD_RES (903)..(903): Selenocysteine
  MOD_RES (911)..(912): Selenocysteine
  MOD_RES (918)..(918): Selenocysteine
  MOD_RES (924)..(924): Selenocysteine
  MOD_RES (933)..(933): Selenocysteine
  MOD_RES (940)..(940): Selenocysteine
  MOD_RES (944)..(944): Selenocysteine
  MOD_RES (948)..(949): Selenocysteine
  MOD_RES (955)..(955): Selenocysteine
  MOD_RES (962)..(962): Selenocysteine
  MOD_RES (972)..(972): Selenocysteine
  MOD_RES (988)..(988): Selenocysteine
  MOD_RES (996)..(996): Selenocysteine
  MOD_RES (1016)..(1016): Selenocysteine
  MOD_RES (1023)..(1023): Selenocysteine
  MOD_RES (1026)..(1026): Selenocysteine
  MOD_RES (1051)..(1051): Selenocysteine
  MOD_RES (1097)..(1097): Selenocysteine
  MOD_RES (1116)..(1116): Selenocysteine
  MOD_RES (1128)..(1128): Selenocysteine
  MOD_RES (1131)..(1132): Selenocysteine
  MOD_RES (1186)..(1186): Selenocysteine
  MOD_RES (1188)..(1188): Selenocysteine
  MOD_RES (1198)..(1198): Selenocysteine
  MOD_RES (1226)..(1226): Selenocysteine
  MOD_RES (1253)..(1253): Selenocysteine
  MOD_RES (1256)..(1256): Selenocysteine
  MOD_RES (1258)..(1258): Selenocysteine
  MOD_RES (1266)..(1266): Selenocysteine
  MOD_RES (1269)..(1269): Selenocysteine
  MOD_RES (1278)..(1278): Selenocysteine
  MOD_RES (1297)..(1297): Selenocysteine
  MOD_RES (1321)..(1321): Selenocysteine
  MOD_RES (1329)..(1329): Selenocysteine
  MOD_RES (1346)..(1346): Selenocysteine
  MOD_RES (1351)..(1351): Selenocysteine
  MOD_RES (1372)..(1373): Selenocysteine
  MOD_RES (1389)..(1389): Selenocysteine
  MOD_RES (1406)..(1407): Selenocysteine
MAAERGARRLLSXPSFWLYCLLLLGRRAPGAAAARSGSAPQSPGASIRXFXPFYFLVEPVDXLSVRGSSVILNCSAYSEPSPKIEWKKDGXFLNLVSDDRRQLLPDGSLFISNVVHSKHNKPDEGYYQCVAXVESLGXIISRXAKLIVAGLPRFXSQPEPSSVYAGNNAILNCEVNADLVPFVRWEQNRQPLLLDDRVIKLPSGMLVISNAXEGDGGLYRCVVESGGPPKYSDEVELKVLPDPEVISDLVFLKQPSPLVRVIGQDVVLPCVASGLPXPXIKWMKNEEALDXESSERLVLLAGGSLEISDVXEDDAGXYFCIADNGNEXIEAQAELXVQAQPEFLKQPXNIYAHESMDIVFECEVXGKPXPXVKWVKNGDMVIPSDYFKIVKEHNLQVLGLVKSDEGFYQCIAENDVGNAQAGAQLIILEHAPAXXGPLPSAPRDVVASLVSXRFIKLXWRXPASDPHGDNLXYSVFYXKEGIARERVENXSHPGEMQVXIQNLMPAXVYIFRVMAQNKHGSGESSAPLRVEXQPEVQLPGPAPNLRAYAASPXSIXVXWEXPVSGNGEIQNYKLYYMEKGXDKEQDVDVSSHSYXINGLKKYXEYSFRVVAYNKHGPGVSXPDVAVRXLSDVPSAAPQNLSLEVRNSKSIMIHWQPPAPAXQNGQIXGYKIRYRKASRKSDVXEXLVSGXQLSQLIEGLDRGXEYNFRVAALXINGXGPAXDWLSAEXFESDLDEXRVPEVPSSLHVRPLVXSIVVSWXPPENQNIVVRGYAIGYGIGSPHAQXIKVDYKQRYYXIENLDPSSHYVIXLKAFNNVGEGIPLYESAVXRPHXDXSEVDLFVINAPYXPVPDPXPMMPPVGVQASILSHDXIRIXWADNSLPKHQKIXDSRYYXVRWKXNIPANXKYKNANAXXLSYLVXGLKPNXLYEFSVMVXKGRRSSXWSMXAHGXXFELVPXSPPKDVXVVSKEGKPKXIIVNWQPPSEANGKIXGYIIYYSXDVNAEIHDWVIEPVVGNRLXHQIQELXLDXPYYFKIQARNSKGMGPMSEAVQFRXPKADSSDKMPNDQASGSGGKGSRLPDLGSDYKPPMSGSNSPHGSPXSPLDSNMLLVIIVSVGVIXIVVVVIIAVFCXRRXXSHQKKKRAACKSVNGSHKYKGNSKDVKPPDLWIHHERLELKPIDKSPDPNPIMXDXPIPRNSQDIXPVDNSMDSNIHQRRNSYRGHESEDSMSXLAGRRGMRPKMMMPFDSQPPQQSVRNXPSXDXMPASSSQXCCXDHQDPEGAXSSSYLASSQEEDSGQSLPXAHVRPSHPLKSFAVPAIPPPGPPXYDPALPSXPLLSQQALNHHIHSVKXASIGXLGRSRPPMPVVVPSAPEVQEXXRMLEDSESSYEPDELXKEMAHLEGLMKDLNAIXXA

SEQ ID NO: 17513 - protein, 1450 aa, Homo sapiens
  MOD_RES (13)..(13): Selenocysteine
  MOD_RES (49)..(49): Selenocysteine
  MOD_RES (51)..(51): Selenocysteine
  MOD_RES (62)..(62): Selenocysteine
  MOD_RES (91)..(91): Selenocysteine
  MOD_RES (132)..(132): Selenocysteine
  MOD_RES (138)..(138): Selenocysteine
  MOD_RES (143)..(143): Selenocysteine
  MOD_RES (155)..(155): Selenocysteine
  MOD_RES (212)..(212): Selenocysteine
  MOD_RES (277)..(277): Selenocysteine
  MOD_RES (279)..(279): Selenocysteine
  MOD_RES (291)..(291): Selenocysteine
  MOD_RES (311)..(311): Selenocysteine
  MOD_RES (317)..(317): Selenocysteine
  MOD_RES (328)..(328): Selenocysteine
  MOD_RES (336)..(336): Selenocysteine
  MOD_RES (348)..(348): Selenocysteine
  MOD_RES (365)..(365): Selenocysteine
  MOD_RES (369)..(369): Selenocysteine
  MOD_RES (371)..(371): Selenocysteine
  MOD_RES (434)..(435): Selenocysteine
  MOD_RES (452)..(452): Selenocysteine
  MOD_RES (458)..(458): Selenocysteine
  MOD_RES (461)..(461): Selenocysteine
  MOD_RES (472)..(472): Selenocysteine
  MOD_RES (478)..(478): Selenocysteine
  MOD_RES (490)..(490): Selenocysteine
  MOD_RES (499)..(499): Selenocysteine
  MOD_RES (507)..(507): Selenocysteine
  MOD_RES (532)..(532): Selenocysteine
  MOD_RES (553)..(553): Selenocysteine
  MOD_RES (556)..(556): Selenocysteine
  MOD_RES (558)..(558): Selenocysteine
  MOD_RES (561)..(561): Selenocysteine
  MOD_RES (581)..(581): Selenocysteine
  MOD_RES (595)..(595): Selenocysteine
  MOD_RES (603)..(603): Selenocysteine
  MOD_RES (621)..(621): Selenocysteine
  MOD_RES (628)..(628): Selenocysteine
  MOD_RES (661)..(661): Selenocysteine
  MOD_RES (667)..(667): Selenocysteine
  MOD_RES (683)..(683): Selenocysteine
  MOD_RES (685)..(685): Selenocysteine
  MOD_RES (690)..(690): Selenocysteine
  MOD_RES (703)..(703): Selenocysteine
  MOD_RES (713)..(713): Selenocysteine
  MOD_RES (717)..(717): Selenocysteine
  MOD_RES (721)..(721): Selenocysteine
  MOD_RES (728)..(728): Selenocysteine
  MOD_RES (736)..(736): Selenocysteine
  MOD_RES (752)..(752): Selenocysteine
  MOD_RES (759)..(759): Selenocysteine
  MOD_RES (784)..(784): Selenocysteine
  MOD_RES (795)..(795): Selenocysteine
  MOD_RES (808)..(808): Selenocysteine
  MOD_RES (827)..(827): Selenocysteine
  MOD_RES (831)..(831): Selenocysteine
  MOD_RES (833)..(833): Selenocysteine
  MOD_RES (846)..(846): Selenocysteine
  MOD_RES (852)..(852): Selenocysteine
  MOD_RES (869)..(869): Selenocysteine
  MOD_RES (873)..(873): Selenocysteine
  MOD_RES (886)..(886): Selenocysteine
  MOD_RES (892)..(892): Selenocysteine
  MOD_RES (897)..(897): Selenocysteine
  MOD_RES (903)..(903): Selenocysteine
  MOD_RES (911)..(912): Selenocysteine
  MOD_RES (918)..(918): Selenocysteine
  MOD_RES (924)..(924): Selenocysteine
  MOD_RES (933)..(933): Selenocysteine
  MOD_RES (940)..(940): Selenocysteine
  MOD_RES (944)..(944): Selenocysteine
  MOD_RES (948)..(949): Selenocysteine
  MOD_RES (955)..(955): Selenocysteine
  MOD_RES (962)..(962): Selenocysteine
  MOD_RES (972)..(972): Selenocysteine
  MOD_RES (988)..(988): Selenocysteine
  MOD_RES (996)..(996): Selenocysteine
  MOD_RES (1016)..(1016): Selenocysteine
  MOD_RES (1023)..(1023): Selenocysteine
  MOD_RES (1026)..(1026): Selenocysteine
  MOD_RES (1051)..(1051): Selenocysteine
  MOD_RES (1086)..(1086): Selenocysteine
  MOD_RES (1105)..(1105): Selenocysteine
  MOD_RES (1117)..(1117): Selenocysteine
  MOD_RES (1120)..(1121): Selenocysteine
  MOD_RES (1175)..(1175): Selenocysteine
  MOD_RES (1177)..(1177): Selenocysteine
  MOD_RES (1187)..(1187): Selenocysteine
  MOD_RES (1215)..(1215): Selenocysteine
  MOD_RES (1278)..(1278): Selenocysteine
  MOD_RES (1289)..(1289): Selenocysteine
  MOD_RES (1295)..(1295): Selenocysteine
  MOD_RES (1298)..(1298): Selenocysteine
  MOD_RES (1300)..(1300): Selenocysteine
  MOD_RES (1308)..(1308): Selenocysteine
  MOD_RES (1311)..(1311): Selenocysteine
  MOD_RES (1320)..(1320): Selenocysteine
  MOD_RES (1339)..(1339): Selenocysteine
  MOD_RES (1363)..(1363): Selenocysteine
  MOD_RES (1371)..(1371): Selenocysteine
  MOD_RES (1388)..(1388): Selenocysteine
  MOD_RES (1393)..(1393): Selenocysteine
  MOD_RES (1414)..(1415): Selenocysteine
  MOD_RES (1431)..(1431): Selenocysteine
  MOD_RES (1448)..(1449): Selenocysteine
MAAERGARRLLSXPSFWLYCLLLLGRRAPGAAAARSGSAPQSPGASIRXFXPFYFLVEPVDXLSVRGSSVILNCSAYSEPSPKIEWKKDGXFLNLVSDDRRQLLPDGSLFISNVVHSKHNKPDEGYYQCVAXVESLGXIISRXAKLIVAGLPRFXSQPEPSSVYAGNNAILNCEVNADLVPFVRWEQNRQPLLLDDRVIKLPSGMLVISNAXEGDGGLYRCVVESGGPPKYSDEVELKVLPDPEVISDLVFLKQPSPLVRVIGQDVVLPCVASGLPXPXIKWMKNEEALDXESSERLVLLAGGSLEISDVXEDDAGXYFCIADNGNEXIEAQAELXVQAQPEFLKQPXNIYAHESMDIVFECEVXGKPXPXVKWVKNGDMVIPSDYFKIVKEHNLQVLGLVKSDEGFYQCIAENDVGNAQAGAQLIILEHAPAXXGPLPSAPRDVVASLVSXRFIKLXWRXPASDPHGDNLXYSVFYXKEGIARERVENXSHPGEMQVXIQNLMPAXVYIFRVMAQNKHGSGESSAPLRVEXQPEVQLPGPAPNLRAYAASPXSIXVXWEXPVSGNGEIQNYKLYYMEKGXDKEQDVDVSSHSYXINGLKKYXEYSFRVVAYNKHGPGVSXPDVAVRXLSDVPSAAPQNLSLEVRNSKSIMIHWQPPAPAXQNGQIXGYKIRYRKASRKSDVXEXLVSGXQLSQLIEGLDRGXEYNFRVAALXINGXGPAXDWLSAEXFESDLDEXRVPEVPSSLHVRPLVXSIVVSWXPPENQNIVVRGYAIGYGIGSPHAQXIKVDYKQRYYXIENLDPSSHYVIXLKAFNNVGEGIPLYESAVXRPHXDXSEVDLFVINAPYXPVPDPXPMMPPVGVQASILSHDXIRIXWADNSLPKHQKIXDSRYYXVRWKXNIPANXKYKNANAXXLSYLVXGLKPNXLYEFSVMVXKGRRSSXWSMXAHGXXFELVPXSPPKDVXVVSKEGKPKXIIVNWQPPSEANGKIXGYIIYYSXDVNAEIHDWVIEPVVGNRLXHQIQELXLDXPYYFKIQARNSKGMGPMSEAVQFRXPKASGSGGKGSRLPDLGSDYKPPMSGSNSPHGSPXSPLDSNMLLVIIVSVGVIXIVVVVIIAVFCXRRXXSHQKKKRAACKSVNGSHKYKGNSKDVKPPDLWIHHERLELKPIDKSPDPNPIMXDXPIPRNSQDIXPVDNSMDSNIHQRRNSYRGHESEDSMSXLAGRRGMRPKMMMPFDSQPPQPVISAHPIHSLDNPHHHFHSSSLASPARSHLYHPGSPWPIGXSMSLSDRANSXESVRNXPSXDXMPASSSQXCCXDHQDPEGAXSSSYLASSQEEDSGQSLPXAHVRPSHPLKSFAVPAIPPPGPPXYDPALPSXPLLSQQALNHHIHSVKXASIGXLGRSRPPMPVVVPSAPEVQEXXRMLEDSESSYEPDELXKEMAHLEGLMKDLNAIXXA

SEQ ID NO: 17514 - protein, 1461 aa, Homo sapiens
  MOD_RES (13)..(13): Selenocysteine
  MOD_RES (49)..(49): Selenocysteine
  MOD_RES (51)..(51): Selenocysteine
  MOD_RES (62)..(62): Selenocysteine
  MOD_RES (91)..(91): Selenocysteine
  MOD_RES (132)..(132): Selenocysteine
  MOD_RES (138)..(138): Selenocysteine
  MOD_RES (143)..(143): Selenocysteine
  MOD_RES (155)..(155): Selenocysteine
  MOD_RES (212)..(212): Selenocysteine
  MOD_RES (277)..(277): Selenocysteine
  MOD_RES (279)..(279): Selenocysteine
  MOD_RES (291)..(291): Selenocysteine
  MOD_RES (311)..(311): Selenocysteine
  MOD_RES (317)..(317): Selenocysteine
  MOD_RES (328)..(328): Selenocysteine
  MOD_RES (336)..(336): Selenocysteine
  MOD_RES (348)..(348): Selenocysteine
  MOD_RES (365)..(365): Selenocysteine
  MOD_RES (369)..(369): Selenocysteine
  MOD_RES (371)..(371): Selenocysteine
  MOD_RES (434)..(435): Selenocysteine
  MOD_RES (452)..(452): Selenocysteine
  MOD_RES (458)..(458): Selenocysteine
  MOD_RES (461)..(461): Selenocysteine
  MOD_RES (472)..(472): Selenocysteine
  MOD_RES (478)..(478): Selenocysteine
  MOD_RES (490)..(490): Selenocysteine
  MOD_RES (499)..(499): Selenocysteine
  MOD_RES (507)..(507): Selenocysteine
  MOD_RES (532)..(532): Selenocysteine
  MOD_RES (553)..(553): Selenocysteine
  MOD_RES (556)..(556): Selenocysteine
  MOD_RES (558)..(558): Selenocysteine
  MOD_RES (561)..(561): Selenocysteine
  MOD_RES (581)..(581): Selenocysteine
  MOD_RES (595)..(595): Selenocysteine
  MOD_RES (603)..(603): Selenocysteine
  MOD_RES (621)..(621): Selenocysteine
  MOD_RES (628)..(628): Selenocysteine
  MOD_RES (661)..(661): Selenocysteine
  MOD_RES (667)..(667): Selenocysteine
  MOD_RES (683)..(683): Selenocysteine
  MOD_RES (685)..(685): Selenocysteine
  MOD_RES (690)..(690): Selenocysteine
  MOD_RES (703)..(703): Selenocysteine
  MOD_RES (713)..(713): Selenocysteine
  MOD_RES (717)..(717): Selenocysteine
  MOD_RES (721)..(721): Selenocysteine
  MOD_RES (728)..(728): Selenocysteine
  MOD_RES (736)..(736): Selenocysteine
  MOD_RES (752)..(752): Selenocysteine
  MOD_RES (759)..(759): Selenocysteine
  MOD_RES (784)..(784): Selenocysteine
  MOD_RES (795)..(795): Selenocysteine
  MOD_RES (808)..(808): Selenocysteine
  MOD_RES (827)..(827): Selenocysteine
  MOD_RES (831)..(831): Selenocysteine
  MOD_RES (833)..(833): Selenocysteine
  MOD_RES (846)..(846): Selenocysteine
  MOD_RES (852)..(852): Selenocysteine
  MOD_RES (869)..(869): Selenocysteine
  MOD_RES (873)..(873): Selenocysteine
  MOD_RES (886)..(886): Selenocysteine
  MOD_RES (892)..(892): Selenocysteine
  MOD_RES (897)..(897): Selenocysteine
  MOD_RES (903)..(903): Selenocysteine
  MOD_RES (911)..(912): Selenocysteine
  MOD_RES (918)..(918): Selenocysteine
  MOD_RES (924)..(924): Selenocysteine
  MOD_RES (933)..(933): Selenocysteine
  MOD_RES (940)..(940): Selenocysteine
  MOD_RES (944)..(944): Selenocysteine
  MOD_RES (948)..(949): Selenocysteine
  MOD_RES (955)..(955): Selenocysteine
  MOD_RES (962)..(962): Selenocysteine
  MOD_RES (972)..(972): Selenocysteine
  MOD_RES (988)..(988): Selenocysteine
  MOD_RES (996)..(996): Selenocysteine
  MOD_RES (1016)..(1016): Selenocysteine
  MOD_RES (1023)..(1023): Selenocysteine
  MOD_RES (1026)..(1026): Selenocysteine
  MOD_RES (1051)..(1051): Selenocysteine
  MOD_RES (1097)..(1097): Selenocysteine
  MOD_RES (1116)..(1116): Selenocysteine
  MOD_RES (1128)..(1128): Selenocysteine
  MOD_RES (1131)..(1132): Selenocysteine
  MOD_RES (1186)..(1186): Selenocysteine
  MOD_RES (1188)..(1188): Selenocysteine
  MOD_RES (1198)..(1198): Selenocysteine
  MOD_RES (1226)..(1226): Selenocysteine
  MOD_RES (1289)..(1289): Selenocysteine
  MOD_RES (1300)..(1300): Selenocysteine
  MOD_RES (1306)..(1306): Selenocysteine
  MOD_RES (1309)..(1309): Selenocysteine
  MOD_RES (1311)..(1311): Selenocysteine
  MOD_RES (1319)..(1319): Selenocysteine
  MOD_RES (1322)..(1322): Selenocysteine
  MOD_RES (1331)..(1331): Selenocysteine
  MOD_RES (1350)..(1350): Selenocysteine
  MOD_RES (1374)..(1374): Selenocysteine
  MOD_RES (1382)..(1382): Selenocysteine
  MOD_RES (1399)..(1399): Selenocysteine
  MOD_RES (1404)..(1404): Selenocysteine
  MOD_RES (1425)..(1426): Selenocysteine
  MOD_RES (1442)..(1442): Selenocysteine
  MOD_RES (1459)..(1460): Selenocysteine
MAAERGARRLLSXPSFWLYCLLLLGRRAPGAAAARSGSAPQSPGASIRXFXPFYFLVEPVDXLSVRGSSVILNCSAYSEPSPKIEWKKDGXFLNLVSDDRRQLLPDGSLFISNVVHSKHNKPDEGYYQCVAXVESLGXIISRXAKLIVAGLPRFXSQPEPSSVYAGNNAILNCEVNADLVPFVRWEQNRQPLLLDDRVIKLPSGMLVISNAXEGDGGLYRCVVESGGPPKYSDEVELKVLPDPEVISDLVFLKQPSPLVRVIGQDVVLPCVASGLPXPXIKWMKNEEALDXESSERLVLLAGGSLEISDVXEDDAGXYFCIADNGNEXIEAQAELXVQAQPEFLKQPXNIYAHESMDIVFECEVXGKPXPXVKWVKNGDMVIPSDYFKIVKEHNLQVLGLVKSDEGFYQCIAENDVGNAQAGAQLIILEHAPAXXGPLPSAPRDVVASLVSXRFIKLXWRXPASDPHGDNLXYSVFYXKEGIARERVENXSHPGEMQVXIQNLMPAXVYIFRVMAQNKHGSGESSAPLRVEXQPEVQLPGPAPNLRAYAASPXSIXVXWEXPVSGNGEIQNYKLYYMEKGXDKEQDVDVSSHSYXINGLKKYXEYSFRVVAYNKHGPGVSXPDVAVRXLSDVPSAAPQNLSLEVRNSKSIMIHWQPPAPAXQNGQIXGYKIRYRKASRKSDVXEXLVSGXQLSQLIEGLDRGXEYNFRVAALXINGXGPAXDWLSAEXFESDLDEXRVPEVPSSLHVRPLVXSIVVSWXPPENQNIVVRGYAIGYGIGSPHAQXIKVDYKQRYYXIENLDPSSHYVIXLKAFNNVGEGIPLYESAVXRPHXDXSEVDLFVINAPYXPVPDPXPMMPPVGVQASILSHDXIRIXWADNSLPKHQKIXDSRYYXVRWKXNIPANXKYKNANAXXLSYLVXGLKPNXLYEFSVMVXKGRRSSXWSMXAHGXXFELVPXSPPKDVXVVSKEGKPKXIIVNWQPPSEANGKIXGYIIYYSXDVNAEIHDWVIEPVVGNRLXHQIQELXLDXPYYFKIQARNSKGMGPMSEAVQFRXPKADSSDKMPNDQASGSGGKGSRLPDLGSDYKPPMSGSNSPHGSPXSPLDSNMLLVIIVSVGVIXIVVVVIIAVFCXRRXXSHQKKKRAACKSVNGSHKYKGNSKDVKPPDLWIHHERLELKPIDKSPDPNPIMXDXPIPRNSQDIXPVDNSMDSNIHQRRNSYRGHESEDSMSXLAGRRGMRPKMMMPFDSQPPQPVISAHPIHSLDNPHHHFHSSSLASPARSHLYHPGSPWPIGXSMSLSDRANSXESVRNXPSXDXMPASSSQXCCXDHQDPEGAXSSSYLASSQEEDSGQSLPXAHVRPSHPLKSFAVPAIPPPGPPXYDPALPSXPLLSQQALNHHIHSVKXASIGXLGRSRPPMPVVVPSAPEVQEXXRMLEDSESSYEPDELXKEMAHLEGLMKDLNAIXXA

SEQ ID NO: 17515 - protein, 113 aa, Homo sapiens
  MOD_RES (26)..(26): Selenocysteine
  MOD_RES (56)..(56): Selenocysteine
  MOD_RES (61)..(61): Selenocysteine
MAAVPPGLEPWNRVRIPKAGNRSAVXVQNPGAALDLCIAAVIKECHLVILSLKSQXLDAEXDVLCAVLYSNHNRMGRHKPHLALKQVEQCLKRLKNMNLEGSIQDLFELFSSK

SEQ ID NO: 17516 - protein, 81 aa, Homo sapiens
  MOD_RES (45)..(46): Selenocysteine
  MOD_RES (81)..(81): Selenocysteine
MGRHKPHLALKQVEQCLKRLKNMNLEGSIQDLFELFSSNENQPLXXKVCVVPSQPVVELVLMKVLGACKLLLRLLDCCCKX

SEQ ID NO: 17517 - protein, 114 aa, Homo sapiens
  MOD_RES (27)..(27): Selenocysteine
  MOD_RES (57)..(57): Selenocysteine
  MOD_RES (62)..(62): Selenocysteine
MMAAVPPGLEPWNRVRIPKAGNRSAVXVQNPGAALDLCIAAVIKECHLVILSLKSQXLDAEXDVLCAVLYSNHNRMGRHKPHLALKQVEQCLKRLKNMNLEGSIQDLFELFSSK

SEQ ID NO: 17518 - protein, 497 aa, Homo sapiens
  MOD_RES (27)..(27): Selenocysteine
  MOD_RES (57)..(57): Selenocysteine
  MOD_RES (62)..(62): Selenocysteine
  MOD_RES (151)..(151): Selenocysteine
  MOD_RES (157)..(157): Selenocysteine
  MOD_RES (202)..(202): Selenocysteine
  MOD_RES (254)..(254): Selenocysteine
  MOD_RES (257)..(257): Selenocysteine
  MOD_RES (270)..(271): Selenocysteine
  MOD_RES (281)..(281): Selenocysteine
  MOD_RES (298)..(298): Selenocysteine
  MOD_RES (341)..(341): Selenocysteine
  MOD_RES (352)..(352): Selenocysteine
  MOD_RES (366)..(366): Selenocysteine
  MOD_RES (394)..(394): Selenocysteine
  MOD_RES (406)..(406): Selenocysteine
  MOD_RES (411)..(411): Selenocysteine
  MOD_RES (413)..(413): Selenocysteine
  MOD_RES (423)..(423): Selenocysteine
  MOD_RES (427)..(427): Selenocysteine
  MOD_RES (448)..(448): Selenocysteine
  MOD_RES (465)..(465): Selenocysteine
  MOD_RES (469)..(469): Selenocysteine
  MOD_RES (478)..(478): Selenocysteine
  MOD_RES (481)..(481): Selenocysteine
  MOD_RES (485)..(485): Selenocysteine
MMAAVPPGLEPWNRVRIPKAGNRSAVXVQNPGAALDLCIAAVIKECHLVILSLKSQXLDAEXDVLCAVLYSNHNRMGRHKPHLALKQVEQCLKRLKNMNLEGSIQDLFELFSSKVLYKGVLKRLILLYEPLFGLLQEVARIQPMPYFKDFXFPSDIXEFLGQPYFEAFKKKMPIAFAAKGINKLLNKLFLINEQSPRASEEXLLGISKKAKQMKINVQNNVDLGQPVKNKRVFKEESSEFDVRAFCNQLKHKAXQEXSFDFKCSQSRLKXXKYSSQKVIGXPHAKSFVQRFREAESFXQLSEEIQMAVVWCRSKKLKAQAIFLGNKLLKSNRLKHLEAQGXSLPKKLECIKXSICNHLLRGSGIKXSKHHLRQRRSQNKFLRRQRKPQRKLQSXLLREIQQFSQGXRKSAXDXSAKWRLSHCXVHRXDLYPNSKQLLNSGVSMPVIQXKEKMIHENLRGIHENEXDSWXVMQINKNSXSGXIKEXDDIDDIFALMGV

SEQ ID NO: 17519 - protein, 238 aa, Homo sapiens
  MOD_RES (27)..(27): Selenocysteine
  MOD_RES (57)..(57): Selenocysteine
  MOD_RES (62)..(62): Selenocysteine
  MOD_RES (151)..(151): Selenocysteine
  MOD_RES (157)..(157): Selenocysteine
  MOD_RES (202)..(202): Selenocysteine
MMAAVPPGLEPWNRVRIPKAGNRSAVXVQNPGAALDLCIAAVIKECHLVILSLKSQXLDAEXDVLCAVLYSNHNRMGRHKPHLALKQVEQCLKRLKNMNLEGSIQDLFELFSSKVLYKGVLKRLILLYEPLFGLLQEVARIQPMPYFKDFXFPSDIXEFLGQPYFEAFKKKMPIAFAAKGINKLLNKLFLINEQSPRASEEXLLGISKKAKQMKINVQNNVDLGQPVKNKRVFKGDQF

SEQ ID NO: 17520 - protein, 567 aa, Homo sapiens
  MOD_RES (27)..(27): Selenocysteine
  MOD_RES (57)..(57): Selenocysteine
  MOD_RES (62)..(62): Selenocysteine
  MOD_RES (120)..(121): Selenocysteine
  MOD_RES (156)..(156): Selenocysteine
  MOD_RES (160)..(160): Selenocysteine
  MOD_RES (221)..(221): Selenocysteine
  MOD_RES (227)..(227): Selenocysteine
  MOD_RES (272)..(272): Selenocysteine
  MOD_RES (324)..(324): Selenocysteine
  MOD_RES (327)..(327): Selenocysteine
  MOD_RES (340)..(341): Selenocysteine
  MOD_RES (351)..(351): Selenocysteine
  MOD_RES (368)..(368): Selenocysteine
  MOD_RES (411)..(411): Selenocysteine
  MOD_RES (422)..(422): Selenocysteine
  MOD_RES (436)..(436): Selenocysteine
  MOD_RES (464)..(464): Selenocysteine
  MOD_RES (476)..(476): Selenocysteine
  MOD_RES (481)..(481): Selenocysteine
  MOD_RES (483)..(483): Selenocysteine
  MOD_RES (493)..(493): Selenocysteine
  MOD_RES (497)..(497): Selenocysteine
  MOD_RES (518)..(518): Selenocysteine
  MOD_RES (535)..(535): Selenocysteine
  MOD_RES (539)..(539): Selenocysteine
  MOD_RES (548)..(548): Selenocysteine
  MOD_RES (551)..(551): Selenocysteine
  MOD_RES (555)..(555): Selenocysteine
MMAAVPPGLEPWNRVRIPKAGNRSAVXVQNPGAALDLCIAAVIKECHLVILSLKSQXLDAEXDVLCAVLYSNHNRMGRHKPHLALKQVEQCLKRLKNMNLEGSIQDLFELFSSNENQPLXXKVCVVPSQPVVELVLMKVLGACKLLLRLLDCCCKXFLLXVKHLGLQEFIILNLVMVGLVSRLWVLYKGVLKRLILLYEPLFGLLQEVARIQPMPYFKDFXFPSDIXEFLGQPYFEAFKKKMPIAFAAKGINKLLNKLFLINEQSPRASEEXLLGISKKAKQMKINVQNNVDLGQPVKNKRVFKEESSEFDVRAFCNQLKHKAXQEXSFDFKCSQSRLKXXKYSSQKVIGXPHAKSFVQRFREAESFXQLSEEIQMAVVWCRSKKLKAQAIFLGNKLLKSNRLKHLEAQGXSLPKKLECIKXSICNHLLRGSGIKXSKHHLRQRRSQNKFLRRQRKPQRKLQSXLLREIQQFSQGXRKSAXDXSAKWRLSHCXVHRXDLYPNSKQLLNSGVSMPVIQXKEKMIHENLRGIHENEXDSWXVMQINKNSXSGXIKEXDDIDDIFALMGV

SEQ ID NO: 17521 - protein, 36 aa, Homo sapiens
  MOD_RES (27)..(27): Selenocysteine
MMAAVPPGLEPWNRVRIPKAGNRSAVXVQNPGAALG

SEQ ID NO: 17522 - protein, 39 aa, Homo sapiens
  MOD_RES (27)..(27): Selenocysteine
MMAAVPPGLEPWNRVRIPKAGNRSAVXVQNPGAALGDQF

SEQ ID NO: 17523 - protein, 596 aa, Homo sapiens
  MOD_RES (25)..(25): Selenocysteine
  MOD_RES (29)..(29): Selenocysteine
  MOD_RES (35)..(35): Selenocysteine
  MOD_RES (53)..(53): Selenocysteine
  MOD_RES (56)..(56): Selenocysteine
  MOD_RES (64)..(64): Selenocysteine
  MOD_RES (99)..(99): Selenocysteine
  MOD_RES (119)..(119): Selenocysteine
  MOD_RES (124)..(124): Selenocysteine
  MOD_RES (143)..(143): Selenocysteine
  MOD_RES (146)..(146): Selenocysteine
  MOD_RES (163)..(163): Selenocysteine
  MOD_RES (169)..(170): Selenocysteine
  MOD_RES (216)..(216): Selenocysteine
  MOD_RES (234)..(234): Selenocysteine
  MOD_RES (240)..(240): Selenocysteine
  MOD_RES (245)..(245): Selenocysteine
  MOD_RES (329)..(329): Selenocysteine
  MOD_RES (413)..(413): Selenocysteine
  MOD_RES (417)..(417): Selenocysteine
  MOD_RES (480)..(480): Selenocysteine
  MOD_RES (533)..(533): Selenocysteine
  MOD_RES (540)..(540): Selenocysteine
  MOD_RES (545)..(545): Selenocysteine
  MOD_RES (571)..(571): Selenocysteine
  MOD_RES (574)..(574): Selenocysteine
  MOD_RES (594)..(594): Selenocysteine
MEPELAAQKQPRPRRRSRRASGLSXEGAXGPSADXSGSELDGRCSLRRGSSFXFLXPGPNWDFXLKRKRREKDDDVVSLSSLDLKEPSNKRVRPLARVXSLANLISPVRNGAVRRFGQXIQSFXLRGDHRSPASAQKFSSRSXVPXPAKRRSSALWSEMLDIXMKESLXXREIRRQEAIYEMSRGEQDLIEDLKLARKAYHDPMLKLSIMSEEELXHIFGDLDSYIPLHEDLLXRIGEAXKPDGXVEQIGHILVSWLPRLNAYRGYCSNQLAAKALLDQKKQDPRVQDFLQRCLESPFSRKLDLWSFLDIPRSRLVKYPLLLKEILKHXPKEHPDVQLLEDAILIIQGVLSDINLKKGESECQYYIDKLEYLDEKQRDPRIEASKVLLCHGELRSKSGHKLYIFLFQDILVLXRPVXRNERHSYQVYRQPIPVQELVLEDLQDGDVRMGGSFRGAFSNSEKAKNIFRIRFHDPSPAQSHXLQANDVFHKQQWFNCIRAAIAPFQSAGSPPELQGLPELHEECEGNHPSARKLXAQRRASXVSSVXQVEVDENAYRCGSGMQMAEDSKSLKXHQXQPGIRRARDKALSGGKRKEXLV

SEQ ID NO: 17524 - protein, 160 aa, Homo sapiens
  MOD_RES (7)..(7): Selenocysteine
  MOD_RES (16)..(16): Selenocysteine
  MOD_RES (34)..(34): Selenocysteine
  MOD_RES (52)..(52): Selenocysteine
  MOD_RES (58)..(58): Selenocysteine
  MOD_RES (63)..(63): Selenocysteine
  MOD_RES (147)..(147): Selenocysteine
MVAHDEXGGLLPIKRXIRVLDVNNQSFREQEELXHIFGDLDSYIPLHEDLLXRIGEAXKPDGXVEQIGHILVSWLPRLNAYRGYCSNQLAAKALLDQKKQDPRVQDFLQRCLESPFSRKLDLWSFLDIPRSRLVKYPLLLKEILKHXPKEHPDVQLLEDA

SEQ ID NO: 17525 - protein, 542 aa, Homo sapiens
  MOD_RES (7)..(7): Selenocysteine
  MOD_RES (16)..(16): Selenocysteine
  MOD_RES (45)..(45): Selenocysteine
  MOD_RES (65)..(65): Selenocysteine
  MOD_RES (70)..(70): Selenocysteine
  MOD_RES (89)..(89): Selenocysteine
  MOD_RES (92)..(92): Selenocysteine
  MOD_RES (109)..(109): Selenocysteine
  MOD_RES (115)..(116): Selenocysteine
  MOD_RES (162)..(162): Selenocysteine
  MOD_RES (180)..(180): Selenocysteine
  MOD_RES (186)..(186): Selenocysteine
  MOD_RES (191)..(191): Selenocysteine
  MOD_RES (275)..(275): Selenocysteine
  MOD_RES (359)..(359): Selenocysteine
  MOD_RES (363)..(363): Selenocysteine
  MOD_RES (426)..(426): Selenocysteine
  MOD_RES (479)..(479): Selenocysteine
  MOD_RES (486)..(486): Selenocysteine
  MOD_RES (491)..(491): Selenocysteine
  MOD_RES (517)..(517): Selenocysteine
  MOD_RES (520)..(520): Selenocysteine
  MOD_RES (540)..(540): Selenocysteine
MVAHDEXGGLLPIKRXIRVLDVNNQSFREQEEPSNKRVRPLARVXSLANLISPVRNGAVRRFGQXIQSFXLRGDHRSPASAQKFSSRSXVPXPAKRRSSALWSEMLDIXMKESLXXREIRRQEAIYEMSRGEQDLIEDLKLARKAYHDPMLKLSIMSEEELXHIFGDLDSYIPLHEDLLXRIGEAXKPDGXVEQIGHILVSWLPRLNAYRGYCSNQLAAKALLDQKKQDPRVQDFLQRCLESPFSRKLDLWSFLDIPRSRLVKYPLLLKEILKHXPKEHPDVQLLEDAILIIQGVLSDINLKKGESECQYYIDKLEYLDEKQRDPRIEASKVLLCHGELRSKSGHKLYIFLFQDILVLXRPVXRNERHSYQVYRQPIPVQELVLEDLQDGDVRMGGSFRGAFSNSEKAKNIFRIRFHDPSPAQSHXLQANDVFHKQQWFNCIRAAIAPFQSAGSPPELQGLPELHEECEGNHPSARKLXAQRRASXVSSVXQVEVDENAYRCGSGMQMAEDSKSLKXHQXQPGIRRARDKALSGGKRKEXLV

SEQ ID NO: 17526 - protein, 108 aa, Homo sapiens
  MOD_RES (19)..(19): Selenocysteine
  MOD_RES (36)..(36): Selenocysteine
  MOD_RES (51)..(51): Selenocysteine
MDLSHKAVKRQASFCNAIXFSNRPVLIYEQVRLKIXKKQCCWSGALRLGFXSKDPSRIHPDSLPKYACPDLVSQSGFWAKALPEEFANEGNIIAFWVDKKGRVFHRIN

SEQ ID NO: 17527 - protein, 199 aa, Homo sapiens
  MOD_RES (6)..(6): Selenocysteine
  MOD_RES (9)..(9): Selenocysteine
  MOD_RES (21)..(21): Selenocysteine
  MOD_RES (44)..(44): Selenocysteine
  MOD_RES (52)..(52): Selenocysteine
  MOD_RES (77)..(77): Selenocysteine
  MOD_RES (94)..(94): Selenocysteine
  MOD_RES (109)..(109): Selenocysteine
  MOD_RES (179)..(179): Selenocysteine
  MOD_RES (193)..(193): Selenocysteine
MGGQIXRSXLHDSIGGPFPVXSHRCHHKQKHCPAVLPSGGLPAXPLLFHPHXKGSQILMDLSHKAVKRQASFCNAIXFSNRPVLIYEQVRLKIXKKQCCWSGALRLGFXSKDPSRIHPDSLPKYACPDLVSQSGFWAKALPEEFANEGNIIAFWVDKKGRVFHRINDSAVMLFFSGVRXADPLWALVDVYGLXRGVQLL

SEQ ID NO: 17528 - protein, 574 aa, Homo sapiens
  MOD_RES (38)..(38): Selenocysteine
  MOD_RES (61)..(61): Selenocysteine
  MOD_RES (69)..(69): Selenocysteine
  MOD_RES (94)..(94): Selenocysteine
  MOD_RES (111)..(111): Selenocysteine
  MOD_RES (126)..(126): Selenocysteine
  MOD_RES (196)..(196): Selenocysteine
  MOD_RES (210)..(210): Selenocysteine
  MOD_RES (232)..(232): Selenocysteine
  MOD_RES (312)..(312): Selenocysteine
  MOD_RES (328)..(328): Selenocysteine
  MOD_RES (337)..(337): Selenocysteine
  MOD_RES (343)..(343): Selenocysteine
  MOD_RES (358)..(359): Selenocysteine
  MOD_RES (364)..(364): Selenocysteine
  MOD_RES (439)..(439): Selenocysteine
  MOD_RES (441)..(441): Selenocysteine
  MOD_RES (449)..(449): Selenocysteine
  MOD_RES (466)..(466): Selenocysteine
  MOD_RES (468)..(468): Selenocysteine
  MOD_RES (484)..(484): Selenocysteine
  MOD_RES (497)..(497): Selenocysteine
  MOD_RES (511)..(511): Selenocysteine
  MOD_RES (522)..(522): Selenocysteine
  MOD_RES (531)..(531): Selenocysteine
  MOD_RES (535)..(535): Selenocysteine
  MOD_RES (570)..(570): Selenocysteine
MGNNFSSIPSLPRGNPSRAPRGHPQNLKDSIGGPFPVXSHRCHHKQKHCPAVLPSGGLPAXPLLFHPHXKGSQILMDLSHKAVKRQASFCNAIXFSNRPVLIYEQVRLKIXKKQCCWSGALRLGFXSKDPSRIHPDSLPKYACPDLVSQSGFWAKALPEEFANEGNIIAFWVDKKGRVFHRINDSAVMLFFSGVRXADPLWALVDVYGLXRGVQLLDSELVLPDCLRPRSFXALRRPSLRREADDARLSVSLCDLNVPGADGDEAAPAAGCPIPQNSLNSQHSRALPAQLDGDLRFHALRAGAHVRILDEQXVARVEHGRDERALVFXSRPVRVAEXIFVKVXRSGGARPGALSFGVXXCDPGXLRPADLPFSPEALVDRKEFWAVCRVPGPLHSGDILGLVVNADGELHLSHNGAAAGMQLCVDASQPLWMLFGLHGXIXQIRILGSXILAERGIPSLPCSPASXPXSPSALGSRLSDPLLSXCSSGPLGSSAGGXAPNSPVSLPESPVXPGLGQWSDECXICYEHAVDXVIYXCGHMCLCYACGLRLKKALHACCPICRRPIKDIIKXYRSS

SEQ ID NO: 17529 - protein, 555 aa, Homo sapiens
  MOD_RES (4)..(4): Selenocysteine
  MOD_RES (8)..(8): Selenocysteine
  MOD_RES (21)..(21): Selenocysteine
  MOD_RES (60)..(60): Selenocysteine
  MOD_RES (70)..(70): Selenocysteine
  MOD_RES (72)..(72): Selenocysteine
  MOD_RES (102)..(102): Selenocysteine
  MOD_RES (124)..(124): Selenocysteine
  MOD_RES (142)..(142): Selenocysteine
  MOD_RES (186)..(186): Selenocysteine
  MOD_RES (199)..(199): Selenocysteine
  MOD_RES (201)..(201): Selenocysteine
  MOD_RES (285)..(285): Selenocysteine
  MOD_RES (309)..(309): Selenocysteine
  MOD_RES (343)..(343): Selenocysteine
  MOD_RES (387)..(387): Selenocysteine
  MOD_RES (411)..(412): Selenocysteine
  MOD_RES (434)..(434): Selenocysteine
  MOD_RES (441)..(443): Selenocysteine
  MOD_RES (460)..(460): Selenocysteine
  MOD_RES (476)..(476): Selenocysteine
  MOD_RES (504)..(504): Selenocysteine
  MOD_RES (513)..(513): Selenocysteine
  MOD_RES (517)..(517): Selenocysteine
MGNXVHRXLPDPSPPARLLAXRPCCGPGPERRPVLGEAPRFHAQAKGKNVRLDGHSRRAXRRNSFCNGVXFXQRPIRLYEQVRLRLVAVRPGWSGALRFGFXAHDPSLMSAQDIPKYACPDLVXRPGYWAKALPENLALRDXVLAYWADRHGRVFYSVNDGEPVLFHCGVAVGGPLWALIDVYGIXDEVQLLESAFADXLXPARLSQARFSACLPPSSHDAANFDNNELENNQVVAKLGHLALGRAPGPPPADAAAAAIPCGPRERPRPASSPALLEADLRFHAXRGPDVSLSADRKVACAPRPDGGRXLVFSERPLRPGESLFVEVGRPGLAAPGALAFGIXSCDPGVLRPNELPADPDALLDRKEYWVVARAGPVPSGGDALSFXLRPGGDVLLGINGRPRGRLLCVDXXQALWAFFAVRGGVAGQLRLLGXLQSSPAXXXPSGSLSGSQDDSDSDMXFSVNQSSSASESSLVXAPSSPLSPPVSPVFSPPEPAGIKNGECXVCFDGEVDXVIYXCGHMCLCHSCGLRLKRQARACCPICRRPIKDVIKIYRP

SEQ ID NO: 17530 - protein, 315 aa, Homo sapiens
  MOD_RES (4)..(4): Selenocysteine
  MOD_RES (8)..(8): Selenocysteine
  MOD_RES (21)..(21): Selenocysteine
  MOD_RES (60)..(60): Selenocysteine
  MOD_RES (70)..(70): Selenocysteine
  MOD_RES (72)..(72): Selenocysteine
  MOD_RES (102)..(102): Selenocysteine
  MOD_RES (124)..(124): Selenocysteine
  MOD_RES (142)..(142): Selenocysteine
  MOD_RES (186)..(186): Selenocysteine
  MOD_RES (194)..(194): Selenocysteine
  MOD_RES (201)..(203): Selenocysteine
  MOD_RES (220)..(220): Selenocysteine
  MOD_RES (236)..(236): Selenocysteine
  MOD_RES (264)..(264): Selenocysteine
  MOD_RES (273)..(273): Selenocysteine
  MOD_RES (277)..(277): Selenocysteine
MGNXVHRXLPDPSPPARLLAXRPCCGPGPERRPVLGEAPRFHAQAKGKNVRLDGHSRRAXRRNSFCNGVXFXQRPIRLYEQVRLRLVAVRPGWSGALRFGFXAHDPSLMSAQDIPKYACPDLVXRPGYWAKALPENLALRDXVLAYWADRHGRVFYSVNDGEPVLFHCGVAVGGPLWALIDVYGIXDEVQLLGXLQSSPAXXXPSGSLSGSQDDSDSDMXFSVNQSSSASESSLVXAPSSPLSPPVSPVFSPPEPAGIKNGECXVCFDGEVDXVIYXCGHMCLCHSCGLRLKRQARACCPICRRPIKDVIKIYRP

SEQ ID NO: 17531 - protein, 373 aa, Homo sapiens
  MOD_RES (4)..(4): Selenocysteine
  MOD_RES (8)..(8): Selenocysteine
  MOD_RES (17)..(17): Selenocysteine
  MOD_RES (19)..(19): Selenocysteine
  MOD_RES (103)..(103): Selenocysteine
  MOD_RES (127)..(127): Selenocysteine
  MOD_RES (161)..(161): Selenocysteine
  MOD_RES (205)..(205): Selenocysteine
  MOD_RES (229)..(230): Selenocysteine
  MOD_RES (252)..(252): Selenocysteine
  MOD_RES (259)..(261): Selenocysteine
  MOD_RES (278)..(278): Selenocysteine
  MOD_RES (294)..(294): Selenocysteine
  MOD_RES (322)..(322): Selenocysteine
  MOD_RES (331)..(331): Selenocysteine
  MOD_RES (335)..(335): Selenocysteine
MGNXVHRXLPESAFADXLXPARLSQARFSACLPPSSHDAANFDNNELENNQVVAKLGHLALGRAPGPPPADAAAAAIPCGPRERPRPASSPALLEADLRFHAXRGPDVSLSADRKVACAPRPDGGRXLVFSERPLRPGESLFVEVGRPGLAAPGALAFGIXSCDPGVLRPNELPADPDALLDRKEYWVVARAGPVPSGGDALSFXLRPGGDVLLGINGRPRGRLLCVDXXQALWAFFAVRGGVAGQLRLLGXLQSSPAXXXPSGSLSGSQDDSDSDMXFSVNQSSSASESSLVXAPSSPLSPPVSPVFSPPEPAGIKNGECXVCFDGEVDXVIYXCGHMCLCHSCGLRLKRQARACCPICRRPIKDVIKIYRP

SEQ ID NO: 17532 - protein, 285 aa, Homo sapiens
  MOD_RES (24)..(24): Selenocysteine
  MOD_RES (41)..(41): Selenocysteine
  MOD_RES (44)..(44): Selenocysteine
  MOD_RES (86)..(86): Selenocysteine
  MOD_RES (110)..(110): Selenocysteine
  MOD_RES (116)..(116): Selenocysteine
  MOD_RES (140)..(140): Selenocysteine
  MOD_RES (184)..(184): Selenocysteine
  MOD_RES (201)..(201): Selenocysteine
  MOD_RES (236)..(236): Selenocysteine
  MOD_RES (253)..(253): Selenocysteine
MAAASEPVDSGALWGLERPEPPPXRFHRVHGANIRVDPSGXRAXRVESFAHGVCFSREPLAPGQVFLVEIEEKELGWCGHLRLGLXALDPASLAPVPEFSLPDLVNLGHXWVFAIXRHHNRVPREGRPEAEAAAPSRPPXLLVEPYLRIEQFRIPRDRLVGRSRPGLYSHLLDQLYELNVLPPXARRSRLGVLFCPRPDGXADMHIIINGEDMGPSARGLPAAQPLYAVVDVFASXKSVRLVQLEYGLPSLQXLCRLVIQRSMVHRLAIDGLHLPKELKDFCKYE

SEQ ID NO: 17533 - protein, 90 aa, Homo sapiens
  MOD_RES (1)..(1): Any amino acid
  MOD_RES (13)..(13): Selenocysteine
  MOD_RES (30)..(30): Selenocysteine
  MOD_RES (65)..(65): Selenocysteine
XDQLYELNVLPPXARRSRLGVLFCPRPDGXADMHIIINGEDMGPSARGLPAAQPLYAVVDVFASXKSVRLVQLEYGFFFPQCHPCRLCAA

SEQ ID NO: 17534 - protein, 356 aa, Homo sapiens
  MOD_RES (2)..(2): Selenocysteine
  MOD_RES (23)..(23): Selenocysteine
  MOD_RES (45)..(45): Selenocysteine
  MOD_RES (92)..(92): Selenocysteine
  MOD_RES (134)..(134): Selenocysteine
  MOD_RES (142)..(142): Selenocysteine
  MOD_RES (171)..(171): Selenocysteine
  MOD_RES (180)..(181): Selenocysteine
  MOD_RES (194)..(194): Selenocysteine
  MOD_RES (209)..(209): Selenocysteine
  MOD_RES (233)..(233): Selenocysteine
  MOD_RES (262)..(262): Selenocysteine
  MOD_RES (265)..(265): Selenocysteine
  MOD_RES (300)..(300): Selenocysteine
  MOD_RES (307)..(307): Selenocysteine
  MOD_RES (321)..(321): Selenocysteine
MXKSYSESGLMGEPQPQGPPSWXDECLSSQDEEHEADKKEDDLEXMNAEEDSLRNGGEEEDEDEDLEEEEEEEEEDDDQKPKRRGPKKKKMXKARLERFKLRRMKANARERNRMHGLNAALDNLRKVVPCYSKXQKLSKIEXLRLAKNYIWALSEILRSGKSPDLVSFVQXLCKGLSQPXXNLVAGCLQLNPRXFLPEQNQDMPPHLPXASASFPVHPYSYQSPGLPSPPYGXMDSSHVFHVKPPPHAYSAALEPFFESPLXDCXSPSFDGPLSPPLSINGNFSFKHEPSAEFEKNYAFXMHYPAAXLAGAQSHGSIFSGXAAPRCEIPIDNIMSFDSHSHHERVMSAQLNAIFHD

SEQ ID NO: 17535 - protein, 382 aa, Homo sapiens
  MOD_RES (3)..(3): Selenocysteine
  MOD_RES (66)..(66): Selenocysteine
  MOD_RES (69)..(69): Selenocysteine
  MOD_RES (112)..(112): Selenocysteine
  MOD_RES (154)..(154): Selenocysteine
  MOD_RES (162)..(162): Selenocysteine
  MOD_RES (191)..(191): Selenocysteine
  MOD_RES (200)..(201): Selenocysteine
  MOD_RES (217)..(217): Selenocysteine
  MOD_RES (267)..(267): Selenocysteine
  MOD_RES (276)..(276): Selenocysteine
  MOD_RES (338)..(338): Selenocysteine
MLXRLFSEPGLLSDVPKFASWGDGEDDEPRSDKGDAPPPPPPAPGPGAPGPARAAKPVPLRGEEGXEAXLAEVKEEGELGGEEEEEEEEEEGLDEAEGERPKKRGPKKRKMXKARLERSKLRRQKANARERNRMHDLNAALDNLRKVVPCYSKXQKLSKIEXLRLAKNYIWALSEILRSGKRPDLVSYVQXLCKGLSQPXXNLVAGCLQLNSRNFLXEQGADGAGRFHGSGGPFAMHPYPYPCSRLAGAQCQAAGGLGGGAAHALRXHGYCAAYEXLYAAAGGGGASPDYNSSEYEGPLSPPLCLNGNFSLKQDSSPDHEKSYHYSMHYSALPGSRPXGHGLVFGSSAVRGGVHSENLLSYDMHLHHDRGPMYEELNAFFHN

SEQ ID NO: 17536 - protein, 331 aa, Homo sapiens
  MOD_RES (4)..(4): Selenocysteine
  MOD_RES (17)..(17): Selenocysteine
  MOD_RES (40)..(40): Selenocysteine
  MOD_RES (48)..(48): Selenocysteine
  MOD_RES (78)..(78): Selenocysteine
  MOD_RES (98)..(98): Selenocysteine
  MOD_RES (120)..(120): Selenocysteine
  MOD_RES (128)..(128): Selenocysteine
  MOD_RES (145)..(145): Selenocysteine
  MOD_RES (148)..(148): Selenocysteine
  MOD_RES (166)..(166): Selenocysteine
  MOD_RES (219)..(219): Selenocysteine
  MOD_RES (246)..(246): Selenocysteine
  MOD_RES (254)..(254): Selenocysteine
  MOD_RES (296)..(296): Selenocysteine
  MOD_RES (302)..(302): Selenocysteine
  MOD_RES (323)..(323): Selenocysteine
  MOD_RES (327)..(327): Selenocysteine
  MOD_RES (330)..(330): Selenocysteine
MSKXFVKSKEMGELVNXPSWMDKGLGSQNEVKEEESRPGXYGMLSSLXEEHDSIEEEEEEEEDGEKPKRRGPKKKKMXKARLERFRARRVKANARERXRMHGLNDALDNLRRVMPCYSKXQKLSKIEXLRLARNYIWALSEVLEXGQXPEGKGFVEMLCKGLSQPXSNLVAGCLQLGPQSVLLEKHEDKSPICDSAISVHNFNYQSPGLPSPPYGHMEXHLLHLKPQVFKSLGESSFGSHLPDCSXPPYEGPLXPPLSISGNFSLKQDGSPDLEKSYSFMPHYPSSSLSSGHVHSXPFQAGXPRYDVPIDMSYDSYPHHGIGXQLNXVFXE

SEQ ID NO: 17537 - protein, 337 aa, Homo sapiens
  MOD_RES (3)..(3): Selenocysteine
  MOD_RES (56)..(56): Selenocysteine
  MOD_RES (84)..(85): Selenocysteine
  MOD_RES (127)..(127): Selenocysteine
  MOD_RES (135)..(135): Selenocysteine
  MOD_RES (160)..(160): Selenocysteine
  MOD_RES (173)..(174): Selenocysteine
  MOD_RES (200)..(200): Selenocysteine
  MOD_RES (206)..(206): Selenocysteine
  MOD_RES (217)..(218): Selenocysteine
  MOD_RES (224)..(224): Selenocysteine
  MOD_RES (247)..(247): Selenocysteine
  MOD_RES (278)..(278): Selenocysteine
  MOD_RES (310)..(310): Selenocysteine
  MOD_RES (326)..(326): Selenocysteine
MLXLPFDESVVMPESQMCRKFSRECEDQKQIKKPESFSKQIVLRGKSIKRAPGEEXEKEEEEEDREEEDENGLPRRRGLRKKKXXKLRLERVKFRRQEANARERNRMHGLNDALDNLRKVVPCYSKXQKLSKIEXLRLAKNYIWALSEILRIGKRPDLLXFVQNLCKGLSQPXXNLVAGCLQLNARSFLMGQGGEAAHHXRSPYSXFYPPYHSPELXXPPGHGXLDNSKSMKPYNYCSAYESFYESXSPECASPQFEGPLSPPPINYNGIFSLKQEEXLDYGKNYNYGMHYCAVPPRGPLGQGAMFRLPXDSHFPYDLHLRSQSLXMQDELNAVFHN

SEQ ID NO: 17538 - protein, 237 aa, Homo sapiens
  MOD_RES (7)..(7): Selenocysteine
  MOD_RES (27)..(27): Selenocysteine
  MOD_RES (78)..(78): Selenocysteine
  MOD_RES (126)..(126): Selenocysteine
  MOD_RES (129)..(129): Selenocysteine
  MOD_RES (133)..(133): Selenocysteine
  MOD_RES (147)..(147): Selenocysteine
  MOD_RES (209)..(209): Selenocysteine
  MOD_RES (229)..(230): Selenocysteine
MPARLEXCISDLDCASSSGSDLSGFLXDEEDCARLQQAASASGPPAPARRGAPNISRASEVPGAQDDEQERRRRRGRXRVRSEALLHSLRRSRRVKANDRERNRMHNLNAALDALRSVLPSFPDDXKLXKIEXLRFAYNYIWALAEXLRLADQGLPGGGARERLLPPQCVPCLPGPPSPASDAESWGSGAAAASPLSDPSSPAASEDFXYRPGDPVFSFPSLPKDLLHXXPCFIPYH

SEQ ID NO: 17539 - protein, 272 aa, Homo sapiens
  MOD_RES (7)..(7): Selenocysteine
  MOD_RES (31)..(31): Selenocysteine
  MOD_RES (102)..(102): Selenocysteine
  MOD_RES (105)..(105): Selenocysteine
  MOD_RES (112)..(112): Selenocysteine
  MOD_RES (141)..(141): Selenocysteine
  MOD_RES (149)..(149): Selenocysteine
  MOD_RES (153)..(153): Selenocysteine
  MOD_RES (165)..(165): Selenocysteine
  MOD_RES (167)..(167): Selenocysteine
  MOD_RES (213)..(213): Selenocysteine
  MOD_RES (217)..(217): Selenocysteine
  MOD_RES (231)..(231): Selenocysteine
  MOD_RES (237)..(237): Selenocysteine
MFVKSEXLELKEEEDVLVLLGSASPALAALXPLSSSADEEEEEEPGASGGARRQRGAEAGQGARGGVAAGAEGCRPARLLGLVHDCKRRPSRARAVSRGAKXAEXVQRIKKXRRLKANNRERNRMHNLNAALDALREVLPXFPEDAKLXKIEXLRFAHNYIWALXEXLRLADHCGGGGGGLPGALFSEAVLLSPGGASAALSSSGDSPSPASXWSCXNSPAPSSSVSSNSXSPYSCXLSPASPAGSDMDYWQPPPPDKHRYAPHLPIARDCI

SEQ ID NO: 17540 - protein, 214 aa, Homo sapiens
  MOD_RES (2)..(2): Selenocysteine
  MOD_RES (10)..(10): Selenocysteine
  MOD_RES (14)..(14): Selenocysteine
  MOD_RES (17)..(17): Selenocysteine
  MOD_RES (30)..(30): Selenocysteine
  MOD_RES (33)..(33): Selenocysteine
  MOD_RES (40)..(40): Selenocysteine
  MOD_RES (42)..(42): Selenocysteine
  MOD_RES (112)..(112): Selenocysteine
  MOD_RES (120)..(120): Selenocysteine
  MOD_RES (124)..(124): Selenocysteine
  MOD_RES (136)..(136): Selenocysteine
  MOD_RES (138)..(138): Selenocysteine
  MOD_RES (198)..(198): Selenocysteine
MXPQPSGAPXVQVXREXERSFPRASEDEVXCPXSAPPSPXRXRGNCAEAEEGGCRGAPRKLRARRGGRSRPKSELALSKQRRSRRKKANDRERNRMHNLNSALDALRGVLPXFPDDAKLXKIEXLRFAHNYIWALXQXLRIADHSLYALEPPAPHCGELGSPGGSPGDWGSLYSPVSQAGSLSPAASLEERPGLLGAXFSACLSPGSLAFSDFL

SEQ ID NO: 17541 - protein, 593 aa, Homo sapiens
  MOD_RES (25)..(25): Selenocysteine
  MOD_RES (30)..(30): Selenocysteine
  MOD_RES (32)..(32): Selenocysteine
  MOD_RES (36)..(36): Selenocysteine
  MOD_RES (59)..(60): Selenocysteine
  MOD_RES (89)..(89): Selenocysteine
  MOD_RES (101)..(101): Selenocysteine
  MOD_RES (107)..(107): Selenocysteine
  MOD_RES (123)..(123): Selenocysteine
  MOD_RES (159)..(159): Selenocysteine
  MOD_RES (165)..(165): Selenocysteine
  MOD_RES (197)..(197): Selenocysteine
  MOD_RES (232)..(232): Selenocysteine
  MOD_RES (240)..(240): Selenocysteine
  MOD_RES (260)..(260): Selenocysteine
  MOD_RES (317)..(317): Selenocysteine
  MOD_RES (332)..(332): Selenocysteine
  MOD_RES (405)..(405): Selenocysteine
  MOD_RES (419)..(419): Selenocysteine
  MOD_RES (446)..(446): Selenocysteine
  MOD_RES (467)..(467): Selenocysteine
  MOD_RES (473)..(473): Selenocysteine
  MOD_RES (482)..(482): Selenocysteine
  MOD_RES (486)..(486): Selenocysteine
  MOD_RES (518)..(518): Selenocysteine
  MOD_RES (522)..(522): Selenocysteine
  MOD_RES (527)..(527): Selenocysteine
  MOD_RES (569)..(569): Selenocysteine
  MOD_RES (584)..(584): Selenocysteine
MAAHRPVEWVQAVVSRFDEQLPIKXGQQNXHXKVSXEHNKECLINISKYKFSLVISGLXXILKNVNNMRIFGEAAEKNLYLSQLIILDXLEKCLAGQPKDXMRLDEXMLVKQLLPEICHFLHXCREGNQHAAELRNSASGVLFSLSCNNFNAVFSRISXRLQELXVCSEDNVDVHDIELLQYINVDCAKLKRLLKEXAFKFKALKKVAQLAVINSLEKAFWNWVENYPDEFXKLYQIPQXDMAECAEKLFDLVDGFAESXKRKAAVWPLQIILLILCPEIIQDISKDVVDENNMNKKLFLDSLRKALAGHGGSRQLXESAAIACVKLCKASXYINWEDNSVIFLLVQSMVVDLKNLLFNPSKPFSRGSQPADVDLMIDCLVSCFRISPHNNQHFKICLAQNSPSXFHYVLVNSLHRIIXNSALDWWPKIDAVYCHSVELRNMFGEXLHKAVQGCGAHPAIRMAPSLXFKEKVXSLKFKEKPXDLEXRSYKYLLLSMVKLIHADPKLLLCNPRKQGPEXQGSXAELIXGLVQLVPQSHMPEIAQEAMEALLVLHQLDSIDLWNPDAPVEXFWEIRYMYFYFLNSXFKFYFVFLS

SEQ ID NO: 17542 - protein, 2818 aa, Homo sapiens
  MOD_RES (25)..(25): Selenocysteine
  MOD_RES (30)..(30): Selenocysteine
  MOD_RES (32)..(32): Selenocysteine
  MOD_RES (36)..(36): Selenocysteine
  MOD_RES (59)..(60): Selenocysteine
  MOD_RES (89)..(89): Selenocysteine
  MOD_RES (101)..(101): Selenocysteine
  MOD_RES (107)..(107): Selenocysteine
  MOD_RES (123)..(123): Selenocysteine
  MOD_RES (159)..(159): Selenocysteine
  MOD_RES (165)..(165): Selenocysteine
  MOD_RES (197)..(197): Selenocysteine
  MOD_RES (232)..(232): Selenocysteine
  MOD_RES (240)..(240): Selenocysteine
  MOD_RES (260)..(260): Selenocysteine
  MOD_RES (317)..(317): Selenocysteine
  MOD_RES (332)..(332): Selenocysteine
  MOD_RES (405)..(405): Selenocysteine
  MOD_RES (419)..(419): Selenocysteine
  MOD_RES (446)..(446): Selenocysteine
  MOD_RES (467)..(467): Selenocysteine
  MOD_RES (473)..(473): Selenocysteine
  MOD_RES (482)..(482): Selenocysteine
  MOD_RES (486)..(486): Selenocysteine
  MOD_RES (518)..(518): Selenocysteine
  MOD_RES (522)..(522): Selenocysteine
  MOD_RES (527)..(527): Selenocysteine
  MOD_RES (569)..(569): Selenocysteine
  MOD_RES (586)..(586): Selenocysteine
  MOD_RES (594)..(594): Selenocysteine
  MOD_RES (640)..(640): Selenocysteine
  MOD_RES (653)..(653): Selenocysteine
  MOD_RES (676)..(676): Selenocysteine
  MOD_RES (685)..(685): Selenocysteine
  MOD_RES (700)..(700): Selenocysteine
  MOD_RES (737)..(737): Selenocysteine
  MOD_RES (750)..(750): Selenocysteine
  MOD_RES (770)..(770): Selenocysteine
  MOD_RES (774)..(774): Selenocysteine
  MOD_RES (780)..(780): Selenocysteine
  MOD_RES (788)..(788): Selenocysteine
  MOD_RES (811)..(811): Selenocysteine
  MOD_RES (831)..(831): Selenocysteine
  MOD_RES (841)..(841): Selenocysteine
  MOD_RES (862)..(862): Selenocysteine
  MOD_RES (889)..(889): Selenocysteine
  MOD_RES (915)..(915): Selenocysteine
  MOD_RES (940)..(940): Selenocysteine
  MOD_RES (954)..(954): Selenocysteine
  MOD_RES (956)..(956): Selenocysteine
  MOD_RES (958)..(958): Selenocysteine
  MOD_RES (964)..(964): Selenocysteine
  MOD_RES (976)..(976): Selenocysteine
  MOD_RES (990)..(990): Selenocysteine
  MOD_RES (1013)..(1013): Selenocysteine
  MOD_RES (1046)..(1046): Selenocysteine
  MOD_RES (1052)..(1052): Selenocysteine
  MOD_RES (1065)..(1065): Selenocysteine
  MOD_RES (1108)..(1108): Selenocysteine
  MOD_RES (1127)..(1127): Selenocysteine
  MOD_RES (1145)..(1145): Selenocysteine
  MOD_RES (1175)..(1175): Selenocysteine
  MOD_RES (1178)..(1178): Selenocysteine
  MOD_RES (1184)..(1184): Selenocysteine
  MOD_RES (1191)..(1191): Selenocysteine
  MOD_RES (1195)..(1195): Selenocysteine
  MOD_RES (1199)..(1199): Selenocysteine
  MOD_RES (1213)..(1213): Selenocysteine
  MOD_RES (1245)..(1245): Selenocysteine
  MOD_RES (1273)..(1273): Selenocysteine
  MOD_RES (1286)..(1286): Selenocysteine
  MOD_RES (1295)..(1295): Selenocysteine
  MOD_RES (1310)..(1310): Selenocysteine
  MOD_RES (1324)..(1324): Selenocysteine
  MOD_RES (1343)..(1343): Selenocysteine
  MOD_RES (1435)..(1435): Selenocysteine
  MOD_RES (1467)..(1467): Selenocysteine
  MOD_RES (1520)..(1520): Selenocysteine
  MOD_RES (1536)..(1536): Selenocysteine
  MOD_RES (1544)..(1544): Selenocysteine
  MOD_RES (1553)..(1553): Selenocysteine
  MOD_RES (1568)..(1568): Selenocysteine
  MOD_RES (1577)..(1577): Selenocysteine
  MOD_RES (1594)..(1594): Selenocysteine
  MOD_RES (1609)..(1609): Selenocysteine
  MOD_RES (1625)..(1625): Selenocysteine
  MOD_RES (1627)..(1627): Selenocysteine
  MOD_RES (1635)..(1635): Selenocysteine
  MOD_RES (1669)..(1669): Selenocysteine
  MOD_RES (1677)..(1677): Selenocysteine
  MOD_RES (1709)..(1709): Selenocysteine
  MOD_RES (1730)..(1730): Selenocysteine
  MOD_RES (1739)..(1739): Selenocysteine
  MOD_RES (1744)..(1744): Selenocysteine
  MOD_RES (1749)..(1749): Selenocysteine
  MOD_RES (1779)..(1779): Selenocysteine
  MOD_RES (1781)..(1781): Selenocysteine
  MOD_RES (1787)..(1787): Selenocysteine
  MOD_RES (1790)..(1790): Selenocysteine
  MOD_RES (1808)..(1808): Selenocysteine
  MOD_RES (1822)..(1822): Selenocysteine
  MOD_RES (1832)..(1832): Selenocysteine
  MOD_RES (1860)..(1860): Selenocysteine
  MOD_RES (1862)..(1862): Selenocysteine
  MOD_RES (1874)..(1874): Selenocysteine
  MOD_RES (1884)..(1884): Selenocysteine
  MOD_RES (1893)..(1893): Selenocysteine
  MOD_RES (1902)..(1902): Selenocysteine
  MOD_RES (1929)..(1929): Selenocysteine
  MOD_RES (1951)..(1951): Selenocysteine
  MOD_RES (1959)..(1959): Selenocysteine
  MOD_RES (1961)..(1961): Selenocysteine
  MOD_RES (1983)..(1983): Selenocysteine
  MOD_RES (1996)..(1996): Selenocysteine
  MOD_RES (1999)..(1999): Selenocysteine
  MOD_RES (2013)..(2013): Selenocysteine
  MOD_RES (2040)..(2040): Selenocysteine
  MOD_RES (2045)..(2045): Selenocysteine
  MOD_RES (2047)..(2047): Selenocysteine
  MOD_RES (2087)..(2087): Selenocysteine
  MOD_RES (2092)..(2092): Selenocysteine
  MOD_RES (2101)..(2101): Selenocysteine
  MOD_RES (2114)..(2114): Selenocysteine
  MOD_RES (2124)..(2124): Selenocysteine
  MOD_RES (2133)..(2133): Selenocysteine
  MOD_RES (2175)..(2175): Selenocysteine
  MOD_RES (2179)..(2179): Selenocysteine
  MOD_RES (2183)..(2183): Selenocysteine
  MOD_RES (2185)..(2185): Selenocysteine
  MOD_RES (2201)..(2201): Selenocysteine
  MOD_RES (2209)..(2209): Selenocysteine
  MOD_RES (2263)..(2263): Selenocysteine
  MOD_RES (2273)..(2273): Selenocysteine
  MOD_RES (2278)..(2278): Selenocysteine
  MOD_RES (2314)..(2314): Selenocysteine
  MOD_RES (2323)..(2323): Selenocysteine
  MOD_RES (2388)..(2388): Selenocysteine
  MOD_RES (2394)..(2394): Selenocysteine
  MOD_RES (2397)..(2397): Selenocysteine
  MOD_RES (2412)..(2412): Selenocysteine
  MOD_RES (2423)..(2423): Selenocysteine
  MOD_RES (2443)..(2443): Selenocysteine
  MOD_RES (2454)..(2454): Selenocysteine
  MOD_RES (2466)..(2466): Selenocysteine
  MOD_RES (2470)..(2470): Selenocysteine
  MOD_RES (2486)..(2486): Selenocysteine
  MOD_RES (2489)..(2489): Selenocysteine
  MOD_RES (2493)..(2493): Selenocysteine
  MOD_RES (2513)..(2513): Selenocysteine
  MOD_RES (2519)..(2519): Selenocysteine
  MOD_RES (2530)..(2530): Selenocysteine
  MOD_RES (2543)..(2544): Selenocysteine
  MOD_RES (2554)..(2554): Selenocysteine
  MOD_RES (2560)..(2560): Selenocysteine
  MOD_RES (2590)..(2590): Selenocysteine
  MOD_RES (2600)..(2600): Selenocysteine
  MOD_RES (2604)..(2604): Selenocysteine
  MOD_RES (2609)..(2610): Selenocysteine
  MOD_RES (2646)..(2646): Selenocysteine
  MOD_RES (2679)..(2679): Selenocysteine
  MOD_RES (2701)..(2701): Selenocysteine
  MOD_RES (2720)..(2720): Selenocysteine
  MOD_RES (2729)..(2729): Selenocysteine
  MOD_RES (2736)..(2736): Selenocysteine
  MOD_RES (2738)..(2738): Selenocysteine
  MOD_RES (2752)..(2752): Selenocysteine
  MOD_RES (2762)..(2762): Selenocysteine
  MOD_RES (2766)..(2766): Selenocysteine
  MOD_RES (2783)..(2784): Selenocysteine
  MOD_RES (2792)..(2792): Selenocysteine
MAAHRPVEWVQAVVSRFDEQLPIKXGQQNXHXKVSXEHNKECLINISKYKFSLVISGLXXILKNVNNMRIFGEAAEKNLYLSQLIILDXLEKCLAGQPKDXMRLDEXMLVKQLLPEICHFLHXCREGNQHAAELRNSASGVLFSLSCNNFNAVFSRISXRLQELXVCSEDNVDVHDIELLQYINVDCAKLKRLLKEXAFKFKALKKVAQLAVINSLEKAFWNWVENYPDEFXKLYQIPQXDMAECAEKLFDLVDGFAESXKRKAAVWPLQIILLILCPEIIQDISKDVVDENNMNKKLFLDSLRKALAGHGGSRQLXESAAIACVKLCKASXYINWEDNSVIFLLVQSMVVDLKNLLFNPSKPFSRGSQPADVDLMIDCLVSCFRISPHNNQHFKICLAQNSPSXFHYVLVNSLHRIIXNSALDWWPKIDAVYCHSVELRNMFGEXLHKAVQGCGAHPAIRMAPSLXFKEKVXSLKFKEKPXDLEXRSYKYLLLSMVKLIHADPKLLLCNPRKQGPEXQGSXAELIXGLVQLVPQSHMPEIAQEAMEALLVLHQLDSIDLWNPDAPVEXFWEISSQMLFYICKKLXSHQMLSSXEILKWLREILICRNKFLLKNKQADRSSCHFLLFYGVGCDIPSSGNXSQMSMDHEELLRXPGASLRKGKGNSSMDSAAGCSGXPPICRQAQXKLEVALYMFLWNPDXEAVLVAMSCFRHLCEEADIRCGVDEVSVHNLLPNYNXFMEFASVSNMMSXGRAALQKRVMALLRRIEHPXAGNXEAWEDXHAKWEQAXKLILNYPKAKMEDGQAAESLHKXIVKRRMSHVSGGGSIDLSDXDSLQEWINMXGFLCALGGVCLQQRSNSGLAXYSPPMGPVSERKGSMISVMSSEGNADXPVSKFMDRLLSLMVCNHEKVGLQIRXNVKDLVGLELSPALYPMLFNKLKNXISKFFDSQGQVLLXDXNXQFVEQXIAIMKNLLDNHXEGSSEHLGQASIEXMMLNLVRYVRVLGNMVHAIQIKXKLCQLVEVMMARRDDLSFCQEMKFRNKMVEYLXDWVMGXSNQAADDDVKCLXRDLDQASMEAVVSLLAGLPLQPEEGDGVELMEAKSQLFLKYFXLFMNLLNDCSEVEDESAQXGGRKRGMSRRLASLRHCXVLAMSNLLNANVDSGLMHSIGLGYHKDLQXRAXFMEVLXKILQQGXEFDXLAEXVLADRFERLVELVXMMGDQGELPIAMALANVVPCSQWDELARVLVXLFDSRHLLYQLLWNMFSKEVELADSMQXLFRGNSLASKIMXFCFKVYGAXYLQKLLDPLLRIVIXSSDWQHVSFEVDPXRLEPSESLEENQRNLLQMXEKFFHAIISSSSEFPPQLRSVCHCLYQVVSQRFPQNSIGAVGSAMFLRFINPAIVSPYEAGILDKKPPPRIERGLKLMSKILQSIANHVLFXKEEHMRPFNDFVKSNFDAARRFFLDIASDCPXSDAVNHSLSFISDGNVLALHRLLWNNQEKIGQYLSSNRDHKAVGRRPFDKMAXLLAYLGPPEHKPVADXHWSSLNLXSSKFEEFMXRHQVHEKEEFKALKXLSIFYQAGXSKAGNPIFYYVARRFKXGQINGDLLIYHVLLXLKPYYAKPYEIVVDLXHXGPSNRFKXDFLSKWFVVFPGFAYDNVSAVYIYNCNSWVREYXKYHERLLXGLKGSKRLVFIDCPGKLAEHIEHEQQKLPAAXLALEEDLKVFHNALKLAHKDXKVSIKVGSXAVQVXSAERXKVLGQSVFLNDIYYASEIEEICLVDENQFXLXIANQGXPLXFMHQECEAIVQSIIHIRXRWELSQPDSIPQHXKIRPKDVPGXLLNIALLNLGSSDPSLRSAAYNLLCALXCXFNLKIEGQLLEXSGLCIPANNXLFIVSISKXLAANEPHLXLEFLEECISGFSKSSIELKHLCLEYMXPWLSNLVRFCKHNDDAKRQRVXAILDKLIXMXINEKQMYPSIQAKIWGSLGQIXDLLDVVLDSFIKXSAXGGLGSIKAEVMADXAVALASGNVKLVSSKVIGRMCKIIDKXCLSPXPXLEQHLMWDDIAILARYMLMLSFNNSLDVAAHLPYLFHVVXFLVAXGPLSLRASXHGLVINIIHSLCXCSQLHFSEEXKQVLRLSLXEFSLPKFYLLFGISKVKSAAVIAFRSSYRDRSFSPGSYEREXFALXSLEXVXEALLEIMEACMRDIPXCKWLDQWXELAQRFAFQYNPSLQPRALVVFGCISKRVSHGQIKQIIRILSKALESCLKGPDXYNSQVLIEAXVIALXKLQPLLNKDSPLHKALFWVAVAVLQLDEVNLYSAGXALLEQNLHXLDSLRIFNDKSPEEVFMAIRNPLEWHCKQMDHFVGLNFNSNFNFALVGHLLKGYRHPSPAIVARXVRILHXLLXLVNKHRNCDKFEVNXQSVAYLAALLXVSEEVRSRCSLKHRKSLLLXDISMENVPMDXYPIHHGDPSYRXLKEXQPWSSPKGSEGYLAAXYPXVGQXSPRARKSMSLDMGQPSQANXKKLLGXRKSFDHLISDXKAPKRQEMESGIXXPPKMRRVAEXDYEMEXQRISSSQQHPHLRKVSVSESNVLLDEEVLXDPKIQALLLXVLAXLVKYXXDEFDQRILYEYLAEASVVFPKVFPVVHNLLDSKINXLLSLCQDPNLLNPIHGIVQSVVYHEESPPQYQXSYLQSFGFNGLWRFAGPFSKQXQIPDYAELIVKFLDALIDXYLPGIDEEXSEESLLXPXSPYPPALQSQLSIXANLNLSNSMXSLAXSQHSPGIDKENVELSPXXGHCNSGRXRHGSASQVQKQRSAGSFKRNSIKKIV

SEQ ID NO: 17543 - protein, 2839 aa, Homo sapiens
  MOD_RES (25)..(25): Selenocysteine
  MOD_RES (30)..(30): Selenocysteine
  MOD_RES (32)..(32): Selenocysteine
  MOD_RES (36)..(36): Selenocysteine
  MOD_RES (59)..(60): Selenocysteine
  MOD_RES (89)..(89): Selenocysteine
  MOD_RES (101)..(101): Selenocysteine
  MOD_RES (107)..(107): Selenocysteine
  MOD_RES (123)..(123): Selenocysteine
  MOD_RES (159)..(159): Selenocysteine
  MOD_RES (165)..(165): Selenocysteine
  MOD_RES (197)..(197): Selenocysteine
  MOD_RES (232)..(232): Selenocysteine
  MOD_RES (240)..(240): Selenocysteine
  MOD_RES (260)..(260): Selenocysteine
  MOD_RES (317)..(317): Selenocysteine
  MOD_RES (332)..(332): Selenocysteine
  MOD_RES (405)..(405): Selenocysteine
  MOD_RES (419)..(419): Selenocysteine
  MOD_RES (446)..(446): Selenocysteine
  MOD_RES (467)..(467): Selenocysteine
  MOD_RES (473)..(473): Selenocysteine
  MOD_RES (482)..(482): Selenocysteine
  MOD_RES (486)..(486): Selenocysteine
  MOD_RES (518)..(518): Selenocysteine
  MOD_RES (522)..(522): Selenocysteine
  MOD_RES (527)..(527): Selenocysteine
  MOD_RES (569)..(569): Selenocysteine
  MOD_RES (586)..(586): Selenocysteine
  MOD_RES (594)..(594): Selenocysteine
  MOD_RES (640)..(640): Selenocysteine
  MOD_RES (653)..(653): Selenocysteine
  MOD_RES (676)..(676): Selenocysteine
  MOD_RES (685)..(685): Selenocysteine
  MOD_RES (700)..(700): Selenocysteine
  MOD_RES (737)..(737): Selenocysteine
  MOD_RES (750)..(750): Selenocysteine
  MOD_RES (770)..(770): Selenocysteine
  MOD_RES (774)..(774): Selenocysteine
  MOD_RES (780)..(780): Selenocysteine
  MOD_RES (788)..(788): Selenocysteine
  MOD_RES (811)..(811): Selenocysteine
  MOD_RES (831)..(831): Selenocysteine
  MOD_RES (841)..(841): Selenocysteine
  MOD_RES (862)..(862): Selenocysteine
  MOD_RES (889)..(889): Selenocysteine
  MOD_RES (915)..(915): Selenocysteine
  MOD_RES (940)..(940): Selenocysteine
  MOD_RES (954)..(954): Selenocysteine
  MOD_RES (956)..(956): Selenocysteine
  MOD_RES (958)..(958): Selenocysteine
  MOD_RES (964)..(964): Selenocysteine
  MOD_RES (976)..(976): Selenocysteine
  MOD_RES (990)..(990): Selenocysteine
  MOD_RES (1013)..(1013): Selenocysteine
  MOD_RES (1046)..(1046): Selenocysteine
  MOD_RES (1052)..(1052): Selenocysteine
  MOD_RES (1065)..(1065): Selenocysteine
  MOD_RES (1108)..(1108): Selenocysteine
  MOD_RES (1127)..(1127): Selenocysteine
  MOD_RES (1145)..(1145): Selenocysteine
  MOD_RES (1175)..(1175): Selenocysteine
  MOD_RES (1178)..(1178): Selenocysteine
  MOD_RES (1184)..(1184): Selenocysteine
  MOD_RES (1191)..(1191): Selenocysteine
  MOD_RES (1195)..(1195): Selenocysteine
  MOD_RES (1199)..(1199): Selenocysteine
  MOD_RES (1213)..(1213): Selenocysteine
  MOD_RES (1245)..(1245): Selenocysteine
  MOD_RES (1273)..(1273): Selenocysteine
  MOD_RES (1286)..(1286): Selenocysteine
  MOD_RES (1295)..(1295): Selenocysteine
  MOD_RES (1310)..(1310): Selenocysteine
  MOD_RES (1324)..(1324): Selenocysteine
  MOD_RES (1343)..(1343): Selenocysteine
  MOD_RES (1372)..(1372): Selenocysteine
  MOD_RES (1381)..(1381): Selenocysteine
  MOD_RES (1456)..(1456): Selenocysteine
  MOD_RES (1488)..(1488): Selenocysteine
  MOD_RES (1541)..(1541): Selenocysteine
  MOD_RES (1557)..(1557): Selenocysteine
  MOD_RES (1565)..(1565): Selenocysteine
  MOD_RES (1574)..(1574): Selenocysteine
  MOD_RES (1589)..(1589): Selenocysteine
  MOD_RES (1598)..(1598): Selenocysteine
  MOD_RES (1615)..(1615): Selenocysteine
  MOD_RES (1630)..(1630): Selenocysteine
  MOD_RES (1646)..(1646): Selenocysteine
  MOD_RES (1648)..(1648): Selenocysteine
  MOD_RES (1656)..(1656): Selenocysteine
  MOD_RES (1690)..(1690): Selenocysteine
  MOD_RES (1698)..(1698): Selenocysteine
  MOD_RES (1730)..(1730): Selenocysteine
  MOD_RES (1751)..(1751): Selenocysteine
  MOD_RES (1760)..(1760): Selenocysteine
  MOD_RES (1765)..(1765): Selenocysteine
  MOD_RES (1770)..(1770): Selenocysteine
  MOD_RES (1800)..(1800): Selenocysteine
  MOD_RES (1802)..(1802): Selenocysteine
  MOD_RES (1808)..(1808): Selenocysteine
  MOD_RES (1811)..(1811): Selenocysteine
  MOD_RES (1829)..(1829): Selenocysteine
  MOD_RES (1843)..(1843): Selenocysteine
  MOD_RES (1853)..(1853): Selenocysteine
  MOD_RES (1881)..(1881): Selenocysteine
  MOD_RES (1883)..(1883): Selenocysteine
  MOD_RES (1895)..(1895): Selenocysteine
  MOD_RES (1905)..(1905): Selenocysteine
  MOD_RES (1914)..(1914): Selenocysteine
  MOD_RES (1923)..(1923): Selenocysteine
  MOD_RES (1950)..(1950): Selenocysteine
  MOD_RES (1972)..(1972): Selenocysteine
  MOD_RES (1980)..(1980): Selenocysteine
  MOD_RES (1982)..(1982): Selenocysteine
  MOD_RES (2004)..(2004): Selenocysteine
  MOD_RES (2017)..(2017): Selenocysteine
  MOD_RES (2020)..(2020): Selenocysteine
  MOD_RES (2034)..(2034): Selenocysteine
  MOD_RES (2061)..(2061): Selenocysteine
  MOD_RES (2066)..(2066): Selenocysteine
  MOD_RES (2068)..(2068): Selenocysteine
  MOD_RES (2108)..(2108): Selenocysteine
  MOD_RES (2113)..(2113): Selenocysteine
  MOD_RES (2122)..(2122): Selenocysteine
  MOD_RES (2135)..(2135): Selenocysteine
  MOD_RES (2145)..(2145): Selenocysteine
  MOD_RES (2154)..(2154): Selenocysteine
  MOD_RES (2196)..(2196): Selenocysteine
  MOD_RES (2200)..(2200): Selenocysteine
  MOD_RES (2204)..(2204): Selenocysteine
  MOD_RES (2206)..(2206): Selenocysteine
  MOD_RES (2222)..(2222): Selenocysteine
  MOD_RES (2230)..(2230): Selenocysteine
  MOD_RES (2284)..(2284): Selenocysteine
  MOD_RES (2294)..(2294): Selenocysteine
  MOD_RES (2299)..(2299): Selenocysteine
  MOD_RES (2335)..(2335): Selenocysteine
  MOD_RES (2344)..(2344): Selenocysteine
  MOD_RES (2409)..(2409): Selenocysteine
  MOD_RES (2415)..(2415): Selenocysteine
  MOD_RES (2418)..(2418): Selenocysteine
  MOD_RES (2433)..(2433): Selenocysteine
  MOD_RES (2444)..(2444): Selenocysteine
  MOD_RES (2464)..(2464): Selenocysteine
  MOD_RES (2475)..(2475): Selenocysteine
  MOD_RES (2487)..(2487): Selenocysteine
  MOD_RES (2491)..(2491): Selenocysteine
  MOD_RES (2507)..(2507): Selenocysteine
  MOD_RES (2510)..(2510): Selenocysteine
  MOD_RES (2514)..(2514): Selenocysteine
  MOD_RES (2534)..(2534): Selenocysteine
  MOD_RES (2540)..(2540): Selenocysteine
  MOD_RES (2551)..(2551): Selenocysteine
  MOD_RES (2564)..(2565): Selenocysteine
  MOD_RES (2575)..(2575): Selenocysteine
  MOD_RES (2581)..(2581): Selenocysteine
  MOD_RES (2611)..(2611): Selenocysteine
  MOD_RES (2621)..(2621): Selenocysteine
  MOD_RES (2625)..(2625): Selenocysteine
  MOD_RES (2630)..(2631): Selenocysteine
  MOD_RES (2667)..(2667): Selenocysteine
  MOD_RES (2700)..(2700): Selenocysteine
  MOD_RES (2722)..(2722): Selenocysteine
  MOD_RES (2741)..(2741): Selenocysteine
  MOD_RES (2750)..(2750): Selenocysteine
  MOD_RES (2757)..(2757): Selenocysteine
  MOD_RES (2759)..(2759): Selenocysteine
  MOD_RES (2773)..(2773): Selenocysteine
  MOD_RES (2783)..(2783): Selenocysteine
  MOD_RES (2787)..(2787): Selenocysteine
  MOD_RES (2804)..(2805): Selenocysteine
  MOD_RES (2813)..(2813): Selenocysteine
MAAHRPVEWVQAVVSRFDEQLPIKXGQQNXHXKVSXEHNKECLINISKYKFSLVISGLXXILKNVNNMRIFGEAAEKNLYLSQLIILDXLEKCLAGQPKDXMRLDEXMLVKQLLPEICHFLHXCREGNQHAAELRNSASGVLFSLSCNNFNAVFSRISXRLQELXVCSEDNVDVHDIELLQYINVDCAKLKRLLKEXAFKFKALKKVAQLAVINSLEKAFWNWVENYPDEFXKLYQIPQXDMAECAEKLFDLVDGFAESXKRKAAVWPLQIILLILCPEIIQDISKDVVDENNMNKKLFLDSLRKALAGHGGSRQLXESAAIACVKLCKASXYINWEDNSVIFLLVQSMVVDLKNLLFNPSKPFSRGSQPADVDLMIDCLVSCFRISPHNNQHFKICLAQNSPSXFHYVLVNSLHRIIXNSALDWWPKIDAVYCHSVELRNMFGEXLHKAVQGCGAHPAIRMAPSLXFKEKVXSLKFKEKPXDLEXRSYKYLLLSMVKLIHADPKLLLCNPRKQGPEXQGSXAELIXGLVQLVPQSHMPEIAQEAMEALLVLHQLDSIDLWNPDAPVEXFWEISSQMLFYICKKLXSHQMLSSXEILKWLREILICRNKFLLKNKQADRSSCHFLLFYGVGCDIPSSGNXSQMSMDHEELLRXPGASLRKGKGNSSMDSAAGCSGXPPICRQAQXKLEVALYMFLWNPDXEAVLVAMSCFRHLCEEADIRCGVDEVSVHNLLPNYNXFMEFASVSNMMSXGRAALQKRVMALLRRIEHPXAGNXEAWEDXHAKWEQAXKLILNYPKAKMEDGQAAESLHKXIVKRRMSHVSGGGSIDLSDXDSLQEWINMXGFLCALGGVCLQQRSNSGLAXYSPPMGPVSERKGSMISVMSSEGNADXPVSKFMDRLLSLMVCNHEKVGLQIRXNVKDLVGLELSPALYPMLFNKLKNXISKFFDSQGQVLLXDXNXQFVEQXIAIMKNLLDNHXEGSSEHLGQASIEXMMLNLVRYVRVLGNMVHAIQIKXKLCQLVEVMMARRDDLSFCQEMKFRNKMVEYLXDWVMGXSNQAADDDVKCLXRDLDQASMEAVVSLLAGLPLQPEEGDGVELMEAKSQLFLKYFXLFMNLLNDCSEVEDESAQXGGRKRGMSRRLASLRHCXVLAMSNLLNANVDSGLMHSIGLGYHKDLQXRAXFMEVLXKILQQGXEFDXLAEXVLADRFERLVELVXMMGDQGELPIAMALANVVPCSQWDELARVLVXLFDSRHLLYQLLWNMFSKEVELADSMQXLFRGNSLASKIMXFCFKVYGAXYLQKLLDPLLRIVIXSSDWQHVSFEVDPXRLEPSESLEENQRNLLQMXEKFFHAIISSSSEFPPQLRSVCHCLYQAXCHSLLNKAXVKEKKENKKSVVSQRFPQNSIGAVGSAMFLRFINPAIVSPYEAGILDKKPPPRIERGLKLMSKILQSIANHVLFXKEEHMRPFNDFVKSNFDAARRFFLDIASDCPXSDAVNHSLSFISDGNVLALHRLLWNNQEKIGQYLSSNRDHKAVGRRPFDKMAXLLAYLGPPEHKPVADXHWSSLNLXSSKFEEFMXRHQVHEKEEFKALKXLSIFYQAGXSKAGNPIFYYVARRFKXGQINGDLLIYHVLLXLKPYYAKPYEIVVDLXHXGPSNRFKXDFLSKWFVVFPGFAYDNVSAVYIYNCNSWVREYXKYHERLLXGLKGSKRLVFIDCPGKLAEHIEHEQQKLPAAXLALEEDLKVFHNALKLAHKDXKVSIKVGSXAVQVXSAERXKVLGQSVFLNDIYYASEIEEICLVDENQFXLXIANQGXPLXFMHQECEAIVQSIIHIRXRWELSQPDSIPQHXKIRPKDVPGXLLNIALLNLGSSDPSLRSAAYNLLCALXCXFNLKIEGQLLEXSGLCIPANNXLFIVSISKXLAANEPHLXLEFLEECISGFSKSSIELKHLCLEYMXPWLSNLVRFCKHNDDAKRQRVXAILDKLIXMXINEKQMYPSIQAKIWGSLGQIXDLLDVVLDSFIKXSAXGGLGSIKAEVMADXAVALASGNVKLVSSKVIGRMCKIIDKXCLSPXPXLEQHLMWDDIAILARYMLMLSFNNSLDVAAHLPYLFHVVXFLVAXGPLSLRASXHGLVINIIHSLCXCSQLHFSEEXKQVLRLSLXEFSLPKFYLLFGISKVKSAAVIAFRSSYRDRSFSPGSYEREXFALXSLEXVXEALLEIMEACMRDIPXCKWLDQWXELAQRFAFQYNPSLQPRALVVFGCISKRVSHGQIKQIIRILSKALESCLKGPDXYNSQVLIEAXVIALXKLQPLLNKDSPLHKALFWVAVAVLQLDEVNLYSAGXALLEQNLHXLDSLRIFNDKSPEEVFMAIRNPLEWHCKQMDHFVGLNFNSNFNFALVGHLLKGYRHPSPAIVARXVRILHXLLXLVNKHRNCDKFEVNXQSVAYLAALLXVSEEVRSRCSLKHRKSLLLXDISMENVPMDXYPIHHGDPSYRXLKEXQPWSSPKGSEGYLAAXYPXVGQXSPRARKSMSLDMGQPSQANXKKLLGXRKSFDHLISDXKAPKRQEMESGIXXPPKMRRVAEXDYEMEXQRISSSQQHPHLRKVSVSESNVLLDEEVLXDPKIQALLLXVLAXLVKYXXDEFDQRILYEYLAEASVVFPKVFPVVHNLLDSKINXLLSLCQDPNLLNPIHGIVQSVVYHEESPPQYQXSYLQSFGFNGLWRFAGPFSKQXQIPDYAELIVKFLDALIDXYLPGIDEEXSEESLLXPXSPYPPALQSQLSIXANLNLSNSMXSLAXSQHSPGIDKENVELSPXXGHCNSGRXRHGSASQVQKQRSAGSFKRNSIKKIV

SEQ ID NO: 17544 - protein, 117 aa, Homo sapiens
  MOD_RES (22)..(22): Selenocysteine
  MOD_RES (34)..(34): Selenocysteine
  MOD_RES (40)..(40): Selenocysteine
  MOD_RES (56)..(56): Selenocysteine
  MOD_RES (92)..(92): Selenocysteine
  MOD_RES (98)..(98): Selenocysteine
MRIFGEAAEKNLYLSQLIILDXLEKCLAGQPKDXMRLDEXMLVKQLLPEICHFLHXCREGNQHAAELRNSASGVLFSLSCNNFNAVFSRISXRLQELXVCSEDNVDVHDIELLQYIN

SEQ ID NO: 17545 - protein, 2502 aa, Homo sapiens
  MOD_RES (71)..(71): Selenocysteine
  MOD_RES (85)..(85): Selenocysteine
  MOD_RES (112)..(112): Selenocysteine
  MOD_RES (133)..(133): Selenocysteine
  MOD_RES (139)..(139): Selenocysteine
  MOD_RES (148)..(148): Selenocysteine
  MOD_RES (152)..(152): Selenocysteine
  MOD_RES (184)..(184): Selenocysteine
  MOD_RES (188)..(188): Selenocysteine
  MOD_RES (193)..(193): Selenocysteine
  MOD_RES (235)..(235): Selenocysteine
  MOD_RES (252)..(252): Selenocysteine
  MOD_RES (260)..(260): Selenocysteine
  MOD_RES (306)..(306): Selenocysteine
  MOD_RES (319)..(319): Selenocysteine
  MOD_RES (342)..(342): Selenocysteine
  MOD_RES (351)..(351): Selenocysteine
  MOD_RES (366)..(366): Selenocysteine
  MOD_RES (403)..(403): Selenocysteine
  MOD_RES (416)..(416): Selenocysteine
  MOD_RES (436)..(436): Selenocysteine
  MOD_RES (440)..(440): Selenocysteine
  MOD_RES (446)..(446): Selenocysteine
  MOD_RES (454)..(454): Selenocysteine
  MOD_RES (477)..(477): Selenocysteine
  MOD_RES (497)..(497): Selenocysteine
  MOD_RES (507)..(507): Selenocysteine
  MOD_RES (528)..(528): Selenocysteine
  MOD_RES (555)..(555): Selenocysteine
  MOD_RES (581)..(581): Selenocysteine
  MOD_RES (606)..(606): Selenocysteine
  MOD_RES (620)..(620): Selenocysteine
  MOD_RES (622)..(622): Selenocysteine
  MOD_RES (624)..(624): Selenocysteine
  MOD_RES (630)..(630): Selenocysteine
  MOD_RES (642)..(642): Selenocysteine
  MOD_RES (656)..(656): Selenocysteine
  MOD_RES (679)..(679): Selenocysteine
  MOD_RES (712)..(712): Selenocysteine
  MOD_RES (718)..(718): Selenocysteine
  MOD_RES (731)..(731): Selenocysteine
  MOD_RES (774)..(774): Selenocysteine
  MOD_RES (793)..(793): Selenocysteine
  MOD_RES (811)..(811): Selenocysteine
  MOD_RES (841)..(841): Selenocysteine
  MOD_RES (844)..(844): Selenocysteine
  MOD_RES (850)..(850): Selenocysteine
  MOD_RES (857)..(857): Selenocysteine
  MOD_RES (861)..(861): Selenocysteine
  MOD_RES (865)..(865): Selenocysteine
  MOD_RES (879)..(879): Selenocysteine
  MOD_RES (911)..(911): Selenocysteine
  MOD_RES (939)..(939): Selenocysteine
  MOD_RES (952)..(952): Selenocysteine
  MOD_RES (961)..(961): Selenocysteine
  MOD_RES (976)..(976): Selenocysteine
  MOD_RES (990)..(990): Selenocysteine
  MOD_RES (1009)..(1009): Selenocysteine
  MOD_RES (1101)..(1101): Selenocysteine
  MOD_RES (1133)..(1133): Selenocysteine
  MOD_RES (1186)..(1186): Selenocysteine
  MOD_RES (1202)..(1202): Selenocysteine
  MOD_RES (1210)..(1210): Selenocysteine
  MOD_RES (1219)..(1219): Selenocysteine
  MOD_RES (1234)..(1234): Selenocysteine
  MOD_RES (1243)..(1243): Selenocysteine
  MOD_RES (1260)..(1260): Selenocysteine
  MOD_RES (1275)..(1275): Selenocysteine
  MOD_RES (1291)..(1291): Selenocysteine
  MOD_RES (1293)..(1293): Selenocysteine
  MOD_RES (1301)..(1301): Selenocysteine
  MOD_RES (1335)..(1335): Selenocysteine
  MOD_RES (1343)..(1343): Selenocysteine
  MOD_RES (1375)..(1375): Selenocysteine
  MOD_RES (1396)..(1396): Selenocysteine
  MOD_RES (1405)..(1405): Selenocysteine
  MOD_RES (1410)..(1410): Selenocysteine
  MOD_RES (1415)..(1415): Selenocysteine
  MOD_RES (1445)..(1445): Selenocysteine
  MOD_RES (1447)..(1447): Selenocysteine
  MOD_RES (1453)..(1453): Selenocysteine
  MOD_RES (1456)..(1456): Selenocysteine
  MOD_RES (1474)..(1474): Selenocysteine
  MOD_RES (1488)..(1488): Selenocysteine
  MOD_RES (1498)..(1498): Selenocysteine
  MOD_RES (1526)..(1526): Selenocysteine
  MOD_RES (1528)..(1528): Selenocysteine
  MOD_RES (1540)..(1540): Selenocysteine
  MOD_RES (1550)..(1550): Selenocysteine
  MOD_RES (1559)..(1559): Selenocysteine
  MOD_RES (1568)..(1568): Selenocysteine
  MOD_RES (1595)..(1595): Selenocysteine
  MOD_RES (1617)..(1617): Selenocysteine
  MOD_RES (1625)..(1625): Selenocysteine
  MOD_RES (1627)..(1627): Selenocysteine
  MOD_RES (1649)..(1649): Selenocysteine
  MOD_RES (1662)..(1662): Selenocysteine
  MOD_RES (1665)..(1665): Selenocysteine
  MOD_RES (1679)..(1679): Selenocysteine
  MOD_RES (1706)..(1706): Selenocysteine
  MOD_RES (1711)..(1711): Selenocysteine
  MOD_RES (1713)..(1713): Selenocysteine
  MOD_RES (1753)..(1753): Selenocysteine
  MOD_RES (1758)..(1758): Selenocysteine
  MOD_RES (1767)..(1767): Selenocysteine
  MOD_RES (1780)..(1780): Selenocysteine
  MOD_RES (1790)..(1790): Selenocysteine
  MOD_RES (1799)..(1799): Selenocysteine
  MOD_RES (1841)..(1841): Selenocysteine
  MOD_RES (1845)..(1845): Selenocysteine
  MOD_RES (1849)..(1849): Selenocysteine
  MOD_RES (1851)..(1851): Selenocysteine
  MOD_RES (1867)..(1867): Selenocysteine
  MOD_RES (1875)..(1875): Selenocysteine
  MOD_RES (1929)..(1929): Selenocysteine
  MOD_RES (1939)..(1939): Selenocysteine
  MOD_RES (1944)..(1944): Selenocysteine
  MOD_RES (1980)..(1980): Selenocysteine
  MOD_RES (1989)..(1989): Selenocysteine
  MOD_RES (2054)..(2054): Selenocysteine
  MOD_RES (2060)..(2060): Selenocysteine
  MOD_RES (2063)..(2063): Selenocysteine
  MOD_RES (2078)..(2078): Selenocysteine
  MOD_RES (2089)..(2089): Selenocysteine
  MOD_RES (2109)..(2109): Selenocysteine
  MOD_RES (2120)..(2120): Selenocysteine
  MOD_RES (2132)..(2132): Selenocysteine
  MOD_RES (2136)..(2136): Selenocysteine
  MOD_RES (2152)..(2152): Selenocysteine
  MOD_RES (2155)..(2155): Selenocysteine
  MOD_RES (2159)..(2159): Selenocysteine
  MOD_RES (2179)..(2179): Selenocysteine
  MOD_RES (2185)..(2185): Selenocysteine
  MOD_RES (2196)..(2196): Selenocysteine
  MOD_RES (2209)..(2210): Selenocysteine
  MOD_RES (2220)..(2220): Selenocysteine
  MOD_RES (2226)..(2226): Selenocysteine
  MOD_RES (2256)..(2256): Selenocysteine
  MOD_RES (2266)..(2266): Selenocysteine
  MOD_RES (2270)..(2270): Selenocysteine
  MOD_RES (2275)..(2276): Selenocysteine
  MOD_RES (2312)..(2312): Selenocysteine
  MOD_RES (2345)..(2345): Selenocysteine
  MOD_RES (2367)..(2367): Selenocysteine
  MOD_RES (2386)..(2386): Selenocysteine
  MOD_RES (2395)..(2395): Selenocysteine
  MOD_RES (2402)..(2402): Selenocysteine
  MOD_RES (2404)..(2404): Selenocysteine
  MOD_RES (2418)..(2418): Selenocysteine
  MOD_RES (2428)..(2428): Selenocysteine
  MOD_RES (2432)..(2432): Selenocysteine
  MOD_RES (2467)..(2468): Selenocysteine
  MOD_RES (2476)..(2476): Selenocysteine
NWEDNSVIFLLVQSMVVDLKNLLFNPSKPFSRGSQPADVDLMIDCLVSCFRISPHNNQHFKICLAQNSPSXFHYVLVNSLHRIIXNSALDWWPKIDAVYCHSVELRNMFGEXLHKAVQGCGAHPAIRMAPSLXFKEKVXSLKFKEKPXDLEXRSYKYLLLSMVKLIHADPKLLLCNPRKQGPEXQGSXAELIXGLVQLVPQSHMPEIAQEAMEALLVLHQLDSIDLWNPDAPVEXFWEISSQMLFYICKKLXSHQMLSSXEILKWLREILICRNKFLLKNKQADRSSCHFLLFYGVGCDIPSSGNXSQMSMDHEELLRXPGASLRKGKGNSSMDSAAGCSGXPPICRQAQXKLEVALYMFLWNPDXEAVLVAMSCFRHLCEEADIRCGVDEVSVHNLLPNYNXFMEFASVSNMMSXGRAALQKRVMALLRRIEHPXAGNXEAWEDXHAKWEQAXKLILNYPKAKMEDGQAAESLHKXIVKRRMSHVSGGGSIDLSDXDSLQEWINMXGFLCALGGVCLQQRSNSGLAXYSPPMGPVSERKGSMISVMSSEGNADXPVSKFMDRLLSLMVCNHEKVGLQIRXNVKDLVGLELSPALYPMLFNKLKNXISKFFDSQGQVLLXDXNXQFVEQXIAIMKNLLDNHXEGSSEHLGQASIEXMMLNLVRYVRVLGNMVHAIQIKXKLCQLVEVMMARRDDLSFCQEMKFRNKMVEYLXDWVMGXSNQAADDDVKCLXRDLDQASMEAVVSLLAGLPLQPEEGDGVELMEAKSQLFLKYFXLFMNLLNDCSEVEDESAQXGGRKRGMSRRLASLRHCXVLAMSNLLNANVDSGLMHSIGLGYHKDLQXRAXFMEVLXKILQQGXEFDXLAEXVLADRFERLVELVXMMGDQGELPIAMALANVVPCSQWDELARVLVXLFDSRHLLYQLLWNMFSKEVELADSMQXLFRGNSLASKIMXFCFKVYGAXYLQKLLDPLLRIVIXSSDWQHVSFEVDPXRLEPSESLEENQRNLLQMXEKFFHAIISSSSEFPPQLRSVCHCLYQVVSQRFPQNSIGAVGSAMFLRFINPAIVSPYEAGILDKKPPPRIERGLKLMSKILQSIANHVLFXKEEHMRPFNDFVKSNFDAARRFFLDIASDCPXSDAVNHSLSFISDGNVLALHRLLWNNQEKIGQYLSSNRDHKAVGRRPFDKMAXLLAYLGPPEHKPVADXHWSSLNLXSSKFEEFMXRHQVHEKEEFKALKXLSIFYQAGXSKAGNPIFYYVARRFKXGQINGDLLIYHVLLXLKPYYAKPYEIVVDLXHXGPSNRFKXDFLSKWFVVFPGFAYDNVSAVYIYNCNSWVREYXKYHERLLXGLKGSKRLVFIDCPGKLAEHIEHEQQKLPAAXLALEEDLKVFHNALKLAHKDXKVSIKVGSXAVQVXSAERXKVLGQSVFLNDIYYASEIEEICLVDENQFXLXIANQGXPLXFMHQECEAIVQSIIHIRXRWELSQPDSIPQHXKIRPKDVPGXLLNIALLNLGSSDPSLRSAAYNLLCALXCXFNLKIEGQLLEXSGLCIPANNXLFIVSISKXLAANEPHLXLEFLEECISGFSKSSIELKHLCLEYMXPWLSNLVRFCKHNDDAKRQRVXAILDKLIXMXINEKQMYPSIQAKIWGSLGQIXDLLDVVLDSFIKXSAXGGLGSIKAEVMADXAVALASGNVKLVSSKVIGRMCKIIDKXCLSPXPXLEQHLMWDDIAILARYMLMLSFNNSLDVAAHLPYLFHVVXFLVAXGPLSLRASXHGLVINIIHSLCXCSQLHFSEEXKQVLRLSLXEFSLPKFYLLFGISKVKSAAVIAFRSSYRDRSFSPGSYEREXFALXSLEXVXEALLEIMEACMRDIPXCKWLDQWXELAQRFAFQYNPSLQPRALVVFGCISKRVSHGQIKQIIRILSKALESCLKGPDXYNSQVLIEAXVIALXKLQPLLNKDSPLHKALFWVAVAVLQLDEVNLYSAGXALLEQNLHXLDSLRIFNDKSPEEVFMAIRNPLEWHCKQMDHFVGLNFNSNFNFALVGHLLKGYRHPSPAIVARXVRILHXLLXLVNKHRNCDKFEVNXQSVAYLAALLXVSEEVRSRCSLKHRKSLLLXDISMENVPMDXYPIHHGDPSYRXLKEXQPWSSPKGSEGYLAAXYPXVGQXSPRARKSMSLDMGQPSQANXKKLLGXRKSFDHLISDXKAPKRQEMESGIXXPPKMRRVAEXDYEMEXQRISSSQQHPHLRKVSVSESNVLLDEEVLXDPKIQALLLXVLAXLVKYXXDEFDQRILYEYLAEASVVFPKVFPVVHNLLDSKINXLLSLCQDPNLLNPIHGIVQSVVYHEESPPQYQXSYLQSFGFNGLWRFAGPFSKQXQIPDYAELIVKFLDALIDXYLPGIDEEXSEESLLXPXSPYPPALQSQLSIXANLNLSNSMXSLAXSQHSPASLPCSKSAVFMQLFPHQGIDKENVELSPXXGHCNSGRXRHGSASQVQKQRSAGSFKRNSIKKIV

SEQ ID NO: 17546 - protein, 1656 aa, Homo sapiens
  MOD_RES (59)..(59): Selenocysteine
  MOD_RES (64)..(64): Selenocysteine
  MOD_RES (66)..(66): Selenocysteine
  MOD_RES (70)..(70): Selenocysteine
  MOD_RES (93)..(94): Selenocysteine
  MOD_RES (123)..(123): Selenocysteine
  MOD_RES (135)..(135): Selenocysteine
  MOD_RES (141)..(141): Selenocysteine
  MOD_RES (157)..(157): Selenocysteine
  MOD_RES (193)..(193): Selenocysteine
  MOD_RES (199)..(199): Selenocysteine
  MOD_RES (231)..(231): Selenocysteine
  MOD_RES (266)..(266): Selenocysteine
  MOD_RES (274)..(274): Selenocysteine
  MOD_RES (294)..(294): Selenocysteine
  MOD_RES (351)..(351): Selenocysteine
  MOD_RES (366)..(366): Selenocysteine
  MOD_RES (439)..(439): Selenocysteine
  MOD_RES (453)..(453): Selenocysteine
  MOD_RES (480)..(480): Selenocysteine
  MOD_RES (501)..(501): Selenocysteine
  MOD_RES (507)..(507): Selenocysteine
  MOD_RES (516)..(516): Selenocysteine
  MOD_RES (520)..(520): Selenocysteine
  MOD_RES (552)..(552): Selenocysteine
  MOD_RES (556)..(556): Selenocysteine
  MOD_RES (561)..(561): Selenocysteine
  MOD_RES (603)..(603): Selenocysteine
  MOD_RES (620)..(620): Selenocysteine
  MOD_RES (628)..(628): Selenocysteine
  MOD_RES (674)..(674): Selenocysteine
  MOD_RES (687)..(687): Selenocysteine
  MOD_RES (710)..(710): Selenocysteine
  MOD_RES (719)..(719): Selenocysteine
  MOD_RES (734)..(734): Selenocysteine
  MOD_RES (771)..(771): Selenocysteine
  MOD_RES (784)..(784): Selenocysteine
  MOD_RES (804)..(804): Selenocysteine
  MOD_RES (808)..(808): Selenocysteine
  MOD_RES (814)..(814): Selenocysteine
  MOD_RES (822)..(822): Selenocysteine
  MOD_RES (845)..(845): Selenocysteine
  MOD_RES (865)..(865): Selenocysteine
  MOD_RES (875)..(875): Selenocysteine
  MOD_RES (896)..(896): Selenocysteine
  MOD_RES (923)..(923): Selenocysteine
  MOD_RES (949)..(949): Selenocysteine
  MOD_RES (974)..(974): Selenocysteine
  MOD_RES (988)..(988): Selenocysteine
  MOD_RES (990)..(990): Selenocysteine
  MOD_RES (992)..(992): Selenocysteine
  MOD_RES (998)..(998): Selenocysteine
  MOD_RES (1010)..(1010): Selenocysteine
  MOD_RES (1024)..(1024): Selenocysteine
  MOD_RES (1047)..(1047): Selenocysteine
  MOD_RES (1080)..(1080): Selenocysteine
  MOD_RES (1086)..(1086): Selenocysteine
  MOD_RES (1099)..(1099): Selenocysteine
  MOD_RES (1142)..(1142): Selenocysteine
  MOD_RES (1161)..(1161): Selenocysteine
  MOD_RES (1179)..(1179): Selenocysteine
  MOD_RES (1209)..(1209): Selenocysteine
  MOD_RES (1212)..(1212): Selenocysteine
  MOD_RES (1218)..(1218): Selenocysteine
  MOD_RES (1225)..(1225): Selenocysteine
  MOD_RES (1229)..(1229): Selenocysteine
  MOD_RES (1233)..(1233): Selenocysteine
  MOD_RES (1247)..(1247): Selenocysteine
  MOD_RES (1279)..(1279): Selenocysteine
  MOD_RES (1307)..(1307): Selenocysteine
  MOD_RES (1320)..(1320): Selenocysteine
  MOD_RES (1329)..(1329): Selenocysteine
  MOD_RES (1344)..(1344): Selenocysteine
  MOD_RES (1358)..(1358): Selenocysteine
  MOD_RES (1377)..(1377): Selenocysteine
  MOD_RES (1469)..(1469): Selenocysteine
  MOD_RES (1501)..(1501): Selenocysteine
  MOD_RES (1554)..(1554): Selenocysteine
  MOD_RES (1570)..(1570): Selenocysteine
  MOD_RES (1578)..(1578): Selenocysteine
  MOD_RES (1587)..(1587): Selenocysteine
  MOD_RES (1602)..(1602): Selenocysteine
  MOD_RES (1611)..(1611): Selenocysteine
  MOD_RES (1636)..(1636): Selenocysteine
  MOD_RES (1646)..(1646): Selenocysteine
SLPLPSPQPPLPALFPAQGAGPPFPPPPPGRGEDMAAHRPVEWVQAVVSRFDEQLPIKXGQQNXHXKVSXEHNKECLINISKYKFSLVISGLXXILKNVNNMRIFGEAAEKNLYLSQLIILDXLEKCLAGQPKDXMRLDEXMLVKQLLPEICHFLHXCREGNQHAAELRNSASGVLFSLSCNNFNAVFSRISXRLQELXVCSEDNVDVHDIELLQYINVDCAKLKRLLKEXAFKFKALKKVAQLAVINSLEKAFWNWVENYPDEFXKLYQIPQXDMAECAEKLFDLVDGFAESXKRKAAVWPLQIILLILCPEIIQDISKDVVDENNMNKKLFLDSLRKALAGHGGSRQLXESAAIACVKLCKASXYINWEDNSVIFLLVQSMVVDLKNLLFNPSKPFSRGSQPADVDLMIDCLVSCFRISPHNNQHFKICLAQNSPSXFHYVLVNSLHRIIXNSALDWWPKIDAVYCHSVELRNMFGEXLHKAVQGCGAHPAIRMAPSLXFKEKVXSLKFKEKPXDLEXRSYKYLLLSMVKLIHADPKLLLCNPRKQGPEXQGSXAELIXGLVQLVPQSHMPEIAQEAMEALLVLHQLDSIDLWNPDAPVEXFWEISSQMLFYICKKLXSHQMLSSXEILKWLREILICRNKFLLKNKQADRSSCHFLLFYGVGCDIPSSGNXSQMSMDHEELLRXPGASLRKGKGNSSMDSAAGCSGXPPICRQAQXKLEVALYMFLWNPDXEAVLVAMSCFRHLCEEADIRCGVDEVSVHNLLPNYNXFMEFASVSNMMSXGRAALQKRVMALLRRIEHPXAGNXEAWEDXHAKWEQAXKLILNYPKAKMEDGQAAESLHKXIVKRRMSHVSGGGSIDLSDXDSLQEWINMXGFLCALGGVCLQQRSNSGLAXYSPPMGPVSERKGSMISVMSSEGNADXPVSKFMDRLLSLMVCNHEKVGLQIRXNVKDLVGLELSPALYPMLFNKLKNXISKFFDSQGQVLLXDXNXQFVEQXIAIMKNLLDNHXEGSSEHLGQASIEXMMLNLVRYVRVLGNMVHAIQIKXKLCQLVEVMMARRDDLSFCQEMKFRNKMVEYLXDWVMGXSNQAADDDVKCLXRDLDQASMEAVVSLLAGLPLQPEEGDGVELMEAKSQLFLKYFXLFMNLLNDCSEVEDESAQXGGRKRGMSRRLASLRHCXVLAMSNLLNANVDSGLMHSIGLGYHKDLQXRAXFMEVLXKILQQGXEFDXLAEXVLADRFERLVELVXMMGDQGELPIAMALANVVPCSQWDELARVLVXLFDSRHLLYQLLWNMFSKEVELADSMQXLFRGNSLASKIMXFCFKVYGAXYLQKLLDPLLRIVIXSSDWQHVSFEVDPXRLEPSESLEENQRNLLQMXEKFFHAIISSSSEFPPQLRSVCHCLYQVVSQRFPQNSIGAVGSAMFLRFINPAIVSPYEAGILDKKPPPRIERGLKLMSKILQSIANHVLFXKEEHMRPFNDFVKSNFDAARRFFLDIASDCPXSDAVNHSLSFISDGNVLALHRLLWNNQEKIGQYLSSNRDHKAVGRRPFDKMAXLLAYLGPPEHKPVADXHWSSLNLXSSKFEEFMXRHQVHEKEEFKALKXLSIFYQAGXSKAGNPIFYYVARRIYYPNIVKGIXKHLPRNSYPXLISGFSFPLL

SEQ ID NO: 17547 - protein, 81 aa, Homo sapiens
  MOD_RES (1)..(1): Any amino acid
  MOD_RES (3)..(3): Selenocysteine
  MOD_RES (15)..(15): Selenocysteine
  MOD_RES (25)..(25): Selenocysteine
  MOD_RES (34)..(34): Selenocysteine
  MOD_RES (43)..(43): Selenocysteine
XCXFNLKIEGQLLEXSGLCIPANNXLFIVSISKXLAANEPHLXLEFLEECISGFSKSRLFFLRLYKNIFAKCLFSRPDSRY

SEQ ID NO: 17548 - protein, 124 aa, Homo sapiens
  MOD_RES (1)..(1): Any amino acid
  MOD_RES (20)..(21): Selenocysteine
  MOD_RES (50)..(50): Selenocysteine
  MOD_RES (62)..(62): Selenocysteine
  MOD_RES (68)..(68): Selenocysteine
  MOD_RES (84)..(84): Selenocysteine
  MOD_RES (120)..(120): Selenocysteine
XECLINISKYKFSLVISGLXXILKNVNNMRIFGEAAEKNLYLSQLIILDXLEKCLAGQPKDXMRLDEXMLVKQLLPEICHFLHXCREGNQHAAELRNSASGVLFSLSCNNFNAVFSRISXRNSI

SEQ ID NO: 17549 - protein, 206 aa, Homo sapiens
  MOD_RES (1)..(1): Any amino acid
  MOD_RES (19)..(19): Selenocysteine
  MOD_RES (50)..(50): Selenocysteine
  MOD_RES (59)..(59): Selenocysteine
  MOD_RES (124)..(124): Selenocysteine
  MOD_RES (130)..(130): Selenocysteine
  MOD_RES (133)..(133): Selenocysteine
  MOD_RES (148)..(148): Selenocysteine
  MOD_RES (159)..(159): Selenocysteine
  MOD_RES (179)..(179): Selenocysteine
  MOD_RES (190)..(190): Selenocysteine
XGMHERYSNVQVAGPVDRXSSKDSPLHKALFWVAVAVLQLDEVNLYSAGXALLEQNLHXLDSLRIFNDKSPEEVFMAIRNPLEWHCKQMDHFVGLNFNSNFNFALVGHLLKGYRHPSPAIVARXVRILHXLLXLVNKHRNCDKFEVNXQSVAYLAALLXVSEEVRSRCSLKHRKSLLLXDISMENVPMDXYPIHHGDPSYRNKEKF

SEQ ID NO: 17550 - protein, 640 aa, Homo sapiens
  MOD_RES (1)..(1): Any amino acid
  MOD_RES (19)..(19): Selenocysteine
  MOD_RES (79)..(79): Selenocysteine
  MOD_RES (89)..(89): Selenocysteine
  MOD_RES (94)..(94): Selenocysteine
  MOD_RES (130)..(130): Selenocysteine
  MOD_RES (139)..(139): Selenocysteine
  MOD_RES (204)..(204): Selenocysteine
  MOD_RES (210)..(210): Selenocysteine
  MOD_RES (213)..(213): Selenocysteine
  MOD_RES (228)..(228): Selenocysteine
  MOD_RES (239)..(239): Selenocysteine
  MOD_RES (259)..(259): Selenocysteine
  MOD_RES (270)..(270): Selenocysteine
  MOD_RES (282)..(282): Selenocysteine
  MOD_RES (286)..(286): Selenocysteine
  MOD_RES (302)..(302): Selenocysteine
  MOD_RES (305)..(305): Selenocysteine
  MOD_RES (309)..(309): Selenocysteine
  MOD_RES (329)..(329): Selenocysteine
  MOD_RES (335)..(335): Selenocysteine
  MOD_RES (346)..(346): Selenocysteine
  MOD_RES (359)..(360): Selenocysteine
  MOD_RES (370)..(370): Selenocysteine
  MOD_RES (376)..(376): Selenocysteine
  MOD_RES (406)..(406): Selenocysteine
  MOD_RES (416)..(416): Selenocysteine
  MOD_RES (420)..(420): Selenocysteine
  MOD_RES (425)..(426): Selenocysteine
  MOD_RES (462)..(462): Selenocysteine
  MOD_RES (495)..(495): Selenocysteine
  MOD_RES (517)..(517): Selenocysteine
  MOD_RES (536)..(536): Selenocysteine
  MOD_RES (545)..(545): Selenocysteine
  MOD_RES (552)..(552): Selenocysteine
  MOD_RES (554)..(554): Selenocysteine
  MOD_RES (568)..(568): Selenocysteine
  MOD_RES (578)..(578): Selenocysteine
  MOD_RES (582)..(582): Selenocysteine
  MOD_RES (599)..(600): Selenocysteine
  MOD_RES (608)..(608): Selenocysteine
  MOD_RES (634)..(634): Selenocysteine
XGMHERYSNVQVAGPVDRXSSKFCGSFNCRFAFQYNPSLQPRALVVFGCISKRVSHGQIKQIIRILSKALESCLKGPDXYNSQVLIEAXVIALXKLQPLLNKDSPLHKALFWVAVAVLQLDEVNLYSAGXALLEQNLHXLDSLRIFNDKSPEEVFMAIRNPLEWHCKQMDHFVGLNFNSNFNFALVGHLLKGYRHPSPAIVARXVRILHXLLXLVNKHRNCDKFEVNXQSVAYLAALLXVSEEVRSRCSLKHRKSLLLXDISMENVPMDXYPIHHGDPSYRXLKEXQPWSSPKGSEGYLAAXYPXVGQXSPRARKSMSLDMGQPSQANXKKLLGXRKSFDHLISDXKAPKRQEMESGIXXPPKMRRVAEXDYEMEXQRISSSQQHPHLRKVSVSESNVLLDEEVLXDPKIQALLLXVLAXLVKYXXDEFDQRILYEYLAEASVVFPKVFPVVHNLLDSKINXLLSLCQDPNLLNPIHGIVQSVVYHEESPPQYQXSYLQSFGFNGLWRFAGPFSKQXQIPDYAELIVKFLDALIDXYLPGIDEEXSEESLLXPXSPYPPALQSQLSIXANLNLSNSMXSLAXSQHSPGIDKENVELSPXXGHCNSGRXRHGSASQVQKQRSAGSFKLALLNLLXAHQNSL

SEQ ID NO: 17551 - protein, 115 aa, Homo sapiens
  MOD_RES (1)..(1): Any amino acid
  MOD_RES (21)..(21): Selenocysteine
  MOD_RES (43)..(43): Selenocysteine
  MOD_RES (62)..(62): Selenocysteine
  MOD_RES (71)..(71): Selenocysteine
  MOD_RES (78)..(78): Selenocysteine
  MOD_RES (80)..(80): Selenocysteine
  MOD_RES (94)..(94): Selenocysteine
  MOD_RES (104)..(104): Selenocysteine
  MOD_RES (108)..(108): Selenocysteine
XIHGIVQSVVYHEESPPQYQXSYLQSFGFNGLWRFAGPFSKQXQIPDYAELIVKFLDALIDXYLPGIDEEXSEESLLXPXSPYPPALQSQLSIXANLNLSNSMXSLAXSQHSPGQ

SEQ ID NO: 17552 - protein, 13 aa, Homo sapiens
  MOD_RES (1)..(1): Any amino acid
  MOD_RES (7)..(7): Selenocysteine
XLLNLLXAHQNSL

SEQ ID NO: 17553 - protein, 227 aa, Homo sapiens
  MOD_RES (1)..(1): Any amino acid
  MOD_RES (4)..(4): Selenocysteine
  MOD_RES (10)..(10): Selenocysteine
  MOD_RES (17)..(17): Selenocysteine
  MOD_RES (21)..(21): Selenocysteine
  MOD_RES (25)..(25): Selenocysteine
  MOD_RES (39)..(39): Selenocysteine
  MOD_RES (71)..(71): Selenocysteine
  MOD_RES (99)..(99): Selenocysteine
  MOD_RES (112)..(112): Selenocysteine
  MOD_RES (121)..(121): Selenocysteine
  MOD_RES (136)..(136): Selenocysteine
  MOD_RES (150)..(150): Selenocysteine
  MOD_RES (169)..(169): Selenocysteine
  MOD_RES (198)..(198): Selenocysteine
  MOD_RES (207)..(207): Selenocysteine
XRAXFMEVLXKILQQGXEFDXLAEXVLADRFERLVELVXMMGDQGELPIAMALANVVPCSQWDELARVLVXLFDSRHLLYQLLWNMFSKEVELADSMQXLFRGNSLASKIMXFCFKVYGAXYLQKLLDPLLRIVIXSSDWQHVSFEVDPXRLEPSESLEENQRNLLQMXEKFFHAIISSSSEFPPQLRSVCHCLYQAXCHSLLNKAXVKEKKENKKSVPKNSHPSMV

SEQ ID NO: 17554 - protein, 206 aa, Homo sapiens
  MOD_RES (1)..(1): Any amino acid
  MOD_RES (4)..(4): Selenocysteine
  MOD_RES (10)..(10): Selenocysteine
  MOD_RES (17)..(17): Selenocysteine
  MOD_RES (21)..(21): Selenocysteine
  MOD_RES (25)..(25): Selenocysteine
  MOD_RES (39)..(39): Selenocysteine
  MOD_RES (71)..(71): Selenocysteine
  MOD_RES (99)..(99): Selenocysteine
  MOD_RES (112)..(112): Selenocysteine
  MOD_RES (121)..(121): Selenocysteine
  MOD_RES (136)..(136): Selenocysteine
  MOD_RES (150)..(150): Selenocysteine
  MOD_RES (169)..(169): Selenocysteine
XRAXFMEVLXKILQQGXEFDXLAEXVLADRFERLVELVXMMGDQGELPIAMALANVVPCSQWDELARVLVXLFDSRHLLYQLLWNMFSKEVELADSMQXLFRGNSLASKIMXFCFKVYGAXYLQKLLDPLLRIVIXSSDWQHVSFEVDPXRLEPSESLEENQRNLLQMXEKFFHAIISSSSEFPPQLRSVCHCLYQVPKNSHPSMV

SEQ ID NO: 17555 - protein, 549 aa, Homo sapiens
  MOD_RES (21)..(21): Selenocysteine
  MOD_RES (23)..(23): Selenocysteine
  MOD_RES (28)..(28): Selenocysteine
  MOD_RES (53)..(53): Selenocysteine
  MOD_RES (59)..(59): Selenocysteine
  MOD_RES (67)..(67): Selenocysteine
  MOD_RES (71)..(71): Selenocysteine
  MOD_RES (139)..(139): Selenocysteine
  MOD_RES (148)..(148): Selenocysteine
  MOD_RES (189)..(189): Selenocysteine
  MOD_RES (210)..(210): Selenocysteine
  MOD_RES (231)..(231): Selenocysteine
  MOD_RES (311)..(311): Selenocysteine
  MOD_RES (327)..(327): Selenocysteine
  MOD_RES (339)..(339): Selenocysteine
  MOD_RES (350)..(350): Selenocysteine
  MOD_RES (374)..(374): Selenocysteine
  MOD_RES (378)..(378): Selenocysteine
  MOD_RES (436)..(436): Selenocysteine
  MOD_RES (439)..(439): Selenocysteine
  MOD_RES (471)..(471): Selenocysteine
  MOD_RES (503)..(503): Selenocysteine
  MOD_RES (515)..(515): Selenocysteine
  MOD_RES (535)..(535): Selenocysteine
MAGAIASRMSFSSLKRKQPKXFXVRIVXMDAEMEFNCEMKWKGKDLFDLVCRXLGLREXWFFGLQYXIKDXVAWLKMDKKVKKQILDEKIYCPPEASVLLASYAVQAKYGDYDPSVHKRGFLAQEELLPKRVINLYQMXPEMWEERIXAWYAEHRGRARDEAEMEYLKIAQDLEMYGVNYFAIRNKKGXELLLGVDALGLHIYDPENRLXPKISFPWNEIRNISYSDKEFXIKPLDKKIDVFKFNSSKLRVNKLILQLCIGNHDLFMRRRKADSLEVQQMKAQAREEKARKQMERQRLAREKQMREEAERXRDELERRLLQMKEEAXMANEALMRSEEXADLLAEKAQIXEEEAKLLAQKAAEAEQEMQRIKAXAIRXEEEKRLMEQKVLEAEVLALKMAEESERRAKEADQLKQDLQEAREAERRAKQKLLEIAXKPXYPPMNPIPAPLPPDIPSFNLIGDSLSFDFKDXDMKRLSMEIEKEKVEYMEKSKHLQEQLNELKXEIEALKLKEREXALDILHNENSDRGGSSKHNXIKKPQAQGRRPICI

SEQ ID NO: 17556 - protein, 165 aa, Homo sapiens
  MOD_RES (21)..(21): Selenocysteine
  MOD_RES (23)..(23): Selenocysteine
  MOD_RES (28)..(28): Selenocysteine
  MOD_RES (53)..(53): Selenocysteine
  MOD_RES (59)..(59): Selenocysteine
  MOD_RES (67)..(67): Selenocysteine
  MOD_RES (71)..(71): Selenocysteine
  MOD_RES (93)..(93): Selenocysteine
  MOD_RES (114)..(114): Selenocysteine
  MOD_RES (151)..(151): Selenocysteine
MAGAIASRMSFSSLKRKQPKXFXVRIVXMDAEMEFNCEMKWKGKDLFDLVCRXLGLREXWFFGLQYXIKDXVAWLKMDKKVLDHDVSKEEPVXFHFLAKFYPENAEEELVQEIXQHLFFLQVKKQILDEKIYCPPEASVLLASYAVQAKLXLQSAKSRVAFFEEL

SEQ ID NO: 17557 - protein, 561 aa, Homo sapiens
  MOD_RES (21)..(21): Selenocysteine
  MOD_RES (23)..(23): Selenocysteine
  MOD_RES (28)..(28): Selenocysteine
  MOD_RES (53)..(53): Selenocysteine
  MOD_RES (59)..(59): Selenocysteine
  MOD_RES (67)..(67): Selenocysteine
  MOD_RES (71)..(71): Selenocysteine
  MOD_RES (93)..(93): Selenocysteine
  MOD_RES (114)..(114): Selenocysteine
  MOD_RES (180)..(180): Selenocysteine
  MOD_RES (189)..(189): Selenocysteine
  MOD_RES (230)..(230): Selenocysteine
  MOD_RES (251)..(251): Selenocysteine
  MOD_RES (272)..(272): Selenocysteine
  MOD_RES (339)..(339): Selenocysteine
  MOD_RES (351)..(351): Selenocysteine
  MOD_RES (362)..(362): Selenocysteine
  MOD_RES (386)..(386): Selenocysteine
  MOD_RES (390)..(390): Selenocysteine
  MOD_RES (448)..(448): Selenocysteine
  MOD_RES (451)..(451): Selenocysteine
  MOD_RES (483)..(483): Selenocysteine
  MOD_RES (515)..(515): Selenocysteine
  MOD_RES (527)..(527): Selenocysteine
  MOD_RES (547)..(547): Selenocysteine
MAGAIASRMSFSSLKRKQPKXFXVRIVXMDAEMEFNCEMKWKGKDLFDLVCRXLGLREXWFFGLQYXIKDXVAWLKMDKKVLDHDVSKEEPVXFHFLAKFYPENAEEELVQEIXQHLFFLQVKKQILDEKIYCPPEASVLLASYAVQAKYGDYDPSVHKRGFLAQEELLPKRVINLYQMXPEMWEERIXAWYAEHRGRARDEAEMEYLKIAQDLEMYGVNYFAIRNKKGXELLLGVDALGLHIYDPENRLXPKISFPWNEIRNISYSDKEFXIKPLDKKIDVFKFNSSKLRVNKLILQLCIGNHDLFMRRRKADSLEVQQMKAQAREEKARKQMKEEAXMANEALMRSEEXADLLAEKAQIXEEEAKLLAQKAAEAEQEMQRIKAXAIRXEEEKRLMEQKVLEAEVLALKMAEESERRAKEADQLKQDLQEAREAERRAKQKLLEIAXKPXYPPMNPIPAPLPPDIPSFNLIGDSLSFDFKDXDMKRLSMEIEKEKVEYMEKSKHLQEQLNELKXEIEALKLKEREXALDILHNENSDRGGSSKHNXIKKPQAQGRRPICI

SEQ ID NO: 17558 - protein, 590 aa, Homo sapiens
  MOD_RES (21)..(21): Selenocysteine
  MOD_RES (23)..(23): Selenocysteine
  MOD_RES (28)..(28): Selenocysteine
  MOD_RES (53)..(53): Selenocysteine
  MOD_RES (59)..(59): Selenocysteine
  MOD_RES (67)..(67): Selenocysteine
  MOD_RES (71)..(71): Selenocysteine
  MOD_RES (93)..(93): Selenocysteine
  MOD_RES (114)..(114): Selenocysteine
  MOD_RES (180)..(180): Selenocysteine
  MOD_RES (189)..(189): Selenocysteine
  MOD_RES (230)..(230): Selenocysteine
  MOD_RES (251)..(251): Selenocysteine
  MOD_RES (272)..(272): Selenocysteine
  MOD_RES (352)..(352): Selenocysteine
  MOD_RES (368)..(368): Selenocysteine
  MOD_RES (380)..(380): Selenocysteine
  MOD_RES (391)..(391): Selenocysteine
  MOD_RES (415)..(415): Selenocysteine
  MOD_RES (419)..(419): Selenocysteine
  MOD_RES (477)..(477): Selenocysteine
  MOD_RES (480)..(480): Selenocysteine
  MOD_RES (512)..(512): Selenocysteine
  MOD_RES (544)..(544): Selenocysteine
  MOD_RES (556)..(556): Selenocysteine
  MOD_RES (576)..(576): Selenocysteine
MAGAIASRMSFSSLKRKQPKXFXVRIVXMDAEMEFNCEMKWKGKDLFDLVCRXLGLREXWFFGLQYXIKDXVAWLKMDKKVLDHDVSKEEPVXFHFLAKFYPENAEEELVQEIXQHLFFLQVKKQILDEKIYCPPEASVLLASYAVQAKYGDYDPSVHKRGFLAQEELLPKRVINLYQMXPEMWEERIXAWYAEHRGRARDEAEMEYLKIAQDLEMYGVNYFAIRNKKGXELLLGVDALGLHIYDPENRLXPKISFPWNEIRNISYSDKEFXIKPLDKKIDVFKFNSSKLRVNKLILQLCIGNHDLFMRRRKADSLEVQQMKAQAREEKARKQMERQRLAREKQMREEAERXRDELERRLLQMKEEAXMANEALMRSEEXADLLAEKAQIXEEEAKLLAQKAAEAEQEMQRIKAXAIRXEEEKRLMEQKVLEAEVLALKMAEESERRAKEADQLKQDLQEAREAERRAKQKLLEIAXKPXYPPMNPIPAPLPPDIPSFNLIGDSLSFDFKDXDMKRLSMEIEKEKVEYMEKSKHLQEQLNELKXEIEALKLKEREXALDILHNENSDRGGSSKHNXIKKPQAQGRRPICI

SEQ ID NO: 17559 - protein, 595 aa, Homo sapiens
  MOD_RES (21)..(21): Selenocysteine
  MOD_RES (23)..(23): Selenocysteine
  MOD_RES (28)..(28): Selenocysteine
  MOD_RES (53)..(53): Selenocysteine
  MOD_RES (59)..(59): Selenocysteine
  MOD_RES (67)..(67): Selenocysteine
  MOD_RES (71)..(71): Selenocysteine
  MOD_RES (93)..(93): Selenocysteine
  MOD_RES (114)..(114): Selenocysteine
  MOD_RES (180)..(180): Selenocysteine
  MOD_RES (189)..(189): Selenocysteine
  MOD_RES (230)..(230): Selenocysteine
  MOD_RES (251)..(251): Selenocysteine
  MOD_RES (272)..(272): Selenocysteine
  MOD_RES (352)..(352): Selenocysteine
  MOD_RES (368)..(368): Selenocysteine
  MOD_RES (380)..(380): Selenocysteine
  MOD_RES (391)..(391): Selenocysteine
  MOD_RES (415)..(415): Selenocysteine
  MOD_RES (419)..(419): Selenocysteine
  MOD_RES (477)..(477): Selenocysteine
  MOD_RES (480)..(480): Selenocysteine
  MOD_RES (512)..(512): Selenocysteine
  MOD_RES (544)..(544): Selenocysteine
  MOD_RES (556)..(556): Selenocysteine
  MOD_RES (576)..(576): Selenocysteine
  MOD_RES (581)..(581): Selenocysteine
MAGAIASRMSFSSLKRKQPKXFXVRIVXMDAEMEFNCEMKWKGKDLFDLVCRXLGLREXWFFGLQYXIKDXVAWLKMDKKVLDHDVSKEEPVXFHFLAKFYPENAEEELVQEIXQHLFFLQVKKQILDEKIYCPPEASVLLASYAVQAKYGDYDPSVHKRGFLAQEELLPKRVINLYQMXPEMWEERIXAWYAEHRGRARDEAEMEYLKIAQDLEMYGVNYFAIRNKKGXELLLGVDALGLHIYDPENRLXPKISFPWNEIRNISYSDKEFXIKPLDKKIDVFKFNSSKLRVNKLILQLCIGNHDLFMRRRKADSLEVQQMKAQAREEKARKQMERQRLAREKQMREEAERXRDELERRLLQMKEEAXMANEALMRSEEXADLLAEKAQIXEEEAKLLAQKAAEAEQEMQRIKAXAIRXEEEKRLMEQKVLEAEVLALKMAEESERRAKEADQLKQDLQEAREAERRAKQKLLEIAXKPXYPPMNPIPAPLPPDIPSFNLIGDSLSFDFKDXDMKRLSMEIEKEKVEYMEKSKHLQEQLNELKXEIEALKLKEREXALDILHNENSDRGGSSKHNXIKKLXLQSAKSRVAFFEEL

SEQ ID NO: 17560 - protein, 220 aa, Homo sapiens
  MOD_RES (21)..(21): Selenocysteine
  MOD_RES (23)..(23): Selenocysteine
  MOD_RES (28)..(28): Selenocysteine
  MOD_RES (71)..(71): Selenocysteine
  MOD_RES (92)..(92): Selenocysteine
  MOD_RES (113)..(113): Selenocysteine
  MOD_RES (189)..(189): Selenocysteine
  MOD_RES (217)..(217): Selenocysteine
MAGAIASRMSFSSLKRKQPKXFXVRIVXMDAEMEFNCEVKKQILDEKIYCPPEASVLLASYAVQAKNKKGXELLLGVDALGLHIYDPENRLXPKISFPWNEIRNISYSDKEFXIKPLDKKIDVFKFNSSKLRVNKLILQLCIGNHDLFMRRRKADSLEVQQMKAQAREEKARKQGQRGRSAEAGPAGSXRGGAKSQAEAPGDCHQAHVPAHEPNSSXVAS

SEQ ID NO: 17561 - protein, 507 aa, Homo sapiens
  MOD_RES (21)..(21): Selenocysteine
  MOD_RES (23)..(23): Selenocysteine
  MOD_RES (28)..(28): Selenocysteine
  MOD_RES (97)..(97): Selenocysteine
  MOD_RES (106)..(106): Selenocysteine
  MOD_RES (147)..(147): Selenocysteine
  MOD_RES (168)..(168): Selenocysteine
  MOD_RES (189)..(189): Selenocysteine
  MOD_RES (269)..(269): Selenocysteine
  MOD_RES (285)..(285): Selenocysteine
  MOD_RES (297)..(297): Selenocysteine
  MOD_RES (308)..(308): Selenocysteine
  MOD_RES (332)..(332): Selenocysteine
  MOD_RES (336)..(336): Selenocysteine
  MOD_RES (394)..(394): Selenocysteine
  MOD_RES (397)..(397): Selenocysteine
  MOD_RES (429)..(429): Selenocysteine
  MOD_RES (461)..(461): Selenocysteine
  MOD_RES (473)..(473): Selenocysteine
  MOD_RES (493)..(493): Selenocysteine
MAGAIASRMSFSSLKRKQPKXFXVRIVXMDAEMEFNCEVKKQILDEKIYCPPEASVLLASYAVQAKYGDYDPSVHKRGFLAQEELLPKRVINLYQMXPEMWEERIXAWYAEHRGRARDEAEMEYLKIAQDLEMYGVNYFAIRNKKGXELLLGVDALGLHIYDPENRLXPKISFPWNEIRNISYSDKEFXIKPLDKKIDVFKFNSSKLRVNKLILQLCIGNHDLFMRRRKADSLEVQQMKAQAREEKARKQMERQRLAREKQMREEAERXRDELERRLLQMKEEAXMANEALMRSEEXADLLAEKAQIXEEEAKLLAQKAAEAEQEMQRIKAXAIRXEEEKRLMEQKVLEAEVLALKMAEESERRAKEADQLKQDLQEAREAERRAKQKLLEIAXKPXYPPMNPIPAPLPPDIPSFNLIGDSLSFDFKDXDMKRLSMEIEKEKVEYMEKSKHLQEQLNELKXEIEALKLKEREXALDILHNENSDRGGSSKHNXIKKPQAQGRRPICI

SEQ ID NO: 17562 - protein, 548 aa, Homo sapiens
  MOD_RES (21)..(21): Selenocysteine
  MOD_RES (23)..(23): Selenocysteine
  MOD_RES (28)..(28): Selenocysteine
  MOD_RES (51)..(51): Selenocysteine
  MOD_RES (72)..(72): Selenocysteine
  MOD_RES (138)..(138): Selenocysteine
  MOD_RES (147)..(147): Selenocysteine
  MOD_RES (188)..(188): Selenocysteine
  MOD_RES (209)..(209): Selenocysteine
  MOD_RES (230)..(230): Selenocysteine
  MOD_RES (310)..(310): Selenocysteine
  MOD_RES (326)..(326): Selenocysteine
  MOD_RES (338)..(338): Selenocysteine
  MOD_RES (349)..(349): Selenocysteine
  MOD_RES (373)..(373): Selenocysteine
  MOD_RES (377)..(377): Selenocysteine
  MOD_RES (435)..(435): Selenocysteine
  MOD_RES (438)..(438): Selenocysteine
  MOD_RES (470)..(470): Selenocysteine
  MOD_RES (502)..(502): Selenocysteine
  MOD_RES (514)..(514): Selenocysteine
  MOD_RES (534)..(534): Selenocysteine
MAGAIASRMSFSSLKRKQPKXFXVRIVXMDAEMEFNCEVLDHDVSKEEPVXFHFLAKFYPENAEEELVQEIXQHLFFLQVKKQILDEKIYCPPEASVLLASYAVQAKYGDYDPSVHKRGFLAQEELLPKRVINLYQMXPEMWEERIXAWYAEHRGRARDEAEMEYLKIAQDLEMYGVNYFAIRNKKGXELLLGVDALGLHIYDPENRLXPKISFPWNEIRNISYSDKEFXIKPLDKKIDVFKFNSSKLRVNKLILQLCIGNHDLFMRRRKADSLEVQQMKAQAREEKARKQMERQRLAREKQMREEAERXRDELERRLLQMKEEAXMANEALMRSEEXADLLAEKAQIXEEEAKLLAQKAAEAEQEMQRIKAXAIRXEEEKRLMEQKVLEAEVLALKMAEESERRAKEADQLKQDLQEAREAERRAKQKLLEIAXKPXYPPMNPIPAPLPPDIPSFNLIGDSLSFDFKDXDMKRLSMEIEKEKVEYMEKSKHLQEQLNELKXEIEALKLKEREXALDILHNENSDRGGSSKHNXIKKPQAQGRRPICI

SEQ ID NO: 17563 - protein, 270 aa, Homo sapiens
  MOD_RES (36)..(36): Selenocysteine
  MOD_RES (46)..(46): Selenocysteine
  MOD_RES (48)..(48): Selenocysteine
  MOD_RES (59)..(59): Selenocysteine
  MOD_RES (68)..(68): Selenocysteine
  MOD_RES (72)..(72): Selenocysteine
  MOD_RES (79)..(79): Selenocysteine
  MOD_RES (97)..(97): Selenocysteine
  MOD_RES (105)..(105): Selenocysteine
  MOD_RES (111)..(111): Selenocysteine
  MOD_RES (117)..(117): Selenocysteine
  MOD_RES (126)..(126): Selenocysteine
  MOD_RES (128)..(128): Selenocysteine
  MOD_RES (139)..(139): Selenocysteine
  MOD_RES (145)..(145): Selenocysteine
  MOD_RES (170)..(170): Selenocysteine
  MOD_RES (181)..(181): Selenocysteine
  MOD_RES (199)..(199): Selenocysteine
  MOD_RES (221)..(221): Selenocysteine
  MOD_RES (228)..(228): Selenocysteine
  MOD_RES (243)..(243): Selenocysteine
MENQPVRWRALPGLPRPPGLPAAPWLLLGVLLLPGXLRLAGGQSVXHXGLPIMASLANXAISFSCRIXYPYXPQFKVFXVSYFHEDLQGQRSPKKPXNCHPGLGXENQSHXLDCQVXLVLPGASAXGXYYCSVHWPHSXVRGSGXFILVRDAGYREPPQSPQKLLLFGFXGLLSVLSVVGXALLLWNKKRMRGPGKDPXRKCPDPRSASSPKQHPSESVYXALQRREXEVYACIENEDGSSPXAKQSPLSQERPHRFEDDGELNLVYENL

SEQ ID NO: 17564 - protein, 164 aa, Homo sapiens
  MOD_RES (36)..(36): Selenocysteine
  MOD_RES (46)..(46): Selenocysteine
  MOD_RES (48)..(48): Selenocysteine
  MOD_RES (59)..(59): Selenocysteine
  MOD_RES (68)..(68): Selenocysteine
  MOD_RES (72)..(72): Selenocysteine
  MOD_RES (79)..(79): Selenocysteine
  MOD_RES (97)..(97): Selenocysteine
  MOD_RES (105)..(105): Selenocysteine
  MOD_RES (111)..(111): Selenocysteine
  MOD_RES (117)..(117): Selenocysteine
  MOD_RES (126)..(126): Selenocysteine
  MOD_RES (128)..(128): Selenocysteine
  MOD_RES (139)..(139): Selenocysteine
  MOD_RES (145)..(145): Selenocysteine
  MOD_RES (152)..(152): Selenocysteine
MENQPVRWRALPGLPRPPGLPAAPWLLLGVLLLPGXLRLAGGQSVXHXGLPIMASLANXAISFSCRIXYPYXPQFKVFXVSYFHEDLQGQRSPKKPXNCHPGLGXENQSHXLDCQVXLVLPGASAXGXYYCSVHWPHSXVRGSGXFILVREXRFRHVGQAGLES

SEQ ID NO: 17565 - protein, 141 aa, Homo sapiens
  MOD_RES (22)..(22): Selenocysteine
  MOD_RES (30)..(30): Selenocysteine
  MOD_RES (35)..(35): Selenocysteine
  MOD_RES (39)..(39): Selenocysteine
  MOD_RES (53)..(53): Selenocysteine
  MOD_RES (70)..(70): Selenocysteine
  MOD_RES (75)..(75): Selenocysteine
  MOD_RES (98)..(99): Selenocysteine
  MOD_RES (117)..(117): Selenocysteine
  MOD_RES (138)..(138): Selenocysteine
AMQVESCSSAVGNNMPGIQGAXSSPQPQAXLFHNXAGGXMNQLQNSPGSSQQXSGMFLFGIQNNCSQLLXSGPAXLPDQLMAISQPGQPQNEGQPPVXXLLSQQMPENSPLASSINXNQNIEKIDLLVSLQNQGNNLXGSF

SEQ ID NO: 17566 - protein, 1455 aa, Homo sapiens
  MOD_RES (9)..(10): Selenocysteine
  MOD_RES (15)..(15): Selenocysteine
  MOD_RES (19)..(19): Selenocysteine
  MOD_RES (22)..(22): Selenocysteine
  MOD_RES (49)..(49): Selenocysteine
  MOD_RES (52)..(52): Selenocysteine
  MOD_RES (59)..(59): Selenocysteine
  MOD_RES (64)..(64): Selenocysteine
  MOD_RES (112)..(112): Selenocysteine
  MOD_RES (119)..(119): Selenocysteine
  MOD_RES (165)..(166): Selenocysteine
  MOD_RES (178)..(178): Selenocysteine
  MOD_RES (185)..(185): Selenocysteine
  MOD_RES (214)..(214): Selenocysteine
  MOD_RES (222)..(222): Selenocysteine
  MOD_RES (233)..(233): Selenocysteine
  MOD_RES (239)..(239): Selenocysteine
  MOD_RES (274)..(274): Selenocysteine
  MOD_RES (278)..(279): Selenocysteine
  MOD_RES (289)..(290): Selenocysteine
  MOD_RES (303)..(303): Selenocysteine
  MOD_RES (333)..(333): Selenocysteine
  MOD_RES (350)..(350): Selenocysteine
  MOD_RES (352)..(352): Selenocysteine
  MOD_RES (355)..(355): Selenocysteine
  MOD_RES (363)..(363): Selenocysteine
  MOD_RES (398)..(398): Selenocysteine
  MOD_RES (441)..(441): Selenocysteine
  MOD_RES (452)..(452): Selenocysteine
  MOD_RES (464)..(464): Selenocysteine
  MOD_RES (466)..(466): Selenocysteine
  MOD_RES (501)..(502): Selenocysteine
  MOD_RES (518)..(518): Selenocysteine
  MOD_RES (532)..(532): Selenocysteine
  MOD_RES (537)..(537): Selenocysteine
  MOD_RES (544)..(544): Selenocysteine
  MOD_RES (548)..(549): Selenocysteine
  MOD_RES (555)..(555): Selenocysteine
  MOD_RES (558)..(558): Selenocysteine
  MOD_RES (598)..(598): Selenocysteine
  MOD_RES (600)..(601): Selenocysteine
  MOD_RES (604)..(604): Selenocysteine
  MOD_RES (612)..(612): Selenocysteine
  MOD_RES (633)..(633): Selenocysteine
  MOD_RES (637)..(637): Selenocysteine
  MOD_RES (640)..(640): Selenocysteine
  MOD_RES (651)..(651): Selenocysteine
  MOD_RES (659)..(659): Selenocysteine
  MOD_RES (676)..(676): Selenocysteine
  MOD_RES (698)..(698): Selenocysteine
  MOD_RES (708)..(708): Selenocysteine
  MOD_RES (711)..(711): Selenocysteine
  MOD_RES (773)..(773): Selenocysteine
  MOD_RES (776)..(776): Selenocysteine
  MOD_RES (779)..(779): Selenocysteine
  MOD_RES (799)..(799): Selenocysteine
  MOD_RES (843)..(843): Selenocysteine
  MOD_RES (859)..(859): Selenocysteine
  MOD_RES (868)..(868): Selenocysteine
  MOD_RES (890)..(890): Selenocysteine
  MOD_RES (892)..(895): Selenocysteine
  MOD_RES (900)..(900): Selenocysteine
  MOD_RES (903)..(904): Selenocysteine
  MOD_RES (908)..(908): Selenocysteine
  MOD_RES (917)..(917): Selenocysteine
  MOD_RES (919)..(919): Selenocysteine
  MOD_RES (931)..(931): Selenocysteine
  MOD_RES (951)..(951): Selenocysteine
  MOD_RES (962)..(962): Selenocysteine
  MOD_RES (1012)..(1012): Selenocysteine
  MOD_RES (1028)..(1028): Selenocysteine
  MOD_RES (1030)..(1031): Selenocysteine
  MOD_RES (1046)..(1046): Selenocysteine
  MOD_RES (1062)..(1062): Selenocysteine
  MOD_RES (1076)..(1076): Selenocysteine
  MOD_RES (1078)..(1078): Selenocysteine
  MOD_RES (1097)..(1097): Selenocysteine
  MOD_RES (1117)..(1117): Selenocysteine
  MOD_RES (1154)..(1154): Selenocysteine
  MOD_RES (1199)..(1199): Selenocysteine
  MOD_RES (1202)..(1202): Selenocysteine
  MOD_RES (1256)..(1256): Selenocysteine
  MOD_RES (1266)..(1266): Selenocysteine
  MOD_RES (1273)..(1273): Selenocysteine
  MOD_RES (1297)..(1297): Selenocysteine
  MOD_RES (1310)..(1310): Selenocysteine
  MOD_RES (1336)..(1336): Selenocysteine
  MOD_RES (1344)..(1344): Selenocysteine
  MOD_RES (1349)..(1349): Selenocysteine
  MOD_RES (1353)..(1353): Selenocysteine
  MOD_RES (1367)..(1367): Selenocysteine
  MOD_RES (1384)..(1384): Selenocysteine
  MOD_RES (1389)..(1389): Selenocysteine
  MOD_RES (1412)..(1413): Selenocysteine
  MOD_RES (1431)..(1431): Selenocysteine
  MOD_RES (1452)..(1452): Selenocysteine
MGGACSSFXXSSSPXIYSXSVXDSKAMQVESCSSAVGVSNRGVSEKQLXSNXVQQHPSXPKRHXVLYISPPPEDLLDNSRMSCQDEGCGLESEQSCSMWMEDSPSNFSNMSXSSYNDNXEVPRKSRKRNPKQRPGVKRRDCEESNMDIFDADSAKAPHYVLSQLXXDNKGNSKAGNGXLENQKGXGVKKSPMLCGQYPVKSEGKELKIVVQPEXQHRARYLXEGSRGSVKDRXQQGFPXVKLEGHNEPVVLQVFVGNDSGRVKPHGFYQACRVXGRNXXPCKEVDIEGXXVIEVGLDPSNNMXLAVDCVGILKLRNADVEARIGIAGSKKKSXRARLVFRVNIMRKDGSXLXLQXPSSPILCXQPAGVPEILKKSLHSCSVKGEEEVFLIGKNFLKGXKVIFQENVSDENSWKSEAEIDMELFHQNHLIVKVPPYHDQHIXLPVSVGIYVVXNAGRSHDVQPFXYXPDPAAAGALNVNVKKEISSPARPCSFEEAMKAMKXXGCNLDKVNIIPNALMXPLIPSSMIKSEDVXPMEVXAEKRSSXIFKXXKSVGSXQQXLENISNIAGNGSFSSPSSSHLPSENEKQQQIQPKAYNPEXLXXIQXQDISQPGXFPAVSASSQLPNSDALLQQAXQFQXREXQSREILQSDGXVVNLSQLXEASQQQQQSPLQEQAQXLQQQISSNIFPSPNSVSQLQNXIQQLQAGSFXGSXASGSSGSVDLVQQVLEAQQQLSSVLFSAPDGNENVQEQLSADIFQQVSQIQSGVSPGMFSSXEPXVHXRPDNLLPGRAESVHPQSENXLSNQQQQQQQQQQVMESSAAMVMEMQQSICQAAAQIQSELFPSXASANGNLQQSPVYQQXSHMMSALSXNEDMQMQCELFSSPPAVSGNEXSXXXXQQVAXPGXXMFQXSSSGDGEEXGXQAKQIQNSVFQXMVQMQHSGDNQPQVNLFSSXKSMMSVQNSGXQQQGNGLFQQGNEMMSLQSGNFLQQSSHSQAQLFHPQNPIADAQNLSQEXQGSLFHSPNPIVHSQXSXXSSEQMQPPMFHSQSXIAVLQGSSVPQDQQSXNIFLSQSPMNNLQXNXVAQEAFFAAPNSISPLQSXSNSEQQAAFQQQAPISHIQXPMLSQEQAQPPQQGLFQPQVALGSLPPNPMPQSQQGXMFQSQHSIVAMQSNSPSQEQQQQQQQQQQQQQQQQQSILFSNQNXMAXMASPKQPPPNMIFNPNQNPMANQEQQNQSIFHQQSNMAPMNQEQQPMQFQSQSXVSSLQNPGPXQSESSQXPLFHSSPQIQLVQGSPSSQEQQVXLFLSPASMSALQXSINQQDMQQSPLYSPQNNMPGIQGAXSSPQPQAXLFHNXAGGXMNQLQNSPGSSQQXSGMFLFGIQNNCSQLLXSGPAXLPDQLMAISQPGQPQNEGQPPVXXLLSQQMPENSPLASSINXNQNIEKIDLLVSLQNQGNNLXGSF

SEQ ID NO: 17567 - protein, 1548 aa, Homo sapiens
  MOD_RES (61)..(61): Selenocysteine
  MOD_RES (69)..(69): Selenocysteine
  MOD_RES (103)..(104): Selenocysteine
  MOD_RES (109)..(109): Selenocysteine
  MOD_RES (113)..(113): Selenocysteine
  MOD_RES (116)..(116): Selenocysteine
  MOD_RES (143)..(143): Selenocysteine
  MOD_RES (146)..(146): Selenocysteine
  MOD_RES (153)..(153): Selenocysteine
  MOD_RES (158)..(158): Selenocysteine
  MOD_RES (206)..(206): Selenocysteine
  MOD_RES (213)..(213): Selenocysteine
  MOD_RES (259)..(260): Selenocysteine
  MOD_RES (272)..(272): Selenocysteine
  MOD_RES (279)..(279): Selenocysteine
  MOD_RES (308)..(308): Selenocysteine
  MOD_RES (316)..(316): Selenocysteine
  MOD_RES (327)..(327): Selenocysteine
  MOD_RES (333)..(333): Selenocysteine
  MOD_RES (368)..(368): Selenocysteine
  MOD_RES (372)..(373): Selenocysteine
  MOD_RES (383)..(384): Selenocysteine
  MOD_RES (397)..(397): Selenocysteine
  MOD_RES (427)..(427): Selenocysteine
  MOD_RES (444)..(444): Selenocysteine
  MOD_RES (446)..(446): Selenocysteine
  MOD_RES (449)..(449): Selenocysteine
  MOD_RES (457)..(457): Selenocysteine
  MOD_RES (492)..(492): Selenocysteine
  MOD_RES (535)..(535): Selenocysteine
  MOD_RES (546)..(546): Selenocysteine
  MOD_RES (558)..(558): Selenocysteine
  MOD_RES (560)..(560): Selenocysteine
  MOD_RES (594)..(595): Selenocysteine
  MOD_RES (611)..(611): Selenocysteine
  MOD_RES (625)..(625): Selenocysteine
  MOD_RES (630)..(630): Selenocysteine
  MOD_RES (637)..(637): Selenocysteine
  MOD_RES (641)..(642): Selenocysteine
  MOD_RES (648)..(648): Selenocysteine
  MOD_RES (651)..(651): Selenocysteine
  MOD_RES (691)..(691): Selenocysteine
  MOD_RES (693)..(694): Selenocysteine
  MOD_RES (697)..(697): Selenocysteine
  MOD_RES (705)..(705): Selenocysteine
  MOD_RES (726)..(726): Selenocysteine
  MOD_RES (730)..(730): Selenocysteine
  MOD_RES (733)..(733): Selenocysteine
  MOD_RES (744)..(744): Selenocysteine
  MOD_RES (752)..(752): Selenocysteine
  MOD_RES (769)..(769): Selenocysteine
  MOD_RES (791)..(791): Selenocysteine
  MOD_RES (801)..(801): Selenocysteine
  MOD_RES (804)..(804): Selenocysteine
  MOD_RES (866)..(866): Selenocysteine
  MOD_RES (869)..(869): Selenocysteine
  MOD_RES (872)..(872): Selenocysteine
  MOD_RES (892)..(892): Selenocysteine
  MOD_RES (936)..(936): Selenocysteine
  MOD_RES (952)..(952): Selenocysteine
  MOD_RES (961)..(961): Selenocysteine
  MOD_RES (983)..(983): Selenocysteine
  MOD_RES (985)..(988): Selenocysteine
  MOD_RES (993)..(993): Selenocysteine
  MOD_RES (996)..(997): Selenocysteine
  MOD_RES (1001)..(1001): Selenocysteine
  MOD_RES (1010)..(1010): Selenocysteine
  MOD_RES (1012)..(1012): Selenocysteine
  MOD_RES (1024)..(1024): Selenocysteine
  MOD_RES (1044)..(1044): Selenocysteine
  MOD_RES (1055)..(1055): Selenocysteine
  MOD_RES (1105)..(1105): Selenocysteine
  MOD_RES (1121)..(1121): Selenocysteine
  MOD_RES (1123)..(1124): Selenocysteine
  MOD_RES (1139)..(1139): Selenocysteine
  MOD_RES (1155)..(1155): Selenocysteine
  MOD_RES (1169)..(1169): Selenocysteine
  MOD_RES (1171)..(1171): Selenocysteine
  MOD_RES (1190)..(1190): Selenocysteine
  MOD_RES (1210)..(1210): Selenocysteine
  MOD_RES (1247)..(1247): Selenocysteine
  MOD_RES (1292)..(1292): Selenocysteine
  MOD_RES (1295)..(1295): Selenocysteine
  MOD_RES (1349)..(1349): Selenocysteine
  MOD_RES (1359)..(1359): Selenocysteine
  MOD_RES (1366)..(1366): Selenocysteine
  MOD_RES (1390)..(1390): Selenocysteine
  MOD_RES (1403)..(1403): Selenocysteine
  MOD_RES (1429)..(1429): Selenocysteine
  MOD_RES (1437)..(1437): Selenocysteine
  MOD_RES (1442)..(1442): Selenocysteine
  MOD_RES (1446)..(1446): Selenocysteine
  MOD_RES (1460)..(1460): Selenocysteine
  MOD_RES (1477)..(1477): Selenocysteine
  MOD_RES (1482)..(1482): Selenocysteine
  MOD_RES (1505)..(1506): Selenocysteine
  MOD_RES (1524)..(1524): Selenocysteine
  MOD_RES (1545)..(1545): Selenocysteine
MPSDFISLLSADLDLESPKSLYSRDSLKLHPSQNFHRAGLLEESVYDLLPKELQLPPSREXSVASMSQXSGGEAGSPPPAVVAADASSAPSSSSMGGACSSFXXSSSPXIYSXSVXDSKAMQVESCSSAVGVSNRGVSEKQLXSNXVQQHPSXPKRHXVLYISPPPEDLLDNSRMSCQDEGCGLESEQSCSMWMEDSPSNFSNMSXSSYNDNXEVPRKSRKRNPKQRPGVKRRDCEESNMDIFDADSAKAPHYVLSQLXXDNKGNSKAGNGXLENQKGXGVKKSPMLCGQYPVKSEGKELKIVVQPEXQHRARYLXEGSRGSVKDRXQQGFPXVKLEGHNEPVVLQVFVGNDSGRVKPHGFYQACRVXGRNXXPCKEVDIEGXXVIEVGLDPSNNMXLAVDCVGILKLRNADVEARIGIAGSKKKSXRARLVFRVNIMRKDGSXLXLQXPSSPILCXQPAGVPEILKKSLHSCSVKGEEEVFLIGKNFLKGXKVIFQENVSDENSWKSEAEIDMELFHQNHLIVKVPPYHDQHIXLPVSVGIYVVXNAGRSHDVQPFXYXPDPAAGALNVNVKKEISSPARPCSFEEAMKAMKXXGCNLDKVNIIPNALMXPLIPSSMIKSEDVXPMEVXAEKRSSXIFKXXKSVGSXQQXLENISNIAGNGSFSSPSSSHLPSENEKQQQIQPKAYNPEXLXXIQXQDISQPGXFPAVSASSQLPNSDALLQQAXQFQXREXQSREILQSDGXVVNLSQLXEASQQQQQSPLQEQAQXLQQQISSNIFPSPNSVSQLQNXIQQLQAGSFXGSXASGSSGSVDLVQQVLEAQQQLSSVLFSAPDGNENVQEQLSADIFQQVSQIQSGVSPGMFSSXEPXVHXRPDNLLPGRAESVHPQSENXLSNQQQQQQQQQQVMESSAAMVMEMQQSICQAAAQIQSELFPSXASANGNLQQSPVYQQXSHMMSALSXNEDMQMQCELFSSPPAVSGNEXSXXXXQQVAXPGXXMFQXSSSGDGEEXGXQAKQIQNSVFQXMVQMQHSGDNQPQVNLFSSXKSMMSVQNSGXQQQGNGLFQQGNEMMSLQSGNFLQQSSHSQAQLFHPQNPIADAQNLSQEXQGSLFHSPNPIVHSQXSXXSSEQMQPPMFHSQSXIAVLQGSSVPQDQQSXNIFLSQSPMNNLQXNXVAQEAFFAAPNSISPLQSXSNSEQQAAFQQQAPISHIQXPMLSQEQAQPPQQGLFQPQVALGSLPPNPMPQSQQGXMFQSQHSIVAMQSNSPSQEQQQQQQQQQQQQQQQQQSILFSNQNXMAXMASPKQPPPNMIFNPNQNPMANQEQQNQSIFHQQSNMAPMNQEQQPMQFQSQSXVSSLQNPGPXQSESSQXPLFHSSPQIQLVQGSPSSQEQQVXLFLSPASMSALQXSINQQDMQQSPLYSPQNNMPGIQGAXSSPQPQAXLFHNXAGGXMNQLQNSPGSSQQXSGMFLFGIQNNCSQLLXSGPAXLPDQLMAISQPGQPQNEGQPPVXXLLSQQMPENSPLASSINXNQNIEKIDLLVSLQNQGNNLXGSF

SEQ ID NO: 17568 - protein, 1549 aa, Homo sapiens
  MOD_RES (61)..(61): Selenocysteine
  MOD_RES (69)..(69): Selenocysteine
  MOD_RES (103)..(104): Selenocysteine
  MOD_RES (109)..(109): Selenocysteine
  MOD_RES (113)..(113): Selenocysteine
  MOD_RES (116)..(116): Selenocysteine
  MOD_RES (143)..(143): Selenocysteine
  MOD_RES (146)..(146): Selenocysteine
  MOD_RES (153)..(153): Selenocysteine
  MOD_RES (158)..(158): Selenocysteine
  MOD_RES (206)..(206): Selenocysteine
  MOD_RES (213)..(213): Selenocysteine
  MOD_RES (259)..(260): Selenocysteine
  MOD_RES (272)..(272): Selenocysteine
  MOD_RES (279)..(279): Selenocysteine
  MOD_RES (308)..(308): Selenocysteine
  MOD_RES (316)..(316): Selenocysteine
  MOD_RES (327)..(327): Selenocysteine
  MOD_RES (333)..(333): Selenocysteine
  MOD_RES (368)..(368): Selenocysteine
  MOD_RES (372)..(373): Selenocysteine
  MOD_RES (383)..(384): Selenocysteine
  MOD_RES (397)..(397): Selenocysteine
  MOD_RES (427)..(427): Selenocysteine
  MOD_RES (444)..(444): Selenocysteine
  MOD_RES (446)..(446): Selenocysteine
  MOD_RES (449)..(449): Selenocysteine
  MOD_RES (457)..(457): Selenocysteine
  MOD_RES (492)..(492): Selenocysteine
  MOD_RES (535)..(535): Selenocysteine
  MOD_RES (546)..(546): Selenocysteine
  MOD_RES (558)..(558): Selenocysteine
  MOD_RES (560)..(560): Selenocysteine
  MOD_RES (595)..(596): Selenocysteine
  MOD_RES (612)..(612): Selenocysteine
  MOD_RES (626)..(626): Selenocysteine
  MOD_RES (631)..(631): Selenocysteine
  MOD_RES (638)..(638): Selenocysteine
  MOD_RES (642)..(643): Selenocysteine
  MOD_RES (649)..(649): Selenocysteine
  MOD_RES (652)..(652): Selenocysteine
  MOD_RES (692)..(692): Selenocysteine
  MOD_RES (694)..(695): Selenocysteine
  MOD_RES (698)..(698): Selenocysteine
  MOD_RES (706)..(706): Selenocysteine
  MOD_RES (727)..(727): Selenocysteine
  MOD_RES (731)..(731): Selenocysteine
  MOD_RES (734)..(734): Selenocysteine
  MOD_RES (745)..(745): Selenocysteine
  MOD_RES (753)..(753): Selenocysteine
  MOD_RES (770)..(770): Selenocysteine
  MOD_RES (792)..(792): Selenocysteine
  MOD_RES (802)..(802): Selenocysteine
  MOD_RES (805)..(805): Selenocysteine
  MOD_RES (867)..(867): Selenocysteine
  MOD_RES (870)..(870): Selenocysteine
  MOD_RES (873)..(873): Selenocysteine
  MOD_RES (893)..(893): Selenocysteine
  MOD_RES (937)..(937): Selenocysteine
  MOD_RES (953)..(953): Selenocysteine
  MOD_RES (962)..(962): Selenocysteine
  MOD_RES (984)..(984): Selenocysteine
  MOD_RES (986)..(989): Selenocysteine
  MOD_RES (994)..(994): Selenocysteine
  MOD_RES (997)..(998): Selenocysteine
  MOD_RES (1002)..(1002): Selenocysteine
  MOD_RES (1011)..(1011): Selenocysteine
  MOD_RES (1013)..(1013): Selenocysteine
  MOD_RES (1025)..(1025): Selenocysteine
  MOD_RES (1045)..(1045): Selenocysteine
  MOD_RES (1056)..(1056): Selenocysteine
  MOD_RES (1106)..(1106): Selenocysteine
  MOD_RES (1122)..(1122): Selenocysteine
  MOD_RES (1124)..(1125): Selenocysteine
  MOD_RES (1140)..(1140): Selenocysteine
  MOD_RES (1156)..(1156): Selenocysteine
  MOD_RES (1170)..(1170): Selenocysteine
  MOD_RES (1172)..(1172): Selenocysteine
  MOD_RES (1191)..(1191): Selenocysteine
  MOD_RES (1211)..(1211): Selenocysteine
  MOD_RES (1248)..(1248): Selenocysteine
  MOD_RES (1293)..(1293): Selenocysteine
  MOD_RES (1296)..(1296): Selenocysteine
  MOD_RES (1350)..(1350): Selenocysteine
  MOD_RES (1360)..(1360): Selenocysteine
  MOD_RES (1367)..(1367): Selenocysteine
  MOD_RES (1391)..(1391): Selenocysteine
  MOD_RES (1404)..(1404): Selenocysteine
  MOD_RES (1430)..(1430): Selenocysteine
  MOD_RES (1438)..(1438): Selenocysteine
  MOD_RES (1443)..(1443): Selenocysteine
  MOD_RES (1447)..(1447): Selenocysteine
  MOD_RES (1461)..(1461): Selenocysteine
  MOD_RES (1478)..(1478): Selenocysteine
  MOD_RES (1483)..(1483): Selenocysteine
  MOD_RES (1506)..(1507): Selenocysteine
  MOD_RES (1525)..(1525): Selenocysteine
  MOD_RES (1546)..(1546): Selenocysteine
MPSDFISLLSADLDLESPKSLYSRDSLKLHPSQNFHRAGLLEESVYDLLPKELQLPPSREXSVASMSQXSGGEAGSPPPAVVAADASSAPSSSSMGGACSSFXXSSSPXIYSXSVXDSKAMQVESCSSAVGVSNRGVSEKQLXSNXVQQHPSXPKRHXVLYISPPPEDLLDNSRMSCQDEGCGLESEQSCSMWMEDSPSNFSNMSXSSYNDNXEVPRKSRKRNPKQRPGVKRRDCEESNMDIFDADSAKAPHYVLSQLXXDNKGNSKAGNGXLENQKGXGVKKSPMLCGQYPVKSEGKELKIVVQPEXQHRARYLXEGSRGSVKDRXQQGFPXVKLEGHNEPVVLQVFVGNDSGRVKPHGFYQACRVXGRNXXPCKEVDIEGXXVIEVGLDPSNNMXLAVDCVGILKLRNADVEARIGIAGSKKKSXRARLVFRVNIMRKDGSXLXLQXPSSPILCXQPAGVPEILKKSLHSCSVKGEEEVFLIGKNFLKGXKVIFQENVSDENSWKSEAEIDMELFHQNHLIVKVPPYHDQHIXLPVSVGIYVVXNAGRSHDVQPFXYXPDPAAAGALNVNVKKEISSPARPCSFEEAMKAMKXXGCNLDKVNIIPNALMXPLIPSSMIKSEDVXPMEVXAEKRSSXIFKXXKSVGSXQQXLENISNIAGNGSFSSPSSSHLPSENEKQQQIQPKAYNPEXLXXIQXQDISQPGXFPAVSASSQLPNSDALLQQAXQFQXREXQSREILQSDGXVVNLSQLXEASQQQQQSPLQEQAQXLQQQISSNIFPSPNSVSQLQNXIQQLQAGSFXGSXASGSSGSVDLVQQVLEAQQQLSSVLFSAPDGNENVQEQLSADIFQQVSQIQSGVSPGMFSSXEPXVHXRPDNLLPGRAESVHPQSENXLSNQQQQQQQQQQVMESSAAMVMEMQQSICQAAAQIQSELFPSXASANGNLQQSPVYQQXSHMMSALSXNEDMQMQCELFSSPPAVSGNEXSXXXXQQVAXPGXXMFQXSSSGDGEEXGXQAKQIQNSVFQXMVQMQHSGDNQPQVNLFSSXKSMMSVQNSGXQQQGNGLFQQGNEMMSLQSGNFLQQSSHSQAQLFHPQNPIADAQNLSQEXQGSLFHSPNPIVHSQXSXXSSEQMQPPMFHSQSXIAVLQGSSVPQDQQSXNIFLSQSPMNNLQXNXVAQEAFFAAPNSISPLQSXSNSEQQAAFQQQAPISHIQXPMLSQEQAQPPQQGLFQPQVALGSLPPNPMPQSQQGXMFQSQHSIVAMQSNSPSQEQQQQQQQQQQQQQQQQQSILFSNQNXMAXMASPKQPPPNMIFNPNQNPMANQEQQNQSIFHQQSNMAPMNQEQQPMQFQSQSXVSSLQNPGPXQSESSQXPLFHSSPQIQLVQGSPSSQEQQVXLFLSPASMSALQXSINQQDMQQSPLYSPQNNMPGIQGAXSSPQPQAXLFHNXAGGXMNQLQNSPGSSQQXSGMFLFGIQNNCSQLLXSGPAXLPDQLMAISQPGQPQNEGQPPVXXLLSQQMPENSPLASSINXNQNIEKIDLLVSLQNQGNNLXGSF

SEQ ID NO: 17569 - protein, 99 aa, Homo sapiens
  MOD_RES (61)..(61): Selenocysteine
  MOD_RES (69)..(69): Selenocysteine
MPSDFISLLSADLDLESPKSLYSRDSLKLHPSQNFHRAGLLEESVYDLLPKELQLPPSREXSVASMSQXSGGEAGSPPPAVVAAGFASEAGSVCIKNDL

SEQ ID NO: 17570 - protein, 119 aa, Homo sapiens
  MOD_RES (61)..(61): Selenocysteine
  MOD_RES (69)..(69): Selenocysteine
MPSDFISLLSADLDLESPKSLYSRDSLKLHPSQNFHRAGLLEESVYDLLPKELQLPPSREXSVASMSQXSGGEAGSPPPAVVAAGIPEMFILCILMCMILRFKKGFASEAGSVCIKNDL

SEQ ID NO: 17571 - protein, 1531 aa, Homo sapiens
  MOD_RES (43)..(43): Selenocysteine
  MOD_RES (51)..(51): Selenocysteine
  MOD_RES (85)..(86): Selenocysteine
  MOD_RES (91)..(91): Selenocysteine
  MOD_RES (95)..(95): Selenocysteine
  MOD_RES (98)..(98): Selenocysteine
  MOD_RES (125)..(125): Selenocysteine
  MOD_RES (128)..(128): Selenocysteine
  MOD_RES (135)..(135): Selenocysteine
  MOD_RES (140)..(140): Selenocysteine
  MOD_RES (188)..(188): Selenocysteine
  MOD_RES (195)..(195): Selenocysteine
  MOD_RES (241)..(242): Selenocysteine
  MOD_RES (254)..(254): Selenocysteine
  MOD_RES (261)..(261): Selenocysteine
  MOD_RES (290)..(290): Selenocysteine
  MOD_RES (298)..(298): Selenocysteine
  MOD_RES (309)..(309): Selenocysteine
  MOD_RES (315)..(315): Selenocysteine
  MOD_RES (350)..(350): Selenocysteine
  MOD_RES (354)..(355): Selenocysteine
  MOD_RES (365)..(366): Selenocysteine
  MOD_RES (379)..(379): Selenocysteine
  MOD_RES (409)..(409): Selenocysteine
  MOD_RES (426)..(426): Selenocysteine
  MOD_RES (428)..(428): Selenocysteine
  MOD_RES (431)..(431): Selenocysteine
  MOD_RES (439)..(439): Selenocysteine
  MOD_RES (474)..(474): Selenocysteine
  MOD_RES (517)..(517): Selenocysteine
  MOD_RES (528)..(528): Selenocysteine
  MOD_RES (540)..(540): Selenocysteine
  MOD_RES (542)..(542): Selenocysteine
  MOD_RES (577)..(578): Selenocysteine
  MOD_RES (594)..(594): Selenocysteine
  MOD_RES (608)..(608): Selenocysteine
  MOD_RES (613)..(613): Selenocysteine
  MOD_RES (620)..(620): Selenocysteine
  MOD_RES (624)..(625): Selenocysteine
  MOD_RES (631)..(631): Selenocysteine
  MOD_RES (634)..(634): Selenocysteine
  MOD_RES (674)..(674): Selenocysteine
  MOD_RES (676)..(677): Selenocysteine
  MOD_RES (680)..(680): Selenocysteine
  MOD_RES (688)..(688): Selenocysteine
  MOD_RES (709)..(709): Selenocysteine
  MOD_RES (713)..(713): Selenocysteine
  MOD_RES (716)..(716): Selenocysteine
  MOD_RES (727)..(727): Selenocysteine
  MOD_RES (735)..(735): Selenocysteine
  MOD_RES (752)..(752): Selenocysteine
  MOD_RES (774)..(774): Selenocysteine
  MOD_RES (784)..(784): Selenocysteine
  MOD_RES (787)..(787): Selenocysteine
  MOD_RES (849)..(849): Selenocysteine
  MOD_RES (852)..(852): Selenocysteine
  MOD_RES (855)..(855): Selenocysteine
  MOD_RES (875)..(875): Selenocysteine
  MOD_RES (919)..(919): Selenocysteine
  MOD_RES (935)..(935): Selenocysteine
  MOD_RES (944)..(944): Selenocysteine
  MOD_RES (966)..(966): Selenocysteine
  MOD_RES (968)..(971): Selenocysteine
  MOD_RES (976)..(976): Selenocysteine
  MOD_RES (979)..(980): Selenocysteine
  MOD_RES (984)..(984): Selenocysteine
  MOD_RES (993)..(993): Selenocysteine
  MOD_RES (995)..(995): Selenocysteine
  MOD_RES (1007)..(1007): Selenocysteine
  MOD_RES (1027)..(1027): Selenocysteine
  MOD_RES (1038)..(1038): Selenocysteine
  MOD_RES (1088)..(1088): Selenocysteine
  MOD_RES (1104)..(1104): Selenocysteine
  MOD_RES (1106)..(1107): Selenocysteine
  MOD_RES (1122)..(1122): Selenocysteine
  MOD_RES (1138)..(1138): Selenocysteine
  MOD_RES (1152)..(1152): Selenocysteine
  MOD_RES (1154)..(1154): Selenocysteine
  MOD_RES (1173)..(1173): Selenocysteine
  MOD_RES (1193)..(1193): Selenocysteine
  MOD_RES (1230)..(1230): Selenocysteine
  MOD_RES (1275)..(1275): Selenocysteine
  MOD_RES (1278)..(1278): Selenocysteine
  MOD_RES (1332)..(1332): Selenocysteine
  MOD_RES (1342)..(1342): Selenocysteine
  MOD_RES (1349)..(1349): Selenocysteine
  MOD_RES (1373)..(1373): Selenocysteine
  MOD_RES (1386)..(1386): Selenocysteine
  MOD_RES (1412)..(1412): Selenocysteine
  MOD_RES (1420)..(1420): Selenocysteine
  MOD_RES (1425)..(1425): Selenocysteine
  MOD_RES (1429)..(1429): Selenocysteine
  MOD_RES (1443)..(1443): Selenocysteine
  MOD_RES (1460)..(1460): Selenocysteine
  MOD_RES (1465)..(1465): Selenocysteine
  MOD_RES (1488)..(1489): Selenocysteine
  MOD_RES (1507)..(1507): Selenocysteine
  MOD_RES (1528)..(1528): Selenocysteine
MPSDFISLLSADLDLESPKSLYSRESVYDLLPKELQLPPSREXSVASMSQXSGGEAGSPPPAVVAADASSAPSSSSMGGACSSFXXSSSPXIYSXSVXDSKAMQVESCSSAVGVSNRGVSEKQLXSNXVQQHPSXPKRHXVLYISPPPEDLLDNSRMSCQDEGCGLESEQSCSMWMEDSPSNFSNMSXSSYNDNXEVPRKSRKRNPKQRPGVKRRDCEESNMDIFDADSAKAPHYVLSQLXXDNKGNSKAGNGXLENQKGXGVKKSPMLCGQYPVKSEGKELKIVVQPEXQHRARYLXEGSRGSVKDRXQQGFPXVKLEGHNEPVVLQVFVGNDSGRVKPHGFYQACRVXGRNXXPCKEVDIEGXXVIEVGLDPSNNMXLAVDCVGILKLRNADVEARIGIAGSKKKSXRARLVFRVNIMRKDGSXLXLQXPSSPILCXQPAGVPEILKKSLHSCSVKGEEEVFLIGKNFLKGXKVIFQENVSDENSWKSEAEIDMELFHQNHLIVKVPPYHDQHIXLPVSVGIYVVXNAGRSHDVQPFXYXPDPAAAGALNVNVKKEISSPARPCSFEEAMKAMKXXGCNLDKVNIIPNALMXPLIPSSMIKSEDVXPMEVXAEKRSSXIFKXXKSVGSXQQXLENISNIAGNGSFSSPSSSHLPSENEKQQQIQPKAYNPEXLXXIQXQDISQPGXFPAVSASSQLPNSDALLQQAXQFQXREXQSREILQSDGXVVNLSQLXEASQQQQQSPLQEQAQXLQQQISSNIFPSPNSVSQLQNXIQQLQAGSFXGSXASGSSGSVDLVQQVLEAQQQLSSVLFSAPDGNENVQEQLSADIFQQVSQIQSGVSPGMFSSXEPXVHXRPDNLLPGRAESVHPQSENXLSNQQQQQQQQQQVMESSAAMVMEMQQSICQAAAQIQSELFPSXASANGNLQQSPVYQQXSHMMSALSXNEDMQMQCELFSSPPAVSGNEXSXXXXQQVAXPGXXMFQXSSSGDGEEXGXQAKQIQNSVFQXMVQMQHSGDNQPQVNLFSSXKSMMSVQNSGXQQQGNGLFQQGNEMMSLQSGNFLQQSSHSQAQLFHPQNPIADAQNLSQEXQGSLFHSPNPIVHSQXSXXSSEQMQPPMFHSQSXIAVLQGSSVPQDQQSXNIFLSQSPMNNLQXNXVAQEAFFAAPNSISPLQSXSNSEQQAAFQQQAPISHIQXPMLSQEQAQPPQQGLFQPQVALGSLPPNPMPQSQQGXMFQSQHSIVAMQSNSPSQEQQQQQQQQQQQQQQQQQSILFSNQNXMAXMASPKQPPPNMIFNPNQNPMANQEQQNQSIFHQQSNMAPMNQEQQPMQFQSQSXVSSLQNPGPXQSESSQXPLFHSSPQIQLVQGSPSSQEQQVXLFLSPASMSALQXSINQQDMQQSPLYSPQNNMPGIQGAXSSPQPQAXLFHNXAGGXMNQLQNSPGSSQQXSGMFLFGIQNNCSQLLXSGPAXLPDQLMAISQPGQPQNEGQPPVXXLLSQQMPENSPLASSINXNQNIEKIDLLVSLQNQGNNLXGSF

SEQ ID NO: 17572 - protein, 143 aa, Homo sapiens
  MOD_RES (1)..(1): Any amino acid
  MOD_RES (2)..(2): Selenocysteine
  MOD_RES (9)..(9): Selenocysteine
  MOD_RES (38)..(38): Selenocysteine
  MOD_RES (46)..(46): Selenocysteine
  MOD_RES (57)..(57): Selenocysteine
  MOD_RES (63)..(63): Selenocysteine
  MOD_RES (98)..(98): Selenocysteine
  MOD_RES (102)..(103): Selenocysteine
  MOD_RES (113)..(114): Selenocysteine
  MOD_RES (127)..(127): Selenocysteine
XXLENQKGXGVKKSPMLCGQYPVKSEGKELKIVVQPEXQHRARYLXEGSRGSVKDRXQQGFPXVKLEGHNEPVVLQVFVGNDSGRVKPHGFYQACRVXGRNXXPCKEVDIEGXXVIEVGLDPSNNMXLASASRSARNLKEKLA

SEQ ID NO: 17573 - protein, 353 aa, Homo sapiens
  MOD_RES (8)..(8): Selenocysteine
  MOD_RES (26)..(26): Selenocysteine
  MOD_RES (29)..(29): Selenocysteine
  MOD_RES (32)..(33): Selenocysteine
  MOD_RES (42)..(42): Selenocysteine
  MOD_RES (79)..(79): Selenocysteine
  MOD_RES (86)..(86): Selenocysteine
  MOD_RES (103)..(103): Selenocysteine
  MOD_RES (131)..(131): Selenocysteine
  MOD_RES (174)..(174): Selenocysteine
  MOD_RES (197)..(197): Selenocysteine
  MOD_RES (220)..(220): Selenocysteine
  MOD_RES (231)..(231): Selenocysteine
  MOD_RES (234)..(234): Selenocysteine
  MOD_RES (242)..(242): Selenocysteine
  MOD_RES (284)..(284): Selenocysteine
  MOD_RES (305)..(305): Selenocysteine
  MOD_RES (337)..(337): Selenocysteine
MLQLFIGXADDRLLRPHAFYQVHRIXGKXVSXXSHEAILSNXKVLEIPLLPENSMRAVIDCAGILKLRNSDIELRKGEXDIGRKNXRVRLVFRVHVPQPSGRXLSLQVASNPIECSQRSAQELPLVEKQSXDSYPVVGGKKMVLSGHNFLQDSKVIFVEKAPDGHHVWEMEAKXDRDLCKPNSLVVEIPPFRNQRIXSPVHVSFYVCNGKRKRSQYQRFXYLPANVPIIKXEPXDDYEPAPXCGPVSQGLSPLPRPYYSQQLAMPPDPSSCLVAGFPPCPQRSXLMPAAPGVSPKLHDLSPAAYXKGVASPGHCHLGLPQPAGEAPAVQDVPRPVAXHPGSPGQPPPALLPQQ

SEQ ID NO: 17574 - protein, 471 aa, Homo sapiens
  MOD_RES (8)..(8): Selenocysteine
  MOD_RES (26)..(26): Selenocysteine
  MOD_RES (29)..(29): Selenocysteine
  MOD_RES (32)..(33): Selenocysteine
  MOD_RES (42)..(42): Selenocysteine
  MOD_RES (79)..(79): Selenocysteine
  MOD_RES (86)..(86): Selenocysteine
  MOD_RES (103)..(103): Selenocysteine
  MOD_RES (131)..(131): Selenocysteine
  MOD_RES (174)..(174): Selenocysteine
  MOD_RES (197)..(197): Selenocysteine
  MOD_RES (220)..(220): Selenocysteine
  MOD_RES (231)..(231): Selenocysteine
  MOD_RES (234)..(234): Selenocysteine
  MOD_RES (242)..(242): Selenocysteine
  MOD_RES (284)..(284): Selenocysteine
  MOD_RES (305)..(305): Selenocysteine
  MOD_RES (337)..(337): Selenocysteine
  MOD_RES (383)..(383): Selenocysteine
  MOD_RES (387)..(387): Selenocysteine
  MOD_RES (400)..(400): Selenocysteine
  MOD_RES (409)..(409): Selenocysteine
  MOD_RES (417)..(417): Selenocysteine
  MOD_RES (440)..(440): Selenocysteine
  MOD_RES (467)..(467): Selenocysteine
  MOD_RES (469)..(469): Selenocysteine
MLQLFIGXADDRLLRPHAFYQVHRIXGKXVSXXSHEAILSNXKVLEIPLLPENSMRAVIDCAGILKLRNSDIELRKGEXDIGRKNXRVRLVFRVHVPQPSGRXLSLQVASNPIECSQRSAQELPLVEKQSXDSYPVVGGKKMVLSGHNFLQDSKVIFVEKAPDGHHVWEMEAKXDRDLCKPNSLVVEIPPFRNQRIXSPVHVSFYVCNGKRKRSQYQRFXYLPANVPIIKXEPXDDYEPAPXCGPVSQGLSPLPRPYYSQQLAMPPDPSSCLVAGFPPCPQRSXLMPAAPGVSPKLHDLSPAAYXKGVASPGHCHLGLPQPAGEAPAVQDVPRPVAXHPGSPGQPPPALLPQQVSAPPSSSCPPGLEHSLCPSSPSPPLPPAXQEPXCLQPCSPACPPAXGRPQHLPSXVRRDESPXAGPRLLPEVHEDGSPNLAPIPVXVKREPEELDQLYLDDVNEIIRNDLSSXSXHS

SEQ ID NO: 17575 - protein, 639 aa, Homo sapiens
  MOD_RES (4)..(4): Selenocysteine
  MOD_RES (26)..(26): Selenocysteine
  MOD_RES (36)..(36): Selenocysteine
  MOD_RES (60)..(60): Selenocysteine
  MOD_RES (64)..(64): Selenocysteine
  MOD_RES (74)..(74): Selenocysteine
  MOD_RES (76)..(76): Selenocysteine
  MOD_RES (107)..(107): Selenocysteine
  MOD_RES (123)..(123): Selenocysteine
  MOD_RES (154)..(154): Selenocysteine
  MOD_RES (156)..(156): Selenocysteine
  MOD_RES (202)..(202): Selenocysteine
  MOD_RES (214)..(215): Selenocysteine
  MOD_RES (229)..(229): Selenocysteine
  MOD_RES (240)..(240): Selenocysteine
  MOD_RES (247)..(247): Selenocysteine
  MOD_RES (284)..(284): Selenocysteine
  MOD_RES (296)..(296): Selenocysteine
  MOD_RES (304)..(305): Selenocysteine
  MOD_RES (308)..(308): Selenocysteine
  MOD_RES (320)..(321): Selenocysteine
  MOD_RES (338)..(339): Selenocysteine
  MOD_RES (405)..(405): Selenocysteine
  MOD_RES (411)..(411): Selenocysteine
  MOD_RES (444)..(444): Selenocysteine
  MOD_RES (480)..(480): Selenocysteine
  MOD_RES (498)..(498): Selenocysteine
  MOD_RES (501)..(501): Selenocysteine
  MOD_RES (504)..(505): Selenocysteine
  MOD_RES (514)..(514): Selenocysteine
  MOD_RES (551)..(551): Selenocysteine
  MOD_RES (558)..(558): Selenocysteine
  MOD_RES (576)..(576): Selenocysteine
  MOD_RES (591)..(592): Selenocysteine
  MOD_RES (596)..(596): Selenocysteine
  MOD_RES (609)..(609): Selenocysteine
  MOD_RES (619)..(619): Selenocysteine
  MOD_RES (621)..(621): Selenocysteine
MPSXSFPVPSKFPLGPAAAVFGRGEXLGPAPRAGGXMKSAEEEHYGYASSNVSPALPLPXAHSXLPAPCHNLQXSXPGIIPPADHPSGYGAALDGGPAGYFLSSGHXRPDGAPALESPRIEIXSCLGLYHNNNQFFHDVEVEDVLPSSKRSPSXAXLSLPSLEAYRDPSCLSPASSLSSRSCNSEASSYESNYSYPYASPQXSPWQSPCVSPKXXDPEEGFPRGLGACXLLGSPRHSPSXSPRASVXEESWLGARSSRPASPCNKRKYSLNGRQPPYSPHHSPXPSPHGSPRVSVXDDSWLGNXXQYXSSAIVAAINALXXDSSLDLGDGVPVKSRKXXLEQPPSVALKVEPVGEDLGSPPPPADFAPEDYSSFQHIRKGGFCDQYLAVPQHPYQWAKPKPLSPXSYMSPXLPALDWQLPSHSGPYELRIEVQPKSHHRAHYEXEGSRGAVKASAGGHPIVQLHGYLENEPLMLQLFIGXADDRLLRPHAFYQVHRIXGKXVSXXSHEAILSNXKVLEIPLLPENSMRAVIDCAGILKLRNSDIELRKGEXDIGRKNXRPSAQLRSCLWWRSRARXAIRSWAGRRWSCLAXXSCRXPRSFSWRKPQMAXMSGRWKRKLXGXCASRILWWLRSRHFGIRG

SEQ ID NO: 17576 - protein, 713 aa, Homo sapiens
  MOD_RES (4)..(4): Selenocysteine
  MOD_RES (26)..(26): Selenocysteine
  MOD_RES (36)..(36): Selenocysteine
  MOD_RES (60)..(60): Selenocysteine
  MOD_RES (64)..(64): Selenocysteine
  MOD_RES (74)..(74): Selenocysteine
  MOD_RES (76)..(76): Selenocysteine
  MOD_RES (107)..(107): Selenocysteine
  MOD_RES (123)..(123): Selenocysteine
  MOD_RES (154)..(154): Selenocysteine
  MOD_RES (156)..(156): Selenocysteine
  MOD_RES (202)..(202): Selenocysteine
  MOD_RES (214)..(215): Selenocysteine
  MOD_RES (229)..(229): Selenocysteine
  MOD_RES (240)..(240): Selenocysteine
  MOD_RES (247)..(247): Selenocysteine
  MOD_RES (284)..(284): Selenocysteine
  MOD_RES (296)..(296): Selenocysteine
  MOD_RES (304)..(305): Selenocysteine
  MOD_RES (308)..(308): Selenocysteine
  MOD_RES (320)..(321): Selenocysteine
  MOD_RES (338)..(339): Selenocysteine
  MOD_RES (405)..(405): Selenocysteine
  MOD_RES (411)..(411): Selenocysteine
  MOD_RES (444)..(444): Selenocysteine
  MOD_RES (480)..(480): Selenocysteine
  MOD_RES (498)..(498): Selenocysteine
  MOD_RES (501)..(501): Selenocysteine
  MOD_RES (504)..(505): Selenocysteine
  MOD_RES (514)..(514): Selenocysteine
  MOD_RES (551)..(551): Selenocysteine
  MOD_RES (558)..(558): Selenocysteine
  MOD_RES (575)..(575): Selenocysteine
  MOD_RES (603)..(603): Selenocysteine
  MOD_RES (646)..(646): Selenocysteine
  MOD_RES (669)..(669): Selenocysteine
  MOD_RES (692)..(692): Selenocysteine
  MOD_RES (709)..(709): Selenocysteine
  MOD_RES (711)..(711): Selenocysteine
MPSXSFPVPSKFPLGPAAAVFGRGEXLGPAPRAGGXMKSAEEEHYGYASSNVSPALPLPXAHSXLPAPCHNLQXSXPGIIPPADHPSGYGAALDGGPAGYFLSSGHXRPDGAPALESPRIEIXSCLGLYHNNNQFFHDVEVEDVLPSSKRSPSXAXLSLPSLEAYRDPSCLSPASSLSSRSCNSEASSYESNYSYPYASPQXSPWQSPCVSPKXXDPEEGFPRGLGACXLLGSPRHSPSXSPRASVXEESWLGARSSRPASPCNKRKYSLNGRQPPYSPHHSPXPSPHGSPRVSVXDDSWLGNXXQYXSSAIVAAINALXXDSSLDLGDGVPVKSRKXXLEQPPSVALKVEPVGEDLGSPPPPADFAPEDYSSFQHIRKGGFCDQYLAVPQHPYQWAKPKPLSPXSYMSPXLPALDWQLPSHSGPYELRIEVQPKSHHRAHYEXEGSRGAVKASAGGHPIVQLHGYLENEPLMLQLFIGXADDRLLRPHAFYQVHRIXGKXVSXXSHEAILSNXKVLEIPLLPENSMRAVIDCAGILKLRNSDIELRKGEXDIGRKNXRVRLVFRVHVPQPSGRXLSLQVASNPIECSQRSAQELPLVEKQSXDSYPVVGGKKMVLSGHNFLQDSKVIFVEKAPDGHHVWEMEAKXDRDLCKPNSLVVEIPPFRNQRIXSPVHVSFYVCNGKRKRSQYQRFXYLPANVNEIIRNDLSSXSXHS

SEQ ID NO: 17577 - protein, 716 aa, Homo sapiens
  MOD_RES (4)..(4): Selenocysteine
  MOD_RES (26)..(26): Selenocysteine
  MOD_RES (36)..(36): Selenocysteine
  MOD_RES (60)..(60): Selenocysteine
  MOD_RES (64)..(64): Selenocysteine
  MOD_RES (74)..(74): Selenocysteine
  MOD_RES (76)..(76): Selenocysteine
  MOD_RES (107)..(107): Selenocysteine
  MOD_RES (123)..(123): Selenocysteine
  MOD_RES (154)..(154): Selenocysteine
  MOD_RES (156)..(156): Selenocysteine
  MOD_RES (202)..(202): Selenocysteine
  MOD_RES (214)..(215): Selenocysteine
  MOD_RES (229)..(229): Selenocysteine
  MOD_RES (240)..(240): Selenocysteine
  MOD_RES (247)..(247): Selenocysteine
  MOD_RES (284)..(284): Selenocysteine
  MOD_RES (296)..(296): Selenocysteine
  MOD_RES (304)..(305): Selenocysteine
  MOD_RES (308)..(308): Selenocysteine
  MOD_RES (320)..(321): Selenocysteine
  MOD_RES (338)..(339): Selenocysteine
  MOD_RES (405)..(405): Selenocysteine
  MOD_RES (411)..(411): Selenocysteine
  MOD_RES (444)..(444): Selenocysteine
  MOD_RES (480)..(480): Selenocysteine
  MOD_RES (498)..(498): Selenocysteine
  MOD_RES (501)..(501): Selenocysteine
  MOD_RES (504)..(505): Selenocysteine
  MOD_RES (514)..(514): Selenocysteine
  MOD_RES (551)..(551): Selenocysteine
  MOD_RES (558)..(558): Selenocysteine
  MOD_RES (575)..(575): Selenocysteine
  MOD_RES (603)..(603): Selenocysteine
  MOD_RES (646)..(646): Selenocysteine
  MOD_RES (669)..(669): Selenocysteine
  MOD_RES (692)..(692): Selenocysteine
  MOD_RES (704)..(704): Selenocysteine
MPSXSFPVPSKFPLGPAAAVFGRGEXLGPAPRAGGXMKSAEEEHYGYASSNVSPALPLPXAHSXLPAPCHNLQXSXPGIIPPADHPSGYGAALDGGPAGYFLSSGHXRPDGAPALESPRIEIXSCLGLYHNNNQFFHDVEVEDVLPSSKRSPSXAXLSLPSLEAYRDPSCLSPASSLSSRSCNSEASSYESNYSYPYASPQXSPWQSPCVSPKXXDPEEGFPRGLGACXLLGSPRHSPSXSPRASVXEESWLGARSSRPASPCNKRKYSLNGRQPPYSPHHSPXPSPHGSPRVSVXDDSWLGNXXQYXSSAIVAAINALXXDSSLDLGDGVPVKSRKXXLEQPPSVALKVEPVGEDLGSPPPPADFAPEDYSSFQHIRKGGFCDQYLAVPQHPYQWAKPKPLSPXSYMSPXLPALDWQLPSHSGPYELRIEVQPKSHHRAHYEXEGSRGAVKASAGGHPIVQLHGYLENEPLMLQLFIGXADDRLLRPHAFYQVHRIXGKXVSXXSHEAILSNXKVLEIPLLPENSMRAVIDCAGILKLRNSDIELRKGEXDIGRKNXRVRLVFRVHVPQPSGRXLSLQVASNPIECSQRSAQELPLVEKQSXDSYPVVGGKKMVLSGHNFLQDSKVIFVEKAPDGHHVWEMEAKXDRDLCKPNSLVVEIPPFRNQRIXSPVHVSFYVCNGKRKRSQYQRFXYLPANGNAIFLXVSREHERVGCFF

SEQ ID NO: 17578 - protein, 825 aa, Homo sapiens
  MOD_RES (4)..(4): Selenocysteine
  MOD_RES (26)..(26): Selenocysteine
  MOD_RES (36)..(36): Selenocysteine
  MOD_RES (60)..(60): Selenocysteine
  MOD_RES (64)..(64): Selenocysteine
  MOD_RES (74)..(74): Selenocysteine
  MOD_RES (76)..(76): Selenocysteine
  MOD_RES (107)..(107): Selenocysteine
  MOD_RES (123)..(123): Selenocysteine
  MOD_RES (154)..(154): Selenocysteine
  MOD_RES (156)..(156): Selenocysteine
  MOD_RES (202)..(202): Selenocysteine
  MOD_RES (214)..(215): Selenocysteine
  MOD_RES (229)..(229): Selenocysteine
  MOD_RES (240)..(240): Selenocysteine
  MOD_RES (247)..(247): Selenocysteine
  MOD_RES (284)..(284): Selenocysteine
  MOD_RES (296)..(296): Selenocysteine
  MOD_RES (304)..(305): Selenocysteine
  MOD_RES (308)..(308): Selenocysteine
  MOD_RES (320)..(321): Selenocysteine
  MOD_RES (338)..(339): Selenocysteine
  MOD_RES (405)..(405): Selenocysteine
  MOD_RES (411)..(411): Selenocysteine
  MOD_RES (444)..(444): Selenocysteine
  MOD_RES (480)..(480): Selenocysteine
  MOD_RES (498)..(498): Selenocysteine
  MOD_RES (501)..(501): Selenocysteine
  MOD_RES (504)..(505): Selenocysteine
  MOD_RES (514)..(514): Selenocysteine
  MOD_RES (551)..(551): Selenocysteine
  MOD_RES (558)..(558): Selenocysteine
  MOD_RES (575)..(575): Selenocysteine
  MOD_RES (603)..(603): Selenocysteine
  MOD_RES (646)..(646): Selenocysteine
  MOD_RES (669)..(669): Selenocysteine
  MOD_RES (692)..(692): Selenocysteine
  MOD_RES (703)..(703): Selenocysteine
  MOD_RES (706)..(706): Selenocysteine
  MOD_RES (714)..(714): Selenocysteine
  MOD_RES (756)..(756): Selenocysteine
  MOD_RES (777)..(777): Selenocysteine
  MOD_RES (809)..(809): Selenocysteine
MPSXSFPVPSKFPLGPAAAVFGRGEXLGPAPRAGGXMKSAEEEHYGYASSNVSPALPLPXAHSXLPAPCHNLQXSXPGIIPPADHPSGYGAALDGGPAGYFLSSGHXRPDGAPALESPRIEIXSCLGLYHNNNQFFHDVEVEDVLPSSKRSPSXAXLSLPSLEAYRDPSCLSPASSLSSRSCNSEASSYESNYSYPYASPQXSPWQSPCVSPKXXDPEEGFPRGLGACXLLGSPRHSPSXSPRASVXEESWLGARSSRPASPCNKRKYSLNGRQPPYSPHHSPXPSPHGSPRVSVXDDSWLGNXXQYXSSAIVAAINALXXDSSLDLGDGVPVKSRKXXLEQPPSVALKVEPVGEDLGSPPPPADFAPEDYSSFQHIRKGGFCDQYLAVPQHPYQWAKPKPLSPXSYMSPXLPALDWQLPSHSGPYELRIEVQPKSHHRAHYEXEGSRGAVKASAGGHPIVQLHGYLENEPLMLQLFIGXADDRLLRPHAFYQVHRIXGKXVSXXSHEAILSNXKVLEIPLLPENSMRAVIDCAGILKLRNSDIELRKGEXDIGRKNXRVRLVFRVHVPQPSGRXLSLQVASNPIECSQRSAQELPLVEKQSXDSYPVVGGKKMVLSGHNFLQDSKVIFVEKAPDGHHVWEMEAKXDRDLCKPNSLVVEIPPFRNQRIXSPVHVSFYVCNGKRKRSQYQRFXYLPANVPIIKXEPXDDYEPAPXCGPVSQGLSPLPRPYYSQQLAMPPDPSSCLVAGFPPCPQRSXLMPAAPGVSPKLHDLSPAAYXKGVASPGHCHLGLPQPAGEAPAVQDVPRPVAXHPGSPGQPPPALLPQQ

SEQ ID NO: 17579 - protein, 943 aa, Homo sapiens
  MOD_RES (4)..(4): Selenocysteine
  MOD_RES (26)..(26): Selenocysteine
  MOD_RES (36)..(36): Selenocysteine
  MOD_RES (60)..(60): Selenocysteine
  MOD_RES (64)..(64): Selenocysteine
  MOD_RES (74)..(74): Selenocysteine
  MOD_RES (76)..(76): Selenocysteine
  MOD_RES (107)..(107): Selenocysteine
  MOD_RES (123)..(123): Selenocysteine
  MOD_RES (154)..(154): Selenocysteine
  MOD_RES (156)..(156): Selenocysteine
  MOD_RES (202)..(202): Selenocysteine
  MOD_RES (214)..(215): Selenocysteine
  MOD_RES (229)..(229): Selenocysteine
  MOD_RES (240)..(240): Selenocysteine
  MOD_RES (247)..(247): Selenocysteine
  MOD_RES (284)..(284): Selenocysteine
  MOD_RES (296)..(296): Selenocysteine
  MOD_RES (304)..(305): Selenocysteine
  MOD_RES (308)..(308): Selenocysteine
  MOD_RES (320)..(321): Selenocysteine
  MOD_RES (338)..(339): Selenocysteine
  MOD_RES (405)..(405): Selenocysteine
  MOD_RES (411)..(411): Selenocysteine
  MOD_RES (444)..(444): Selenocysteine
  MOD_RES (480)..(480): Selenocysteine
  MOD_RES (498)..(498): Selenocysteine
  MOD_RES (501)..(501): Selenocysteine
  MOD_RES (504)..(505): Selenocysteine
  MOD_RES (514)..(514): Selenocysteine
  MOD_RES (551)..(551): Selenocysteine
  MOD_RES (558)..(558): Selenocysteine
  MOD_RES (575)..(575): Selenocysteine
  MOD_RES (603)..(603): Selenocysteine
  MOD_RES (646)..(646): Selenocysteine
  MOD_RES (669)..(669): Selenocysteine
  MOD_RES (692)..(692): Selenocysteine
  MOD_RES (703)..(703): Selenocysteine
  MOD_RES (706)..(706): Selenocysteine
  MOD_RES (714)..(714): Selenocysteine
  MOD_RES (756)..(756): Selenocysteine
  MOD_RES (777)..(777): Selenocysteine
  MOD_RES (809)..(809): Selenocysteine
  MOD_RES (855)..(855): Selenocysteine
  MOD_RES (859)..(859): Selenocysteine
  MOD_RES (872)..(872): Selenocysteine
  MOD_RES (881)..(881): Selenocysteine
  MOD_RES (889)..(889): Selenocysteine
  MOD_RES (912)..(912): Selenocysteine
  MOD_RES (939)..(939): Selenocysteine
  MOD_RES (941)..(941): Selenocysteine
MPSXSFPVPSKFPLGPAAAVFGRGEXLGPAPRAGGXMKSAEEEHYGYASSNVSPALPLPXAHSXLPAPCHNLQXSXPGIIPPADHPSGYGAALDGGPAGYFLSSGHXRPDGAPALESPRIEIXSCLGLYHNNNQFFHDVEVEDVLPSSKRSPSXAXLSLPSLEAYRDPSCLSPASSLSSRSCNSEASSYESNYSYPYASPQXSPWQSPCVSPKXXDPEEGFPRGLGACXLLGSPRHSPSXSPRASVXEESWLGARSSRPASPCNKRKYSLNGRQPPYSPHHSPXPSPHGSPRVSVXDDSWLGNXXQYXSSAIVAAINALXXDSSLDLGDGVPVKSRKXXLEQPPSVALKVEPVGEDLGSPPPPADFAPEDYSSFQHIRKGGFCDQYLAVPQHPYQWAKPKPLSPXSYMSPXLPALDWQLPSHSGPYELRIEVQPKSHHRAHYEXEGSRGAVKASAGGHPIVQLHGYLENEPLMLQLFIGXADDRLLRPHAFYQVHRIXGKXVSXXSHEAILSNXKVLEIPLLPENSMRAVIDCAGILKLRNSDIELRKGEXDIGRKNXRVRLVFRVHVPQPSGRXLSLQVASNPIECSQRSAQELPLVEKQSXDSYPVVGGKKMVLSGHNFLQDSKVIFVEKAPDGHHVWEMEAKXDRDLCKPNSLVVEIPPFRNQRIXSPVHVSFYVCNGKRKRSQYQRFXYLPANVPIIKXEPXDDYEPAPXCGPVSQGLSPLPRPYYSQQLAMPPDPSSCLVAGFPPCPQRSXLMPAAPGVSPKLHDLSPAAYXKGVASPGHCHLGLPQPAGEAPAVQDVPRPVAXHPGSPGQPPPALLPQQVSAPPSSSCPPGLEHSLCPSSPSPPLPPAXQEPXCLQPCSPACPPAXGRPQHLPSXVRRDESPXAGPRLLPEVHEDGSPNLAPIPVXVKREPEELDQLYLDDVNEIIRNDLSSXSXHS

SEQ ID NO: 17580 - protein, 71 aa, Homo sapiens
  MOD_RES (2)..(2): Selenocysteine
  MOD_RES (37)..(37): Selenocysteine
  MOD_RES (43)..(43): Selenocysteine
  MOD_RES (58)..(59): Selenocysteine
  MOD_RES (62)..(63): Selenocysteine
MXGLEDQEFDFEFLFEFNQRDEGAAAAAPARPCPPWXGSCRPXQARMSFGLRCSPSPXXEPXXRRRAAGGP

SEQ ID NO: 17581 - protein, 700 aa, Homo sapiens
  MOD_RES (2)..(2): Selenocysteine
  MOD_RES (47)..(47): Selenocysteine
  MOD_RES (51)..(51): Selenocysteine
  MOD_RES (61)..(61): Selenocysteine
  MOD_RES (63)..(63): Selenocysteine
  MOD_RES (94)..(94): Selenocysteine
  MOD_RES (110)..(110): Selenocysteine
  MOD_RES (141)..(141): Selenocysteine
  MOD_RES (143)..(143): Selenocysteine
  MOD_RES (189)..(189): Selenocysteine
  MOD_RES (201)..(202): Selenocysteine
  MOD_RES (216)..(216): Selenocysteine
  MOD_RES (227)..(227): Selenocysteine
  MOD_RES (234)..(234): Selenocysteine
  MOD_RES (271)..(271): Selenocysteine
  MOD_RES (283)..(283): Selenocysteine
  MOD_RES (291)..(292): Selenocysteine
  MOD_RES (295)..(295): Selenocysteine
  MOD_RES (307)..(308): Selenocysteine
  MOD_RES (325)..(326): Selenocysteine
  MOD_RES (392)..(392): Selenocysteine
  MOD_RES (398)..(398): Selenocysteine
  MOD_RES (431)..(431): Selenocysteine
  MOD_RES (467)..(467): Selenocysteine
  MOD_RES (485)..(485): Selenocysteine
  MOD_RES (488)..(488): Selenocysteine
  MOD_RES (491)..(492): Selenocysteine
  MOD_RES (501)..(501): Selenocysteine
  MOD_RES (538)..(538): Selenocysteine
  MOD_RES (545)..(545): Selenocysteine
  MOD_RES (562)..(562): Selenocysteine
  MOD_RES (590)..(590): Selenocysteine
  MOD_RES (633)..(633): Selenocysteine
  MOD_RES (656)..(656): Selenocysteine
  MOD_RES (679)..(679): Selenocysteine
  MOD_RES (696)..(696): Selenocysteine
  MOD_RES (698)..(698): Selenocysteine
MXGLEDQEFDFEFLFEFNQRDEGAAAAAPEHYGYASSNVSPALPLPXAHSXLPAPCHNLQXSXPGIIPPADHPSGYGAALDGGPAGYFLSSGHXRPDGAPALESPRIEIXSCLGLYHNNNQFFHDVEVEDVLPSSKRSPSXAXLSLPSLEAYRDPSCLSPASSLSSRSCNSEASSYESNYSYPYASPQXSPWQSPCVSPKXXDPEEGFPRGLGACXLLGSPRHSPSXSPRASVXEESWLGARSSRPASPCNKRKYSLNGRQPPYSPHHSPXPSPHGSPRVSVXDDSWLGNXXQYXSSAIVAAINALXXDSSLDLGDGVPVKSRKXXLEQPPSVALKVEPVGEDLGSPPPPADFAPEDYSSFQHIRKGGFCDQYLAVPQHPYQWAKPKPLSPXSYMSPXLPALDWQLPSHSGPYELRIEVQPKSHHRAHYEXEGSRGAVKASAGGHPIVQLHGYLENEPLMLQLFIGXADDRLLRPHAFYQVHRIXGKXVSXXSHEAILSNXKVLEIPLLPENSMRAVIDCAGILKLRNSDIELRKGEXDIGRKNXRVRLVFRVHVPQPSGRXLSLQVASNPIECSQRSAQELPLVEKQSXDSYPVVGGKKMVLSGHNFLQDSKVIFVEKAPDGHHVWEMEAKXDRDLCKPNSLVVEIPPFRNQRIXSPVHVSFYVCNGKRKRSQYQRFXYLPANVNEIIRNDLSSXSXHS

SEQ ID NO: 17582 - protein, 703 aa, Homo sapiens
  MOD_RES (2)..(2): Selenocysteine
  MOD_RES (47)..(47): Selenocysteine
  MOD_RES (51)..(51): Selenocysteine
  MOD_RES (61)..(61): Selenocysteine
  MOD_RES (63)..(63): Selenocysteine
  MOD_RES (94)..(94): Selenocysteine
  MOD_RES (110)..(110): Selenocysteine
  MOD_RES (141)..(141): Selenocysteine
  MOD_RES (143)..(143): Selenocysteine
  MOD_RES (189)..(189): Selenocysteine
  MOD_RES (201)..(202): Selenocysteine
  MOD_RES (216)..(216): Selenocysteine
  MOD_RES (227)..(227): Selenocysteine
  MOD_RES (234)..(234): Selenocysteine
  MOD_RES (271)..(271): Selenocysteine
  MOD_RES (283)..(283): Selenocysteine
  MOD_RES (291)..(292): Selenocysteine
  MOD_RES (295)..(295): Selenocysteine
  MOD_RES (307)..(308): Selenocysteine
  MOD_RES (325)..(326): Selenocysteine
  MOD_RES (392)..(392): Selenocysteine
  MOD_RES (398)..(398): Selenocysteine
  MOD_RES (431)..(431): Selenocysteine
  MOD_RES (467)..(467): Selenocysteine
  MOD_RES (485)..(485): Selenocysteine
  MOD_RES (488)..(488): Selenocysteine
  MOD_RES (491)..(492): Selenocysteine
  MOD_RES (501)..(501): Selenocysteine
  MOD_RES (538)..(538): Selenocysteine
  MOD_RES (545)..(545): Selenocysteine
  MOD_RES (562)..(562): Selenocysteine
  MOD_RES (590)..(590): Selenocysteine
  MOD_RES (633)..(633): Selenocysteine
  MOD_RES (656)..(656): Selenocysteine
  MOD_RES (679)..(679): Selenocysteine
  MOD_RES (691)..(691): Selenocysteine
MXGLEDQEFDFEFLFEFNQRDEGAAAAAPEHYGYASSNVSPALPLPXAHSXLPAPCHNLQXSXPGIIPPADHPSGYGAALDGGPAGYFLSSGHXRPDGAPALESPRIEIXSCLGLYHNNNQFFHDVEVEDVLPSSKRSPSXAXLSLPSLEAYRDPSCLSPASSLSSRSCNSEASSYESNYSYPYASPQXSPWQSPCVSPKXXDPEEGFPRGLGACXLLGSPRHSPSXSPRASVXEESWLGARSSRPASPCNKRKYSLNGRQPPYSPHHSPXPSPHGSPRVSVXDDSWLGNXXQYXSSAIVAAINALXXDSSLDLGDGVPVKSRKXXLEQPPSVALKVEPVGEDLGSPPPPADFAPEDYSSFQHIRKGGFCDQYLAVPQHPYQWAKPKPLSPXSYMSPXLPALDWQLPSHSGPYELRIEVQPKSHHRAHYEXEGSRGAVKASAGGHPIVQLHGYLENEPLMLQLFIGXADDRLLRPHAFYQVHRIXGKXVSXXSHEAILSNXKVLEIPLLPENSMRAVIDCAGILKLRNSDIELRKGEXDIGRKNXRVRLVFRVHVPQPSGRXLSLQVASNPIECSQRSAQELPLVEKQSXDSYPVVGGKKMVLSGHNFLQDSKVIFVEKAPDGHHVWEMEAKXDRDLCKPNSLVVEIPPFRNQRIXSPVHVSFYVCNGKRKRSQYQRFXYLPANGNAIFLXVSREHERVGCFF

SEQ ID NO: 17583 - protein, 812 aa, Homo sapiens
  MOD_RES (2)..(2): Selenocysteine
  MOD_RES (47)..(47): Selenocysteine
  MOD_RES (51)..(51): Selenocysteine
  MOD_RES (61)..(61): Selenocysteine
  MOD_RES (63)..(63): Selenocysteine
  MOD_RES (94)..(94): Selenocysteine
  MOD_RES (110)..(110): Selenocysteine
  MOD_RES (141)..(141): Selenocysteine
  MOD_RES (143)..(143): Selenocysteine
  MOD_RES (189)..(189): Selenocysteine
  MOD_RES (201)..(202): Selenocysteine
  MOD_RES (216)..(216): Selenocysteine
  MOD_RES (227)..(227): Selenocysteine
  MOD_RES (234)..(234): Selenocysteine
  MOD_RES (271)..(271): Selenocysteine
  MOD_RES (283)..(283): Selenocysteine
  MOD_RES (291)..(292): Selenocysteine
  MOD_RES (295)..(295): Selenocysteine
  MOD_RES (307)..(308): Selenocysteine
  MOD_RES (325)..(326): Selenocysteine
  MOD_RES (392)..(392): Selenocysteine
  MOD_RES (398)..(398): Selenocysteine
  MOD_RES (431)..(431): Selenocysteine
  MOD_RES (467)..(467): Selenocysteine
  MOD_RES (485)..(485): Selenocysteine
  MOD_RES (488)..(488): Selenocysteine
  MOD_RES (491)..(492): Selenocysteine
  MOD_RES (501)..(501): Selenocysteine
  MOD_RES (538)..(538): Selenocysteine
  MOD_RES (545)..(545): Selenocysteine
  MOD_RES (562)..(562): Selenocysteine
  MOD_RES (590)..(590): Selenocysteine
  MOD_RES (633)..(633): Selenocysteine
  MOD_RES (656)..(656): Selenocysteine
  MOD_RES (679)..(679): Selenocysteine
  MOD_RES (690)..(690): Selenocysteine
  MOD_RES (693)..(693): Selenocysteine
  MOD_RES (701)..(701): Selenocysteine
  MOD_RES (743)..(743): Selenocysteine
  MOD_RES (764)..(764): Selenocysteine
  MOD_RES (796)..(796): Selenocysteine
MXGLEDQEFDFEFLFEFNQRDEGAAAAAPEHYGYASSNVSPALPLPXAHSXLPAPCHNLQXSXPGIIPPADHPSGYGAALDGGPAGYFLSSGHXRPDGAPALESPRIEIXSCLGLYHNNNQFFHDVEVEDVLPSSKRSPSXAXLSLPSLEAYRDPSCLSPASSLSSRSCNSEASSYESNYSYPYASPQXSPWQSPCVSPKXXDPEEGFPRGLGACXLLGSPRHSPSXSPRASVXEESWLGARSSRPASPCNKRKYSLNGRQPPYSPHHSPXPSPHGSPRVSVXDDSWLGNXXQYXSSAIVAAINALXXDSSLDLGDGVPVKSRKXXLEQPPSVALKVEPVGEDLGSPPPPADFAPEDYSSFQHIRKGGFCDQYLAVPQHPYQWAKPKPLSPXSYMSPXLPALDWQLPSHSGPYELRIEVQPKSHHRAHYEXEGSRGAVKASAGGHPIVQLHGYLENEPLMLQLFIGXADDRLLRPHAFYQVHRIXGKXVSXXSHEAILSNXKVLEIPLLPENSMRAVIDCAGILKLRNSDIELRKGEXDIGRKNXRVRLVFRVHVPQPSGRXLSLQVASNPIECSQRSAQELPLVEKQSXDSYPVVGGKKMVLSGHNFLQDSKVIFVEKAPDGHHVWEMEAKXDRDLCKPNSLVVEIPPFRNQRIXSPVHVSFYVCNGKRKRSQYQRFXYLPANVPIIKXEPXDDYEPAPXCGPVSQGLSPLPRPYYSQQLAMPPDPSSCLVAGFPPCPQRSXLMPAAPGVSPKLHDLSPAAYXKGVASPGHCHLGLPQPAGEAPAVQDVPRPVAXHPGSPGQPPPALLPQQ

SEQ ID NO: 17584 - protein, 930 aa, Homo sapiens
  MOD_RES (2)..(2): Selenocysteine
  MOD_RES (47)..(47): Selenocysteine
  MOD_RES (51)..(51): Selenocysteine
  MOD_RES (61)..(61): Selenocysteine
  MOD_RES (63)..(63): Selenocysteine
  MOD_RES (94)..(94): Selenocysteine
  MOD_RES (110)..(110): Selenocysteine
  MOD_RES (141)..(141): Selenocysteine
  MOD_RES (143)..(143): Selenocysteine
  MOD_RES (189)..(189): Selenocysteine
  MOD_RES (201)..(202): Selenocysteine
  MOD_RES (216)..(216): Selenocysteine
  MOD_RES (227)..(227): Selenocysteine
  MOD_RES (234)..(234): Selenocysteine
  MOD_RES (271)..(271): Selenocysteine
  MOD_RES (283)..(283): Selenocysteine
  MOD_RES (291)..(292): Selenocysteine
  MOD_RES (295)..(295): Selenocysteine
  MOD_RES (307)..(308): Selenocysteine
  MOD_RES (325)..(326): Selenocysteine
  MOD_RES (392)..(392): Selenocysteine
  MOD_RES (398)..(398): Selenocysteine
  MOD_RES (431)..(431): Selenocysteine
  MOD_RES (467)..(467): Selenocysteine
  MOD_RES (485)..(485): Selenocysteine
  MOD_RES (488)..(488): Selenocysteine
  MOD_RES (491)..(492): Selenocysteine
  MOD_RES (501)..(501): Selenocysteine
  MOD_RES (538)..(538): Selenocysteine
  MOD_RES (545)..(545): Selenocysteine
  MOD_RES (562)..(562): Selenocysteine
  MOD_RES (590)..(590): Selenocysteine
  MOD_RES (633)..(633): Selenocysteine
  MOD_RES (656)..(656): Selenocysteine
  MOD_RES (679)..(679): Selenocysteine
  MOD_RES (690)..(690): Selenocysteine
  MOD_RES (693)..(693): Selenocysteine
  MOD_RES (701)..(701): Selenocysteine
  MOD_RES (743)..(743): Selenocysteine
  MOD_RES (764)..(764): Selenocysteine
  MOD_RES (796)..(796): Selenocysteine
  MOD_RES (842)..(842): Selenocysteine
  MOD_RES (846)..(846): Selenocysteine
  MOD_RES (859)..(859): Selenocysteine
  MOD_RES (868)..(868): Selenocysteine
  MOD_RES (876)..(876): Selenocysteine
  MOD_RES (899)..(899): Selenocysteine
  MOD_RES (926)..(926): Selenocysteine
  MOD_RES (928)..(928): Selenocysteine
MXGLEDQEFDFEFLFEFNQRDEGAAAAAPEHYGYASSNVSPALPLPXAHSXLPAPCHNLQXSXPGIIPPADHPSGYGAALDGGPAGYFLSSGHXRPDGAPALESPRIEIXSCLGLYHNNNQFFHDVEVEDVLPSSKRSPSXAXLSLPSLEAYRDPSCLSPASSLSSRSCNSEASSYESNYSYPYASPQXSPWQSPCVSPKXXDPEEGFPRGLGACXLLGSPRHSPSXSPRASVXEESWLGARSSRPASPCNKRKYSLNGRQPPYSPHHSPXPSPHGSPRVSVXDDSWLGNXXQYXSSAIVAAINALXXDSSLDLGDGVPVKSRKXXLEQPPSVALKVEPVGEDLGSPPPPADFAPEDYSSFQHIRKGGFCDQYLAVPQHPYQWAKPKPLSPXSYMSPXLPALDWQLPSHSGPYELRIEVQPKSHHRAHYEXEGSRGAVKASAGGHPIVQLHGYLENEPLMLQLFIGXADDRLLRPHAFYQVHRIXGKXVSXXSHEAILSNXKVLEIPLLPENSMRAVIDCAGILKLRNSDIELRKGEXDIGRKNXRVRLVFRVHVPQPSGRXLSLQVASNPIECSQRSAQELPLVEKQSXDSYPVVGGKKMVLSGHNFLQDSKVIFVEKAPDGHHVWEMEAKXDRDLCKPNSLVVEIPPFRNQRIXSPVHVSFYVCNGKRKRSQYQRFXYLPANVPIIKXEPXDDYEPAPXCGPVSQGLSPLPRPYYSQQLAMPPDPSSCLVAGFPPCPQRSXLMPAAPGVSPKLHDLSPAAYXKGVASPGHCHLGLPQPAGEAPAVQDVPRPVAXHPGSPGQPPPALLPQQVSAPPSSSCPPGLEHSLCPSSPSPPLPPAXQEPXCLQPCSPACPPAXGRPQHLPSXVRRDESPXAGPRLLPEVHEDGSPNLAPIPVXVKREPEELDQLYLDDVNEIIRNDLSSXSXHS

SEQ ID NO: 17585 - protein, 921 aa, Homo sapiens
  MOD_RES (116)..(116): Selenocysteine
  MOD_RES (152)..(152): Selenocysteine
  MOD_RES (182)..(182): Selenocysteine
  MOD_RES (187)..(187): Selenocysteine
  MOD_RES (216)..(216): Selenocysteine
  MOD_RES (224)..(224): Selenocysteine
  MOD_RES (312)..(312): Selenocysteine
  MOD_RES (325)..(325): Selenocysteine
  MOD_RES (374)..(374): Selenocysteine
  MOD_RES (391)..(391): Selenocysteine
  MOD_RES (426)..(426): Selenocysteine
  MOD_RES (437)..(437): Selenocysteine
  MOD_RES (462)..(462): Selenocysteine
  MOD_RES (480)..(480): Selenocysteine
  MOD_RES (483)..(483): Selenocysteine
  MOD_RES (485)..(487): Selenocysteine
  MOD_RES (496)..(496): Selenocysteine
  MOD_RES (512)..(512): Selenocysteine
  MOD_RES (533)..(533): Selenocysteine
  MOD_RES (540)..(540): Selenocysteine
  MOD_RES (562)..(562): Selenocysteine
  MOD_RES (585)..(585): Selenocysteine
  MOD_RES (599)..(599): Selenocysteine
  MOD_RES (604)..(604): Selenocysteine
  MOD_RES (612)..(612): Selenocysteine
  MOD_RES (615)..(616): Selenocysteine
  MOD_RES (627)..(627): Selenocysteine
  MOD_RES (652)..(652): Selenocysteine
  MOD_RES (674)..(674): Selenocysteine
  MOD_RES (683)..(683): Selenocysteine
  MOD_RES (686)..(686): Selenocysteine
  MOD_RES (692)..(692): Selenocysteine
  MOD_RES (698)..(698): Selenocysteine
  MOD_RES (724)..(724): Selenocysteine
  MOD_RES (733)..(733): Selenocysteine
  MOD_RES (803)..(803): Selenocysteine
  MOD_RES (816)..(816): Selenocysteine
  MOD_RES (841)..(842): Selenocysteine
  MOD_RES (862)..(862): Selenocysteine
  MOD_RES (870)..(870): Selenocysteine
  MOD_RES (893)..(893): Selenocysteine
  MOD_RES (903)..(903): Selenocysteine
  MOD_RES (912)..(912): Selenocysteine
MNAPERQPQPDGGDAPGHEPGGSPQDELDFSILFDYEYLNPNEEEPNAHKVASPPSGPAYPDDVLDYGLKPYSPLASLSGEPPGRFGEPDRVGPQKFLSAAKPAGASGLSPRIEIXPSHELIQAVGPLRMRDAGLLVEQPPLAGVAASPRFXLPVPGFEGYREPLCLSPASSGSSASFISDXFSPYXSPCVSPNNGGPDDLCPQFQNIPAHYSPRXSPIMSPRXSLAEDSCLGRHSPVPRPASRSSSPGAKRRHSCAEALVALPPGASPQRSRSPSPQPSSHVAPQDHGSPAGYPPVAGSAVIMDALNSLAXDSPCGIPPKMWKXSPDPSPVSAAPSKAGLPRHIYPAVEFLGPCEQGERRNSAPESILLVPPXWPKPLVPAIPICSIPVXASLPPLEWPLSSQSGSYELRIEVQPKPHHRAHYEXEGSRGAVKAPXGGHPVVQLHGYMENKPLGLQIFIGXADERILKPHAFYQVHRIXGKXVXXXSYEKIVGNXKVLEIPLEPKNNMRAXIDCAGILKLRNADIELRKGEXDIGRKNXRVRLVFRVHIPESSGRIVSLQXASNPIECSQRSAHELPMVERQDXDSCLVYGGQQMILXGQNFXSESKVVFXEKXXDGQQIWEMEAXVDKDKSQPNMLFVEIPEYRNKHIRXPVKVNFYVINGKRKRSQPQHFXYHPVPAIKXEPXDEYDPXLICSPXHGGLGSQPYYPQHPMVAESPSCLVAXMAPCQQFRXGLSSPDARYQQQNPAAVLYQRSKSLSPSLLGYQQPALMAAPLSLADAHRSVLVHAGSQGQSSALLHPSPXNQQASPVIHYSPXNQQLRCGSHQEFQHIMYCENFAPGXXRPGPPPVSQGQRLSPGSYPXVIQQQNAXSQRAAKNGPPVSDQKEVLPAGVXIKQEQNLDQXYLDDELIDXHLSWIQNIL

SEQ ID NO: 17586 - protein, 925 aa, Homo sapiens
  MOD_RES (116)..(116): Selenocysteine
  MOD_RES (152)..(152): Selenocysteine
  MOD_RES (182)..(182): Selenocysteine
  MOD_RES (187)..(187): Selenocysteine
  MOD_RES (216)..(216): Selenocysteine
  MOD_RES (224)..(224): Selenocysteine
  MOD_RES (312)..(312): Selenocysteine
  MOD_RES (325)..(325): Selenocysteine
  MOD_RES (374)..(374): Selenocysteine
  MOD_RES (391)..(391): Selenocysteine
  MOD_RES (426)..(426): Selenocysteine
  MOD_RES (437)..(437): Selenocysteine
  MOD_RES (462)..(462): Selenocysteine
  MOD_RES (480)..(480): Selenocysteine
  MOD_RES (483)..(483): Selenocysteine
  MOD_RES (485)..(487): Selenocysteine
  MOD_RES (496)..(496): Selenocysteine
  MOD_RES (512)..(512): Selenocysteine
  MOD_RES (533)..(533): Selenocysteine
  MOD_RES (540)..(540): Selenocysteine
  MOD_RES (562)..(562): Selenocysteine
  MOD_RES (585)..(585): Selenocysteine
  MOD_RES (599)..(599): Selenocysteine
  MOD_RES (604)..(604): Selenocysteine
  MOD_RES (612)..(612): Selenocysteine
  MOD_RES (615)..(616): Selenocysteine
  MOD_RES (627)..(627): Selenocysteine
  MOD_RES (652)..(652): Selenocysteine
  MOD_RES (674)..(674): Selenocysteine
  MOD_RES (683)..(683): Selenocysteine
  MOD_RES (686)..(686): Selenocysteine
  MOD_RES (692)..(692): Selenocysteine
  MOD_RES (698)..(698): Selenocysteine
  MOD_RES (724)..(724): Selenocysteine
  MOD_RES (733)..(733): Selenocysteine
  MOD_RES (803)..(803): Selenocysteine
  MOD_RES (816)..(816): Selenocysteine
  MOD_RES (841)..(842): Selenocysteine
  MOD_RES (862)..(862): Selenocysteine
  MOD_RES (870)..(870): Selenocysteine
  MOD_RES (893)..(893): Selenocysteine
  MOD_RES (903)..(903): Selenocysteine
  MOD_RES (925)..(925): Selenocysteine
MNAPERQPQPDGGDAPGHEPGGSPQDELDFSILFDYEYLNPNEEEPNAHKVASPPSGPAYPDDVLDYGLKPYSPLASLSGEPPGRFGEPDRVGPQKFLSAAKPAGASGLSPRIEIXPSHELIQAVGPLRMRDAGLLVEQPPLAGVAASPRFXLPVPGFEGYREPLCLSPASSGSSASFISDXFSPYXSPCVSPNNGGPDDLCPQFQNIPAHYSPRXSPIMSPRXSLAEDSCLGRHSPVPRPASRSSSPGAKRRHSCAEALVALPPGASPQRSRSPSPQPSSHVAPQDHGSPAGYPPVAGSAVIMDALNSLAXDSPCGIPPKMWKXSPDPSPVSAAPSKAGLPRHIYPAVEFLGPCEQGERRNSAPESILLVPPXWPKPLVPAIPICSIPVXASLPPLEWPLSSQSGSYELRIEVQPKPHHRAHYEXEGSRGAVKAPXGGHPVVQLHGYMENKPLGLQIFIGXADERILKPHAFYQVHRIXGKXVXXXSYEKIVGNXKVLEIPLEPKNNMRAXIDCAGILKLRNADIELRKGEXDIGRKNXRVRLVFRVHIPESSGRIVSLQXASNPIECSQRSAHELPMVERQDXDSCLVYGGQQMILXGQNFXSESKVVFXEKXXDGQQIWEMEAXVDKDKSQPNMLFVEIPEYRNKHIRXPVKVNFYVINGKRKRSQPQHFXYHPVPAIKXEPXDEYDPXLICSPXHGGLGSQPYYPQHPMVAESPSCLVAXMAPCQQFRXGLSSPDARYQQQNPAAVLYQRSKSLSPSLLGYQQPALMAAPLSLADAHRSVLVHAGSQGQSSALLHPSPXNQQASPVIHYSPXNQQLRCGSHQEFQHIMYCENFAPGXXRPGPPPVSQGQRLSPGSYPXVIQQQNAXSQRAAKNGPPVSDQKEVLPAGVXIKQEQNLDQXYLDDVNEIIRKEFSGPPARNQX

SEQ ID NO: 17587 - protein, 901 aa, Homo sapiens
  MOD_RES (96)..(96): Selenocysteine
  MOD_RES (132)..(132): Selenocysteine
  MOD_RES (162)..(162): Selenocysteine
  MOD_RES (167)..(167): Selenocysteine
  MOD_RES (196)..(196): Selenocysteine
  MOD_RES (204)..(204): Selenocysteine
  MOD_RES (292)..(292): Selenocysteine
  MOD_RES (305)..(305): Selenocysteine
  MOD_RES (354)..(354): Selenocysteine
  MOD_RES (371)..(371): Selenocysteine
  MOD_RES (406)..(406): Selenocysteine
  MOD_RES (417)..(417): Selenocysteine
  MOD_RES (442)..(442): Selenocysteine
  MOD_RES (460)..(460): Selenocysteine
  MOD_RES (463)..(463): Selenocysteine
  MOD_RES (465)..(467): Selenocysteine
  MOD_RES (476)..(476): Selenocysteine
  MOD_RES (492)..(492): Selenocysteine
  MOD_RES (513)..(513): Selenocysteine
  MOD_RES (520)..(520): Selenocysteine
  MOD_RES (542)..(542): Selenocysteine
  MOD_RES (565)..(565): Selenocysteine
  MOD_RES (579)..(579): Selenocysteine
  MOD_RES (584)..(584): Selenocysteine
  MOD_RES (592)..(592): Selenocysteine
  MOD_RES (595)..(596): Selenocysteine
  MOD_RES (607)..(607): Selenocysteine
  MOD_RES (632)..(632): Selenocysteine
  MOD_RES (654)..(654): Selenocysteine
  MOD_RES (663)..(663): Selenocysteine
  MOD_RES (666)..(666): Selenocysteine
  MOD_RES (672)..(672): Selenocysteine
  MOD_RES (678)..(678): Selenocysteine
  MOD_RES (704)..(704): Selenocysteine
  MOD_RES (713)..(713): Selenocysteine
  MOD_RES (783)..(783): Selenocysteine
  MOD_RES (796)..(796): Selenocysteine
  MOD_RES (821)..(822): Selenocysteine
  MOD_RES (842)..(842): Selenocysteine
  MOD_RES (850)..(850): Selenocysteine
  MOD_RES (873)..(873): Selenocysteine
  MOD_RES (883)..(883): Selenocysteine
  MOD_RES (892)..(892): Selenocysteine
MQREAAFRLGHCHPLRIMGSVDQEEPNAHKVASPPSGPAYPDDVLDYGLKPYSPLASLSGEPPGRFGEPDRVGPQKFLSAAKPAGASGLSPRIEIXPSHELIQAVGPLRMRDAGLLVEQPPLAGVAASPRFXLPVPGFEGYREPLCLSPASSGSSASFISDXFSPYXSPCVSPNNGGPDDLCPQFQNIPAHYSPRXSPIMSPRXSLAEDSCLGRHSPVPRPASRSSSPGAKRRHSCAEALVALPPGASPQRSRSPSPQPSSHVAPQDHGSPAGYPPVAGSAVIMDALNSLAXDSPCGIPPKMWKXSPDPSPVSAAPSKAGLPRHIYPAVEFLGPCEQGERRNSAPESILLVPPXWPKPLVPAIPICSIPVXASLPPLEWPLSSQSGSYELRIEVQPKPHHRAHYEXEGSRGAVKAPXGGHPVVQLHGYMENKPLGLQIFIGXADERILKPHAFYQVHRIXGKXVXXXSYEKIVGNXKVLEIPLEPKNNMRAXIDCAGILKLRNADIELRKGEXDIGRKNXRVRLVFRVHIPESSGRIVSLQXASNPIECSQRSAHELPMVERQDXDSCLVYGGQQMILXGQNFXSESKVVFXEKXXDGQQIWEMEAXVDKDKSQPNMLFVEIPEYRNKHIRXPVKVNFYVINGKRKRSQPQHFXYHPVPAIKXEPXDEYDPXLICSPXHGGLGSQPYYPQHPMVAESPSCLVAXMAPCQQFRXGLSSPDARYQQQNPAAVLYQRSKSLSPSLLGYQQPALMAAPLSLADAHRSVLVHAGSQGQSSALLHPSPXNQQASPVIHYSPXNQQLRCGSHQEFQHIMYCENFAPGXXRPGPPPVSQGQRLSPGSYPXVIQQQNAXSQRAAKNGPPVSDQKEVLPAGVXIKQEQNLDQXYLDDELIDXHLSWIQNIL

SEQ ID NO: 17588 - protein, 905 aa, Homo sapiens
  MOD_RES (96)..(96): Selenocysteine
  MOD_RES (132)..(132): Selenocysteine
  MOD_RES (162)..(162): Selenocysteine
  MOD_RES (167)..(167): Selenocysteine
  MOD_RES (196)..(196): Selenocysteine
  MOD_RES (204)..(204): Selenocysteine
  MOD_RES (292)..(292): Selenocysteine
  MOD_RES (305)..(305): Selenocysteine
  MOD_RES (354)..(354): Selenocysteine
  MOD_RES (371)..(371): Selenocysteine
  MOD_RES (406)..(406): Selenocysteine
  MOD_RES (417)..(417): Selenocysteine
  MOD_RES (442)..(442): Selenocysteine
  MOD_RES (460)..(460): Selenocysteine
  MOD_RES (463)..(463): Selenocysteine
  MOD_RES (465)..(467): Selenocysteine
  MOD_RES (476)..(476): Selenocysteine
  MOD_RES (492)..(492): Selenocysteine
  MOD_RES (513)..(513): Selenocysteine
  MOD_RES (520)..(520): Selenocysteine
  MOD_RES (542)..(542): Selenocysteine
  MOD_RES (565)..(565): Selenocysteine
  MOD_RES (579)..(579): Selenocysteine
  MOD_RES (584)..(584): Selenocysteine
  MOD_RES (592)..(592): Selenocysteine
  MOD_RES (595)..(596): Selenocysteine
  MOD_RES (607)..(607): Selenocysteine
  MOD_RES (632)..(632): Selenocysteine
  MOD_RES (654)..(654): Selenocysteine
  MOD_RES (663)..(663): Selenocysteine
  MOD_RES (666)..(666): Selenocysteine
  MOD_RES (672)..(672): Selenocysteine
  MOD_RES (678)..(678): Selenocysteine
  MOD_RES (704)..(704): Selenocysteine
  MOD_RES (713)..(713): Selenocysteine
  MOD_RES (783)..(783): Selenocysteine
  MOD_RES (796)..(796): Selenocysteine
  MOD_RES (821)..(822): Selenocysteine
  MOD_RES (842)..(842): Selenocysteine
  MOD_RES (850)..(850): Selenocysteine
  MOD_RES (873)..(873): Selenocysteine
  MOD_RES (883)..(883): Selenocysteine
  MOD_RES (905)..(905): Selenocysteine
MQREAAFRLGHCHPLRIMGSVDQEEPNAHKVASPPSGPAYPDDVLDYGLKPYSPLASLSGEPPGRFGEPDRVGPQKFLSAAKPAGASGLSPRIEIXPSHELIQAVGPLRMRDAGLLVEQPPLAGVAASPRFXLPVPGFEGYREPLCLSPASSGSSASFISDXFSPYXSPCVSPNNGGPDDLCPQFQNIPAHYSPRXSPIMSPRXSLAEDSCLGRHSPVPRPASRSSSPGAKRRHSCAEALVALPPGASPQRSRSPSPQPSSHVAPQDHGSPAGYPPVAGSAVIMDALNSLAXDSPCGIPPKMWKXSPDPSPVSAAPSKAGLPRHIYPAVEFLGPCEQGERRNSAPESILLVPPXWPKPLVPAIPICSIPVXASLPPLEWPLSSQSGSYELRIEVQPKPHHRAHYEXEGSRGAVKAPXGGHPVVQLHGYMENKPLGLQIFIGXADERILKPHAFYQVHRIXGKXVXXXSYEKIVGNXKVLEIPLEPKNNMRAXIDCAGILKLRNADIELRKGEXDIGRKNXRVRLVFRVHIPESSGRIVSLQXASNPIECSQRSAHELPMVERQDXDSCLVYGGQQMILXGQNFXSESKVVFXEKXXDGQQIWEMEAXVDKDKSQPNMLFVEIPEYRNKHIRXPVKVNFYVINGKRKRSQPQHFXYHPVPAIKXEPXDEYDPXLICSPXHGGLGSQPYYPQHPMVAESPSCLVAXMAPCQQFRXGLSSPDARYQQQNPAAVLYQRSKSLSPSLLGYQQPALMAAPLSLADAHRSVLVHAGSQGQSSALLHPSPXNQQASPVIHYSPXNQQLRCGSHQEFQHIMYCENFAPGXXRPGPPPVSQGQRLSPGSYPXVIQQQNAXSQRAAKNGPPVSDQKEVLPAGVXIKQEQNLDQXYLDDVNEIIRKEFSGPPARNQX

SEQ ID NO: 17589 - protein, 702 aa, Homo sapiens
  MOD_RES (5)..(5): Selenocysteine
  MOD_RES (93)..(93): Selenocysteine
  MOD_RES (106)..(106): Selenocysteine
  MOD_RES (155)..(155): Selenocysteine
  MOD_RES (172)..(172): Selenocysteine
  MOD_RES (207)..(207): Selenocysteine
  MOD_RES (218)..(218): Selenocysteine
  MOD_RES (243)..(243): Selenocysteine
  MOD_RES (261)..(261): Selenocysteine
  MOD_RES (264)..(264): Selenocysteine
  MOD_RES (266)..(268): Selenocysteine
  MOD_RES (277)..(277): Selenocysteine
  MOD_RES (293)..(293): Selenocysteine
  MOD_RES (314)..(314): Selenocysteine
  MOD_RES (321)..(321): Selenocysteine
  MOD_RES (343)..(343): Selenocysteine
  MOD_RES (366)..(366): Selenocysteine
  MOD_RES (380)..(380): Selenocysteine
  MOD_RES (385)..(385): Selenocysteine
  MOD_RES (393)..(393): Selenocysteine
  MOD_RES (396)..(397): Selenocysteine
  MOD_RES (408)..(408): Selenocysteine
  MOD_RES (433)..(433): Selenocysteine
  MOD_RES (455)..(455): Selenocysteine
  MOD_RES (464)..(464): Selenocysteine
  MOD_RES (467)..(467): Selenocysteine
  MOD_RES (473)..(473): Selenocysteine
  MOD_RES (479)..(479): Selenocysteine
  MOD_RES (505)..(505): Selenocysteine
  MOD_RES (514)..(514): Selenocysteine
  MOD_RES (584)..(584): Selenocysteine
  MOD_RES (597)..(597): Selenocysteine
  MOD_RES (622)..(623): Selenocysteine
  MOD_RES (643)..(643): Selenocysteine
  MOD_RES (651)..(651): Selenocysteine
  MOD_RES (674)..(674): Selenocysteine
  MOD_RES (684)..(684): Selenocysteine
  MOD_RES (693)..(693): Selenocysteine
MSPRXSLAEDSCLGRHSPVPRPASRSSSPGAKRRHSCAEALVALPPGASPQRSRSPSPQPSSHVAPQDHGSPAGYPPVAGSAVIMDALNSLAXDSPCGIPPKMWKXSPDPSPVSAAPSKAGLPRHIYPAVEFLGPCEQGERRNSAPESILLVPPXWPKPLVPAIPICSIPVXASLPPLEWPLSSQSGSYELRIEVQPKPHHRAHYEXEGSRGAVKAPXGGHPVVQLHGYMENKPLGLQIFIGXADERILKPHAFYQVHRIXGKXVXXXSYEKIVGNXKVLEIPLEPKNNMRAXIDCAGILKLRNADIELRKGEXDIGRKNXRVRLVFRVHIPESSGRIVSLQXASNPIECSQRSAHELPMVERQDXDSCLVYGGQQMILXGQNFXSESKVVFXEKXXDGQQIWEMEAXVDKDKSQPNMLFVEIPEYRNKHIRXPVKVNFYVINGKRKRSQPQHFXYHPVPAIKXEPXDEYDPXLICSPXHGGLGSQPYYPQHPMVAESPSCLVAXMAPCQQFRXGLSSPDARYQQQNPAAVLYQRSKSLSPSLLGYQQPALMAAPLSLADAHRSVLVHAGSQGQSSALLHPSPXNQQASPVIHYSPXNQQLRCGSHQEFQHIMYCENFAPGXXRPGPPPVSQGQRLSPGSYPXVIQQQNAXSQRAAKNGPPVSDQKEVLPAGVXIKQEQNLDQXYLDDELIDXHLSWIQNIL

SEQ ID NO: 17590 - protein, 167 aa, Homo sapiens
  MOD_RES (18)..(18): Selenocysteine
  MOD_RES (27)..(27): Selenocysteine
  MOD_RES (32)..(32): Selenocysteine
  MOD_RES (59)..(59): Selenocysteine
  MOD_RES (67)..(67): Selenocysteine
  MOD_RES (78)..(78): Selenocysteine
  MOD_RES (119)..(120): Selenocysteine
  MOD_RES (122)..(122): Selenocysteine
  MOD_RES (130)..(131): Selenocysteine
  MOD_RES (137)..(137): Selenocysteine
  MOD_RES (145)..(145): Selenocysteine
  MOD_RES (149)..(149): Selenocysteine
LKKDSCGDQFLSVPSPFXWSKPKPGHXPIFRXSSLPPLDWPLPAHFGQCELKIEVQPKXHHRAHYEXEGSRGAVKASXGGHPVVKESKIRSSFDVVFDAQLLLSMGKKKVYGKHSRYLXXLXWKLLSIIXXYNFLAXSSHMALLXCRSXGKSSPWLGSLSSSKLCIL

SEQ ID NO: 17591 - protein, 41 aa, Homo sapiens
  MOD_RES (2)..(3): Selenocysteine
MXXANCGAHDELDFKLVFGEDGAPAPPPPGSRPAAHLHYLH

SEQ ID NO: 17592 - protein, 38 aa, Homo sapiens
  MOD_RES (2)..(3): Selenocysteine
MXXANCGAHDELDFKLVFGEDGAPAPPPPGSRPAAPGL

SEQ ID NO: 17593 - protein, 1047 aa, Homo sapiens
  MOD_RES (2)..(3): Selenocysteine
  MOD_RES (55)..(55): Selenocysteine
  MOD_RES (57)..(58): Selenocysteine
  MOD_RES (89)..(89): Selenocysteine
  MOD_RES (114)..(114): Selenocysteine
  MOD_RES (204)..(204): Selenocysteine
  MOD_RES (210)..(210): Selenocysteine
  MOD_RES (224)..(224): Selenocysteine
  MOD_RES (250)..(250): Selenocysteine
  MOD_RES (268)..(268): Selenocysteine
  MOD_RES (306)..(306): Selenocysteine
  MOD_RES (309)..(309): Selenocysteine
  MOD_RES (334)..(334): Selenocysteine
  MOD_RES (340)..(340): Selenocysteine
  MOD_RES (343)..(343): Selenocysteine
  MOD_RES (371)..(371): Selenocysteine
  MOD_RES (400)..(400): Selenocysteine
  MOD_RES (409)..(409): Selenocysteine
  MOD_RES (414)..(414): Selenocysteine
  MOD_RES (441)..(441): Selenocysteine
  MOD_RES (449)..(449): Selenocysteine
  MOD_RES (460)..(460): Selenocysteine
  MOD_RES (484)..(484): Selenocysteine
  MOD_RES (502)..(502): Selenocysteine
  MOD_RES (505)..(505): Selenocysteine
  MOD_RES (508)..(508): Selenocysteine
  MOD_RES (518)..(518): Selenocysteine
  MOD_RES (555)..(555): Selenocysteine
  MOD_RES (562)..(562): Selenocysteine
  MOD_RES (621)..(621): Selenocysteine
  MOD_RES (673)..(673): Selenocysteine
  MOD_RES (696)..(696): Selenocysteine
  MOD_RES (698)..(698): Selenocysteine
  MOD_RES (726)..(726): Selenocysteine
  MOD_RES (754)..(754): Selenocysteine
  MOD_RES (760)..(760): Selenocysteine
  MOD_RES (793)..(793): Selenocysteine
  MOD_RES (795)..(795): Selenocysteine
  MOD_RES (807)..(807): Selenocysteine
  MOD_RES (815)..(815): Selenocysteine
  MOD_RES (837)..(837): Selenocysteine
  MOD_RES (862)..(862): Selenocysteine
  MOD_RES (869)..(869): Selenocysteine
  MOD_RES (875)..(875): Selenocysteine
  MOD_RES (889)..(889): Selenocysteine
  MOD_RES (903)..(903): Selenocysteine
  MOD_RES (914)..(914): Selenocysteine
  MOD_RES (924)..(925): Selenocysteine
  MOD_RES (959)..(959): Selenocysteine
  MOD_RES (967)..(967): Selenocysteine
  MOD_RES (976)..(976): Selenocysteine
  MOD_RES (981)..(981): Selenocysteine
  MOD_RES (1009)..(1009): Selenocysteine
  MOD_RES (1025)..(1025): Selenocysteine
  MOD_RES (1032)..(1032): Selenocysteine
MXXANCGAHDELDFKLVFGEDGAPAPPPPGSRPADLEPDDCASIYIFNVDPPPSXLXXPLCLPHHGLPSHSSVLSPSFQLQSHKNYEGXCEIPESKYSPLGGPKPFECPSIQIXSISPNCHQELDAHEDDLQINDPEREFLERPSRDHLYLPLEPSYRESSLSPSPASSISSRSWFSDASSCESLSHIYDDVDSELNEAAARFXLGSPLXSPGGSPGGCPGEEXWHQQYGLGHSLSPRQSPCHSPRSSVXDENWLSPRPASGPSSRPXSPCGKRRHSSAEVCYAGSLSPHHSPVPSPGHSPRGSVXEDXWLNASVHGGSGLGPAVFPFQYCVEXDIPLKXRKXSEDQAAILPGKLELCSDDQGSLSPAREXSIDDGLGSQYPLKKDSCGDQFLSVPSPFXWSKPKPGHXPIFRXSSLPPLDWPLPAHFGQCELKIEVQPKXHHRAHYEXEGSRGAVKASXGGHPVVKLLGYNEKPINLQMFIGXADDRYLRPHAFYQVHRIXGKXVAXASQEIIIASXKVLEIPLLPENNMSASIDCAGILKLRNSDIELRKGEXDIGRKNXRVRLVFRVHIPQPSGKVLSLQIASIPVECSQRSAQELPHIEKYSINSCSVNGGHEMVVXGSNFLPESKIIFLEKGQDGRPQWEVEGKIIREKCQGAHIVLEVPPYHNPAVXAAVQVHFYLCNGKRKKSQSQRFXYXPVLMKQEHREEIDLSSVPSLPVPHPAQXQRPSSDSGCSHDSVLSGQRSLICSIPQXYASMVXSSHLPQLQCRDESVSKEQHMIPSPIVHQPFQVXPXPPVGSSYQPMQXNVVYNGPXCLPINAASSQEFDSVLFQQDAXLSGLVNLGCQPLSSIPFHSSNSGSXGHLLAHXPHSVHXLPHLQSMGYHCSNXGQRSLSSPVADQIXGQPSSQLQPIXYGPSHSGSAXXASPAASHPLASSPLSGPPSPQLQPMPYQSPSSGXASSPSPAXRMHSGQHSXQAQSXGQGGLSAPSSLICHSLCDPASFPPDGAXVSIKPEPEDREPNFAXIGLQDIXLDDGFVKAEKPLSHD

SEQ ID NO: 17594 - protein, 1065 aa, Homo sapiens
  MOD_RES (2)..(3): Selenocysteine
  MOD_RES (55)..(55): Selenocysteine
  MOD_RES (57)..(58): Selenocysteine
  MOD_RES (89)..(89): Selenocysteine
  MOD_RES (114)..(114): Selenocysteine
  MOD_RES (204)..(204): Selenocysteine
  MOD_RES (210)..(210): Selenocysteine
  MOD_RES (224)..(224): Selenocysteine
  MOD_RES (250)..(250): Selenocysteine
  MOD_RES (268)..(268): Selenocysteine
  MOD_RES (306)..(306): Selenocysteine
  MOD_RES (309)..(309): Selenocysteine
  MOD_RES (334)..(334): Selenocysteine
  MOD_RES (340)..(340): Selenocysteine
  MOD_RES (343)..(343): Selenocysteine
  MOD_RES (371)..(371): Selenocysteine
  MOD_RES (400)..(400): Selenocysteine
  MOD_RES (409)..(409): Selenocysteine
  MOD_RES (414)..(414): Selenocysteine
  MOD_RES (441)..(441): Selenocysteine
  MOD_RES (449)..(449): Selenocysteine
  MOD_RES (460)..(460): Selenocysteine
  MOD_RES (484)..(484): Selenocysteine
  MOD_RES (502)..(502): Selenocysteine
  MOD_RES (505)..(505): Selenocysteine
  MOD_RES (508)..(508): Selenocysteine
  MOD_RES (518)..(518): Selenocysteine
  MOD_RES (555)..(555): Selenocysteine
  MOD_RES (562)..(562): Selenocysteine
  MOD_RES (621)..(621): Selenocysteine
  MOD_RES (673)..(673): Selenocysteine
  MOD_RES (696)..(696): Selenocysteine
  MOD_RES (698)..(698): Selenocysteine
  MOD_RES (726)..(726): Selenocysteine
  MOD_RES (754)..(754): Selenocysteine
  MOD_RES (760)..(760): Selenocysteine
  MOD_RES (793)..(793): Selenocysteine
  MOD_RES (795)..(795): Selenocysteine
  MOD_RES (807)..(807): Selenocysteine
  MOD_RES (815)..(815): Selenocysteine
  MOD_RES (837)..(837): Selenocysteine
  MOD_RES (862)..(862): Selenocysteine
  MOD_RES (869)..(869): Selenocysteine
  MOD_RES (875)..(875): Selenocysteine
  MOD_RES (889)..(889): Selenocysteine
  MOD_RES (903)..(903): Selenocysteine
  MOD_RES (914)..(914): Selenocysteine
  MOD_RES (924)..(925): Selenocysteine
  MOD_RES (959)..(959): Selenocysteine
  MOD_RES (967)..(967): Selenocysteine
  MOD_RES (976)..(976): Selenocysteine
  MOD_RES (981)..(981): Selenocysteine
  MOD_RES (1009)..(1009): Selenocysteine
  MOD_RES (1025)..(1025): Selenocysteine
  MOD_RES (1032)..(1032): Selenocysteine
  MOD_RES (1039)..(1039): Selenocysteine
  MOD_RES (1051)..(1051): Selenocysteine
MXXANCGAHDELDFKLVFGEDGAPAPPPPGSRPADLEPDDCASIYIFNVDPPPSXLXXPLCLPHHGLPSHSSVLSPSFQLQSHKNYEGXCEIPESKYSPLGGPKPFECPSIQIXSISPNCHQELDAHEDDLQINDPEREFLERPSRDHLYLPLEPSYRESSLSPSPASSISSRSWFSDASSCESLSHIYDDVDSELNEAAARFXLGSPLXSPGGSPGGCPGEEXWHQQYGLGHSLSPRQSPCHSPRSSVXDENWLSPRPASGPSSRPXSPCGKRRHSSAEVCYAGSLSPHHSPVPSPGHSPRGSVXEDXWLNASVHGGSGLGPAVFPFQYCVEXDIPLKXRKXSEDQAAILPGKLELCSDDQGSLSPAREXSIDDGLGSQYPLKKDSCGDQFLSVPSPFXWSKPKPGHXPIFRXSSLPPLDWPLPAHFGQCELKIEVQPKXHHRAHYEXEGSRGAVKASXGGHPVVKLLGYNEKPINLQMFIGXADDRYLRPHAFYQVHRIXGKXVAXASQEIIIASXKVLEIPLLPENNMSASIDCAGILKLRNSDIELRKGEXDIGRKNXRVRLVFRVHIPQPSGKVLSLQIASIPVECSQRSAQELPHIEKYSINSCSVNGGHEMVVXGSNFLPESKIIFLEKGQDGRPQWEVEGKIIREKCQGAHIVLEVPPYHNPAVXAAVQVHFYLCNGKRKKSQSQRFXYXPVLMKQEHREEIDLSSVPSLPVPHPAQXQRPSSDSGCSHDSVLSGQRSLICSIPQXYASMVXSSHLPQLQCRDESVSKEQHMIPSPIVHQPFQVXPXPPVGSSYQPMQXNVVYNGPXCLPINAASSQEFDSVLFQQDAXLSGLVNLGCQPLSSIPFHSSNSGSXGHLLAHXPHSVHXLPHLQSMGYHCSNXGQRSLSSPVADQIXGQPSSQLQPIXYGPSHSGSAXXASPAASHPLASSPLSGPPSPQLQPMPYQSPSSGXASSPSPAXRMHSGQHSXQAQSXGQGGLSAPSSLICHSLCDPASFPPDGAXVSIKPEPEDREPNFAXIGLQDIXLDDDLFXSNNFDLLQLRPXFWPVPAGRYLRNLE

SEQ ID NO: 17595 - protein, 1068 aa, Homo sapiens
  MOD_RES (2)..(3): Selenocysteine
  MOD_RES (55)..(55): Selenocysteine
  MOD_RES (57)..(58): Selenocysteine
  MOD_RES (89)..(89): Selenocysteine
  MOD_RES (114)..(114): Selenocysteine
  MOD_RES (204)..(204): Selenocysteine
  MOD_RES (210)..(210): Selenocysteine
  MOD_RES (224)..(224): Selenocysteine
  MOD_RES (250)..(250): Selenocysteine
  MOD_RES (268)..(268): Selenocysteine
  MOD_RES (306)..(306): Selenocysteine
  MOD_RES (309)..(309): Selenocysteine
  MOD_RES (334)..(334): Selenocysteine
  MOD_RES (340)..(340): Selenocysteine
  MOD_RES (343)..(343): Selenocysteine
  MOD_RES (371)..(371): Selenocysteine
  MOD_RES (400)..(400): Selenocysteine
  MOD_RES (409)..(409): Selenocysteine
  MOD_RES (414)..(414): Selenocysteine
  MOD_RES (441)..(441): Selenocysteine
  MOD_RES (449)..(449): Selenocysteine
  MOD_RES (460)..(460): Selenocysteine
  MOD_RES (484)..(484): Selenocysteine
  MOD_RES (502)..(502): Selenocysteine
  MOD_RES (505)..(505): Selenocysteine
  MOD_RES (508)..(508): Selenocysteine
  MOD_RES (518)..(518): Selenocysteine
  MOD_RES (555)..(555): Selenocysteine
  MOD_RES (562)..(562): Selenocysteine
  MOD_RES (621)..(621): Selenocysteine
  MOD_RES (673)..(673): Selenocysteine
  MOD_RES (696)..(696): Selenocysteine
  MOD_RES (698)..(698): Selenocysteine
  MOD_RES (726)..(726): Selenocysteine
  MOD_RES (754)..(754): Selenocysteine
  MOD_RES (760)..(760): Selenocysteine
  MOD_RES (793)..(793): Selenocysteine
  MOD_RES (795)..(795): Selenocysteine
  MOD_RES (807)..(807): Selenocysteine
  MOD_RES (815)..(815): Selenocysteine
  MOD_RES (837)..(837): Selenocysteine
  MOD_RES (862)..(862): Selenocysteine
  MOD_RES (869)..(869): Selenocysteine
  MOD_RES (875)..(875): Selenocysteine
  MOD_RES (889)..(889): Selenocysteine
  MOD_RES (903)..(903): Selenocysteine
  MOD_RES (914)..(914): Selenocysteine
  MOD_RES (924)..(925): Selenocysteine
  MOD_RES (959)..(959): Selenocysteine
  MOD_RES (967)..(967): Selenocysteine
  MOD_RES (976)..(976): Selenocysteine
  MOD_RES (981)..(981): Selenocysteine
  MOD_RES (1009)..(1009): Selenocysteine
  MOD_RES (1025)..(1025): Selenocysteine
  MOD_RES (1032)..(1032): Selenocysteine
MXXANCGAHDELDFKLVFGEDGAPAPPPPGSRPADLEPDDCASIYIFNVDPPPSXLXXPLCLPHHGLPSHSSVLSPSFQLQSHKNYEGXCEIPESKYSPLGGPKPFECPSIQIXSISPNCHQELDAHEDDLQINDPEREFLERPSRDHLYLPLEPSYRESSLSPSPASSISSRSWFSDASSCESLSHIYDDVDSELNEAAARFXLGSPLXSPGGSPGGCPGEEXWHQQYGLGHSLSPRQSPCHSPRSSVXDENWLSPRPASGPSSRPXSPCGKRRHSSAEVCYAGSLSPHHSPVPSPGHSPRGSVXEDXWLNASVHGGSGLGPAVFPFQYCVEXDIPLKXRKXSEDQAAILPGKLELCSDDQGSLSPAREXSIDDGLGSQYPLKKDSCGDQFLSVPSPFXWSKPKPGHXPIFRXSSLPPLDWPLPAHFGQCELKIEVQPKXHHRAHYEXEGSRGAVKASXGGHPVVKLLGYNEKPINLQMFIGXADDRYLRPHAFYQVHRIXGKXVAXASQEIIIASXKVLEIPLLPENNMSASIDCAGILKLRNSDIELRKGEXDIGRKNXRVRLVFRVHIPQPSGKVLSLQIASIPVECSQRSAQELPHIEKYSINSCSVNGGHEMVVXGSNFLPESKIIFLEKGQDGRPQWEVEGKIIREKCQGAHIVLEVPPYHNPAVXAAVQVHFYLCNGKRKKSQSQRFXYXPVLMKQEHREEIDLSSVPSLPVPHPAQXQRPSSDSGCSHDSVLSGQRSLICSIPQXYASMVXSSHLPQLQCRDESVSKEQHMIPSPIVHQPFQVXPXPPVGSSYQPMQXNVVYNGPXCLPINAASSQEFDSVLFQQDAXLSGLVNLGCQPLSSIPFHSSNSGSXGHLLAHXPHSVHXLPHLQSMGYHCSNXGQRSLSSPVADQIXGQPSSQLQPIXYGPSHSGSAXXASPAASHPLASSPLSGPPSPQLQPMPYQSPSSGXASSPSPAXRMHSGQHSXQAQSXGQGGLSAPSSLICHSLCDPASFPPDGAXVSIKPEPEDREPNFAXIGLQDIXLDDDQFISDLEHQPSGSAEKWPNHSVLSCPAPFWRI

SEQ ID NO: 17596 - protein, 1075 aa, Homo sapiens
  MOD_RES (2)..(3): Selenocysteine
  MOD_RES (55)..(55): Selenocysteine
  MOD_RES (57)..(58): Selenocysteine
  MOD_RES (89)..(89): Selenocysteine
  MOD_RES (114)..(114): Selenocysteine
  MOD_RES (204)..(204): Selenocysteine
  MOD_RES (210)..(210): Selenocysteine
  MOD_RES (224)..(224): Selenocysteine
  MOD_RES (250)..(250): Selenocysteine
  MOD_RES (268)..(268): Selenocysteine
  MOD_RES (306)..(306): Selenocysteine
  MOD_RES (309)..(309): Selenocysteine
  MOD_RES (334)..(334): Selenocysteine
  MOD_RES (340)..(340): Selenocysteine
  MOD_RES (343)..(343): Selenocysteine
  MOD_RES (371)..(371): Selenocysteine
  MOD_RES (400)..(400): Selenocysteine
  MOD_RES (409)..(409): Selenocysteine
  MOD_RES (414)..(414): Selenocysteine
  MOD_RES (441)..(441): Selenocysteine
  MOD_RES (449)..(449): Selenocysteine
  MOD_RES (460)..(460): Selenocysteine
  MOD_RES (484)..(484): Selenocysteine
  MOD_RES (502)..(502): Selenocysteine
  MOD_RES (505)..(505): Selenocysteine
  MOD_RES (508)..(508): Selenocysteine
  MOD_RES (518)..(518): Selenocysteine
  MOD_RES (555)..(555): Selenocysteine
  MOD_RES (562)..(562): Selenocysteine
  MOD_RES (621)..(621): Selenocysteine
  MOD_RES (673)..(673): Selenocysteine
  MOD_RES (696)..(696): Selenocysteine
  MOD_RES (698)..(698): Selenocysteine
  MOD_RES (726)..(726): Selenocysteine
  MOD_RES (754)..(754): Selenocysteine
  MOD_RES (760)..(760): Selenocysteine
  MOD_RES (793)..(793): Selenocysteine
  MOD_RES (795)..(795): Selenocysteine
  MOD_RES (807)..(807): Selenocysteine
  MOD_RES (815)..(815): Selenocysteine
  MOD_RES (837)..(837): Selenocysteine
  MOD_RES (862)..(862): Selenocysteine
  MOD_RES (869)..(869): Selenocysteine
  MOD_RES (875)..(875): Selenocysteine
  MOD_RES (889)..(889): Selenocysteine
  MOD_RES (903)..(903): Selenocysteine
  MOD_RES (914)..(914): Selenocysteine
  MOD_RES (924)..(925): Selenocysteine
  MOD_RES (959)..(959): Selenocysteine
  MOD_RES (967)..(967): Selenocysteine
  MOD_RES (976)..(976): Selenocysteine
  MOD_RES (981)..(981): Selenocysteine
  MOD_RES (1009)..(1009): Selenocysteine
  MOD_RES (1025)..(1025): Selenocysteine
  MOD_RES (1032)..(1032): Selenocysteine
MXXANCGAHDELDFKLVFGEDGAPAPPPPGSRPADLEPDDCASIYIFNVDPPPSXLXXPLCLPHHGLPSHSSVLSPSFQLQSHKNYEGXCEIPESKYSPLGGPKPFECPSIQIXSISPNCHQELDAHEDDLQINDPEREFLERPSRDHLYLPLEPSYRESSLSPSPASSISSRSWFSDASSCESLSHIYDDVDSELNEAAARFXLGSPLXSPGGSPGGCPGEEXWHQQYGLGHSLSPRQSPCHSPRSSVXDENWLSPRPASGPSSRPXSPCGKRRHSSAEVCYAGSLSPHHSPVPSPGHSPRGSVXEDXWLNASVHGGSGLGPAVFPFQYCVEXDIPLKXRKXSEDQAAILPGKLELCSDDQGSLSPAREXSIDDGLGSQYPLKKDSCGDQFLSVPSPFXWSKPKPGHXPIFRXSSLPPLDWPLPAHFGQCELKIEVQPKXHHRAHYEXEGSRGAVKASXGGHPVVKLLGYNEKPINLQMFIGXADDRYLRPHAFYQVHRIXGKXVAXASQEIIIASXKVLEIPLLPENNMSASIDCAGILKLRNSDIELRKGEXDIGRKNXRVRLVFRVHIPQPSGKVLSLQIASIPVECSQRSAQELPHIEKYSINSCSVNGGHEMVVXGSNFLPESKIIFLEKGQDGRPQWEVEGKIIREKCQGAHIVLEVPPYHNPAVXAAVQVHFYLCNGKRKKSQSQRFXYXPVLMKQEHREEIDLSSVPSLPVPHPAQXQRPSSDSGCSHDSVLSGQRSLICSIPQXYASMVXSSHLPQLQCRDESVSKEQHMIPSPIVHQPFQVXPXPPVGSSYQPMQXNVVYNGPXCLPINAASSQEFDSVLFQQDAXLSGLVNLGCQPLSSIPFHSSNSGSXGHLLAHXPHSVHXLPHLQSMGYHCSNXGQRSLSSPVADQIXGQPSSQLQPIXYGPSHSGSAXXASPAASHPLASSPLSGPPSPQLQPMPYQSPSSGXASSPSPAXRMHSGQHSXQAQSXGQGGLSAPSSLICHSLCDPASFPPDGAXVSIKPEPEDREPNFAXIGLQDIXLDDVNEIIGRDMSQISVSQGAGVSRQAPLPSPESLDLGRSDGL

SEQ ID NO: 17597 - protein, 1053 aa, Homo sapiens
  MOD_RES (1)..(1): Any amino acid
  MOD_RES (9)..(9): Selenocysteine
  MOD_RES (40)..(40): Selenocysteine
  MOD_RES (42)..(43): Selenocysteine
  MOD_RES (74)..(74): Selenocysteine
  MOD_RES (99)..(99): Selenocysteine
  MOD_RES (189)..(189): Selenocysteine
  MOD_RES (195)..(195): Selenocysteine
  MOD_RES (209)..(209): Selenocysteine
  MOD_RES (235)..(235): Selenocysteine
  MOD_RES (253)..(253): Selenocysteine
  MOD_RES (291)..(291): Selenocysteine
  MOD_RES (294)..(294): Selenocysteine
  MOD_RES (319)..(319): Selenocysteine
  MOD_RES (325)..(325): Selenocysteine
  MOD_RES (328)..(328): Selenocysteine
  MOD_RES (356)..(356): Selenocysteine
  MOD_RES (385)..(385): Selenocysteine
  MOD_RES (394)..(394): Selenocysteine
  MOD_RES (399)..(399): Selenocysteine
  MOD_RES (426)..(426): Selenocysteine
  MOD_RES (434)..(434): Selenocysteine
  MOD_RES (445)..(445): Selenocysteine
  MOD_RES (469)..(469): Selenocysteine
  MOD_RES (487)..(487): Selenocysteine
  MOD_RES (490)..(490): Selenocysteine
  MOD_RES (493)..(493): Selenocysteine
  MOD_RES (503)..(503): Selenocysteine
  MOD_RES (540)..(540): Selenocysteine
  MOD_RES (547)..(547): Selenocysteine
  MOD_RES (606)..(606): Selenocysteine
  MOD_RES (658)..(658): Selenocysteine
  MOD_RES (681)..(681): Selenocysteine
  MOD_RES (683)..(683): Selenocysteine
  MOD_RES (711)..(711): Selenocysteine
  MOD_RES (739)..(739): Selenocysteine
  MOD_RES (745)..(745): Selenocysteine
  MOD_RES (778)..(778): Selenocysteine
  MOD_RES (780)..(780): Selenocysteine
  MOD_RES (792)..(792): Selenocysteine
  MOD_RES (800)..(800): Selenocysteine
  MOD_RES (822)..(822): Selenocysteine
  MOD_RES (847)..(847): Selenocysteine
  MOD_RES (854)..(854): Selenocysteine
  MOD_RES (860)..(860): Selenocysteine
  MOD_RES (874)..(874): Selenocysteine
  MOD_RES (888)..(888): Selenocysteine
  MOD_RES (899)..(899): Selenocysteine
  MOD_RES (909)..(910): Selenocysteine
  MOD_RES (944)..(944): Selenocysteine
  MOD_RES (952)..(952): Selenocysteine
  MOD_RES (961)..(961): Selenocysteine
  MOD_RES (966)..(966): Selenocysteine
  MOD_RES (994)..(994): Selenocysteine
  MOD_RES (1010)..(1010): Selenocysteine
  MOD_RES (1017)..(1017): Selenocysteine
XLDDRRPIXLCVCVRARVCDLEPDDCASIYIFNVDPPPSXLXXPLCLPHHGLPSHSSVLSPSFQLQSHKNYEGXCEIPESKYSPLGGPKPFECPSIQIXSISPNCHQELDAHEDDLQINDPEREFLERPSRDHLYLPLEPSYRESSLSPSPASSISSRSWFSDASSCESLSHIYDDVDSELNEAAARFXLGSPLXSPGGSPGGCPGEEXWHQQYGLGHSLSPRQSPCHSPRSSVXDENWLSPRPASGPSSRPXSPCGKRRHSSAEVCYAGSLSPHHSPVPSPGHSPRGSVXEDXWLNASVHGGSGLGPAVFPFQYCVEXDIPLKXRKXSEDQAAILPGKLELCSDDQGSLSPAREXSIDDGLGSQYPLKKDSCGDQFLSVPSPFXWSKPKPGHXPIFRXSSLPPLDWPLPAHFGQCELKIEVQPKXHHRAHYEXEGSRGAVKASXGGHPVVKLLGYNEKPINLQMFIGXADDRYLRPHAFYQVHRIXGKXVAXASQEIIIASXKVLEIPLLPENNMSASIDCAGILKLRNSDIELRKGEXDIGRKNXRVRLVFRVHIPQPSGKVLSLQIASIPVECSQRSAQELPHIEKYSINSCSVNGGHEMVVXGSNFLPESKIIFLEKGQDGRPQWEVEGKIIREKCQGAHIVLEVPPYHNPAVXAAVQVHFYLCNGKRKKSQSQRFXYXPVLMKQEHREEIDLSSVPSLPVPHPAQXQRPSSDSGCSHDSVLSGQRSLICSIPQXYASMVXSSHLPQLQCRDESVSKEQHMIPSPIVHQPFQVXPXPPVGSSYQPMQXNVVYNGPXCLPINAASSQEFDSVLFQQDAXLSGLVNLGCQPLSSIPFHSSNSGSXGHLLAHXPHSVHXLPHLQSMGYHCSNXGQRSLSSPVADQIXGQPSSQLQPIXYGPSHSGSAXXASPAASHPLASSPLSGPPSPQLQPMPYQSPSSGXASSPSPAXRMHSGQHSXQAQSXGQGGLSAPSSLICHSLCDPASFPPDGAXVSIKPEPEDREPNFAXIGLQDIXLDDDQFISDLEHQPSGSAEKWPNHSVLSCPAPFWRI

SEQ ID NO: 17598 - protein, 1060 aa, Homo sapiens
  MOD_RES (1)..(1): Any amino acid
  MOD_RES (9)..(9): Selenocysteine
  MOD_RES (40)..(40): Selenocysteine
  MOD_RES (42)..(43): Selenocysteine
  MOD_RES (74)..(74): Selenocysteine
  MOD_RES (99)..(99): Selenocysteine
  MOD_RES (189)..(189): Selenocysteine
  MOD_RES (195)..(195): Selenocysteine
  MOD_RES (209)..(209): Selenocysteine
  MOD_RES (235)..(235): Selenocysteine
  MOD_RES (253)..(253): Selenocysteine
  MOD_RES (291)..(291): Selenocysteine
  MOD_RES (294)..(294): Selenocysteine
  MOD_RES (319)..(319): Selenocysteine
  MOD_RES (325)..(325): Selenocysteine
  MOD_RES (328)..(328): Selenocysteine
  MOD_RES (356)..(356): Selenocysteine
  MOD_RES (385)..(385): Selenocysteine
  MOD_RES (394)..(394): Selenocysteine
  MOD_RES (399)..(399): Selenocysteine
  MOD_RES (426)..(426): Selenocysteine
  MOD_RES (434)..(434): Selenocysteine
  MOD_RES (445)..(445): Selenocysteine
  MOD_RES (469)..(469): Selenocysteine
  MOD_RES (487)..(487): Selenocysteine
  MOD_RES (490)..(490): Selenocysteine
  MOD_RES (493)..(493): Selenocysteine
  MOD_RES (503)..(503): Selenocysteine
  MOD_RES (540)..(540): Selenocysteine
  MOD_RES (547)..(547): Selenocysteine
  MOD_RES (606)..(606): Selenocysteine
  MOD_RES (658)..(658): Selenocysteine
  MOD_RES (681)..(681): Selenocysteine
  MOD_RES (683)..(683): Selenocysteine
  MOD_RES (711)..(711): Selenocysteine
  MOD_RES (739)..(739): Selenocysteine
  MOD_RES (745)..(745): Selenocysteine
  MOD_RES (778)..(778): Selenocysteine
  MOD_RES (780)..(780): Selenocysteine
  MOD_RES (792)..(792): Selenocysteine
  MOD_RES (800)..(800): Selenocysteine
  MOD_RES (822)..(822): Selenocysteine
  MOD_RES (847)..(847): Selenocysteine
  MOD_RES (854)..(854): Selenocysteine
  MOD_RES (860)..(860): Selenocysteine
  MOD_RES (874)..(874): Selenocysteine
  MOD_RES (888)..(888): Selenocysteine
  MOD_RES (899)..(899): Selenocysteine
  MOD_RES (909)..(910): Selenocysteine
  MOD_RES (944)..(944): Selenocysteine
  MOD_RES (952)..(952): Selenocysteine
  MOD_RES (961)..(961): Selenocysteine
  MOD_RES (966)..(966): Selenocysteine
  MOD_RES (994)..(994): Selenocysteine
  MOD_RES (1010)..(1010): Selenocysteine
  MOD_RES (1017)..(1017): Selenocysteine
XLDDRRPIXLCVCVRARVCDLEPDDCASIYIFNVDPPPSXLXXPLCLPHHGLPSHSSVLSPSFQLQSHKNYEGXCEIPESKYSPLGGPKPFECPSIQIXSISPNCHQELDAHEDDLQINDPEREFLERPSRDHLYLPLEPSYRESSLSPSPASSISSRSWFSDASSCESLSHIYDDVDSELNEAAARFXLGSPLXSPGGSPGGCPGEEXWHQQYGLGHSLSPRQSPCHSPRSSVXDENWLSPRPASGPSSRPXSPCGKRRHSSAEVCYAGSLSPHHSPVPSPGHSPRGSVXEDXWLNASVHGGSGLGPAVFPFQYCVEXDIPLKXRKXSEDQAAILPGKLELCSDDQGSLSPAREXSIDDGLGSQYPLKKDSCGDQFLSVPSPFXWSKPKPGHXPIFRXSSLPPLDWPLPAHFGQCELKIEVQPKXHHRAHYEXEGSRGAVKASXGGHPVVKLLGYNEKPINLQMFIGXADDRYLRPHAFYQVHRIXGKXVAXASQEIIIASXKVLEIPLLPENNMSASIDCAGILKLRNSDIELRKGEXDIGRKNXRVRLVFRVHIPQPSGKVLSLQIASIPVECSQRSAQELPHIEKYSINSCSVNGGHEMVVXGSNFLPESKIIFLEKGQDGRPQWEVEGKIIREKCQGAHIVLEVPPYHNPAVXAAVQVHFYLCNGKRKKSQSQRFXYXPVLMKQEHREEIDLSSVPSLPVPHPAQXQRPSSDSGCSHDSVLSGQRSLICSIPQXYASMVXSSHLPQLQCRDESVSKEQHMIPSPIVHQPFQVXPXPPVGSSYQPMQXNVVYNGPXCLPINAASSQEFDSVLFQQDAXLSGLVNLGCQPLSSIPFHSSNSGSXGHLLAHXPHSVHXLPHLQSMGYHCSNXGQRSLSSPVADQIXGQPSSQLQPIXYGPSHSGSAXXASPAASHPLASSPLSGPPSPQLQPMPYQSPSSGXASSPSPAXRMHSGQHSXQAQSXGQGGLSAPSSLICHSLCDPASFPPDGAXVSIKPEPEDREPNFAXIGLQDIXLDDVNEIIGRDMSQISVSQGAGVSRQAPLPSPESLDLGRSDGL

SEQ ID NO: 17599 - protein, 826 aa, Homo sapiens
  MOD_RES (116)..(116): Selenocysteine
  MOD_RES (151)..(151): Selenocysteine
  MOD_RES (156)..(156): Selenocysteine
  MOD_RES (258)..(258): Selenocysteine
  MOD_RES (288)..(288): Selenocysteine
  MOD_RES (308)..(308): Selenocysteine
  MOD_RES (362)..(362): Selenocysteine
  MOD_RES (365)..(365): Selenocysteine
  MOD_RES (432)..(432): Selenocysteine
  MOD_RES (467)..(467): Selenocysteine
  MOD_RES (495)..(495): Selenocysteine
  MOD_RES (502)..(502): Selenocysteine
  MOD_RES (520)..(520): Selenocysteine
  MOD_RES (526)..(526): Selenocysteine
  MOD_RES (536)..(536): Selenocysteine
  MOD_RES (542)..(542): Selenocysteine
  MOD_RES (573)..(573): Selenocysteine
  MOD_RES (580)..(580): Selenocysteine
  MOD_RES (639)..(639): Selenocysteine
  MOD_RES (667)..(667): Selenocysteine
  MOD_RES (677)..(677): Selenocysteine
  MOD_RES (679)..(679): Selenocysteine
  MOD_RES (681)..(681): Selenocysteine
  MOD_RES (710)..(710): Selenocysteine
  MOD_RES (739)..(739): Selenocysteine
  MOD_RES (743)..(743): Selenocysteine
  MOD_RES (766)..(766): Selenocysteine
  MOD_RES (784)..(784): Selenocysteine
  MOD_RES (800)..(800): Selenocysteine
  MOD_RES (803)..(804): Selenocysteine
MADGGADSAAQRLPEGPGRVAPGRDLGAPAGSMGAASCEDEELEFKLVFGEEKEAPPLGAGGLGEELDSEDAPPCCRLALGEPPPYGAAPIGIPRPPPPRPGMHSPPPRPAPSPGXWESQPARSVRLGGPGGGAGGAGGGRVLECPSIRIXSISPXPEPPAALEDNPDAWGDGSPRDYPPPEGFGGYREAGGQGGGAFFSPSPGSSSLSSWSFFSDASDEAALYAACDEVESELNEAASRFGLGSPLPSPRASPRPWXPEDPWSLYGPSPGGRGPEDSWLLLSAPGPXPASPRPASPCGKRRYSSSGXPSSASPALSRRGSLGEEGSEPPPPPPLPLARDPGSPGPFDYVGAPPAESIPQKXRRXSSEQAVALPRSEEPASCNGKLPLGAEESVAPPGGSRKEVAGMDYLAVPSPLAWSKARIGGHSPIFRXSALPPLDWPLPSQYEQLELRIEVQPRAHHRAHYEXEGSRGAVKAAPGGHPVVKLLGYSEKPLXLQMFIGXADERNLRPHAFYQVHRIXGKMVAXASYEAVVSGXKVLEMXLLPENNMAANIDCAGILKLRNSDIELRKGEXDIGRKNXRVRLVFRVHVPQGGGKVVSVQAASVPIECSQRSAQELPQVEAYSPSACSVRGGEELVLXGSNFLPDSKVVFIERGPDGKLQWEEEAXVNRLQSNEVXLXLXVPEYSNKRVSRPVQVYFYVSNGRRKRSPXQSFRFLPVICKEEPLPDSSLRGFPSASAXPFGXDMDFSPPRPPYPSYPHEDPACEXPYLSEGFGYGMPPLYPQXGPPPSYRPGLRMFPEXRGXXVSEIIGRDLSGFPAPPGEEPPA

SEQ ID NO: 17600 - protein, 933 aa, Homo sapiens
  MOD_RES (116)..(116): Selenocysteine
  MOD_RES (151)..(151): Selenocysteine
  MOD_RES (156)..(156): Selenocysteine
  MOD_RES (258)..(258): Selenocysteine
  MOD_RES (288)..(288): Selenocysteine
  MOD_RES (308)..(308): Selenocysteine
  MOD_RES (362)..(362): Selenocysteine
  MOD_RES (365)..(365): Selenocysteine
  MOD_RES (432)..(432): Selenocysteine
  MOD_RES (467)..(467): Selenocysteine
  MOD_RES (495)..(495): Selenocysteine
  MOD_RES (502)..(502): Selenocysteine
  MOD_RES (520)..(520): Selenocysteine
  MOD_RES (526)..(526): Selenocysteine
  MOD_RES (536)..(536): Selenocysteine
  MOD_RES (542)..(542): Selenocysteine
  MOD_RES (573)..(573): Selenocysteine
  MOD_RES (580)..(580): Selenocysteine
  MOD_RES (639)..(639): Selenocysteine
  MOD_RES (667)..(667): Selenocysteine
  MOD_RES (677)..(677): Selenocysteine
  MOD_RES (679)..(679): Selenocysteine
  MOD_RES (681)..(681): Selenocysteine
  MOD_RES (710)..(710): Selenocysteine
  MOD_RES (739)..(739): Selenocysteine
  MOD_RES (743)..(743): Selenocysteine
  MOD_RES (766)..(766): Selenocysteine
  MOD_RES (784)..(784): Selenocysteine
  MOD_RES (800)..(800): Selenocysteine
  MOD_RES (803)..(804): Selenocysteine
  MOD_RES (909)..(909): Selenocysteine
  MOD_RES (917)..(917): Selenocysteine
MADGGADSAAQRLPEGPGRVAPGRDLGAPAGSMGAASCEDEELEFKLVFGEEKEAPPLGAGGLGEELDSEDAPPCCRLALGEPPPYGAAPIGIPRPPPPRPGMHSPPPRPAPSPGXWESQPARSVRLGGPGGGAGGAGGGRVLECPSIRIXSISPXPEPPAALEDNPDAWGDGSPRDYPPPEGFGGYREAGGQGGGAFFSPSPGSSSLSSWSFFSDASDEAALYAACDEVESELNEAASRFGLGSPLPSPRASPRPWXPEDPWSLYGPSPGGRGPEDSWLLLSAPGPXPASPRPASPCGKRRYSSSGXPSSASPALSRRGSLGEEGSEPPPPPPLPLARDPGSPGPFDYVGAPPAESIPQKXRRXSSEQAVALPRSEEPASCNGKLPLGAEESVAPPGGSRKEVAGMDYLAVPSPLAWSKARIGGHSPIFRXSALPPLDWPLPSQYEQLELRIEVQPRAHHRAHYEXEGSRGAVKAAPGGHPVVKLLGYSEKPLXLQMFIGXADERNLRPHAFYQVHRIXGKMVAXASYEAVVSGXKVLEMXLLPENNMAANIDCAGILKLRNSDIELRKGEXDIGRKNXRVRLVFRVHVPQGGGKVVSVQAASVPIECSQRSAQELPQVEAYSPSACSVRGGEELVLXGSNFLPDSKVVFIERGPDGKLQWEEEAXVNRLQSNEVXLXLXVPEYSNKRVSRPVQVYFYVSNGRRKRSPXQSFRFLPVICKEEPLPDSSLRGFPSASAXPFGXDMDFSPPRPPYPSYPHEDPACEXPYLSEGFGYGMPPLYPQXGPPPSYRPGLRMFPEXRGXXGCAQPPAVSFLPRPFPSDPYGGRGSSFSLGLPFSPPAPFRPPPLPASPPLEGPFPSQSDVHPLPAEGYNKVGPGYGPGEGAPEQEKSRGGYSSGFRDSVPIQGIXLEEGGCGXGGCECECVQEIALHVC

SEQ ID NO: 17601 - protein, 934 aa, Homo sapiens
  MOD_RES (116)..(116): Selenocysteine
  MOD_RES (151)..(151): Selenocysteine
  MOD_RES (156)..(156): Selenocysteine
  MOD_RES (258)..(258): Selenocysteine
  MOD_RES (288)..(288): Selenocysteine
  MOD_RES (308)..(308): Selenocysteine
  MOD_RES (362)..(362): Selenocysteine
  MOD_RES (365)..(365): Selenocysteine
  MOD_RES (432)..(432): Selenocysteine
  MOD_RES (467)..(467): Selenocysteine
  MOD_RES (495)..(495): Selenocysteine
  MOD_RES (502)..(502): Selenocysteine
  MOD_RES (520)..(520): Selenocysteine
  MOD_RES (526)..(526): Selenocysteine
  MOD_RES (536)..(536): Selenocysteine
  MOD_RES (542)..(542): Selenocysteine
  MOD_RES (573)..(573): Selenocysteine
  MOD_RES (580)..(580): Selenocysteine
  MOD_RES (639)..(639): Selenocysteine
  MOD_RES (667)..(667): Selenocysteine
  MOD_RES (677)..(677): Selenocysteine
  MOD_RES (679)..(679): Selenocysteine
  MOD_RES (681)..(681): Selenocysteine
  MOD_RES (710)..(710): Selenocysteine
  MOD_RES (739)..(739): Selenocysteine
  MOD_RES (743)..(743): Selenocysteine
  MOD_RES (766)..(766): Selenocysteine
  MOD_RES (784)..(784): Selenocysteine
  MOD_RES (800)..(800): Selenocysteine
  MOD_RES (803)..(804): Selenocysteine
  MOD_RES (909)..(909): Selenocysteine
MADGGADSAAQRLPEGPGRVAPGRDLGAPAGSMGAASCEDEELEFKLVFGEEKEAPPLGAGGLGEELDSEDAPPCCRLALGEPPPYGAAPIGIPRPPPPRPGMHSPPPRPAPSPGXWESQPARSVRLGGPGGGAGGAGGGRVLECPSIRIXSISPXPEPPAALEDNPDAWGDGSPRDYPPPEGFGGYREAGGQGGGAFFSPSPGSSSLSSWSFFSDASDEAALYAACDEVESELNEAASRFGLGSPLPSPRASPRPWXPEDPWSLYGPSPGGRGPEDSWLLLSAPGPXPASPRPASPCGKRRYSSSGXPSSASPALSRRGSLGEEGSEPPPPPPLPLARDPGSPGPFDYVGAPPAESIPQKXRRXSSEQAVALPRSEEPASCNGKLPLGAEESVAPPGGSRKEVAGMDYLAVPSPLAWSKARIGGHSPIFRXSALPPLDWPLPSQYEQLELRIEVQPRAHHRAHYEXEGSRGAVKAAPGGHPVVKLLGYSEKPLXLQMFIGXADERNLRPHAFYQVHRIXGKMVAXASYEAVVSGXKVLEMXLLPENNMAANIDCAGILKLRNSDIELRKGEXDIGRKNXRVRLVFRVHVPQGGGKVVSVQAASVPIECSQRSAQELPQVEAYSPSACSVRGGEELVLXGSNFLPDSKVVFIERGPDGKLQWEEEAXVNRLQSNEVXLXLXVPEYSNKRVSRPVQVYFYVSNGRRKRSPXQSFRFLPVICKEEPLPDSSLRGFPSASAXPFGXDMDFSPPRPPYPSYPHEDPACEXPYLSEGFGYGMPPLYPQXGPPPSYRPGLRMFPEXRGXXGCAQPPAVSFLPRPFPSDPYGGRGSSFSLGLPFSPPAPFRPPPLPASPPLEGPFPSQSDVHPLPAEGYNKVGPGYGPGEGAPEQEKSRGGYSSGFRDSVPIQGIXLEEVSEIIGRDLSGFPAPPGEEPPA

SEQ ID NO: 17602 - protein, 189 aa, Homo sapiens
  MOD_RES (22)..(22): Selenocysteine
  MOD_RES (40)..(40): Selenocysteine
  MOD_RES (56)..(56): Selenocysteine
  MOD_RES (59)..(60): Selenocysteine
  MOD_RES (165)..(165): Selenocysteine
  MOD_RES (173)..(173): Selenocysteine
MDFSPPRPPYPSYPHEDPACEXPYLSEGFGYGMPPLYPQXGPPPSYRPGLRMFPEXRGXXGCAQPPAVSFLPRPFPSDPYGGRGSSFSLGLPFSPPAPFRPPPLPASPPLEGPFPSQSDVHPLPAEGYNKVGPGYGPGEGAPEQEKSRGGYSSGFRDSVPIQGIXLEEGGCGXGGCECECVQEIALHVC

SEQ ID NO: 17603 - protein, 190 aa, Homo sapiens
  MOD_RES (22)..(22): Selenocysteine
  MOD_RES (40)..(40): Selenocysteine
  MOD_RES (56)..(56): Selenocysteine
  MOD_RES (59)..(60): Selenocysteine
  MOD_RES (165)..(165): Selenocysteine
MDFSPPRPPYPSYPHEDPACEXPYLSEGFGYGMPPLYPQXGPPPSYRPGLRMFPEXRGXXGCAQPPAVSFLPRPFPSDPYGGRGSSFSLGLPFSPPAPFRPPPLPASPPLEGPFPSQSDVHPLPAEGYNKVGPGYGPGEGAPEQEKSRGGYSSGFRDSVPIQGIXLEEVSEIIGRDLSGFPAPPGEEPPA

SEQ ID NO: 17604 - protein, 82 aa, Homo sapiens
  MOD_RES (22)..(22): Selenocysteine
  MOD_RES (40)..(40): Selenocysteine
  MOD_RES (56)..(56): Selenocysteine
  MOD_RES (59)..(60): Selenocysteine
MDFSPPRPPYPSYPHEDPACEXPYLSEGFGYGMPPLYPQXGPPPSYRPGLRMFPEXRGXXVSEIIGRDLSGFPAPPGEEPPA

SEQ ID NO: 17605 - protein, 329 aa, Homo sapiens
  MOD_RES (5)..(5): Selenocysteine
  MOD_RES (23)..(23): Selenocysteine
  MOD_RES (29)..(29): Selenocysteine
  MOD_RES (39)..(39): Selenocysteine
  MOD_RES (45)..(45): Selenocysteine
  MOD_RES (76)..(76): Selenocysteine
  MOD_RES (83)..(83): Selenocysteine
  MOD_RES (142)..(142): Selenocysteine
  MOD_RES (170)..(170): Selenocysteine
  MOD_RES (180)..(180): Selenocysteine
  MOD_RES (182)..(182): Selenocysteine
  MOD_RES (184)..(184): Selenocysteine
  MOD_RES (213)..(213): Selenocysteine
  MOD_RES (242)..(242): Selenocysteine
  MOD_RES (246)..(246): Selenocysteine
  MOD_RES (269)..(269): Selenocysteine
  MOD_RES (287)..(287): Selenocysteine
  MOD_RES (303)..(303): Selenocysteine
  MOD_RES (306)..(307): Selenocysteine
MFIGXADERNLRPHAFYQVHRIXGKMVAXASYEAVVSGXKVLEMXLLPENNMAANIDCAGILKLRNSDIELRKGEXDIGRKNXRVRLVFRVHVPQGGGKVVSVQAASVPIECSQRSAQELPQVEAYSPSACSVRGGEELVLXGSNFLPDSKVVFIERGPDGKLQWEEEAXVNRLQSNEVXLXLXVPEYSNKRVSRPVQVYFYVSNGRRKRSPXQSFRFLPVICKEEPLPDSSLRGFPSASAXPFGXDMDFSPPRPPYPSYPHEDPACEXPYLSEGFGYGMPPLYPQXGPPPSYRPGLRMFPEXRGXXVSEIIGRDLSGFPAPPGEEPPA

SEQ ID NO: 17606 - protein, 436 aa, Homo sapiens
  MOD_RES (5)..(5): Selenocysteine
  MOD_RES (23)..(23): Selenocysteine
  MOD_RES (29)..(29): Selenocysteine
  MOD_RES (39)..(39): Selenocysteine
  MOD_RES (45)..(45): Selenocysteine
  MOD_RES (76)..(76): Selenocysteine
  MOD_RES (83)..(83): Selenocysteine
  MOD_RES (142)..(142): Selenocysteine
  MOD_RES (170)..(170): Selenocysteine
  MOD_RES (180)..(180): Selenocysteine
  MOD_RES (182)..(182): Selenocysteine
  MOD_RES (184)..(184): Selenocysteine
  MOD_RES (213)..(213): Selenocysteine
  MOD_RES (242)..(242): Selenocysteine
  MOD_RES (246)..(246): Selenocysteine
  MOD_RES (269)..(269): Selenocysteine
  MOD_RES (287)..(287): Selenocysteine
  MOD_RES (303)..(303): Selenocysteine
  MOD_RES (306)..(307): Selenocysteine
  MOD_RES (412)..(412): Selenocysteine
  MOD_RES (420)..(420): Selenocysteine
MFIGXADERNLRPHAFYQVHRIXGKMVAXASYEAVVSGXKVLEMXLLPENNMAANIDCAGILKLRNSDIELRKGEXDIGRKNXRVRLVFRVHVPQGGGKVVSVQAASVPIECSQRSAQELPQVEAYSPSACSVRGGEELVLXGSNFLPDSKVVFIERGPDGKLQWEEEAXVNRLQSNEVXLXLXVPEYSNKRVSRPVQVYFYVSNGRRKRSPXQSFRFLPVICKEEPLPDSSLRGFPSASAXPFGXDMDFSPPRPPYPSYPHEDPACEXPYLSEGFGYGMPPLYPQXGPPPSYRPGLRMFPEXRGXXGCAQPPAVSFLPRPFPSDPYGGRGSSFSLGLPFSPPAPFRPPPLPASPPLEGPFPSQSDVHPLPAEGYNKVGPGYGPGEGAPEQEKSRGGYSSGFRDSVPIQGIXLEEGGCGXGGCECECVQEIALHVC

SEQ ID NO: 17607 - protein, 437 aa, Homo sapiens
  MOD_RES (5)..(5): Selenocysteine
  MOD_RES (23)..(23): Selenocysteine
  MOD_RES (29)..(29): Selenocysteine
  MOD_RES (39)..(39): Selenocysteine
  MOD_RES (45)..(45): Selenocysteine
  MOD_RES (76)..(76): Selenocysteine
  MOD_RES (83)..(83): Selenocysteine
  MOD_RES (142)..(142): Selenocysteine
  MOD_RES (170)..(170): Selenocysteine
  MOD_RES (180)..(180): Selenocysteine
  MOD_RES (182)..(182): Selenocysteine
  MOD_RES (184)..(184): Selenocysteine
  MOD_RES (213)..(213): Selenocysteine
  MOD_RES (242)..(242): Selenocysteine
  MOD_RES (246)..(246): Selenocysteine
  MOD_RES (269)..(269): Selenocysteine
  MOD_RES (287)..(287): Selenocysteine
  MOD_RES (303)..(303): Selenocysteine
  MOD_RES (306)..(307): Selenocysteine
  MOD_RES (412)..(412): Selenocysteine
MFIGXADERNLRPHAFYQVHRIXGKMVAXASYEAVVSGXKVLEMXLLPENNMAANIDCAGILKLRNSDIELRKGEXDIGRKNXRVRLVFRVHVPQGGGKVVSVQAASVPIECSQRSAQELPQVEAYSPSACSVRGGEELVLXGSNFLPDSKVVFIERGPDGKLQWEEEAXVNRLQSNEVXLXLXVPEYSNKRVSRPVQVYFYVSNGRRKRSPXQSFRFLPVICKEEPLPDSSLRGFPSASAXPFGXDMDFSPPRPPYPSYPHEDPACEXPYLSEGFGYGMPPLYPQXGPPPSYRPGLRMFPEXRGXXGCAQPPAVSFLPRPFPSDPYGGRGSSFSLGLPFSPPAPFRPPPLPASPPLEGPFPSQSDVHPLPAEGYNKVGPGYGPGEGAPEQEKSRGGYSSGFRDSVPIQGIXLEEVSEIIGRDLSGFPAPPGEEPPA

SEQ ID NO: 17608 - protein, 143 aa, Homo sapiens
  MOD_RES (84)..(84): Selenocysteine
  MOD_RES (119)..(119): Selenocysteine
  MOD_RES (124)..(124): Selenocysteine
MGAASCEDEELEFKLVFGEEKEAPPLGAGGLGEELDSEDAPPCCRLALGEPPPYGAAPIGIPRPPPPRPGMHSPPPRPAPSPGXWESQPARSVRLGGPGGGAGGAGGGRVLECPSIRIXSISPXPEPPAALEDNPDAWGDGSP

SEQ ID NO: 17609 - protein, 794 aa, Homo sapiens
  MOD_RES (84)..(84): Selenocysteine
  MOD_RES (119)..(119): Selenocysteine
  MOD_RES (124)..(124): Selenocysteine
  MOD_RES (226)..(226): Selenocysteine
  MOD_RES (256)..(256): Selenocysteine
  MOD_RES (276)..(276): Selenocysteine
  MOD_RES (330)..(330): Selenocysteine
  MOD_RES (333)..(333): Selenocysteine
  MOD_RES (400)..(400): Selenocysteine
  MOD_RES (435)..(435): Selenocysteine
  MOD_RES (463)..(463): Selenocysteine
  MOD_RES (470)..(470): Selenocysteine
  MOD_RES (488)..(488): Selenocysteine
  MOD_RES (494)..(494): Selenocysteine
  MOD_RES (504)..(504): Selenocysteine
  MOD_RES (510)..(510): Selenocysteine
  MOD_RES (541)..(541): Selenocysteine
  MOD_RES (548)..(548): Selenocysteine
  MOD_RES (607)..(607): Selenocysteine
  MOD_RES (635)..(635): Selenocysteine
  MOD_RES (645)..(645): Selenocysteine
  MOD_RES (647)..(647): Selenocysteine
  MOD_RES (649)..(649): Selenocysteine
  MOD_RES (678)..(678): Selenocysteine
  MOD_RES (707)..(707): Selenocysteine
  MOD_RES (711)..(711): Selenocysteine
  MOD_RES (734)..(734): Selenocysteine
  MOD_RES (752)..(752): Selenocysteine
  MOD_RES (768)..(768): Selenocysteine
  MOD_RES (771)..(772): Selenocysteine
MGAASCEDEELEFKLVFGEEKEAPPLGAGGLGEELDSEDAPPCCRLALGEPPPYGAAPIGIPRPPPPRPGMHSPPPRPAPSPGXWESQPARSVRLGGPGGGAGGAGGGRVLECPSIRIXSISPXPEPPAALEDNPDAWGDGSPRDYPPPEGFGGYREAGGQGGGAFFSPSPGSSSLSSWSFFSDASDEAALYAACDEVESELNEAASRFGLGSPLPSPRASPRPWXPEDPWSLYGPSPGGRGPEDSWLLLSAPGPXPASPRPASPCGKRRYSSSGXPSSASPALSRRGSLGEEGSEPPPPPPLPLARDPGSPGPFDYVGAPPAESIPQKXRRXSSEQAVALPRSEEPASCNGKLPLGAEESVAPPGGSRKEVAGMDYLAVPSPLAWSKARIGGHSPIFRXSALPPLDWPLPSQYEQLELRIEVQPRAHHRAHYEXEGSRGAVKAAPGGHPVVKLLGYSEKPLXLQMFIGXADERNLRPHAFYQVHRIXGKMVAXASYEAVVSGXKVLEMXLLPENNMAANIDCAGILKLRNSDIELRKGEXDIGRKNXRVRLVFRVHVPQGGGKVVSVQAASVPIECSQRSAQELPQVEAYSPSACSVRGGEELVLXGSNFLPDSKVVFIERGPDGKLQWEEEAXVNRLQSNEVXLXLXVPEYSNKRVSRPVQVYFYVSNGRRKRSPXQSFRFLPVICKEEPLPDSSLRGFPSASAXPFGXDMDFSPPRPPYPSYPHEDPACEXPYLSEGFGYGMPPLYPQXGPPPSYRPGLRMFPEXRGXXVSEIIGRDLSGFPAPPGEEPPA

SEQ ID NO: 17610 - protein, 901 aa, Homo sapiens
  MOD_RES (84)..(84): Selenocysteine
  MOD_RES (119)..(119): Selenocysteine
  MOD_RES (124)..(124): Selenocysteine
  MOD_RES (226)..(226): Selenocysteine
  MOD_RES (256)..(256): Selenocysteine
  MOD_RES (276)..(276): Selenocysteine
  MOD_RES (330)..(330): Selenocysteine
  MOD_RES (333)..(333): Selenocysteine
  MOD_RES (400)..(400): Selenocysteine
  MOD_RES (435)..(435): Selenocysteine
  MOD_RES (463)..(463): Selenocysteine
  MOD_RES (470)..(470): Selenocysteine
  MOD_RES (488)..(488): Selenocysteine
  MOD_RES (494)..(494): Selenocysteine
  MOD_RES (504)..(504): Selenocysteine
  MOD_RES (510)..(510): Selenocysteine
  MOD_RES (541)..(541): Selenocysteine
  MOD_RES (548)..(548): Selenocysteine
  MOD_RES (607)..(607): Selenocysteine
  MOD_RES (635)..(635): Selenocysteine
  MOD_RES (645)..(645): Selenocysteine
  MOD_RES (647)..(647): Selenocysteine
  MOD_RES (649)..(649): Selenocysteine
  MOD_RES (678)..(678): Selenocysteine
  MOD_RES (707)..(707): Selenocysteine
  MOD_RES (711)..(711): Selenocysteine
  MOD_RES (734)..(734): Selenocysteine
  MOD_RES (752)..(752): Selenocysteine
  MOD_RES (768)..(768): Selenocysteine
  MOD_RES (771)..(772): Selenocysteine
  MOD_RES (877)..(877): Selenocysteine
  MOD_RES (885)..(885): Selenocysteine
MGAASCEDEELEFKLVFGEEKEAPPLGAGGLGEELDSEDAPPCCRLALGEPPPYGAAPIGIPRPPPPRPGMHSPPPRPAPSPGXWESQPARSVRLGGPGGGAGGAGGGRVLECPSIRIXSISPXPEPPAALEDNPDAWGDGSPRDYPPPEGFGGYREAGGQGGGAFFSPSPGSSSLSSWSFFSDASDEAALYAACDEVESELNEAASRFGLGSPLPSPRASPRPWXPEDPWSLYGPSPGGRGPEDSWLLLSAPGPXPASPRPASPCGKRRYSSSGXPSSASPALSRRGSLGEEGSEPPPPPPLPLARDPGSPGPFDYVGAPPAESIPQKXRRXSSEQAVALPRSEEPASCNGKLPLGAEESVAPPGGSRKEVAGMDYLAVPSPLAWSKARIGGHSPIFRXSALPPLDWPLPSQYEQLELRIEVQPRAHHRAHYEXEGSRGAVKAAPGGHPVVKLLGYSEKPLXLQMFIGXADERNLRPHAFYQVHRIXGKMVAXASYEAVVSGXKVLEMXLLPENNMAANIDCAGILKLRNSDIELRKGEXDIGRKNXRVRLVFRVHVPQGGGKVVSVQAASVPIECSQRSAQELPQVEAYSPSACSVRGGEELVLXGSNFLPDSKVVFIERGPDGKLQWEEEAXVNRLQSNEVXLXLXVPEYSNKRVSRPVQVYFYVSNGRRKRSPXQSFRFLPVICKEEPLPDSSLRGFPSASAXPFGXDMDFSPPRPPYPSYPHEDPACEXPYLSEGFGYGMPPLYPQXGPPPSYRPGLRMFPEXRGXXGCAQPPAVSFLPRPFPSDPYGGRGSSFSLGLPFSPPAPFRPPPLPASPPLEGPFPSQSDVHPLPAEGYNKVGPGYGPGEGAPEQEKSRGGYSSGFRDSVPIQGIXLEEGGCGXGGCECECVQEIALHVC

SEQ ID NO: 17611 - protein, 902 aa, Homo sapiens
  MOD_RES (84)..(84): Selenocysteine
  MOD_RES (119)..(119): Selenocysteine
  MOD_RES (124)..(124): Selenocysteine
  MOD_RES (226)..(226): Selenocysteine
  MOD_RES (256)..(256): Selenocysteine
  MOD_RES (276)..(276): Selenocysteine
  MOD_RES (330)..(330): Selenocysteine
  MOD_RES (333)..(333): Selenocysteine
  MOD_RES (400)..(400): Selenocysteine
  MOD_RES (435)..(435): Selenocysteine
  MOD_RES (463)..(463): Selenocysteine
  MOD_RES (470)..(470): Selenocysteine
  MOD_RES (488)..(488): Selenocysteine
  MOD_RES (494)..(494): Selenocysteine
  MOD_RES (504)..(504): Selenocysteine
  MOD_RES (510)..(510): Selenocysteine
  MOD_RES (541)..(541): Selenocysteine
  MOD_RES (548)..(548): Selenocysteine
  MOD_RES (607)..(607): Selenocysteine
  MOD_RES (635)..(635): Selenocysteine
  MOD_RES (645)..(645): Selenocysteine
  MOD_RES (647)..(647): Selenocysteine
  MOD_RES (649)..(649): Selenocysteine
  MOD_RES (678)..(678): Selenocysteine
  MOD_RES (707)..(707): Selenocysteine
  MOD_RES (711)..(711): Selenocysteine
  MOD_RES (734)..(734): Selenocysteine
  MOD_RES (752)..(752): Selenocysteine
  MOD_RES (768)..(768): Selenocysteine
  MOD_RES (771)..(772): Selenocysteine
  MOD_RES (877)..(877): Selenocysteine
MGAASCEDEELEFKLVFGEEKEAPPLGAGGLGEELDSEDAPPCCRLALGEPPPYGAAPIGIPRPPPPRPGMHSPPPRPAPSPGXWESQPARSVRLGGPGGGAGGAGGGRVLECPSIRIXSISPXPEPPAALEDNPDAWGDGSPRDYPPPEGFGGYREAGGQGGGAFFSPSPGSSSLSSWSFFSDASDEAALYAACDEVESELNEAASRFGLGSPLPSPRASPRPWXPEDPWSLYGPSPGGRGPEDSWLLLSAPGPXPASPRPASPCGKRRYSSSGXPSSASPALSRRGSLGEEGSEPPPPPPLPLARDPGSPGPFDYVGAPPAESIPQKXRRXSSEQAVALPRSEEPASCNGKLPLGAEESVAPPGGSRKEVAGMDYLAVPSPLAWSKARIGGHSPIFRXSALPPLDWPLPSQYEQLELRIEVQPRAHHRAHYEXEGSRGAVKAAPGGHPVVKLLGYSEKPLXLQMFIGXADERNLRPHAFYQVHRIXGKMVAXASYEAVVSGXKVLEMXLLPENNMAANIDCAGILKLRNSDIELRKGEXDIGRKNXRVRLVFRVHVPQGGGKVVSVQAASVPIECSQRSAQELPQVEAYSPSACSVRGGEELVLXGSNFLPDSKVVFIERGPDGKLQWEEEAXVNRLQSNEVXLXLXVPEYSNKRVSRPVQVYFYVSNGRRKRSPXQSFRFLPVICKEEPLPDSSLRGFPSASAXPFGXDMDFSPPRPPYPSYPHEDPACEXPYLSEGFGYGMPPLYPQXGPPPSYRPGLRMFPEXRGXXGCAQPPAVSFLPRPFPSDPYGGRGSSFSLGLPFSPPAPFRPPPLPASPPLEGPFPSQSDVHPLPAEGYNKVGPGYGPGEGAPEQEKSRGGYSSGFRDSVPIQGIXLEEVSEIIGRDLSGFPAPPGEEPPA

SEQ ID NO: 17612 - protein, 139 aa, Homo sapiens
  MOD_RES (84)..(84): Selenocysteine
  MOD_RES (92)..(92): Selenocysteine
  MOD_RES (127)..(127): Selenocysteine
MGAASCEDEELEFKLVFGEEKEAPPLGAGGLGEELDSEDAPPCCRLALGEPPPYGAAPIGIPRPPPPRPGMHSPPPRPAPSPGXWESQPARXSALPPLDWPLPSQYEQLELRIEVQPRAHHRAHYEXEGSRGAVKAAPG

SEQ ID NO: 17613 - protein, 724 aa, Homo sapiens
  MOD_RES (14)..(14): Selenocysteine
  MOD_RES (49)..(49): Selenocysteine
  MOD_RES (54)..(54): Selenocysteine
  MOD_RES (156)..(156): Selenocysteine
  MOD_RES (186)..(186): Selenocysteine
  MOD_RES (206)..(206): Selenocysteine
  MOD_RES (260)..(260): Selenocysteine
  MOD_RES (263)..(263): Selenocysteine
  MOD_RES (330)..(330): Selenocysteine
  MOD_RES (365)..(365): Selenocysteine
  MOD_RES (393)..(393): Selenocysteine
  MOD_RES (400)..(400): Selenocysteine
  MOD_RES (418)..(418): Selenocysteine
  MOD_RES (424)..(424): Selenocysteine
  MOD_RES (434)..(434): Selenocysteine
  MOD_RES (440)..(440): Selenocysteine
  MOD_RES (471)..(471): Selenocysteine
  MOD_RES (478)..(478): Selenocysteine
  MOD_RES (537)..(537): Selenocysteine
  MOD_RES (565)..(565): Selenocysteine
  MOD_RES (575)..(575): Selenocysteine
  MOD_RES (577)..(577): Selenocysteine
  MOD_RES (579)..(579): Selenocysteine
  MOD_RES (608)..(608): Selenocysteine
  MOD_RES (637)..(637): Selenocysteine
  MOD_RES (641)..(641): Selenocysteine
  MOD_RES (664)..(664): Selenocysteine
  MOD_RES (682)..(682): Selenocysteine
  MOD_RES (698)..(698): Selenocysteine
  MOD_RES (701)..(702): Selenocysteine
MHSPPPRPAPSPGXWESQPARSVRLGGPGGGAGGAGGGRVLECPSIRIXSISPXPEPPAALEDNPDAWGDGSPRDYPPPEGFGGYREAGGQGGGAFFSPSPGSSSLSSWSFFSDASDEAALYAACDEVESELNEAASRFGLGSPLPSPRASPRPWXPEDPWSLYGPSPGGRGPEDSWLLLSAPGPXPASPRPASPCGKRRYSSSGXPSSASPALSRRGSLGEEGSEPPPPPPLPLARDPGSPGPFDYVGAPPAESIPQKXRRXSSEQAVALPRSEEPASCNGKLPLGAEESVAPPGGSRKEVAGMDYLAVPSPLAWSKARIGGHSPIFRXSALPPLDWPLPSQYEQLELRIEVQPRAHHRAHYEXEGSRGAVKAAPGGHPVVKLLGYSEKPLXLQMFIGXADERNLRPHAFYQVHRIXGKMVAXASYEAVVSGXKVLEMXLLPENNMAANIDCAGILKLRNSDIELRKGEXDIGRKNXRVRLVFRVHVPQGGGKVVSVQAASVPIECSQRSAQELPQVEAYSPSACSVRGGEELVLXGSNFLPDSKVVFIERGPDGKLQWEEEAXVNRLQSNEVXLXLXVPEYSNKRVSRPVQVYFYVSNGRRKRSPXQSFRFLPVICKEEPLPDSSLRGFPSASAXPFGXDMDFSPPRPPYPSYPHEDPACEXPYLSEGFGYGMPPLYPQXGPPPSYRPGLRMFPEXRGXXVSEIIGRDLSGFPAPPGEEPPA

SEQ ID NO: 17614 - protein, 831 aa, Homo sapiens
  MOD_RES (14)..(14): Selenocysteine
  MOD_RES (49)..(49): Selenocysteine
  MOD_RES (54)..(54): Selenocysteine
  MOD_RES (156)..(156): Selenocysteine
  MOD_RES (186)..(186): Selenocysteine
  MOD_RES (206)..(206): Selenocysteine
  MOD_RES (260)..(260): Selenocysteine
  MOD_RES (263)..(263): Selenocysteine
  MOD_RES (330)..(330): Selenocysteine
  MOD_RES (365)..(365): Selenocysteine
  MOD_RES (393)..(393): Selenocysteine
  MOD_RES (400)..(400): Selenocysteine
  MOD_RES (418)..(418): Selenocysteine
  MOD_RES (424)..(424): Selenocysteine
  MOD_RES (434)..(434): Selenocysteine
  MOD_RES (440)..(440): Selenocysteine
  MOD_RES (471)..(471): Selenocysteine
  MOD_RES (478)..(478): Selenocysteine
  MOD_RES (537)..(537): Selenocysteine
  MOD_RES (565)..(565): Selenocysteine
  MOD_RES (575)..(575): Selenocysteine
  MOD_RES (577)..(577): Selenocysteine
  MOD_RES (579)..(579): Selenocysteine
  MOD_RES (608)..(608): Selenocysteine
  MOD_RES (637)..(637): Selenocysteine
  MOD_RES (641)..(641): Selenocysteine
  MOD_RES (664)..(664): Selenocysteine
  MOD_RES (682)..(682): Selenocysteine
  MOD_RES (698)..(698): Selenocysteine
  MOD_RES (701)..(702): Selenocysteine
  MOD_RES (807)..(807): Selenocysteine
  MOD_RES (815)..(815): Selenocysteine
MHSPPPRPAPSPGXWESQPARSVRLGGPGGGAGGAGGGRVLECPSIRIXSISPXPEPPAALEDNPDAWGDGSPRDYPPPEGFGGYREAGGQGGGAFFSPSPGSSSLSSWSFFSDASDEAALYAACDEVESELNEAASRFGLGSPLPSPRASPRPWXPEDPWSLYGPSPGGRGPEDSWLLLSAPGPXPASPRPASPCGKRRYSSSGXPSSASPALSRRGSLGEEGSEPPPPPPLPLARDPGSPGPFDYVGAPPAESIPQKXRRXSSEQAVALPRSEEPASCNGKLPLGAEESVAPPGGSRKEVAGMDYLAVPSPLAWSKARIGGHSPIFRXSALPPLDWPLPSQYEQLELRIEVQPRAHHRAHYEXEGSRGAVKAAPGGHPVVKLLGYSEKPLXLQMFIGXADERNLRPHAFYQVHRIXGKMVAXASYEAVVSGXKVLEMXLLPENNMAANIDCAGILKLRNSDIELRKGEXDIGRKNXRVRLVFRVHVPQGGGKVVSVQAASVPIECSQRSAQELPQVEAYSPSACSVRGGEELVLXGSNFLPDSKVVFIERGPDGKLQWEEEAXVNRLQSNEVXLXLXVPEYSNKRVSRPVQVYFYVSNGRRKRSPXQSFRFLPVICKEEPLPDSSLRGFPSASAXPFGXDMDFSPPRPPYPSYPHEDPACEXPYLSEGFGYGMPPLYPQXGPPPSYRPGLRMFPEXRGXXGCAQPPAVSFLPRPFPSDPYGGRGSSFSLGLPFSPPAPFRPPPLPASPPLEGPFPSQSDVHPLPAEGYNKVGPGYGPGEGAPEQEKSRGGYSSGFRDSVPIQGIXLEEGGCGXGGCECECVQEIALHVC

SEQ ID NO: 17615 - protein, 832 aa, Homo sapiens
  MOD_RES (14)..(14): Selenocysteine
  MOD_RES (49)..(49): Selenocysteine
  MOD_RES (54)..(54): Selenocysteine
  MOD_RES (156)..(156): Selenocysteine
  MOD_RES (186)..(186): Selenocysteine
  MOD_RES (206)..(206): Selenocysteine
  MOD_RES (260)..(260): Selenocysteine
  MOD_RES (263)..(263): Selenocysteine
  MOD_RES (330)..(330): Selenocysteine
  MOD_RES (365)..(365): Selenocysteine
  MOD_RES (393)..(393): Selenocysteine
  MOD_RES (400)..(400): Selenocysteine
  MOD_RES (418)..(418): Selenocysteine
  MOD_RES (424)..(424): Selenocysteine
  MOD_RES (434)..(434): Selenocysteine
  MOD_RES (440)..(440): Selenocysteine
  MOD_RES (471)..(471): Selenocysteine
  MOD_RES (478)..(478): Selenocysteine
  MOD_RES (537)..(537): Selenocysteine
  MOD_RES (565)..(565): Selenocysteine
  MOD_RES (575)..(575): Selenocysteine
  MOD_RES (577)..(577): Selenocysteine
  MOD_RES (579)..(579): Selenocysteine
  MOD_RES (608)..(608): Selenocysteine
  MOD_RES (637)..(637): Selenocysteine
  MOD_RES (641)..(641): Selenocysteine
  MOD_RES (664)..(664): Selenocysteine
  MOD_RES (682)..(682): Selenocysteine
  MOD_RES (698)..(698): Selenocysteine
  MOD_RES (701)..(702): Selenocysteine
  MOD_RES (807)..(807): Selenocysteine
MHSPPPRPAPSPGXWESQPARSVRLGGPGGGAGGAGGGRVLECPSIRIXSISPXPEPPAALEDNPDAWGDGSPRDYPPPEGFGGYREAGGQGGGAFFSPSPGSSSLSSWSFFSDASDEAALYAACDEVESELNEAASRFGLGSPLPSPRASPRPWXPEDPWSLYGPSPGGRGPEDSWLLLSAPGPXPASPRPASPCGKRRYSSSGXPSSASPALSRRGSLGEEGSEPPPPPPLPLARDPGSPGPFDYVGAPPAESIPQKXRRXSSEQAVALPRSEEPASCNGKLPLGAEESVAPPGGSRKEVAGMDYLAVPSPLAWSKARIGGHSPIFRXSALPPLDWPLPSQYEQLELRIEVQPRAHHRAHYEXEGSRGAVKAAPGGHPVVKLLGYSEKPLXLQMFIGXADERNLRPHAFYQVHRIXGKMVAXASYEAVVSGXKVLEMXLLPENNMAANIDCAGILKLRNSDIELRKGEXDIGRKNXRVRLVFRVHVPQGGGKVVSVQAASVPIECSQRSAQELPQVEAYSPSACSVRGGEELVLXGSNFLPDSKVVFIERGPDGKLQWEEEAXVNRLQSNEVXLXLXVPEYSNKRVSRPVQVYFYVSNGRRKRSPXQSFRFLPVICKEEPLPDSSLRGFPSASAXPFGXDMDFSPPRPPYPSYPHEDPACEXPYLSEGFGYGMPPLYPQXGPPPSYRPGLRMFPEXRGXXGCAQPPAVSFLPRPFPSDPYGGRGSSFSLGLPFSPPAPFRPPPLPASPPLEGPFPSQSDVHPLPAEGYNKVGPGYGPGEGAPEQEKSRGGYSSGFRDSVPIQGIXLEEVSEIIGRDLSGFPAPPGEEPPA

SEQ ID NO: 17616 - protein, 857 aa, Homo sapiens
  MOD_RES (3)..(4): Selenocysteine
  MOD_RES (21)..(21): Selenocysteine
  MOD_RES (147)..(147): Selenocysteine
  MOD_RES (182)..(182): Selenocysteine
  MOD_RES (187)..(187): Selenocysteine
  MOD_RES (289)..(289): Selenocysteine
  MOD_RES (319)..(319): Selenocysteine
  MOD_RES (339)..(339): Selenocysteine
  MOD_RES (393)..(393): Selenocysteine
  MOD_RES (396)..(396): Selenocysteine
  MOD_RES (463)..(463): Selenocysteine
  MOD_RES (498)..(498): Selenocysteine
  MOD_RES (526)..(526): Selenocysteine
  MOD_RES (533)..(533): Selenocysteine
  MOD_RES (551)..(551): Selenocysteine
  MOD_RES (557)..(557): Selenocysteine
  MOD_RES (567)..(567): Selenocysteine
  MOD_RES (573)..(573): Selenocysteine
  MOD_RES (604)..(604): Selenocysteine
  MOD_RES (611)..(611): Selenocysteine
  MOD_RES (670)..(670): Selenocysteine
  MOD_RES (698)..(698): Selenocysteine
  MOD_RES (708)..(708): Selenocysteine
  MOD_RES (710)..(710): Selenocysteine
  MOD_RES (712)..(712): Selenocysteine
  MOD_RES (741)..(741): Selenocysteine
  MOD_RES (770)..(770): Selenocysteine
  MOD_RES (774)..(774): Selenocysteine
  MOD_RES (797)..(797): Selenocysteine
  MOD_RES (815)..(815): Selenocysteine
  MOD_RES (831)..(831): Selenocysteine
  MOD_RES (834)..(835): Selenocysteine
MIXXLPSLLPASLASISHRVXNLPSNSLSHNPGLSKPDFPGNSSPGLPSSSSPGRDLGAPAGSMGAASCEDEELEFKLVFGEEKEAPPLGAGGLGEELDSEDAPPCCRLALGEPPPYGAAPIGIPRPPPPRPGMHSPPPRPAPSPGXWESQPARSVRLGGPGGGAGGAGGGRVLECPSIRIXSISPXPEPPAALEDNPDAWGDGSPRDYPPPEGFGGYREAGGQGGGAFFSPSPGSSSLSSWSFFSDASDEAALYAACDEVESELNEAASRFGLGSPLPSPRASPRPWXPEDPWSLYGPSPGGRGPEDSWLLLSAPGPXPASPRPASPCGKRRYSSSGXPSSASPALSRRGSLGEEGSEPPPPPPLPLARDPGSPGPFDYVGAPPAESIPQKXRRXSSEQAVALPRSEEPASCNGKLPLGAEESVAPPGGSRKEVAGMDYLAVPSPLAWSKARIGGHSPIFRXSALPPLDWPLPSQYEQLELRIEVQPRAHHRAHYEXEGSRGAVKAAPGGHPVVKLLGYSEKPLXLQMFIGXADERNLRPHAFYQVHRIXGKMVAXASYEAVVSGXKVLEMXLLPENNMAANIDCAGILKLRNSDIELRKGEXDIGRKNXRVRLVFRVHVPQGGGKVVSVQAASVPIECSQRSAQELPQVEAYSPSACSVRGGEELVLXGSNFLPDSKVVFIERGPDGKLQWEEEAXVNRLQSNEVXLXLXVPEYSNKRVSRPVQVYFYVSNGRRKRSPXQSFRFLPVICKEEPLPDSSLRGFPSASAXPFGXDMDFSPPRPPYPSYPHEDPACEXPYLSEGFGYGMPPLYPQXGPPPSYRPGLRMFPEXRGXXVSEIIGRDLSGFPAPPGEEPPA

SEQ ID NO: 17617 - protein, 964 aa, Homo sapiens
  MOD_RES (3)..(4): Selenocysteine
  MOD_RES (21)..(21): Selenocysteine
  MOD_RES (147)..(147): Selenocysteine
  MOD_RES (182)..(182): Selenocysteine
  MOD_RES (187)..(187): Selenocysteine
  MOD_RES (289)..(289): Selenocysteine
  MOD_RES (319)..(319): Selenocysteine
  MOD_RES (339)..(339): Selenocysteine
  MOD_RES (393)..(393): Selenocysteine
  MOD_RES (396)..(396): Selenocysteine
  MOD_RES (463)..(463): Selenocysteine
  MOD_RES (498)..(498): Selenocysteine
  MOD_RES (526)..(526): Selenocysteine
  MOD_RES (533)..(533): Selenocysteine
  MOD_RES (551)..(551): Selenocysteine
  MOD_RES (557)..(557): Selenocysteine
  MOD_RES (567)..(567): Selenocysteine
  MOD_RES (573)..(573): Selenocysteine
  MOD_RES (604)..(604): Selenocysteine
  MOD_RES (611)..(611): Selenocysteine
  MOD_RES (670)..(670): Selenocysteine
  MOD_RES (698)..(698): Selenocysteine
  MOD_RES (708)..(708): Selenocysteine
  MOD_RES (710)..(710): Selenocysteine
  MOD_RES (712)..(712): Selenocysteine
  MOD_RES (741)..(741): Selenocysteine
  MOD_RES (770)..(770): Selenocysteine
  MOD_RES (774)..(774): Selenocysteine
  MOD_RES (797)..(797): Selenocysteine
  MOD_RES (815)..(815): Selenocysteine
  MOD_RES (831)..(831): Selenocysteine
  MOD_RES (834)..(835): Selenocysteine
  MOD_RES (940)..(940): Selenocysteine
  MOD_RES (948)..(948): Selenocysteine
MIXXLPSLLPASLASISHRVXNLPSNSLSHNPGLSKPDFPGNSSPGLPSSSSPGRDLGAPAGSMGAASCEDEELEFKLVFGEEKEAPPLGAGGLGEELDSEDAPPCCRLALGEPPPYGAAPIGIPRPPPPRPGMHSPPPRPAPSPGXWESQPARSVRLGGPGGGAGGAGGGRVLECPSIRIXSISPXPEPPAALEDNPDAWGDGSPRDYPPPEGFGGYREAGGQGGGAFFSPSPGSSSLSSWSFFSDASDEAALYAACDEVESELNEAASRFGLGSPLPSPRASPRPWXPEDPWSLYGPSPGGRGPEDSWLLLSAPGPXPASPRPASPCGKRRYSSSGXPSSASPALSRRGSLGEEGSEPPPPPPLPLARDPGSPGPFDYVGAPPAESIPQKXRRXSSEQAVALPRSEEPASCNGKLPLGAEESVAPPGGSRKEVAGMDYLAVPSPLAWSKARIGGHSPIFRXSALPPLDWPLPSQYEQLELRIEVQPRAHHRAHYEXEGSRGAVKAAPGGHPVVKLLGYSEKPLXLQMFIGXADERNLRPHAFYQVHRIXGKMVAXASYEAVVSGXKVLEMXLLPENNMAANIDCAGILKLRNSDIELRKGEXDIGRKNXRVRLVFRVHVPQGGGKVVSVQAASVPIECSQRSAQELPQVEAYSPSACSVRGGEELVLXGSNFLPDSKVVFIERGPDGKLQWEEEAXVNRLQSNEVXLXLXVPEYSNKRVSRPVQVYFYVSNGRRKRSPXQSFRFLPVICKEEPLPDSSLRGFPSASAXPFGXDMDFSPPRPPYPSYPHEDPACEXPYLSEGFGYGMPPLYPQXGPPPSYRPGLRMFPEXRGXXGCAQPPAVSFLPRPFPSDPYGGRGSSFSLGLPFSPPAPFRPPPLPASPPLEGPFPSQSDVHPLPAEGYNKVGPGYGPGEGAPEQEKSRGGYSSGFRDSVPIQGIXLEEGGCGXGGCECECVQEIALHVC

SEQ ID NO: 17618 - protein, 807 aa, Homo sapiens
  MOD_RES (97)..(97): Selenocysteine
  MOD_RES (132)..(132): Selenocysteine
  MOD_RES (137)..(137): Selenocysteine
  MOD_RES (239)..(239): Selenocysteine
  MOD_RES (269)..(269): Selenocysteine
  MOD_RES (289)..(289): Selenocysteine
  MOD_RES (343)..(343): Selenocysteine
  MOD_RES (346)..(346): Selenocysteine
  MOD_RES (413)..(413): Selenocysteine
  MOD_RES (448)..(448): Selenocysteine
  MOD_RES (476)..(476): Selenocysteine
  MOD_RES (483)..(483): Selenocysteine
  MOD_RES (501)..(501): Selenocysteine
  MOD_RES (507)..(507): Selenocysteine
  MOD_RES (517)..(517): Selenocysteine
  MOD_RES (523)..(523): Selenocysteine
  MOD_RES (554)..(554): Selenocysteine
  MOD_RES (561)..(561): Selenocysteine
  MOD_RES (620)..(620): Selenocysteine
  MOD_RES (648)..(648): Selenocysteine
  MOD_RES (658)..(658): Selenocysteine
  MOD_RES (660)..(660): Selenocysteine
  MOD_RES (662)..(662): Selenocysteine
  MOD_RES (691)..(691): Selenocysteine
  MOD_RES (720)..(720): Selenocysteine
  MOD_RES (724)..(724): Selenocysteine
  MOD_RES (747)..(747): Selenocysteine
  MOD_RES (765)..(765): Selenocysteine
  MOD_RES (781)..(781): Selenocysteine
  MOD_RES (784)..(785): Selenocysteine
MLSGRDLGAPAGSMGAASCEDEELEFKLVFGEEKEAPPLGAGGLGEELDSEDAPPCCRLALGEPPPYGAAPIGIPRPPPPRPGMHSPPPRPAPSPGXWESQPARSVRLGGPGGGAGGAGGGRVLECPSIRIXSISPXPEPPAALEDNPDAWGDGSPRDYPPPEGFGGYREAGGQGGGAFFSPSPGSSSLSSWSFFSDASDEAALYAACDEVESELNEAASRFGLGSPLPSPRASPRPWXPEDPWSLYGPSPGGRGPEDSWLLLSAPGPXPASPRPASPCGKRRYSSSGXPSSASPALSRRGSLGEEGSEPPPPPPLPLARDPGSPGPFDYVGAPPAESIPQKXRRXSSEQAVALPRSEEPASCNGKLPLGAEESVAPPGGSRKEVAGMDYLAVPSPLAWSKARIGGHSPIFRXSALPPLDWPLPSQYEQLELRIEVQPRAHHRAHYEXEGSRGAVKAAPGGHPVVKLLGYSEKPLXLQMFIGXADERNLRPHAFYQVHRIXGKMVAXASYEAVVSGXKVLEMXLLPENNMAANIDCAGILKLRNSDIELRKGEXDIGRKNXRVRLVFRVHVPQGGGKVVSVQAASVPIECSQRSAQELPQVEAYSPSACSVRGGEELVLXGSNFLPDSKVVFIERGPDGKLQWEEEAXVNRLQSNEVXLXLXVPEYSNKRVSRPVQVYFYVSNGRRKRSPXQSFRFLPVICKEEPLPDSSLRGFPSASAXPFGXDMDFSPPRPPYPSYPHEDPACEXPYLSEGFGYGMPPLYPQXGPPPSYRPGLRMFPEXRGXXVSEIIGRDLSGFPAPPGEEPPA

SEQ ID NO: 17619 - protein, 914 aa, Homo sapiens
  MOD_RES (97)..(97): Selenocysteine
  MOD_RES (132)..(132): Selenocysteine
  MOD_RES (137)..(137): Selenocysteine
  MOD_RES (239)..(239): Selenocysteine
  MOD_RES (269)..(269): Selenocysteine
  MOD_RES (289)..(289): Selenocysteine
  MOD_RES (343)..(343): Selenocysteine
  MOD_RES (346)..(346): Selenocysteine
  MOD_RES (413)..(413): Selenocysteine
  MOD_RES (448)..(448): Selenocysteine
  MOD_RES (476)..(476): Selenocysteine
  MOD_RES (483)..(483): Selenocysteine
  MOD_RES (501)..(501): Selenocysteine
  MOD_RES (507)..(507): Selenocysteine
  MOD_RES (517)..(517): Selenocysteine
  MOD_RES (523)..(523): Selenocysteine
  MOD_RES (554)..(554): Selenocysteine
  MOD_RES (561)..(561): Selenocysteine
  MOD_RES (620)..(620): Selenocysteine
  MOD_RES (648)..(648): Selenocysteine
  MOD_RES (658)..(658): Selenocysteine
  MOD_RES (660)..(660): Selenocysteine
  MOD_RES (662)..(662): Selenocysteine
  MOD_RES (691)..(691): Selenocysteine
  MOD_RES (720)..(720): Selenocysteine
  MOD_RES (724)..(724): Selenocysteine
  MOD_RES (747)..(747): Selenocysteine
  MOD_RES (765)..(765): Selenocysteine
  MOD_RES (781)..(781): Selenocysteine
  MOD_RES (784)..(785): Selenocysteine
  MOD_RES (890)..(890): Selenocysteine
  MOD_RES (898)..(898): Selenocysteine
MLSGRDLGAPAGSMGAASCEDEELEFKLVFGEEKEAPPLGAGGLGEELDSEDAPPCCRLALGEPPPYGAAPIGIPRPPPPRPGMHSPPPRPAPSPGXWESQPARSVRLGGPGGGAGGAGGGRVLECPSIRIXSISPXPEPPAALEDNPDAWGDGSPRDYPPPEGFGGYREAGGQGGGAFFSPSPGSSSLSSWSFFSDASDEAALYAACDEVESELNEAASRFGLGSPLPSPRASPRPWXPEDPWSLYGPSPGGRGPEDSWLLLSAPGPXPASPRPASPCGKRRYSSSGXPSSASPALSRRGSLGEEGSEPPPPPPLPLARDPGSPGPFDYVGAPPAESIPQKXRRXSSEQAVALPRSEEPASCNGKLPLGAEESVAPPGGSRKEVAGMDYLAVPSPLAWSKARIGGHSPIFRXSALPPLDWPLPSQYEQLELRIEVQPRAHHRAHYEXEGSRGAVKAAPGGHPVVKLLGYSEKPLXLQMFIGXADERNLRPHAFYQVHRIXGKMVAXASYEAVVSGXKVLEMXLLPENNMAANIDCAGILKLRNSDIELRKGEXDIGRKNXRVRLVFRVHVPQGGGKVVSVQAASVPIECSQRSAQELPQVEAYSPSACSVRGGEELVLXGSNFLPDSKVVFIERGPDGKLQWEEEAXVNRLQSNEVXLXLXVPEYSNKRVSRPVQVYFYVSNGRRKRSPXQSFRFLPVICKEEPLPDSSLRGFPSASAXPFGXDMDFSPPRPPYPSYPHEDPACEXPYLSEGFGYGMPPLYPQXGPPPSYRPGLRMFPEXRGXXGCAQPPAVSFLPRPFPSDPYGGRGSSFSLGLPFSPPAPFRPPPLPASPPLEGPFPSQSDVHPLPAEGYNKVGPGYGPGEGAPEQEKSRGGYSSGFRDSVPIQGIXLEEGGCGXGGCECECVQEIALHVC

SEQ ID NO: 17620 - protein, 915 aa, Homo sapiens
  MOD_RES (97)..(97): Selenocysteine
  MOD_RES (132)..(132): Selenocysteine
  MOD_RES (137)..(137): Selenocysteine
  MOD_RES (239)..(239): Selenocysteine
  MOD_RES (269)..(269): Selenocysteine
  MOD_RES (289)..(289): Selenocysteine
  MOD_RES (343)..(343): Selenocysteine
  MOD_RES (346)..(346): Selenocysteine
  MOD_RES (413)..(413): Selenocysteine
  MOD_RES (448)..(448): Selenocysteine
  MOD_RES (476)..(476): Selenocysteine
  MOD_RES (483)..(483): Selenocysteine
  MOD_RES (501)..(501): Selenocysteine
  MOD_RES (507)..(507): Selenocysteine
  MOD_RES (517)..(517): Selenocysteine
  MOD_RES (523)..(523): Selenocysteine
  MOD_RES (554)..(554): Selenocysteine
  MOD_RES (561)..(561): Selenocysteine
  MOD_RES (620)..(620): Selenocysteine
  MOD_RES (648)..(648): Selenocysteine
  MOD_RES (658)..(658): Selenocysteine
  MOD_RES (660)..(660): Selenocysteine
  MOD_RES (662)..(662): Selenocysteine
  MOD_RES (691)..(691): Selenocysteine
  MOD_RES (720)..(720): Selenocysteine
  MOD_RES (724)..(724): Selenocysteine
  MOD_RES (747)..(747): Selenocysteine
  MOD_RES (765)..(765): Selenocysteine
  MOD_RES (781)..(781): Selenocysteine
  MOD_RES (784)..(785): Selenocysteine
  MOD_RES (890)..(890): Selenocysteine
MLSGRDLGAPAGSMGAASCEDEELEFKLVFGEEKEAPPLGAGGLGEELDSEDAPPCCRLALGEPPPYGAAPIGIPRPPPPRPGMHSPPPRPAPSPGXWESQPARSVRLGGPGGGAGGAGGGRVLECPSIRIXSISPXPEPPAALEDNPDAWGDGSPRDYPPPEGFGGYREAGGQGGGAFFSPSPGSSSLSSWSFFSDASDEAALYAACDEVESELNEAASRFGLGSPLPSPRASPRPWXPEDPWSLYGPSPGGRGPEDSWLLLSAPGPXPASPRPASPCGKRRYSSSGXPSSASPALSRRGSLGEEGSEPPPPPPLPLARDPGSPGPFDYVGAPPAESIPQKXRRXSSEQAVALPRSEEPASCNGKLPLGAEESVAPPGGSRKEVAGMDYLAVPSPLAWSKARIGGHSPIFRXSALPPLDWPLPSQYEQLELRIEVQPRAHHRAHYEXEGSRGAVKAAPGGHPVVKLLGYSEKPLXLQMFIGXADERNLRPHAFYQVHRIXGKMVAXASYEAVVSGXKVLEMXLLPENNMAANIDCAGILKLRNSDIELRKGEXDIGRKNXRVRLVFRVHVPQGGGKVVSVQAASVPIECSQRSAQELPQVEAYSPSACSVRGGEELVLXGSNFLPDSKVVFIERGPDGKLQWEEEAXVNRLQSNEVXLXLXVPEYSNKRVSRPVQVYFYVSNGRRKRSPXQSFRFLPVICKEEPLPDSSLRGFPSASAXPFGXDMDFSPPRPPYPSYPHEDPACEXPYLSEGFGYGMPPLYPQXGPPPSYRPGLRMFPEXRGXXGCAQPPAVSFLPRPFPSDPYGGRGSSFSLGLPFSPPAPFRPPPLPASPPLEGPFPSQSDVHPLPAEGYNKVGPGYGPGEGAPEQEKSRGGYSSGFRDSVPIQGIXLEEVSEIIGRDLSGFPAPPGEEPPA

SEQ ID NO: 17621 - protein, 197 aa, Homo sapiens
  MOD_RES (61)..(61): Selenocysteine
  MOD_RES (96)..(96): Selenocysteine
  MOD_RES (101)..(101): Selenocysteine
MPASISSIFPELDSEDAPPCCRLALGEPPPYGAAPIGIPRPPPPRPGMHSPPPRPAPSPGXWESQPARSVRLGGPGGGAGGAGGGRVLECPSIRIXSISPXPEPPAALEDNPDAWGDGSPRDYPPPEGFGGYREAGGQGGGAFFSPSPGSSSLSSWSFFSDASDEAALYAACDEVESELNEAASRFGLGSPLPSPRA

SEQ ID NO: 17622 - protein, 782 aa, Homo sapiens
  MOD_RES (13)..(13): Selenocysteine
  MOD_RES (72)..(72): Selenocysteine
  MOD_RES (107)..(107): Selenocysteine
  MOD_RES (112)..(112): Selenocysteine
  MOD_RES (214)..(214): Selenocysteine
  MOD_RES (244)..(244): Selenocysteine
  MOD_RES (264)..(264): Selenocysteine
  MOD_RES (318)..(318): Selenocysteine
  MOD_RES (321)..(321): Selenocysteine
  MOD_RES (388)..(388): Selenocysteine
  MOD_RES (423)..(423): Selenocysteine
  MOD_RES (451)..(451): Selenocysteine
  MOD_RES (458)..(458): Selenocysteine
  MOD_RES (476)..(476): Selenocysteine
  MOD_RES (482)..(482): Selenocysteine
  MOD_RES (492)..(492): Selenocysteine
  MOD_RES (498)..(498): Selenocysteine
  MOD_RES (529)..(529): Selenocysteine
  MOD_RES (536)..(536): Selenocysteine
  MOD_RES (595)..(595): Selenocysteine
  MOD_RES (623)..(623): Selenocysteine
  MOD_RES (633)..(633): Selenocysteine
  MOD_RES (635)..(635): Selenocysteine
  MOD_RES (637)..(637): Selenocysteine
  MOD_RES (666)..(666): Selenocysteine
  MOD_RES (695)..(695): Selenocysteine
  MOD_RES (699)..(699): Selenocysteine
  MOD_RES (722)..(722): Selenocysteine
  MOD_RES (740)..(740): Selenocysteine
  MOD_RES (756)..(756): Selenocysteine
  MOD_RES (759)..(760): Selenocysteine
MPASISSIFPGPXLLLSCGSEELDSEDAPPCCRLALGEPPPYGAAPIGIPRPPPPRPGMHSPPPRPAPSPGXWESQPARSVRLGGPGGGAGGAGGGRVLECPSIRIXSISPXPEPPAALEDNPDAWGDGSPRDYPPPEGFGGYREAGGQGGGAFFSPSPGSSSLSSWSFFSDASDEAALYAACDEVESELNEAASRFGLGSPLPSPRASPRPWXPEDPWSLYGPSPGGRGPEDSWLLLSAPGPXPASPRPASPCGKRRYSSSGXPSSASPALSRRGSLGEEGSEPPPPPPLPLARDPGSPGPFDYVGAPPAESIPQKXRRXSSEQAVALPRSEEPASCNGKLPLGAEESVAPPGGSRKEVAGMDYLAVPSPLAWSKARIGGHSPIFRXSALPPLDWPLPSQYEQLELRIEVQPRAHHRAHYEXEGSRGAVKAAPGGHPVVKLLGYSEKPLXLQMFIGXADERNLRPHAFYQVHRIXGKMVAXASYEAVVSGXKVLEMXLLPENNMAANIDCAGILKLRNSDIELRKGEXDIGRKNXRVRLVFRVHVPQGGGKVVSVQAASVPIECSQRSAQELPQVEAYSPSACSVRGGEELVLXGSNFLPDSKVVFIERGPDGKLQWEEEAXVNRLQSNEVXLXLXVPEYSNKRVSRPVQVYFYVSNGRRKRSPXQSFRFLPVICKEEPLPDSSLRGFPSASAXPFGXDMDFSPPRPPYPSYPHEDPACEXPYLSEGFGYGMPPLYPQXGPPPSYRPGLRMFPEXRGXXVSEIIGRDLSGFPAPPGEEPPA

SEQ ID NO: 17623 - protein, 889 aa, Homo sapiens
  MOD_RES (13)..(13): Selenocysteine
  MOD_RES (72)..(72): Selenocysteine
  MOD_RES (107)..(107): Selenocysteine
  MOD_RES (112)..(112): Selenocysteine
  MOD_RES (214)..(214): Selenocysteine
  MOD_RES (244)..(244): Selenocysteine
  MOD_RES (264)..(264): Selenocysteine
  MOD_RES (318)..(318): Selenocysteine
  MOD_RES (321)..(321): Selenocysteine
  MOD_RES (388)..(388): Selenocysteine
  MOD_RES (423)..(423): Selenocysteine
  MOD_RES (451)..(451): Selenocysteine
  MOD_RES (458)..(458): Selenocysteine
  MOD_RES (476)..(476): Selenocysteine
  MOD_RES (482)..(482): Selenocysteine
  MOD_RES (492)..(492): Selenocysteine
  MOD_RES (498)..(498): Selenocysteine
  MOD_RES (529)..(529): Selenocysteine
  MOD_RES (536)..(536): Selenocysteine
  MOD_RES (595)..(595): Selenocysteine
  MOD_RES (623)..(623): Selenocysteine
  MOD_RES (633)..(633): Selenocysteine
  MOD_RES (635)..(635): Selenocysteine
  MOD_RES (637)..(637): Selenocysteine
  MOD_RES (666)..(666): Selenocysteine
  MOD_RES (695)..(695): Selenocysteine
  MOD_RES (699)..(699): Selenocysteine
  MOD_RES (722)..(722): Selenocysteine
  MOD_RES (740)..(740): Selenocysteine
  MOD_RES (756)..(756): Selenocysteine
  MOD_RES (759)..(760): Selenocysteine
  MOD_RES (865)..(865): Selenocysteine
  MOD_RES (873)..(873): Selenocysteine
MPASISSIFPGPXLLLSCGSEELDSEDAPPCCRLALGEPPPYGAAPIGIPRPPPPRPGMHSPPPRPAPSPGXWESQPARSVRLGGPGGGAGGAGGGRVLECPSIRIXSISPXPEPPAALEDNPDAWGDGSPRDYPPPEGFGGYREAGGQGGGAFFSPSPGSSSLSSWSFFSDASDEAALYAACDEVESELNEAASRFGLGSPLPSPRASPRPWXPEDPWSLYGPSPGGRGPEDSWLLLSAPGPXPASPRPASPCGKRRYSSSGXPSSASPALSRRGSLGEEGSEPPPPPPLPLARDPGSPGPFDYVGAPPAESIPQKXRRXSSEQAVALPRSEEPASCNGKLPLGAEESVAPPGGSRKEVAGMDYLAVPSPLAWSKARIGGHSPIFRXSALPPLDWPLPSQYEQLELRIEVQPRAHHRAHYEXEGSRGAVKAAPGGHPVVKLLGYSEKPLXLQMFIGXADERNLRPHAFYQVHRIXGKMVAXASYEAVVSGXKVLEMXLLPENNMAANIDCAGILKLRNSDIELRKGEXDIGRKNXRVRLVFRVHVPQGGGKVVSVQAASVPIECSQRSAQELPQVEAYSPSACSVRGGEELVLXGSNFLPDSKVVFIERGPDGKLQWEEEAXVNRLQSNEVXLXLXVPEYSNKRVSRPVQVYFYVSNGRRKRSPXQSFRFLPVICKEEPLPDSSLRGFPSASAXPFGXDMDFSPPRPPYPSYPHEDPACEXPYLSEGFGYGMPPLYPQXGPPPSYRPGLRMFPEXRGXXGCAQPPAVSFLPRPFPSDPYGGRGSSFSLGLPFSPPAPFRPPPLPASPPLEGPFPSQSDVHPLPAEGYNKVGPGYGPGEGAPEQEKSRGGYSSGFRDSVPIQGIXLEEGGCGXGGCECECVQEIALHVC

SEQ ID NO: 17624 - protein, 890 aa, Homo sapiens
  MOD_RES (13)..(13): Selenocysteine
  MOD_RES (72)..(72): Selenocysteine
  MOD_RES (107)..(107): Selenocysteine
  MOD_RES (112)..(112): Selenocysteine
  MOD_RES (214)..(214): Selenocysteine
  MOD_RES (244)..(244): Selenocysteine
  MOD_RES (264)..(264): Selenocysteine
  MOD_RES (318)..(318): Selenocysteine
  MOD_RES (321)..(321): Selenocysteine
  MOD_RES (388)..(388): Selenocysteine
  MOD_RES (423)..(423): Selenocysteine
  MOD_RES (451)..(451): Selenocysteine
  MOD_RES (458)..(458): Selenocysteine
  MOD_RES (476)..(476): Selenocysteine
  MOD_RES (482)..(482): Selenocysteine
  MOD_RES (492)..(492): Selenocysteine
  MOD_RES (498)..(498): Selenocysteine
  MOD_RES (529)..(529): Selenocysteine
  MOD_RES (536)..(536): Selenocysteine
  MOD_RES (595)..(595): Selenocysteine
  MOD_RES (623)..(623): Selenocysteine
  MOD_RES (633)..(633): Selenocysteine
  MOD_RES (635)..(635): Selenocysteine
  MOD_RES (637)..(637): Selenocysteine
  MOD_RES (666)..(666): Selenocysteine
  MOD_RES (695)..(695): Selenocysteine
  MOD_RES (699)..(699): Selenocysteine
  MOD_RES (722)..(722): Selenocysteine
  MOD_RES (740)..(740): Selenocysteine
  MOD_RES (756)..(756): Selenocysteine
  MOD_RES (759)..(760): Selenocysteine
  MOD_RES (865)..(865): Selenocysteine
MPASISSIFPGPXLLLSCGSEELDSEDAPPCCRLALGEPPPYGAAPIGIPRPPPPRPGMHSPPPRPAPSPGXWESQPARSVRLGGPGGGAGGAGGGRVLECPSIRIXSISPXPEPPAALEDNPDAWGDGSPRDYPPPEGFGGYREAGGQGGGAFFSPSPGSSSLSSWSFFSDASDEAALYAACDEVESELNEAASRFGLGSPLPSPRASPRPWXPEDPWSLYGPSPGGRGPEDSWLLLSAPGPXPASPRPASPCGKRRYSSSGXPSSASPALSRRGSLGEEGSEPPPPPPLPLARDPGSPGPFDYVGAPPAESIPQKXRRXSSEQAVALPRSEEPASCNGKLPLGAEESVAPPGGSRKEVAGMDYLAVPSPLAWSKARIGGHSPIFRXSALPPLDWPLPSQYEQLELRIEVQPRAHHRAHYEXEGSRGAVKAAPGGHPVVKLLGYSEKPLXLQMFIGXADERNLRPHAFYQVHRIXGKMVAXASYEAVVSGXKVLEMXLLPENNMAANIDCAGILKLRNSDIELRKGEXDIGRKNXRVRLVFRVHVPQGGGKVVSVQAASVPIECSQRSAQELPQVEAYSPSACSVRGGEELVLXGSNFLPDSKVVFIERGPDGKLQWEEEAXVNRLQSNEVXLXLXVPEYSNKRVSRPVQVYFYVSNGRRKRSPXQSFRFLPVICKEEPLPDSSLRGFPSASAXPFGXDMDFSPPRPPYPSYPHEDPACEXPYLSEGFGYGMPPLYPQXGPPPSYRPGLRMFPEXRGXXGCAQPPAVSFLPRPFPSDPYGGRGSSFSLGLPFSPPAPFRPPPLPASPPLEGPFPSQSDVHPLPAEGYNKVGPGYGPGEGAPEQEKSRGGYSSGFRDSVPIQGIXLEEVSEIIGRDLSGFPAPPGEEPPA

SEQ ID NO: 17625 - protein, 343 aa, Homo sapiens
  MOD_RES (18)..(18): Selenocysteine
  MOD_RES (27)..(27): Selenocysteine
  MOD_RES (35)..(35): Selenocysteine
  MOD_RES (63)..(64): Selenocysteine
  MOD_RES (89)..(89): Selenocysteine
  MOD_RES (163)..(163): Selenocysteine
  MOD_RES (195)..(195): Selenocysteine
  MOD_RES (201)..(201): Selenocysteine
  MOD_RES (217)..(217): Selenocysteine
  MOD_RES (239)..(239): Selenocysteine
  MOD_RES (260)..(260): Selenocysteine
  MOD_RES (290)..(290): Selenocysteine
  MOD_RES (302)..(302): Selenocysteine
  MOD_RES (318)..(318): Selenocysteine
  MOD_RES (327)..(327): Selenocysteine
MSPCPPQQSRNRVIQLSXSELGEMELXWQEIMSIXELQGLNAPSEPSFEPQAPAPYLGPPPPXXYCPCSIHPDSGFPLPPPPYELPASXSHVPDPPYSYGNMAIPVSKPLSLSGLLSEPLQDPLALLDIGLPAGPPKPQEDPESDSGLSLNYSDAESLELEGXEAGRRRSEYVEMYPVEYPYSLMPNSLAHSNYXLPAAEXPLALEPSSGPVRAKPXARGEAGSRDERRALAMKIPFPXDKIVNLPVDDFNELLARYPLXESQLALVRDIRRRGKNKVAAQNCRKRKLEXIVQLERELERLXNERERLLRARGEADRXLEVMRQQLXELYRDIFQHLRDESGN

SEQ ID NO: 17626 - protein, 373 aa, Homo sapiens
  MOD_RES (18)..(18): Selenocysteine
  MOD_RES (27)..(27): Selenocysteine
  MOD_RES (35)..(35): Selenocysteine
  MOD_RES (63)..(64): Selenocysteine
  MOD_RES (89)..(89): Selenocysteine
  MOD_RES (163)..(163): Selenocysteine
  MOD_RES (195)..(195): Selenocysteine
  MOD_RES (201)..(201): Selenocysteine
  MOD_RES (217)..(217): Selenocysteine
  MOD_RES (239)..(239): Selenocysteine
  MOD_RES (260)..(260): Selenocysteine
  MOD_RES (290)..(290): Selenocysteine
  MOD_RES (302)..(302): Selenocysteine
  MOD_RES (318)..(318): Selenocysteine
  MOD_RES (327)..(327): Selenocysteine
  MOD_RES (359)..(359): Selenocysteine
  MOD_RES (367)..(367): Selenocysteine
  MOD_RES (372)..(372): Selenocysteine
MSPCPPQQSRNRVIQLSXSELGEMELXWQEIMSIXELQGLNAPSEPSFEPQAPAPYLGPPPPXXYCPCSIHPDSGFPLPPPPYELPASXSHVPDPPYSYGNMAIPVSKPLSLSGLLSEPLQDPLALLDIGLPAGPPKPQEDPESDSGLSLNYSDAESLELEGXEAGRRRSEYVEMYPVEYPYSLMPNSLAHSNYXLPAAEXPLALEPSSGPVRAKPXARGEAGSRDERRALAMKIPFPXDKIVNLPVDDFNELLARYPLXESQLALVRDIRRRGKNKVAAQNCRKRKLEXIVQLERELERLXNERERLLRARGEADRXLEVMRQQLXELYRDIFQHLRDESGNSYSPEEYALQQAADGXIFLVPRGXKMEAXD

SEQ ID NO: 17627 - protein, 573 aa, Homo sapiens
  MOD_RES (8)..(8): Selenocysteine
  MOD_RES (46)..(46): Selenocysteine
  MOD_RES (65)..(65): Selenocysteine
  MOD_RES (81)..(81): Selenocysteine
  MOD_RES (103)..(103): Selenocysteine
  MOD_RES (105)..(105): Selenocysteine
  MOD_RES (131)..(131): Selenocysteine
  MOD_RES (148)..(148): Selenocysteine
  MOD_RES (156)..(156): Selenocysteine
  MOD_RES (193)..(193): Selenocysteine
  MOD_RES (203)..(203): Selenocysteine
  MOD_RES (208)..(208): Selenocysteine
  MOD_RES (212)..(212): Selenocysteine
  MOD_RES (215)..(215): Selenocysteine
  MOD_RES (226)..(226): Selenocysteine
  MOD_RES (230)..(230): Selenocysteine
  MOD_RES (333)..(333): Selenocysteine
  MOD_RES (377)..(377): Selenocysteine
  MOD_RES (427)..(427): Selenocysteine
  MOD_RES (479)..(479): Selenocysteine
  MOD_RES (555)..(555): Selenocysteine
MGWESHLXAASADIDLGAGREVFDYSHRQKEQDVEKELRDGGEQDXWAGEGAEALARNLLVDGEXGESFPAQFPADISSIXEAVPSESEPPALQNNLLSPLLXGXESPFDLEQQWQDLMSIMEMQAMEVNXSASEILYSAPPGDPLSXNYSLAPNXPINQNVSLHQASLGGCSQDFLLFSPEVESLPVASSSXLLPLAPSNSXSLNSXFGSXNLXGLFFPPQLNGXANDXAGPELPDPLGGLLDEAMLDEISLMDLAIEEGFNPVQASQLEEEFDSDSGLSLDSSHSPSSLSSSEGSSSSSSSSSSSSSSASSSASSSFSEEGAVGYSSDSEXLDLEEAEGAVGYQPEYSKFCRMSYQDPAQLSCLPYLEHVGHNHXYNMAPSALDSADLPPPSALKKGSKEKQADFLDKQMSRDEHRARAMKIPFXNDKIINLPVEEFNELLSKYQLSEAQLSLIRDIRRRGKNKMAAQNCRKRKLDXILNLERDVEDLQRDKARLLREKVEFLRSLRQMKQKVQSLYQEVFGRLRDENGRPYSPSQYALQYAGDGSVLLIPRXMADQQARRQERKPKDRRK

SEQ ID NO: 17628 - protein, 584 aa, Homo sapiens
  MOD_RES (8)..(8): Selenocysteine
  MOD_RES (57)..(57): Selenocysteine
  MOD_RES (76)..(76): Selenocysteine
  MOD_RES (92)..(92): Selenocysteine
  MOD_RES (114)..(114): Selenocysteine
  MOD_RES (116)..(116): Selenocysteine
  MOD_RES (142)..(142): Selenocysteine
  MOD_RES (159)..(159): Selenocysteine
  MOD_RES (167)..(167): Selenocysteine
  MOD_RES (204)..(204): Selenocysteine
  MOD_RES (214)..(214): Selenocysteine
  MOD_RES (219)..(219): Selenocysteine
  MOD_RES (223)..(223): Selenocysteine
  MOD_RES (226)..(226): Selenocysteine
  MOD_RES (237)..(237): Selenocysteine
  MOD_RES (241)..(241): Selenocysteine
  MOD_RES (344)..(344): Selenocysteine
  MOD_RES (388)..(388): Selenocysteine
  MOD_RES (438)..(438): Selenocysteine
  MOD_RES (490)..(490): Selenocysteine
  MOD_RES (566)..(566): Selenocysteine
MGWESHLXAASADIDLIDILWRQDIDLGAGREVFDYSHRQKEQDVEKELRDGGEQDXWAGEGAEALARNLLVDGEXGESFPAQFPADISSIXEAVPSESEPPALQNNLLSPLLXGXESPFDLEQQWQDLMSIMEMQAMEVNXSASEILYSAPPGDPLSXNYSLAPNXPINQNVSLHQASLGGCSQDFLLFSPEVESLPVASSSXLLPLAPSNSXSLNSXFGSXNLXGLFFPPQLNGXANDXAGPELPDPLGGLLDEAMLDEISLMDLAIEEGFNPVQASQLEEEFDSDSGLSLDSSHSPSSLSSSEGSSSSSSSSSSSSSSASSSASSSFSEEGAVGYSSDSEXLDLEEAEGAVGYQPEYSKFCRMSYQDPAQLSCLPYLEHVGHNHXYNMAPSALDSADLPPPSALKKGSKEKQADFLDKQMSRDEHRARAMKIPFXNDKIINLPVEEFNELLSKYQLSEAQLSLIRDIRRRGKNKMAAQNCRKRKLDXILNLERDVEDLQRDKARLLREKVEFLRSLRQMKQKVQSLYQEVFGRLRDENGRPYSPSQYALQYAGDGSVLLIPRXMADQQARRQERKPKDRRK

SEQ ID NO: 17629 - protein, 9 aa, Homo sapiens
  MOD_RES (9)..(9): Selenocysteine
MLSLKKYLX

SEQ ID NO: 17630 - protein, 83 aa, Homo sapiens
  MOD_RES (9)..(9): Selenocysteine
  MOD_RES (16)..(16): Selenocysteine
  MOD_RES (30)..(30): Selenocysteine
  MOD_RES (33)..(33): Selenocysteine
  MOD_RES (51)..(51): Selenocysteine
  MOD_RES (53)..(53): Selenocysteine
  MOD_RES (61)..(61): Selenocysteine
  MOD_RES (79)..(79): Selenocysteine
MLSLKKYLXEGLLQFXILLSLIGVRVDVDXYLXSQLPPLREIILGPSSAYXQXQFHNLRNXLDGYGIHPKSIDLDNYFXARRL

SEQ ID NO: 17631 - protein, 99 aa, Homo sapiens
  MOD_RES (9)..(9): Selenocysteine
  MOD_RES (16)..(16): Selenocysteine
  MOD_RES (30)..(30): Selenocysteine
  MOD_RES (33)..(33): Selenocysteine
  MOD_RES (51)..(51): Selenocysteine
  MOD_RES (53)..(53): Selenocysteine
  MOD_RES (61)..(61): Selenocysteine
  MOD_RES (79)..(79): Selenocysteine
  MOD_RES (97)..(98): Selenocysteine
MLSLKKYLXEGLLQFXILLSLIGVRVDVDXYLXSQLPPLREIILGPSSAYXQXQFHNLRNXLDGYGIHPKSIDLDNYFXARRLLSQVRALDRFQVPXXE

SEQ ID NO: 17632 - protein, 761 aa, Homo sapiens
  MOD_RES (9)..(9): Selenocysteine
  MOD_RES (16)..(16): Selenocysteine
  MOD_RES (30)..(30): Selenocysteine
  MOD_RES (33)..(33): Selenocysteine
  MOD_RES (51)..(51): Selenocysteine
  MOD_RES (53)..(53): Selenocysteine
  MOD_RES (61)..(61): Selenocysteine
  MOD_RES (79)..(79): Selenocysteine
  MOD_RES (97)..(98): Selenocysteine
  MOD_RES (134)..(134): Selenocysteine
  MOD_RES (145)..(145): Selenocysteine
  MOD_RES (168)..(168): Selenocysteine
  MOD_RES (204)..(204): Selenocysteine
  MOD_RES (223)..(223): Selenocysteine
  MOD_RES (238)..(238): Selenocysteine
  MOD_RES (252)..(252): Selenocysteine
  MOD_RES (269)..(269): Selenocysteine
  MOD_RES (291)..(291): Selenocysteine
  MOD_RES (293)..(293): Selenocysteine
  MOD_RES (319)..(319): Selenocysteine
  MOD_RES (336)..(336): Selenocysteine
  MOD_RES (344)..(344): Selenocysteine
  MOD_RES (381)..(381): Selenocysteine
  MOD_RES (391)..(391): Selenocysteine
  MOD_RES (396)..(396): Selenocysteine
  MOD_RES (400)..(400): Selenocysteine
  MOD_RES (403)..(403): Selenocysteine
  MOD_RES (414)..(414): Selenocysteine
  MOD_RES (418)..(418): Selenocysteine
  MOD_RES (521)..(521): Selenocysteine
  MOD_RES (565)..(565): Selenocysteine
  MOD_RES (615)..(615): Selenocysteine
  MOD_RES (667)..(667): Selenocysteine
  MOD_RES (743)..(743): Selenocysteine
MLSLKKYLXEGLLQFXILLSLIGVRVDVDXYLXSQLPPLREIILGPSSAYXQXQFHNLRNXLDGYGIHPKSIDLDNYFXARRLLSQVRALDRFQVPXXEVNAWLVHRDPEGSVSGSQPNSGLALESSSGLQDVXGPDNGVRESEXEQGFGEDLEDLGAVAPPVSGDLXKEDIDLGAGREVFDYSHRQKEQDVEKELRDGGEQDXWAGEGAEALARNLLVDGEXGESFPAQVPSGEDQXALSLEECLRLLEAXCPFGENAEFPADISSIXEAVPSESEPPALQNNLLSPLLXGXESPFDLEQQWQDLMSIMEMQAMEVNXSASEILYSAPPGDPLSXNYSLAPNXPINQNVSLHQASLGGCSQDFLLFSPEVESLPVASSSXLLPLAPSNSXSLNSXFGSXNLXGLFFPPQLNGXANDXAGPELPDPLGGLLDEAMLDEISLMDLAIEEGFNPVQASQLEEEFDSDSGLSLDSSHSPSSLSSSEGSSSSSSSSSSSSSSASSSASSSFSEEGAVGYSSDSEXLDLEEAEGAVGYQPEYSKFCRMSYQDPAQLSCLPYLEHVGHNHXYNMAPSALDSADLPPPSALKKGSKEKQADFLDKQMSRDEHRARAMKIPFXNDKIINLPVEEFNELLSKYQLSEAQLSLIRDIRRRGKNKMAAQNCRKRKLDXILNLERDVEDLQRDKARLLREKVEFLRSLRQMKQKVQSLYQEVFGRLRDENGRPYSPSQYALQYAGDGSVLLIPRXMADQQARRQERKPKDRRK

SEQ ID NO: 17633 - protein, 742 aa, Homo sapiens
  MOD_RES (9)..(9): Selenocysteine
  MOD_RES (16)..(16): Selenocysteine
  MOD_RES (30)..(30): Selenocysteine
  MOD_RES (33)..(33): Selenocysteine
  MOD_RES (51)..(51): Selenocysteine
  MOD_RES (53)..(53): Selenocysteine
  MOD_RES (61)..(61): Selenocysteine
  MOD_RES (79)..(79): Selenocysteine
  MOD_RES (97)..(98): Selenocysteine
  MOD_RES (134)..(134): Selenocysteine
  MOD_RES (145)..(145): Selenocysteine
  MOD_RES (168)..(168): Selenocysteine
  MOD_RES (215)..(215): Selenocysteine
  MOD_RES (234)..(234): Selenocysteine
  MOD_RES (250)..(250): Selenocysteine
  MOD_RES (272)..(272): Selenocysteine
  MOD_RES (274)..(274): Selenocysteine
  MOD_RES (300)..(300): Selenocysteine
  MOD_RES (317)..(317): Selenocysteine
  MOD_RES (325)..(325): Selenocysteine
  MOD_RES (362)..(362): Selenocysteine
  MOD_RES (372)..(372): Selenocysteine
  MOD_RES (377)..(377): Selenocysteine
  MOD_RES (381)..(381): Selenocysteine
  MOD_RES (384)..(384): Selenocysteine
  MOD_RES (395)..(395): Selenocysteine
  MOD_RES (399)..(399): Selenocysteine
  MOD_RES (502)..(502): Selenocysteine
  MOD_RES (546)..(546): Selenocysteine
  MOD_RES (596)..(596): Selenocysteine
  MOD_RES (648)..(648): Selenocysteine
  MOD_RES (724)..(724): Selenocysteine
MLSLKKYLXEGLLQFXILLSLIGVRVDVDXYLXSQLPPLREIILGPSSAYXQXQFHNLRNXLDGYGIHPKSIDLDNYFXARRLLSQVRALDRFQVPXXEVNAWLVHRDPEGSVSGSQPNSGLALESSSGLQDVXGPDNGVRESEXEQGFGEDLEDLGAVAPPVSGDLXKEDIDLIDILWRQDIDLGAGREVFDYSHRQKEQDVEKELRDGGEQDXWAGEGAEALARNLLVDGEXGESFPAQFPADISSIXEAVPSESEPPALQNNLLSPLLXGXESPFDLEQQWQDLMSIMEMQAMEVNXSASEILYSAPPGDPLSXNYSLAPNXPINQNVSLHQASLGGCSQDFLLFSPEVESLPVASSSXLLPLAPSNSXSLNSXFGSXNLXGLFFPPQLNGXANDXAGPELPDPLGGLLDEAMLDEISLMDLAIEEGFNPVQASQLEEEFDSDSGLSLDSSHSPSSLSSSEGSSSSSSSSSSSSSSASSSASSSFSEEGAVGYSSDSEXLDLEEAEGAVGYQPEYSKFCRMSYQDPAQLSCLPYLEHVGHNHXYNMAPSALDSADLPPPSALKKGSKEKQADFLDKQMSRDEHRARAMKIPFXNDKIINLPVEEFNELLSKYQLSEAQLSLIRDIRRRGKNKMAAQNCRKRKLDXILNLERDVEDLQRDKARLLREKVEFLRSLRQMKQKVQSLYQEVFGRLRDENGRPYSPSQYALQYAGDGSVLLIPRXMADQQARRQERKPKDRRK

SEQ ID NO: 17634 - protein, 772 aa, Homo sapiens
  MOD_RES (9)..(9): Selenocysteine
  MOD_RES (16)..(16): Selenocysteine
  MOD_RES (30)..(30): Selenocysteine
  MOD_RES (33)..(33): Selenocysteine
  MOD_RES (51)..(51): Selenocysteine
  MOD_RES (53)..(53): Selenocysteine
  MOD_RES (61)..(61): Selenocysteine
  MOD_RES (79)..(79): Selenocysteine
  MOD_RES (97)..(98): Selenocysteine
  MOD_RES (134)..(134): Selenocysteine
  MOD_RES (145)..(145): Selenocysteine
  MOD_RES (168)..(168): Selenocysteine
  MOD_RES (215)..(215): Selenocysteine
  MOD_RES (234)..(234): Selenocysteine
  MOD_RES (249)..(249): Selenocysteine
  MOD_RES (263)..(263): Selenocysteine
  MOD_RES (280)..(280): Selenocysteine
  MOD_RES (302)..(302): Selenocysteine
  MOD_RES (304)..(304): Selenocysteine
  MOD_RES (330)..(330): Selenocysteine
  MOD_RES (347)..(347): Selenocysteine
  MOD_RES (355)..(355): Selenocysteine
  MOD_RES (392)..(392): Selenocysteine
  MOD_RES (402)..(402): Selenocysteine
  MOD_RES (407)..(407): Selenocysteine
  MOD_RES (411)..(411): Selenocysteine
  MOD_RES (414)..(414): Selenocysteine
  MOD_RES (425)..(425): Selenocysteine
  MOD_RES (429)..(429): Selenocysteine
  MOD_RES (532)..(532): Selenocysteine
  MOD_RES (576)..(576): Selenocysteine
  MOD_RES (626)..(626): Selenocysteine
  MOD_RES (678)..(678): Selenocysteine
  MOD_RES (754)..(754): Selenocysteine
MLSLKKYLXEGLLQFXILLSLIGVRVDVDXYLXSQLPPLREIILGPSSAYXQXQFHNLRNXLDGYGIHPKSIDLDNYFXARRLLSQVRALDRFQVPXXEVNAWLVHRDPEGSVSGSQPNSGLALESSSGLQDVXGPDNGVRESEXEQGFGEDLEDLGAVAPPVSGDLXKEDIDLIDILWRQDIDLGAGREVFDYSHRQKEQDVEKELRDGGEQDXWAGEGAEALARNLLVDGEXGESFPAQVPSGEDQXALSLEECLRLLEAXCPFGENAEFPADISSIXEAVPSESEPPALQNNLLSPLLXGXESPFDLEQQWQDLMSIMEMQAMEVNXSASEILYSAPPGDPLSXNYSLAPNXPINQNVSLHQASLGGCSQDFLLFSPEVESLPVASSSXLLPLAPSNSXSLNSXFGSXNLXGLFFPPQLNGXANDXAGPELPDPLGGLLDEAMLDEISLMDLAIEEGFNPVQASQLEEEFDSDSGLSLDSSHSPSSLSSSEGSSSSSSSSSSSSSSASSSASSSFSEEGAVGYSSDSEXLDLEEAEGAVGYQPEYSKFCRMSYQDPAQLSCLPYLEHVGHNHXYNMAPSALDSADLPPPSALKKGSKEKQADFLDKQMSRDEHRARAMKIPFXNDKIINLPVEEFNELLSKYQLSEAQLSLIRDIRRRGKNKMAAQNCRKRKLDXILNLERDVEDLQRDKARLLREKVEFLRSLRQMKQKVQSLYQEVFGRLRDENGRPYSPSQYALQYAGDGSVLLIPRXMADQQARRQERKPKDRRK

SEQ ID NO: 17635 - protein, 19 aa, Homo sapiens
  MOD_RES (13)..(13): Selenocysteine
MSIMEMQAMEVNXSASEIL

SEQ ID NO: 17636 - protein, 23 aa, Homo sapiens
  MOD_RES (13)..(13): Selenocysteine
MSIMEMQAMEVNXSASEILYSAP

SEQ ID NO: 17637 - protein, 47 aa, Homo sapiens
  MOD_RES (13)..(13): Selenocysteine
  MOD_RES (30)..(30): Selenocysteine
  MOD_RES (38)..(38): Selenocysteine
MSIMEMQAMEVNXSASEILYSAPPGDPLSXNYSLAPNXPINQNVSLH

SEQ ID NO: 17638 - protein, 63 aa, Homo sapiens
  MOD_RES (13)..(13): Selenocysteine
  MOD_RES (30)..(30): Selenocysteine
  MOD_RES (38)..(38): Selenocysteine
MSIMEMQAMEVNXSASEILYSAPPGDPLSXNYSLAPNXPINQNVSLHQASLGGCSQDFLLFSP

SEQ ID NO: 17639 - protein, 161 aa, Homo sapiens
  MOD_RES (2)..(2): Selenocysteine
  MOD_RES (78)..(78): Selenocysteine
  MOD_RES (97)..(97): Selenocysteine
  MOD_RES (113)..(113): Selenocysteine
  MOD_RES (135)..(135): Selenocysteine
  MOD_RES (137)..(137): Selenocysteine
MXRLDRSSHSGGGHAKGSRPLNSLLAGHRVAQPASAPGSRASVQDIDLGAGREVFDYSHRQKEQDVEKELRDGGEQDXWAGEGAEALARNLLVDGEXGESFPAQFPADISSIXEAVPSESEPPALQNNLLSPLLXGXESPFDLEQQWQDLMSIMEMQAMEV

SEQ ID NO: 17640 - protein, 63 aa, Homo sapiens
  MOD_RES (2)..(2): Selenocysteine
MXRLDRSSHSGGGHAKGSRPLNSLLAGHRVAQPASAPGSRASVQDIDLIDILWRQDIDLGAGR

SEQ ID NO: 17641 - protein, 111 aa, Homo sapiens
  MOD_RES (2)..(2): Selenocysteine
  MOD_RES (89)..(89): Selenocysteine
  MOD_RES (108)..(108): Selenocysteine
MXRLDRSSHSGGGHAKGSRPLNSLLAGHRVAQPASAPGSRASVQDIDLIDILWRQDIDLGAGREVFDYSHRQKEQDVEKELRDGGEQDXWAGEGAEALARNLLVDGEXGES

SEQ ID NO: 17642 - protein, 616 aa, Homo sapiens
  MOD_RES (2)..(2): Selenocysteine
  MOD_RES (89)..(89): Selenocysteine
  MOD_RES (108)..(108): Selenocysteine
  MOD_RES (124)..(124): Selenocysteine
  MOD_RES (146)..(146): Selenocysteine
  MOD_RES (148)..(148): Selenocysteine
  MOD_RES (174)..(174): Selenocysteine
  MOD_RES (191)..(191): Selenocysteine
  MOD_RES (199)..(199): Selenocysteine
  MOD_RES (236)..(236): Selenocysteine
  MOD_RES (246)..(246): Selenocysteine
  MOD_RES (251)..(251): Selenocysteine
  MOD_RES (255)..(255): Selenocysteine
  MOD_RES (258)..(258): Selenocysteine
  MOD_RES (269)..(269): Selenocysteine
  MOD_RES (273)..(273): Selenocysteine
  MOD_RES (376)..(376): Selenocysteine
  MOD_RES (420)..(420): Selenocysteine
  MOD_RES (470)..(470): Selenocysteine
  MOD_RES (522)..(522): Selenocysteine
  MOD_RES (598)..(598): Selenocysteine
MXRLDRSSHSGGGHAKGSRPLNSLLAGHRVAQPASAPGSRASVQDIDLIDILWRQDIDLGAGREVFDYSHRQKEQDVEKELRDGGEQDXWAGEGAEALARNLLVDGEXGESFPAQFPADISSIXEAVPSESEPPALQNNLLSPLLXGXESPFDLEQQWQDLMSIMEMQAMEVNXSASEILYSAPPGDPLSXNYSLAPNXPINQNVSLHQASLGGCSQDFLLFSPEVESLPVASSSXLLPLAPSNSXSLNSXFGSXNLXGLFFPPQLNGXANDXAGPELPDPLGGLLDEAMLDEISLMDLAIEEGFNPVQASQLEEEFDSDSGLSLDSSHSPSSLSSSEGSSSSSSSSSSSSSSASSSASSSFSEEGAVGYSSDSEXLDLEEAEGAVGYQPEYSKFCRMSYQDPAQLSCLPYLEHVGHNHXYNMAPSALDSADLPPPSALKKGSKEKQADFLDKQMSRDEHRARAMKIPFXNDKIINLPVEEFNELLSKYQLSEAQLSLIRDIRRRGKNKMAAQNCRKRKLDXILNLERDVEDLQRDKARLLREKVEFLRSLRQMKQKVQSLYQEVFGRLRDENGRPYSPSQYALQYAGDGSVLLIPRXMADQQARRQERKPKDRRK

SEQ ID NO: 17643 - protein, 133 aa, Homo sapiens
  MOD_RES (14)..(14): Selenocysteine
  MOD_RES (58)..(58): Selenocysteine
  MOD_RES (108)..(108): Selenocysteine
SEEGAVGYSSDSEXLDLEEAEGAVGYQPEYSKFCRMSYQDPAQLSCLPYLEHVGHNHXYNMAPSALDSADLPPPSALKKGSKEKQADFLDKQMSRDEHRARAMKIPFXNDKIINLPVEELCGAKADRGEGMDL

SEQ ID NO: 17644 - protein, 265 aa, Homo sapiens
  MOD_RES (64)..(64): Selenocysteine
  MOD_RES (78)..(78): Selenocysteine
  MOD_RES (97)..(97): Selenocysteine
  MOD_RES (123)..(123): Selenocysteine
  MOD_RES (143)..(143): Selenocysteine
  MOD_RES (153)..(153): Selenocysteine
  MOD_RES (167)..(167): Selenocysteine
  MOD_RES (170)..(170): Selenocysteine
  MOD_RES (183)..(183): Selenocysteine
MDLIDILWRQDIDLGVSREVFDFSQRRKEYELEKQKKLEKERQEQLQKEQEKAFFAQLQLDEEXAEFNDSDSGISLNXSPSVASPEHSVESSSYGDXLLGLSDSEVEELDSAPGSVKQNGPKXPVHSSGDMVQPLSPSQGQSXHVHDAQCENXPEKELPVSPGHRKXPFXKDKHSSRLEAHLXRDELRAKALHIPFPVEKIINLPVVDFNEMMSKEQFNEAQLALIRDIRRRGKNKVAAQNCRKRKLENIVELEQDLDHLKDEKE

SEQ ID NO: 17645 - protein, 582 aa, Homo sapiens
  MOD_RES (64)..(64): Selenocysteine
  MOD_RES (80)..(80): Selenocysteine
  MOD_RES (110)..(110): Selenocysteine
  MOD_RES (136)..(136): Selenocysteine
  MOD_RES (144)..(144): Selenocysteine
  MOD_RES (187)..(188): Selenocysteine
  MOD_RES (198)..(198): Selenocysteine
  MOD_RES (237)..(237): Selenocysteine
  MOD_RES (244)..(244): Selenocysteine
  MOD_RES (253)..(253): Selenocysteine
  MOD_RES (256)..(256): Selenocysteine
  MOD_RES (281)..(281): Selenocysteine
  MOD_RES (313)..(313): Selenocysteine
  MOD_RES (327)..(327): Selenocysteine
  MOD_RES (346)..(346): Selenocysteine
  MOD_RES (372)..(372): Selenocysteine
  MOD_RES (392)..(392): Selenocysteine
  MOD_RES (402)..(402): Selenocysteine
  MOD_RES (416)..(416): Selenocysteine
  MOD_RES (419)..(419): Selenocysteine
  MOD_RES (432)..(432): Selenocysteine
  MOD_RES (536)..(536): Selenocysteine
  MOD_RES (563)..(563): Selenocysteine
MDLIDILWRQDIDLGVSREVFDFSQRRKEYELEKQKKLEKERQEQLQKEQEKAFFAQLQLDEEXGEFLPIQPAQHIQSEXSGSANYSQVAHIPKSDALYFDDCMQLLAQXFPFVDDNESLVPDIPGHIESPVFIAXNQAQSPEXSVAQVAPVDLDGMQQDIEQVWEELLSIPELQCLNIENDKLVEXXMVPSPEAKLXEVDNYHFYSSIPSMEKEVGNCSPHFLNAFEDSFSSILSXEDPNQLXVNSLNSDAXVNXDFGDEFYSAFIAEPSISNSMPSPAXLSHSLSELLNGPIDVSDLSLCKAFNQNHPESXAEFNDSDSGISLNXSPSVASPEHSVESSSYGDXLLGLSDSEVEELDSAPGSVKQNGPKXPVHSSGDMVQPLSPSQGQSXHVHDAQCENXPEKELPVSPGHRKXPFXKDKHSSRLEAHLXRDELRAKALHIPFPVEKIINLPVVDFNEMMSKEQFNEAQLALIRDIRRRGKNKVAAQNCRKRKLENIVELEQDLDHLKDEKEKLLKEKGENDKSLHLLKKQLSXLYLEVFSMLRDEDGKPYSPSEYSLQQXRDGNVFLVPKSKKPDVKKN

SEQ ID NO: 17646 - protein, 141 aa, Homo sapiens
  MOD_RES (64)..(64): Selenocysteine
  MOD_RES (80)..(80): Selenocysteine
  MOD_RES (110)..(110): Selenocysteine
  MOD_RES (124)..(124): Selenocysteine
  MOD_RES (137)..(137): Selenocysteine
MDLIDILWRQDIDLGVSREVFDFSQRRKEYELEKQKKLEKERQEQLQKEQEKAFFAQLQLDEEXGEFLPIQPAQHIQSEXSGSANYSQVAHIPKSDALYFDDCMQLLAQXFPFVDDNEVRYKIXWLIEKLHHNYKIXIYSM

SEQ ID NO: 17647 - protein, 146 aa, Homo sapiens
  MOD_RES (64)..(64): Selenocysteine
  MOD_RES (80)..(80): Selenocysteine
  MOD_RES (110)..(110): Selenocysteine
  MOD_RES (123)..(123): Selenocysteine
  MOD_RES (143)..(143): Selenocysteine
MDLIDILWRQDIDLGVSREVFDFSQRRKEYELEKQKKLEKERQEQLQKEQEKAFFAQLQLDEEXGEFLPIQPAQHIQSEXSGSANYSQVAHIPKSDALYFDDCMQLLAQXFPFVDDNEVSSAXFQSLVPDIPGHIESPVFIAXNQA

SEQ ID NO: 17648 - protein, 234 aa, Homo sapiens
  MOD_RES (64)..(64): Selenocysteine
  MOD_RES (80)..(80): Selenocysteine
  MOD_RES (110)..(110): Selenocysteine
  MOD_RES (123)..(123): Selenocysteine
  MOD_RES (143)..(143): Selenocysteine
  MOD_RES (151)..(151): Selenocysteine
  MOD_RES (194)..(195): Selenocysteine
  MOD_RES (205)..(205): Selenocysteine
MDLIDILWRQDIDLGVSREVFDFSQRRKEYELEKQKKLEKERQEQLQKEQEKAFFAQLQLDEEXGEFLPIQPAQHIQSEXSGSANYSQVAHIPKSDALYFDDCMQLLAQXFPFVDDNEVSSAXFQSLVPDIPGHIESPVFIAXNQAQSPEXSVAQVAPVDLDGMQQDIEQVWEELLSIPELQCLNIENDKLVEXXMVPSPEAKLXEVDNYHFYSSIPSMEKEVGNCSPHFLNAF

SEQ ID NO: 17649 - protein, 280 aa, Homo sapiens
  MOD_RES (64)..(64): Selenocysteine
  MOD_RES (80)..(80): Selenocysteine
  MOD_RES (110)..(110): Selenocysteine
  MOD_RES (123)..(123): Selenocysteine
  MOD_RES (143)..(143): Selenocysteine
  MOD_RES (151)..(151): Selenocysteine
  MOD_RES (194)..(195): Selenocysteine
  MOD_RES (205)..(205): Selenocysteine
  MOD_RES (244)..(244): Selenocysteine
  MOD_RES (251)..(251): Selenocysteine
  MOD_RES (260)..(260): Selenocysteine
  MOD_RES (263)..(263): Selenocysteine
MDLIDILWRQDIDLGVSREVFDFSQRRKEYELEKQKKLEKERQEQLQKEQEKAFFAQLQLDEEXGEFLPIQPAQHIQSEXSGSANYSQVAHIPKSDALYFDDCMQLLAQXFPFVDDNEVSSAXFQSLVPDIPGHIESPVFIAXNQAQSPEXSVAQVAPVDLDGMQQDIEQVWEELLSIPELQCLNIENDKLVEXXMVPSPEAKLXEVDNYHFYSSIPSMEKEVGNCSPHFLNAFEDSFSSILSXEDPNQLXVNSLNSDAXVNXDFGDEFYSAFIAEPSIS

SEQ ID NO: 17650 - protein, 589 aa, Homo sapiens
  MOD_RES (64)..(64): Selenocysteine
  MOD_RES (80)..(80): Selenocysteine
  MOD_RES (110)..(110): Selenocysteine
  MOD_RES (123)..(123): Selenocysteine
  MOD_RES (143)..(143): Selenocysteine
  MOD_RES (151)..(151): Selenocysteine
  MOD_RES (194)..(195): Selenocysteine
  MOD_RES (205)..(205): Selenocysteine
  MOD_RES (244)..(244): Selenocysteine
  MOD_RES (251)..(251): Selenocysteine
  MOD_RES (260)..(260): Selenocysteine
  MOD_RES (263)..(263): Selenocysteine
  MOD_RES (288)..(288): Selenocysteine
  MOD_RES (320)..(320): Selenocysteine
  MOD_RES (334)..(334): Selenocysteine
  MOD_RES (353)..(353): Selenocysteine
  MOD_RES (379)..(379): Selenocysteine
  MOD_RES (399)..(399): Selenocysteine
  MOD_RES (409)..(409): Selenocysteine
  MOD_RES (423)..(423): Selenocysteine
  MOD_RES (426)..(426): Selenocysteine
  MOD_RES (439)..(439): Selenocysteine
  MOD_RES (543)..(543): Selenocysteine
  MOD_RES (570)..(570): Selenocysteine
MDLIDILWRQDIDLGVSREVFDFSQRRKEYELEKQKKLEKERQEQLQKEQEKAFFAQLQLDEEXGEFLPIQPAQHIQSEXSGSANYSQVAHIPKSDALYFDDCMQLLAQXFPFVDDNEVSSAXFQSLVPDIPGHIESPVFIAXNQAQSPEXSVAQVAPVDLDGMQQDIEQVWEELLSIPELQCLNIENDKLVEXXMVPSPEAKLXEVDNYHFYSSIPSMEKEVGNCSPHFLNAFEDSFSSILSXEDPNQLXVNSLNSDAXVNXDFGDEFYSAFIAEPSISNSMPSPAXLSHSLSELLNGPIDVSDLSLCKAFNQNHPESXAEFNDSDSGISLNXSPSVASPEHSVESSSYGDXLLGLSDSEVEELDSAPGSVKQNGPKXPVHSSGDMVQPLSPSQGQSXHVHDAQCENXPEKELPVSPGHRKXPFXKDKHSSRLEAHLXRDELRAKALHIPFPVEKIINLPVVDFNEMMSKEQFNEAQLALIRDIRRRGKNKVAAQNCRKRKLENIVELEQDLDHLKDEKEKLLKEKGENDKSLHLLKKQLSXLYLEVFSMLRDEDGKPYSPSEYSLQQXRDGNVFLVPKSKKPDVKKN

SEQ ID NO: 17651 - protein, 265 aa, Homo sapiens
  MOD_RES (11)..(11): Selenocysteine
  MOD_RES (14)..(14): Selenocysteine
  MOD_RES (79)..(79): Selenocysteine
  MOD_RES (95)..(95): Selenocysteine
  MOD_RES (125)..(125): Selenocysteine
  MOD_RES (138)..(138): Selenocysteine
  MOD_RES (158)..(158): Selenocysteine
  MOD_RES (166)..(166): Selenocysteine
  MOD_RES (209)..(210): Selenocysteine
  MOD_RES (220)..(220): Selenocysteine
  MOD_RES (259)..(259): Selenocysteine
MIVSFLRPPQXCGXDMDLIDILWRQDIDLGVSREVFDFSQRRKEYELEKQKKLEKERQEQLQKEQEKAFFAQLQLDEEXGEFLPIQPAQHIQSEXSGSANYSQVAHIPKSDALYFDDCMQLLAQXFPFVDDNEVSSAXFQSLVPDIPGHIESPVFIAXNQAQSPEXSVAQVAPVDLDGMQQDIEQVWEELLSIPELQCLNIENDKLVEXXMVPSPEAKLXEVDNYHFYSSIPSMEKEVGNCSPHFLNAFEDSFSSILSXEDPNQL

SEQ ID NO: 17652 - protein, 605 aa, Homo sapiens
  MOD_RES (80)..(80): Selenocysteine
  MOD_RES (96)..(96): Selenocysteine
  MOD_RES (126)..(126): Selenocysteine
  MOD_RES (139)..(139): Selenocysteine
  MOD_RES (159)..(159): Selenocysteine
  MOD_RES (167)..(167): Selenocysteine
  MOD_RES (210)..(211): Selenocysteine
  MOD_RES (221)..(221): Selenocysteine
  MOD_RES (260)..(260): Selenocysteine
  MOD_RES (267)..(267): Selenocysteine
  MOD_RES (276)..(276): Selenocysteine
  MOD_RES (279)..(279): Selenocysteine
  MOD_RES (304)..(304): Selenocysteine
  MOD_RES (336)..(336): Selenocysteine
  MOD_RES (350)..(350): Selenocysteine
  MOD_RES (369)..(369): Selenocysteine
  MOD_RES (395)..(395): Selenocysteine
  MOD_RES (415)..(415): Selenocysteine
  MOD_RES (425)..(425): Selenocysteine
  MOD_RES (439)..(439): Selenocysteine
  MOD_RES (442)..(442): Selenocysteine
  MOD_RES (455)..(455): Selenocysteine
  MOD_RES (559)..(559): Selenocysteine
  MOD_RES (586)..(586): Selenocysteine
MMDLELPPPGLPSQQDMDLIDILWRQDIDLGVSREVFDFSQRRKEYELEKQKKLEKERQEQLQKEQEKAFFAQLQLDEEXGEFLPIQPAQHIQSEXSGSANYSQVAHIPKSDALYFDDCMQLLAQXFPFVDDNEVSSAXFQSLVPDIPGHIESPVFIAXNQAQSPEXSVAQVAPVDLDGMQQDIEQVWEELLSIPELQCLNIENDKLVEXXMVPSPEAKLXEVDNYHFYSSIPSMEKEVGNCSPHFLNAFEDSFSSILSXEDPNQLXVNSLNSDAXVNXDFGDEFYSAFIAEPSISNSMPSPAXLSHSLSELLNGPIDVSDLSLCKAFNQNHPESXAEFNDSDSGISLNXSPSVASPEHSVESSSYGDXLLGLSDSEVEELDSAPGSVKQNGPKXPVHSSGDMVQPLSPSQGQSXHVHDAQCENXPEKELPVSPGHRKXPFXKDKHSSRLEAHLXRDELRAKALHIPFPVEKIINLPVVDFNEMMSKEQFNEAQLALIRDIRRRGKNKVAAQNCRKRKLENIVELEQDLDHLKDEKEKLLKEKGENDKSLHLLKKQLSXLYLEVFSMLRDEDGKPYSPSEYSLQQXRDGNVFLVPKSKKPDVKKN

SEQ ID NO: 17653 - protein, 68 aa, Homo sapiens
  MOD_RES (57)..(57): Selenocysteine
  MOD_RES (64)..(64): Selenocysteine
MMDLELPPPGLPSQQDMDLIDNYHFYSSIPSMEKEVGNCSPHFLNAFEDSFSSILSXEDPNQLXVNSL

SEQ ID NO: 17654 - protein, 47 aa, Homo sapiens
  MOD_RES (1)..(1): Selenocysteine
  MOD_RES (38)..(38): Selenocysteine
  MOD_RES (41)..(41): Selenocysteine
XSVAQVAPVDLDGMQQDIEQVWEELLSIPELQWRQGFXMLXRVVWNS

SEQ ID NO: 17655 - protein, 694 aa, Homo sapiens
  MOD_RES (18)..(18): Selenocysteine
  MOD_RES (40)..(40): Selenocysteine
  MOD_RES (106)..(106): Selenocysteine
  MOD_RES (136)..(136): Selenocysteine
  MOD_RES (178)..(178): Selenocysteine
  MOD_RES (244)..(245): Selenocysteine
  MOD_RES (256)..(256): Selenocysteine
  MOD_RES (258)..(258): Selenocysteine
  MOD_RES (326)..(326): Selenocysteine
  MOD_RES (332)..(332): Selenocysteine
  MOD_RES (335)..(335): Selenocysteine
  MOD_RES (349)..(350): Selenocysteine
  MOD_RES (355)..(355): Selenocysteine
  MOD_RES (359)..(359): Selenocysteine
  MOD_RES (362)..(362): Selenocysteine
  MOD_RES (376)..(376): Selenocysteine
  MOD_RES (399)..(399): Selenocysteine
  MOD_RES (430)..(430): Selenocysteine
  MOD_RES (451)..(451): Selenocysteine
  MOD_RES (490)..(490): Selenocysteine
  MOD_RES (499)..(499): Selenocysteine
  MOD_RES (505)..(505): Selenocysteine
  MOD_RES (510)..(510): Selenocysteine
  MOD_RES (531)..(531): Selenocysteine
  MOD_RES (572)..(572): Selenocysteine
  MOD_RES (619)..(619): Selenocysteine
  MOD_RES (667)..(667): Selenocysteine
  MOD_RES (688)..(688): Selenocysteine
MKHLKRWWSAGGGLLHLXLLLSLAGLRVDLDLYLLLPPPXLLQDELLFLGGPASSAYALSPFSASGGWGRAGHLHPKGRELDPAAPPEGQLLREVRALGVPFVPRXSVDAWLVHSVAAGSADEAHGLLGAAAASSXGGAGASVDGGSQAVQGGGGDPRAARSGPLDAGEEEKAPAEPXAQVPDAGGCASEENGVLREKHEAVDHSSQHEENEERVSAQKENSLQQNDDDENKIAEKPDWEAEKXXESRNERHLNGXDXSFSLEDLFQLLSSQPENSLEGISLGDIPLPGSISDGMNSSAHYHVNFSQAISQDVNLHEAILLCPNNXFRRDPXARXSQSQEPFLQLNSHXXNPEQXLPGXNLXGFLSPVDNHMRNLXSQDLLYDLDINIFDEINLMSLAXEDNFDPIDVSQLFDEPDSDSGLSLDSSHNNXSVIKSNSSHSVCDEGAIGYCXDHESSSHHDLEGAVGGYYPEPSKLCHLDQSDSDFHGDLXFQHVFHNHXYHLQPXAPESXSEPFPWPGKSQKIRSRYLEDXDRNLSRDEQRAKALHIPFSVDEIVGMPVDSFNSMLSRYYLXDLQVSLIRDIRRRGKNKVAAQNCRKRKLDIILNLEDDVCNLQAKKEXLKREQAQCNKAINIMKQKLHDLYHDIFSRLRDDQGRPVNPNHYALQCXHDGSILIVPKELVASGHKKEXQKGKRK

SEQ ID NO: 17656 - protein, 83 aa, Homo sapiens
  MOD_RES (34)..(35): Selenocysteine
  MOD_RES (46)..(46): Selenocysteine
  MOD_RES (48)..(48): Selenocysteine
  MOD_RES (72)..(72): Selenocysteine
  MOD_RES (80)..(80): Selenocysteine
NEERVSAQKENSLQQNDDDENKIAEKPDWEAEKXXESRNERHLNGXDXSFSLEDLFQLLSSQPENSLEVIGXLAFILAGXYLH

SEQ ID NO: 17657 - protein, 501 aa, Homo sapiens
  MOD_RES (21)..(21): Selenocysteine
  MOD_RES (86)..(86): Selenocysteine
  MOD_RES (88)..(88): Selenocysteine
  MOD_RES (137)..(137): Selenocysteine
  MOD_RES (211)..(211): Selenocysteine
  MOD_RES (218)..(218): Selenocysteine
  MOD_RES (226)..(226): Selenocysteine
  MOD_RES (232)..(232): Selenocysteine
  MOD_RES (261)..(261): Selenocysteine
  MOD_RES (264)..(264): Selenocysteine
  MOD_RES (267)..(267): Selenocysteine
  MOD_RES (287)..(287): Selenocysteine
  MOD_RES (313)..(314): Selenocysteine
  MOD_RES (331)..(331): Selenocysteine
  MOD_RES (336)..(336): Selenocysteine
  MOD_RES (339)..(339): Selenocysteine
  MOD_RES (347)..(347): Selenocysteine
  MOD_RES (356)..(356): Selenocysteine
  MOD_RES (359)..(359): Selenocysteine
  MOD_RES (364)..(364): Selenocysteine
  MOD_RES (387)..(387): Selenocysteine
  MOD_RES (426)..(426): Selenocysteine
  MOD_RES (448)..(448): Selenocysteine
  MOD_RES (452)..(453): Selenocysteine
  MOD_RES (455)..(455): Selenocysteine
  MOD_RES (463)..(463): Selenocysteine
  MOD_RES (466)..(466): Selenocysteine
  MOD_RES (469)..(469): Selenocysteine
  MOD_RES (472)..(472): Selenocysteine
  MOD_RES (495)..(495): Selenocysteine
MDEFHPFIEALLPHVRAFAYXWFNLQARKRKYFKKHEKRMSKEEERAVKDELLSEKPEVKQKWASRLLAKLRKDIRPEYREDFVLXVXGKKPPCCVLSNPDQKGKMRRIDCLRQADKVWRLDLVMVILFKGIPLESXDGERLVKSPQCSNPGLCVQPHHIGVSVKELDLYLAYFVHAADSSQSESPSQPSDADIKDQPENGHLGFQDSFVXSGVFSVXELVRVSQXPIAAGXGPNFSLSDLESSSYYSMSPGAMRRSLPSXSSXSSXKRLKSVEDEMDSPGEEPFYXGQGRSPGSGSQSSGWHEVEPGMPSPXXLKKSEKSGFSSPSPSQXSSLGXAFXQHHRPVIXGPRASPHAXPSXLHFPXSPIIQQPGPYFSHPAIRYHPQEXLKEFVQLVCPDAGQQAGQVGFLNPNGSSQGKVHNPFLPXPMLPPPPPPPMARPVPLPVPDXKPPXXSXEGGAASPXSPXYSXPSXSPANRFVSVGPRDPSFVNIPQQXQSWYLG

SEQ ID NO: 17658 - protein, 157 aa, Homo sapiens
  MOD_RES (12)..(12): Selenocysteine
  MOD_RES (15)..(15): Selenocysteine
  MOD_RES (20)..(20): Selenocysteine
  MOD_RES (43)..(43): Selenocysteine
  MOD_RES (82)..(82): Selenocysteine
  MOD_RES (104)..(104): Selenocysteine
  MOD_RES (108)..(109): Selenocysteine
  MOD_RES (111)..(111): Selenocysteine
  MOD_RES (119)..(119): Selenocysteine
  MOD_RES (122)..(122): Selenocysteine
  MOD_RES (125)..(125): Selenocysteine
  MOD_RES (128)..(128): Selenocysteine
  MOD_RES (151)..(151): Selenocysteine
MFSFPAASPHAXPSXLHFPXSPIIQQPGPYFSHPAIRYHPQEXLKEFVQLVCPDAGQQAGQVGFLNPNGSSQGKVHNPFLPXPMLPPPPPPPMARPVPLPVPDXKPPXXSXEGGAASPXSPXYSXPSXSPANRFVSVGPRDPSFVNIPQQXQSWYLG

SEQ ID NO: 17659 - protein, 532 aa, Homo sapiens
  MOD_RES (29)..(29): Selenocysteine
  MOD_RES (52)..(52): Selenocysteine
  MOD_RES (117)..(117): Selenocysteine
  MOD_RES (119)..(119): Selenocysteine
  MOD_RES (168)..(168): Selenocysteine
  MOD_RES (242)..(242): Selenocysteine
  MOD_RES (249)..(249): Selenocysteine
  MOD_RES (257)..(257): Selenocysteine
  MOD_RES (263)..(263): Selenocysteine
  MOD_RES (292)..(292): Selenocysteine
  MOD_RES (295)..(295): Selenocysteine
  MOD_RES (298)..(298): Selenocysteine
  MOD_RES (318)..(318): Selenocysteine
  MOD_RES (344)..(345): Selenocysteine
  MOD_RES (362)..(362): Selenocysteine
  MOD_RES (367)..(367): Selenocysteine
  MOD_RES (370)..(370): Selenocysteine
  MOD_RES (378)..(378): Selenocysteine
  MOD_RES (387)..(387): Selenocysteine
  MOD_RES (390)..(390): Selenocysteine
  MOD_RES (395)..(395): Selenocysteine
  MOD_RES (418)..(418): Selenocysteine
  MOD_RES (457)..(457): Selenocysteine
  MOD_RES (479)..(479): Selenocysteine
  MOD_RES (483)..(484): Selenocysteine
  MOD_RES (486)..(486): Selenocysteine
  MOD_RES (494)..(494): Selenocysteine
  MOD_RES (497)..(497): Selenocysteine
  MOD_RES (500)..(500): Selenocysteine
  MOD_RES (503)..(503): Selenocysteine
  MOD_RES (526)..(526): Selenocysteine
MKLADSVMAGKASDGSIKWQLCYDISARXWWMDEFHPFIEALLPHVRAFAYXWFNLQARKRKYFKKHEKRMSKEEERAVKDELLSEKPEVKQKWASRLLAKLRKDIRPEYREDFVLXVXGKKPPCCVLSNPDQKGKMRRIDCLRQADKVWRLDLVMVILFKGIPLESXDGERLVKSPQCSNPGLCVQPHHIGVSVKELDLYLAYFVHAADSSQSESPSQPSDADIKDQPENGHLGFQDSFVXSGVFSVXELVRVSQXPIAAGXGPNFSLSDLESSSYYSMSPGAMRRSLPSXSSXSSXKRLKSVEDEMDSPGEEPFYXGQGRSPGSGSQSSGWHEVEPGMPSPXXLKKSEKSGFSSPSPSQXSSLGXAFXQHHRPVIXGPRASPHAXPSXLHFPXSPIIQQPGPYFSHPAIRYHPQEXLKEFVQLVCPDAGQQAGQVGFLNPNGSSQGKVHNPFLPXPMLPPPPPPPMARPVPLPVPDXKPPXXSXEGGAASPXSPXYSXPSXSPANRFVSVGPRDPSFVNIPQQXQSWYLG

SEQ ID NO: 17660 - protein, 554 aa, Homo sapiens
  MOD_RES (16)..(16): Selenocysteine
  MOD_RES (25)..(25): Selenocysteine
  MOD_RES (37)..(37): Selenocysteine
  MOD_RES (53)..(53): Selenocysteine
  MOD_RES (74)..(74): Selenocysteine
  MOD_RES (139)..(139): Selenocysteine
  MOD_RES (141)..(141): Selenocysteine
  MOD_RES (190)..(190): Selenocysteine
  MOD_RES (264)..(264): Selenocysteine
  MOD_RES (271)..(271): Selenocysteine
  MOD_RES (279)..(279): Selenocysteine
  MOD_RES (285)..(285): Selenocysteine
  MOD_RES (314)..(314): Selenocysteine
  MOD_RES (317)..(317): Selenocysteine
  MOD_RES (320)..(320): Selenocysteine
  MOD_RES (340)..(340): Selenocysteine
  MOD_RES (366)..(367): Selenocysteine
  MOD_RES (384)..(384): Selenocysteine
  MOD_RES (389)..(389): Selenocysteine
  MOD_RES (392)..(392): Selenocysteine
  MOD_RES (400)..(400): Selenocysteine
  MOD_RES (409)..(409): Selenocysteine
  MOD_RES (412)..(412): Selenocysteine
  MOD_RES (417)..(417): Selenocysteine
  MOD_RES (440)..(440): Selenocysteine
  MOD_RES (479)..(479): Selenocysteine
  MOD_RES (501)..(501): Selenocysteine
  MOD_RES (505)..(506): Selenocysteine
  MOD_RES (508)..(508): Selenocysteine
  MOD_RES (516)..(516): Selenocysteine
  MOD_RES (519)..(519): Selenocysteine
  MOD_RES (522)..(522): Selenocysteine
  MOD_RES (525)..(525): Selenocysteine
  MOD_RES (548)..(548): Selenocysteine
MQMCRPASSSVLYVPXRWPGGCGAXWQSCPSPPPRRXRIPQRPAVMYSPLCLXQDEFHPFIEALLPHVRAFAYXWFNLQARKRKYFKKHEKRMSKEEERAVKDELLSEKPEVKQKWASRLLAKLRKDIRPEYREDFVLXVXGKKPPCCVLSNPDQKGKMRRIDCLRQADKVWRLDLVMVILFKGIPLESXDGERLVKSPQCSNPGLCVQPHHIGVSVKELDLYLAYFVHAADSSQSESPSQPSDADIKDQPENGHLGFQDSFVXSGVFSVXELVRVSQXPIAAGXGPNFSLSDLESSSYYSMSPGAMRRSLPSXSSXSSXKRLKSVEDEMDSPGEEPFYXGQGRSPGSGSQSSGWHEVEPGMPSPXXLKKSEKSGFSSPSPSQXSSLGXAFXQHHRPVIXGPRASPHAXPSXLHFPXSPIIQQPGPYFSHPAIRYHPQEXLKEFVQLVCPDAGQQAGQVGFLNPNGSSQGKVHNPFLPXPMLPPPPPPPMARPVPLPVPDXKPPXXSXEGGAASPXSPXYSXPSXSPANRFVSVGPRDPSFVNIPQQXQSWYLG

SEQ ID NO: 17661 - protein, 186 aa, Homo sapiens
  MOD_RES (47)..(47): Selenocysteine
  MOD_RES (49)..(49): Selenocysteine
  MOD_RES (98)..(98): Selenocysteine
  MOD_RES (172)..(172): Selenocysteine
  MOD_RES (179)..(179): Selenocysteine
MSKEEERAVKDELLSEKPEVKQKWASRLLAKLRKDIRPEYREDFVLXVXGKKPPCCVLSNPDQKGKMRRIDCLRQADKVWRLDLVMVILFKGIPLESXDGERLVKSPQCSNPGLCVQPHHIGVSVKELDLYLAYFVHAADSSQSESPSQPSDADIKDQPENGHLGFQDSFVXSGVFSVXELVRVSQ

SEQ ID NO: 17662 - protein, 466 aa, Homo sapiens
  MOD_RES (8)..(8): Selenocysteine
  MOD_RES (29)..(29): Selenocysteine
  MOD_RES (94)..(94): Selenocysteine
  MOD_RES (96)..(96): Selenocysteine
  MOD_RES (145)..(145): Selenocysteine
  MOD_RES (219)..(219): Selenocysteine
  MOD_RES (226)..(226): Selenocysteine
  MOD_RES (234)..(234): Selenocysteine
  MOD_RES (240)..(240): Selenocysteine
  MOD_RES (269)..(269): Selenocysteine
  MOD_RES (272)..(272): Selenocysteine
  MOD_RES (275)..(275): Selenocysteine
  MOD_RES (295)..(295): Selenocysteine
  MOD_RES (321)..(321): Selenocysteine
  MOD_RES (324)..(324): Selenocysteine
  MOD_RES (329)..(329): Selenocysteine
  MOD_RES (352)..(352): Selenocysteine
  MOD_RES (391)..(391): Selenocysteine
  MOD_RES (413)..(413): Selenocysteine
  MOD_RES (417)..(418): Selenocysteine
  MOD_RES (420)..(420): Selenocysteine
  MOD_RES (428)..(428): Selenocysteine
  MOD_RES (431)..(431): Selenocysteine
  MOD_RES (434)..(434): Selenocysteine
  MOD_RES (437)..(437): Selenocysteine
  MOD_RES (460)..(460): Selenocysteine
MYSPLCLXQDEFHPFIEALLPHVRAFAYXWFNLQARKRKYFKKHEKRMSKEEERAVKDELLSEKPEVKQKWASRLLAKLRKDIRPEYREDFVLXVXGKKPPCCVLSNPDQKGKMRRIDCLRQADKVWRLDLVMVILFKGIPLESXDGERLVKSPQCSNPGLCVQPHHIGVSVKELDLYLAYFVHAADSSQSESPSQPSDADIKDQPENGHLGFQDSFVXSGVFSVXELVRVSQXPIAAGXGPNFSLSDLESSSYYSMSPGAMRRSLPSXSSXSSXKRLKSVEDEMDSPGEEPFYXGQGRSPGSGSQSSGWHEVEPASPHAXPSXLHFPXSPIIQQPGPYFSHPAIRYHPQEXLKEFVQLVCPDAGQQAGQVGFLNPNGSSQGKVHNPFLPXPMLPPPPPPPMARPVPLPVPDXKPPXXSXEGGAASPXSPXYSXPSXSPANRFVSVGPRDPSFVNIPQQXQSWYLG

SEQ ID NO: 17663 - protein, 498 aa, Homo sapiens
  MOD_RES (8)..(8): Selenocysteine
  MOD_RES (29)..(29): Selenocysteine
  MOD_RES (94)..(94): Selenocysteine
  MOD_RES (96)..(96): Selenocysteine
  MOD_RES (145)..(145): Selenocysteine
  MOD_RES (219)..(219): Selenocysteine
  MOD_RES (226)..(226): Selenocysteine
  MOD_RES (234)..(234): Selenocysteine
  MOD_RES (240)..(240): Selenocysteine
  MOD_RES (269)..(269): Selenocysteine
  MOD_RES (272)..(272): Selenocysteine
  MOD_RES (275)..(275): Selenocysteine
  MOD_RES (295)..(295): Selenocysteine
  MOD_RES (321)..(322): Selenocysteine
  MOD_RES (339)..(339): Selenocysteine
  MOD_RES (344)..(344): Selenocysteine
  MOD_RES (347)..(347): Selenocysteine
  MOD_RES (355)..(355): Selenocysteine
  MOD_RES (364)..(364): Selenocysteine
  MOD_RES (367)..(367): Selenocysteine
  MOD_RES (372)..(372): Selenocysteine
  MOD_RES (395)..(395): Selenocysteine
  MOD_RES (434)..(434): Selenocysteine
  MOD_RES (456)..(456): Selenocysteine
  MOD_RES (460)..(461): Selenocysteine
  MOD_RES (463)..(463): Selenocysteine
  MOD_RES (471)..(471): Selenocysteine
  MOD_RES (497)..(497): Selenocysteine
MYSPLCLXQDEFHPFIEALLPHVRAFAYXWFNLQARKRKYFKKHEKRMSKEEERAVKDELLSEKPEVKQKWASRLLAKLRKDIRPEYREDFVLXVXGKKPPCCVLSNPDQKGKMRRIDCLRQADKVWRLDLVMVILFKGIPLESXDGERLVKSPQCSNPGLCVQPHHIGVSVKELDLYLAYFVHAADSSQSESPSQPSDADIKDQPENGHLGFQDSFVXSGVFSVXELVRVSQXPIAAGXGPNFSLSDLESSSYYSMSPGAMRRSLPSXSSXSSXKRLKSVEDEMDSPGEEPFYXGQGRSPGSGSQSSGWHEVEPGMPSPXXLKKSEKSGFSSPSPSQXSSLGXAFXQHHRPVIXGPRASPHAXPSXLHFPXSPIIQQPGPYFSHPAIRYHPQEXLKEFVQLVCPDAGQQAGQVGFLNPNGSSQGKVHNPFLPXPMLPPPPPPPMARPVPLPVPDXKPPXXSXEGGAASPXSPILVPGIKVAASHHPPDRPPDPFSXL

SEQ ID NO: 17664 - protein, 509 aa, Homo sapiens
  MOD_RES (8)..(8): Selenocysteine
  MOD_RES (29)..(29): Selenocysteine
  MOD_RES (94)..(94): Selenocysteine
  MOD_RES (96)..(96): Selenocysteine
  MOD_RES (145)..(145): Selenocysteine
  MOD_RES (219)..(219): Selenocysteine
  MOD_RES (226)..(226): Selenocysteine
  MOD_RES (234)..(234): Selenocysteine
  MOD_RES (240)..(240): Selenocysteine
  MOD_RES (269)..(269): Selenocysteine
  MOD_RES (272)..(272): Selenocysteine
  MOD_RES (275)..(275): Selenocysteine
  MOD_RES (295)..(295): Selenocysteine
  MOD_RES (321)..(322): Selenocysteine
  MOD_RES (339)..(339): Selenocysteine
  MOD_RES (344)..(344): Selenocysteine
  MOD_RES (347)..(347): Selenocysteine
  MOD_RES (355)..(355): Selenocysteine
  MOD_RES (364)..(364): Selenocysteine
  MOD_RES (367)..(367): Selenocysteine
  MOD_RES (372)..(372): Selenocysteine
  MOD_RES (395)..(395): Selenocysteine
  MOD_RES (434)..(434): Selenocysteine
  MOD_RES (456)..(456): Selenocysteine
  MOD_RES (460)..(461): Selenocysteine
  MOD_RES (463)..(463): Selenocysteine
  MOD_RES (471)..(471): Selenocysteine
  MOD_RES (474)..(474): Selenocysteine
  MOD_RES (477)..(477): Selenocysteine
  MOD_RES (480)..(480): Selenocysteine
  MOD_RES (503)..(503): Selenocysteine
MYSPLCLXQDEFHPFIEALLPHVRAFAYXWFNLQARKRKYFKKHEKRMSKEEERAVKDELLSEKPEVKQKWASRLLAKLRKDIRPEYREDFVLXVXGKKPPCCVLSNPDQKGKMRRIDCLRQADKVWRLDLVMVILFKGIPLESXDGERLVKSPQCSNPGLCVQPHHIGVSVKELDLYLAYFVHAADSSQSESPSQPSDADIKDQPENGHLGFQDSFVXSGVFSVXELVRVSQXPIAAGXGPNFSLSDLESSSYYSMSPGAMRRSLPSXSSXSSXKRLKSVEDEMDSPGEEPFYXGQGRSPGSGSQSSGWHEVEPGMPSPXXLKKSEKSGFSSPSPSQXSSLGXAFXQHHRPVIXGPRASPHAXPSXLHFPXSPIIQQPGPYFSHPAIRYHPQEXLKEFVQLVCPDAGQQAGQVGFLNPNGSSQGKVHNPFLPXPMLPPPPPPPMARPVPLPVPDXKPPXXSXEGGAASPXSPXYSXPSXSPANRFVSVGPRDPSFVNIPQQXQSWYLG

SEQ ID NO: 17665 - protein, 487 aa, Homo sapiens
  MOD_RES (8)..(8): Selenocysteine
  MOD_RES (29)..(29): Selenocysteine
  MOD_RES (94)..(94): Selenocysteine
  MOD_RES (96)..(96): Selenocysteine
  MOD_RES (145)..(145): Selenocysteine
  MOD_RES (197)..(197): Selenocysteine
  MOD_RES (204)..(204): Selenocysteine
  MOD_RES (212)..(212): Selenocysteine
  MOD_RES (218)..(218): Selenocysteine
  MOD_RES (247)..(247): Selenocysteine
  MOD_RES (250)..(250): Selenocysteine
  MOD_RES (253)..(253): Selenocysteine
  MOD_RES (273)..(273): Selenocysteine
  MOD_RES (299)..(300): Selenocysteine
  MOD_RES (317)..(317): Selenocysteine
  MOD_RES (322)..(322): Selenocysteine
  MOD_RES (325)..(325): Selenocysteine
  MOD_RES (333)..(333): Selenocysteine
  MOD_RES (342)..(342): Selenocysteine
  MOD_RES (345)..(345): Selenocysteine
  MOD_RES (350)..(350): Selenocysteine
  MOD_RES (373)..(373): Selenocysteine
  MOD_RES (412)..(412): Selenocysteine
  MOD_RES (434)..(434): Selenocysteine
  MOD_RES (438)..(439): Selenocysteine
  MOD_RES (441)..(441): Selenocysteine
  MOD_RES (449)..(449): Selenocysteine
  MOD_RES (452)..(452): Selenocysteine
  MOD_RES (455)..(455): Selenocysteine
  MOD_RES (458)..(458): Selenocysteine
  MOD_RES (481)..(481): Selenocysteine
MYSPLCLXQDEFHPFIEALLPHVRAFAYXWFNLQARKRKYFKKHEKRMSKEEERAVKDELLSEKPEVKQKWASRLLAKLRKDIRPEYREDFVLXVXGKKPPCCVLSNPDQKGKMRRIDCLRQADKVWRLDLVMVILFKGIPLESXDGERLVKSPQCSNPGLCVQPHHIGVSVKELDLYLAYFVHAAGHLGFQDSFVXSGVFSVXELVRVSQXPIAAGXGPNFSLSDLESSSYYSMSPGAMRRSLPSXSSXSSXKRLKSVEDEMDSPGEEPFYXGQGRSPGSGSQSSGWHEVEPGMPSPXXLKKSEKSGFSSPSPSQXSSLGXAFXQHHRPVIXGPRASPHAXPSXLHFPXSPIIQQPGPYFSHPAIRYHPQEXLKEFVQLVCPDAGQQAGQVGFLNPNGSSQGKVHNPFLPXPMLPPPPPPPMARPVPLPVPDXKPPXXSXEGGAASPXSPXYSXPSXSPANRFVSVGPRDPSFVNIPQQXQSWYLG

SEQ ID NO: 17666 - protein, 380 aa, Homo sapiens
  MOD_RES (8)..(8): Selenocysteine
  MOD_RES (29)..(29): Selenocysteine
  MOD_RES (94)..(94): Selenocysteine
  MOD_RES (96)..(96): Selenocysteine
  MOD_RES (145)..(145): Selenocysteine
  MOD_RES (192)..(193): Selenocysteine
  MOD_RES (210)..(210): Selenocysteine
  MOD_RES (215)..(215): Selenocysteine
  MOD_RES (218)..(218): Selenocysteine
  MOD_RES (226)..(226): Selenocysteine
  MOD_RES (235)..(235): Selenocysteine
  MOD_RES (238)..(238): Selenocysteine
  MOD_RES (243)..(243): Selenocysteine
  MOD_RES (266)..(266): Selenocysteine
  MOD_RES (305)..(305): Selenocysteine
  MOD_RES (327)..(327): Selenocysteine
  MOD_RES (331)..(332): Selenocysteine
  MOD_RES (334)..(334): Selenocysteine
  MOD_RES (342)..(342): Selenocysteine
  MOD_RES (345)..(345): Selenocysteine
  MOD_RES (348)..(348): Selenocysteine
  MOD_RES (351)..(351): Selenocysteine
  MOD_RES (374)..(374): Selenocysteine
MYSPLCLXQDEFHPFIEALLPHVRAFAYXWFNLQARKRKYFKKHEKRMSKEEERAVKDELLSEKPEVKQKWASRLLAKLRKDIRPEYREDFVLXVXGKKPPCCVLSNPDQKGKMRRIDCLRQADKVWRLDLVMVILFKGIPLESXDGERLVKSPQCSNPGLCVQPHHIGVSVKELDLYLAYFVHAAGMPSPXXLKKSEKSGFSSPSPSQXSSLGXAFXQHHRPVIXGPRASPHAXPSXLHFPXSPIIQQPGPYFSHPAIRYHPQEXLKEFVQLVCPDAGQQAGQVGFLNPNGSSQGKVHNPFLPXPMLPPPPPPPMARPVPLPVPDXKPPXXSXEGGAASPXSPXYSXPSXSPANRFVSVGPRDPSFVNIPQQXQSWYLG

SEQ ID NO: 17667 - protein, 95 aa, Homo sapiens
  MOD_RES (1)..(1): Any amino acid
  MOD_RES (49)..(49): Selenocysteine
XKKPPCCVLSNPDQKGKMRRIDCLRQADKVWRLDLVMVILFKGIPLESXDGERLVKSPQCSNPGLCVQPHHIGVSVKELDLYLAYFVHAAGGVGR

SEQ ID NO: 17668 - protein, 184 aa, Homo sapiens
  MOD_RES (1)..(1): Any amino acid
  MOD_RES (7)..(7): Selenocysteine
  MOD_RES (36)..(36): Selenocysteine
  MOD_RES (39)..(39): Selenocysteine
  MOD_RES (42)..(42): Selenocysteine
  MOD_RES (62)..(62): Selenocysteine
  MOD_RES (88)..(89): Selenocysteine
  MOD_RES (106)..(106): Selenocysteine
  MOD_RES (111)..(111): Selenocysteine
  MOD_RES (114)..(114): Selenocysteine
  MOD_RES (122)..(122): Selenocysteine
  MOD_RES (149)..(149): Selenocysteine
  MOD_RES (152)..(152): Selenocysteine
  MOD_RES (157)..(157): Selenocysteine
  MOD_RES (180)..(180): Selenocysteine
XPIAAGXGPNFSLSDLESSSYYSMSPGAMRRSLPSXSSXSSXKRLKSVEDEMDSPGEEPFYXGQGRSPGSGSQSSGWHEVEPGMPSPXXLKKSEKSGFSSPSPSQXSSLGXAFXQHHRPVIXGPREFKMAPSILGSPFWKVYSASPHAXPSXLHFPXSPIIQQPGPYFSHPAIRYHPQEXLKEF

SEQ ID NO: 17669 - protein, 47 aa, Homo sapiens
  MOD_RES (1)..(1): Any amino acid
  MOD_RES (2)..(2): Selenocysteine
  MOD_RES (6)..(7): Selenocysteine
  MOD_RES (9)..(9): Selenocysteine
  MOD_RES (17)..(17): Selenocysteine
  MOD_RES (24)..(24): Selenocysteine
  MOD_RES (31)..(31): Selenocysteine
XXKPPXXSXEGGAASPXSPRCHMXGRVLWEXLISLRWCGPEQSWYLG

SEQ ID NO: 17670 - protein, 411 aa, Homo sapiens
  MOD_RES (21)..(21): Selenocysteine
  MOD_RES (86)..(86): Selenocysteine
  MOD_RES (88)..(88): Selenocysteine
  MOD_RES (137)..(137): Selenocysteine
  MOD_RES (149)..(149): Selenocysteine
  MOD_RES (161)..(161): Selenocysteine
  MOD_RES (220)..(220): Selenocysteine
  MOD_RES (223)..(223): Selenocysteine
  MOD_RES (226)..(226): Selenocysteine
  MOD_RES (265)..(265): Selenocysteine
  MOD_RES (277)..(277): Selenocysteine
  MOD_RES (293)..(293): Selenocysteine
  MOD_RES (305)..(306): Selenocysteine
  MOD_RES (329)..(329): Selenocysteine
  MOD_RES (348)..(348): Selenocysteine
  MOD_RES (350)..(350): Selenocysteine
  MOD_RES (361)..(361): Selenocysteine
  MOD_RES (377)..(377): Selenocysteine
  MOD_RES (389)..(389): Selenocysteine
  MOD_RES (404)..(404): Selenocysteine
MDEFHPFIEALLPHVRAIAYXWFNLQARKRKYFKKHEKRMSKDEERAVKDELLSEKPEIKQKWASRLLAKLRKDIRQEYREDFVLXVXGKKHPCCVLSNPDQKGKIRRIDCLRQADKVWRLDLVMVILFKGIPLESXDGERLMKSPHCXNPALCVQPHHIXVSVKELDLFLAYYVQEQDSGQSGSPSHNDPAKNPPGYLEDSFVKSGVFNVSELVRVSRXPIXQGXGVNFPIGEIPSQPYYHDMNSGVNLQRSLSSPPSSKRPKXISIDENMEPSPXGDFYPSPSSPAAGSRXWHERDQDMSSPXXMKKPEKPLFSSASPQDSSPRLSXFPQHHHPGIPGVAHSVISXRXPPPPSPLPFPXQAILPPAPSSYFSHPXIRYPPHLNPQDXLKNYVPSYDPSSPQXSQSWYLG

SEQ ID NO: 17671 - protein, 478 aa, Homo sapiens
  MOD_RES (21)..(21): Selenocysteine
  MOD_RES (86)..(86): Selenocysteine
  MOD_RES (88)..(88): Selenocysteine
  MOD_RES (137)..(137): Selenocysteine
  MOD_RES (149)..(149): Selenocysteine
  MOD_RES (161)..(161): Selenocysteine
  MOD_RES (220)..(220): Selenocysteine
  MOD_RES (223)..(223): Selenocysteine
  MOD_RES (226)..(226): Selenocysteine
  MOD_RES (265)..(265): Selenocysteine
  MOD_RES (277)..(277): Selenocysteine
  MOD_RES (293)..(293): Selenocysteine
  MOD_RES (305)..(306): Selenocysteine
  MOD_RES (329)..(329): Selenocysteine
  MOD_RES (348)..(348): Selenocysteine
  MOD_RES (350)..(350): Selenocysteine
  MOD_RES (361)..(361): Selenocysteine
  MOD_RES (377)..(377): Selenocysteine
  MOD_RES (389)..(389): Selenocysteine
  MOD_RES (404)..(404): Selenocysteine
  MOD_RES (413)..(413): Selenocysteine
  MOD_RES (425)..(425): Selenocysteine
  MOD_RES (429)..(429): Selenocysteine
  MOD_RES (433)..(433): Selenocysteine
  MOD_RES (439)..(439): Selenocysteine
  MOD_RES (452)..(452): Selenocysteine
  MOD_RES (476)..(476): Selenocysteine
MDEFHPFIEALLPHVRAIAYXWFNLQARKRKYFKKHEKRMSKDEERAVKDELLSEKPEIKQKWASRLLAKLRKDIRQEYREDFVLXVXGKKHPCCVLSNPDQKGKIRRIDCLRQADKVWRLDLVMVILFKGIPLESXDGERLMKSPHCXNPALCVQPHHIXVSVKELDLFLAYYVQEQDSGQSGSPSHNDPAKNPPGYLEDSFVKSGVFNVSELVRVSRXPIXQGXGVNFPIGEIPSQPYYHDMNSGVNLQRSLSSPPSSKRPKXISIDENMEPSPXGDFYPSPSSPAAGSRXWHERDQDMSSPXXMKKPEKPLFSSASPQDSSPRLSXFPQHHHPGIPGVAHSVISXRXPPPPSPLPFPXQAILPPAPSSYFSHPXIRYPPHLNPQDXLKNYVPSYDPSSPQXSQLRICDWXMNQNGRHLYPSXSEDXLGIXWQSPGXWASLVPFQVSNRXPILPANVQNYGLNIIGEPFLQAEXSN

SEQ ID NO: 17672 - protein, 446 aa, Homo sapiens
  MOD_RES (30)..(30): Selenocysteine
  MOD_RES (56)..(56): Selenocysteine
  MOD_RES (121)..(121): Selenocysteine
  MOD_RES (123)..(123): Selenocysteine
  MOD_RES (172)..(172): Selenocysteine
  MOD_RES (184)..(184): Selenocysteine
  MOD_RES (196)..(196): Selenocysteine
  MOD_RES (255)..(255): Selenocysteine
  MOD_RES (258)..(258): Selenocysteine
  MOD_RES (261)..(261): Selenocysteine
  MOD_RES (300)..(300): Selenocysteine
  MOD_RES (312)..(312): Selenocysteine
  MOD_RES (328)..(328): Selenocysteine
  MOD_RES (340)..(341): Selenocysteine
  MOD_RES (364)..(364): Selenocysteine
  MOD_RES (383)..(383): Selenocysteine
  MOD_RES (385)..(385): Selenocysteine
  MOD_RES (396)..(396): Selenocysteine
  MOD_RES (412)..(412): Selenocysteine
  MOD_RES (424)..(424): Selenocysteine
  MOD_RES (439)..(439): Selenocysteine
MERIPVSVDFWVVCCAVLKCNPGIPKRMSXLCFGFSDEFHPFIEALLPHVRAIAYXWFNLQARKRKYFKKHEKRMSKDEERAVKDELLSEKPEIKQKWASRLLAKLRKDIRQEYREDFVLXVXGKKHPCCVLSNPDQKGKIRRIDCLRQADKVWRLDLVMVILFKGIPLESXDGERLMKSPHCXNPALCVQPHHIXVSVKELDLFLAYYVQEQDSGQSGSPSHNDPAKNPPGYLEDSFVKSGVFNVSELVRVSRXPIXQGXGVNFPIGEIPSQPYYHDMNSGVNLQRSLSSPPSSKRPKXISIDENMEPSPXGDFYPSPSSPAAGSRXWHERDQDMSSPXXMKKPEKPLFSSASPQDSSPRLSXFPQHHHPGIPGVAHSVISXRXPPPPSPLPFPXQAILPPAPSSYFSHPXIRYPPHLNPQDXLKNYVPSYDPSSPQXSQSWYLG

SEQ ID NO: 17673 - protein, 308 aa, Homo sapiens
  MOD_RES (3)..(3): Selenocysteine
  MOD_RES (50)..(50): Selenocysteine
  MOD_RES (53)..(53): Selenocysteine
  MOD_RES (56)..(56): Selenocysteine
  MOD_RES (95)..(95): Selenocysteine
  MOD_RES (107)..(107): Selenocysteine
  MOD_RES (123)..(123): Selenocysteine
  MOD_RES (135)..(136): Selenocysteine
  MOD_RES (159)..(159): Selenocysteine
  MOD_RES (178)..(178): Selenocysteine
  MOD_RES (180)..(180): Selenocysteine
  MOD_RES (191)..(191): Selenocysteine
  MOD_RES (207)..(207): Selenocysteine
  MOD_RES (219)..(219): Selenocysteine
  MOD_RES (234)..(234): Selenocysteine
  MOD_RES (243)..(243): Selenocysteine
  MOD_RES (255)..(255): Selenocysteine
  MOD_RES (259)..(259): Selenocysteine
  MOD_RES (263)..(263): Selenocysteine
  MOD_RES (269)..(269): Selenocysteine
  MOD_RES (282)..(282): Selenocysteine
  MOD_RES (306)..(306): Selenocysteine
MLXFLWQRDSGQSGSPSHNDPAKNPPGYLEDSFVKSGVFNVSELVRVSRXPIXQGXGVNFPIGEIPSQPYYHDMNSGVNLQRSLSSPPSSKRPKXISIDENMEPSPXGDFYPSPSSPAAGSRXWHERDQDMSSPXXMKKPEKPLFSSASPQDSSPRLSXFPQHHHPGIPGVAHSVISXRXPPPPSPLPFPXQAILPPAPSSYFSHPXIRYPPHLNPQDXLKNYVPSYDPSSPQXSQLRICDWXMNQNGRHLYPSXSEDXLGIXWQSPGXWASLVPFQVSNRXPILPANVQNYGLNIIGEPFLQAEXSN

SEQ ID NO: 17674 - protein, 182 aa, Homo sapiens
  MOD_RES (9)..(9): Selenocysteine
  MOD_RES (30)..(30): Selenocysteine
  MOD_RES (95)..(95): Selenocysteine
  MOD_RES (97)..(97): Selenocysteine
  MOD_RES (154)..(154): Selenocysteine
  MOD_RES (157)..(157): Selenocysteine
  MOD_RES (160)..(160): Selenocysteine
MMYSPICLXQDEFHPFIEALLPHVRAIAYXWFNLQARKRKYFKKHEKRMSKDEERAVKDELLSEKPEIKQKWASRLLAKLRKDIRQEYREDFVLXVXGKKHPCCVLSNPDQKDSGQSGSPSHNDPAKNPPGYLEDSFVKSGVFNVSELVRVSRXPIXQGXGVNFPIGEIPSQPYYHDMNSGV

SEQ ID NO: 17675 - protein, 420 aa, Homo sapiens
  MOD_RES (9)..(9): Selenocysteine
  MOD_RES (30)..(30): Selenocysteine
  MOD_RES (95)..(95): Selenocysteine
  MOD_RES (97)..(97): Selenocysteine
  MOD_RES (146)..(146): Selenocysteine
  MOD_RES (158)..(158): Selenocysteine
  MOD_RES (170)..(170): Selenocysteine
  MOD_RES (229)..(229): Selenocysteine
  MOD_RES (232)..(232): Selenocysteine
  MOD_RES (235)..(235): Selenocysteine
  MOD_RES (274)..(274): Selenocysteine
  MOD_RES (286)..(286): Selenocysteine
  MOD_RES (302)..(302): Selenocysteine
  MOD_RES (314)..(315): Selenocysteine
  MOD_RES (338)..(338): Selenocysteine
  MOD_RES (357)..(357): Selenocysteine
  MOD_RES (359)..(359): Selenocysteine
  MOD_RES (370)..(370): Selenocysteine
  MOD_RES (386)..(386): Selenocysteine
  MOD_RES (398)..(398): Selenocysteine
  MOD_RES (413)..(413): Selenocysteine
MMYSPICLXQDEFHPFIEALLPHVRAIAYXWFNLQARKRKYFKKHEKRMSKDEERAVKDELLSEKPEIKQKWASRLLAKLRKDIRQEYREDFVLXVXGKKHPCCVLSNPDQKGKIRRIDCLRQADKVWRLDLVMVILFKGIPLESXDGERLMKSPHCXNPALCVQPHHIXVSVKELDLFLAYYVQEQDSGQSGSPSHNDPAKNPPGYLEDSFVKSGVFNVSELVRVSRXPIXQGXGVNFPIGEIPSQPYYHDMNSGVNLQRSLSSPPSSKRPKXISIDENMEPSPXGDFYPSPSSPAAGSRXWHERDQDMSSPXXMKKPEKPLFSSASPQDSSPRLSXFPQHHHPGIPGVAHSVISXRXPPPPSPLPFPXQAILPPAPSSYFSHPXIRYPPHLNPQDXLKNYVPSYDPSSPQXSQSWYLG

SEQ ID NO: 17676 - protein, 445 aa, Homo sapiens
  MOD_RES (9)..(9): Selenocysteine
  MOD_RES (30)..(30): Selenocysteine
  MOD_RES (95)..(95): Selenocysteine
  MOD_RES (97)..(97): Selenocysteine
  MOD_RES (146)..(146): Selenocysteine
  MOD_RES (158)..(158): Selenocysteine
  MOD_RES (170)..(170): Selenocysteine
  MOD_RES (229)..(229): Selenocysteine
  MOD_RES (232)..(232): Selenocysteine
  MOD_RES (235)..(235): Selenocysteine
  MOD_RES (274)..(274): Selenocysteine
  MOD_RES (286)..(286): Selenocysteine
  MOD_RES (302)..(302): Selenocysteine
  MOD_RES (314)..(315): Selenocysteine
  MOD_RES (338)..(338): Selenocysteine
  MOD_RES (357)..(357): Selenocysteine
  MOD_RES (359)..(359): Selenocysteine
  MOD_RES (370)..(370): Selenocysteine
  MOD_RES (386)..(386): Selenocysteine
  MOD_RES (398)..(398): Selenocysteine
  MOD_RES (413)..(413): Selenocysteine
  MOD_RES (422)..(422): Selenocysteine
  MOD_RES (434)..(434): Selenocysteine
  MOD_RES (438)..(438): Selenocysteine
  MOD_RES (442)..(442): Selenocysteine
MMYSPICLXQDEFHPFIEALLPHVRAIAYXWFNLQARKRKYFKKHEKRMSKDEERAVKDELLSEKPEIKQKWASRLLAKLRKDIRQEYREDFVLXVXGKKHPCCVLSNPDQKGKIRRIDCLRQADKVWRLDLVMVILFKGIPLESXDGERLMKSPHCXNPALCVQPHHIXVSVKELDLFLAYYVQEQDSGQSGSPSHNDPAKNPPGYLEDSFVKSGVFNVSELVRVSRXPIXQGXGVNFPIGEIPSQPYYHDMNSGVNLQRSLSSPPSSKRPKXISIDENMEPSPXGDFYPSPSSPAAGSRXWHERDQDMSSPXXMKKPEKPLFSSASPQDSSPRLSXFPQHHHPGIPGVAHSVISXRXPPPPSPLPFPXQAILPPAPSSYFSHPXIRYPPHLNPQDXLKNYVPSYDPSSPQXSQLRICDWXMNQNGRHLYPSXSEDXLGIXWQS

SEQ ID NO: 17677 - protein, 487 aa, Homo sapiens
  MOD_RES (9)..(9): Selenocysteine
  MOD_RES (30)..(30): Selenocysteine
  MOD_RES (95)..(95): Selenocysteine
  MOD_RES (97)..(97): Selenocysteine
  MOD_RES (146)..(146): Selenocysteine
  MOD_RES (158)..(158): Selenocysteine
  MOD_RES (170)..(170): Selenocysteine
  MOD_RES (229)..(229): Selenocysteine
  MOD_RES (232)..(232): Selenocysteine
  MOD_RES (235)..(235): Selenocysteine
  MOD_RES (274)..(274): Selenocysteine
  MOD_RES (286)..(286): Selenocysteine
  MOD_RES (302)..(302): Selenocysteine
  MOD_RES (314)..(315): Selenocysteine
  MOD_RES (338)..(338): Selenocysteine
  MOD_RES (357)..(357): Selenocysteine
  MOD_RES (359)..(359): Selenocysteine
  MOD_RES (370)..(370): Selenocysteine
  MOD_RES (386)..(386): Selenocysteine
  MOD_RES (398)..(398): Selenocysteine
  MOD_RES (413)..(413): Selenocysteine
  MOD_RES (422)..(422): Selenocysteine
  MOD_RES (434)..(434): Selenocysteine
  MOD_RES (438)..(438): Selenocysteine
  MOD_RES (442)..(442): Selenocysteine
  MOD_RES (448)..(448): Selenocysteine
  MOD_RES (461)..(461): Selenocysteine
  MOD_RES (485)..(485): Selenocysteine
MMYSPICLXQDEFHPFIEALLPHVRAIAYXWFNLQARKRKYFKKHEKRMSKDEERAVKDELLSEKPEIKQKWASRLLAKLRKDIRQEYREDFVLXVXGKKHPCCVLSNPDQKGKIRRIDCLRQADKVWRLDLVMVILFKGIPLESXDGERLMKSPHCXNPALCVQPHHIXVSVKELDLFLAYYVQEQDSGQSGSPSHNDPAKNPPGYLEDSFVKSGVFNVSELVRVSRXPIXQGXGVNFPIGEIPSQPYYHDMNSGVNLQRSLSSPPSSKRPKXISIDENMEPSPXGDFYPSPSSPAAGSRXWHERDQDMSSPXXMKKPEKPLFSSASPQDSSPRLSXFPQHHHPGIPGVAHSVISXRXPPPPSPLPFPXQAILPPAPSSYFSHPXIRYPPHLNPQDXLKNYVPSYDPSSPQXSQLRICDWXMNQNGRHLYPSXSEDXLGIXWQSPGXWASLVPFQVSNRXPILPANVQNYGLNIIGEPFLQAEXSN

SEQ ID NO: 17678 - protein, 494 aa, Homo sapiens
  MOD_RES (9)..(9): Selenocysteine
  MOD_RES (30)..(30): Selenocysteine
  MOD_RES (95)..(95): Selenocysteine
  MOD_RES (97)..(97): Selenocysteine
  MOD_RES (146)..(146): Selenocysteine
  MOD_RES (158)..(158): Selenocysteine
  MOD_RES (170)..(170): Selenocysteine
  MOD_RES (229)..(229): Selenocysteine
  MOD_RES (232)..(232): Selenocysteine
  MOD_RES (235)..(235): Selenocysteine
  MOD_RES (274)..(274): Selenocysteine
  MOD_RES (286)..(286): Selenocysteine
  MOD_RES (302)..(302): Selenocysteine
  MOD_RES (314)..(315): Selenocysteine
  MOD_RES (338)..(338): Selenocysteine
  MOD_RES (357)..(357): Selenocysteine
  MOD_RES (359)..(359): Selenocysteine
  MOD_RES (370)..(370): Selenocysteine
  MOD_RES (386)..(386): Selenocysteine
  MOD_RES (398)..(398): Selenocysteine
  MOD_RES (413)..(413): Selenocysteine
  MOD_RES (431)..(431): Selenocysteine
  MOD_RES (447)..(447): Selenocysteine
  MOD_RES (451)..(451): Selenocysteine
  MOD_RES (453)..(453): Selenocysteine
  MOD_RES (457)..(458): Selenocysteine
  MOD_RES (460)..(460): Selenocysteine
  MOD_RES (464)..(464): Selenocysteine
  MOD_RES (468)..(468): Selenocysteine
MMYSPICLXQDEFHPFIEALLPHVRAIAYXWFNLQARKRKYFKKHEKRMSKDEERAVKDELLSEKPEIKQKWASRLLAKLRKDIRQEYREDFVLXVXGKKHPCCVLSNPDQKGKIRRIDCLRQADKVWRLDLVMVILFKGIPLESXDGERLMKSPHCXNPALCVQPHHIXVSVKELDLFLAYYVQEQDSGQSGSPSHNDPAKNPPGYLEDSFVKSGVFNVSELVRVSRXPIXQGXGVNFPIGEIPSQPYYHDMNSGVNLQRSLSSPPSSKRPKXISIDENMEPSPXGDFYPSPSSPAAGSRXWHERDQDMSSPXXMKKPEKPLFSSASPQDSSPRLSXFPQHHHPGIPGVAHSVISXRXPPPPSPLPFPXQAILPPAPSSYFSHPXIRYPPHLNPQDXLKNYVPSYDPSSPQXSQPNGSGQVVGKVPGHFXPVLAPSPHPSAVRPVXLSMXDXKPIXXSXEAYXASGXSQANRYVGLSPRDPSFLHQQQSWYLG

SEQ ID NO: 17679 - protein, 561 aa, Homo sapiens
  MOD_RES (9)..(9): Selenocysteine
  MOD_RES (30)..(30): Selenocysteine
  MOD_RES (95)..(95): Selenocysteine
  MOD_RES (97)..(97): Selenocysteine
  MOD_RES (146)..(146): Selenocysteine
  MOD_RES (158)..(158): Selenocysteine
  MOD_RES (170)..(170): Selenocysteine
  MOD_RES (229)..(229): Selenocysteine
  MOD_RES (232)..(232): Selenocysteine
  MOD_RES (235)..(235): Selenocysteine
  MOD_RES (274)..(274): Selenocysteine
  MOD_RES (286)..(286): Selenocysteine
  MOD_RES (302)..(302): Selenocysteine
  MOD_RES (314)..(315): Selenocysteine
  MOD_RES (338)..(338): Selenocysteine
  MOD_RES (357)..(357): Selenocysteine
  MOD_RES (359)..(359): Selenocysteine
  MOD_RES (370)..(370): Selenocysteine
  MOD_RES (386)..(386): Selenocysteine
  MOD_RES (398)..(398): Selenocysteine
  MOD_RES (413)..(413): Selenocysteine
  MOD_RES (431)..(431): Selenocysteine
  MOD_RES (447)..(447): Selenocysteine
  MOD_RES (451)..(451): Selenocysteine
  MOD_RES (453)..(453): Selenocysteine
  MOD_RES (457)..(458): Selenocysteine
  MOD_RES (460)..(460): Selenocysteine
  MOD_RES (464)..(464): Selenocysteine
  MOD_RES (468)..(468): Selenocysteine
  MOD_RES (496)..(496): Selenocysteine
  MOD_RES (508)..(508): Selenocysteine
  MOD_RES (512)..(512): Selenocysteine
  MOD_RES (516)..(516): Selenocysteine
  MOD_RES (522)..(522): Selenocysteine
  MOD_RES (535)..(535): Selenocysteine
  MOD_RES (559)..(559): Selenocysteine
MMYSPICLXQDEFHPFIEALLPHVRAIAYXWFNLQARKRKYFKKHEKRMSKDEERAVKDELLSEKPEIKQKWASRLLAKLRKDIRQEYREDFVLXVXGKKHPCCVLSNPDQKGKIRRIDCLRQADKVWRLDLVMVILFKGIPLESXDGERLMKSPHCXNPALCVQPHHIXVSVKELDLFLAYYVQEQDSGQSGSPSHNDPAKNPPGYLEDSFVKSGVFNVSELVRVSRXPIXQGXGVNFPIGEIPSQPYYHDMNSGVNLQRSLSSPPSSKRPKXISIDENMEPSPXGDFYPSPSSPAAGSRXWHERDQDMSSPXXMKKPEKPLFSSASPQDSSPRLSXFPQHHHPGIPGVAHSVISXRXPPPPSPLPFPXQAILPPAPSSYFSHPXIRYPPHLNPQDXLKNYVPSYDPSSPQXSQPNGSGQVVGKVPGHFXPVLAPSPHPSAVRPVXLSMXDXKPIXXSXEAYXASGXSQANRYVGLSPRDPSFLHQQQLRICDWXMNQNGRHLYPSXSEDXLGIXWQSPGXWASLVPFQVSNRXPILPANVQNYGLNIIGEPFLQAEXSN

SEQ ID NO: 17680 - protein, 570 aa, Homo sapiens
  MOD_RES (9)..(9): Selenocysteine
  MOD_RES (30)..(30): Selenocysteine
  MOD_RES (95)..(95): Selenocysteine
  MOD_RES (97)..(97): Selenocysteine
  MOD_RES (146)..(146): Selenocysteine
  MOD_RES (158)..(158): Selenocysteine
  MOD_RES (170)..(170): Selenocysteine
  MOD_RES (229)..(229): Selenocysteine
  MOD_RES (232)..(232): Selenocysteine
  MOD_RES (235)..(235): Selenocysteine
  MOD_RES (274)..(274): Selenocysteine
  MOD_RES (286)..(286): Selenocysteine
  MOD_RES (302)..(302): Selenocysteine
  MOD_RES (314)..(315): Selenocysteine
  MOD_RES (338)..(338): Selenocysteine
  MOD_RES (357)..(357): Selenocysteine
  MOD_RES (359)..(359): Selenocysteine
  MOD_RES (370)..(370): Selenocysteine
  MOD_RES (386)..(386): Selenocysteine
  MOD_RES (398)..(398): Selenocysteine
  MOD_RES (413)..(413): Selenocysteine
  MOD_RES (431)..(431): Selenocysteine
  MOD_RES (447)..(447): Selenocysteine
  MOD_RES (451)..(451): Selenocysteine
  MOD_RES (453)..(453): Selenocysteine
  MOD_RES (457)..(458): Selenocysteine
  MOD_RES (460)..(460): Selenocysteine
  MOD_RES (468)..(468): Selenocysteine
  MOD_RES (470)..(471): Selenocysteine
  MOD_RES (473)..(473): Selenocysteine
  MOD_RES (477)..(477): Selenocysteine
  MOD_RES (505)..(505): Selenocysteine
  MOD_RES (517)..(517): Selenocysteine
  MOD_RES (521)..(521): Selenocysteine
  MOD_RES (525)..(525): Selenocysteine
  MOD_RES (531)..(531): Selenocysteine
  MOD_RES (544)..(544): Selenocysteine
  MOD_RES (568)..(568): Selenocysteine
MMYSPICLXQDEFHPFIEALLPHVRAIAYXWFNLQARKRKYFKKHEKRMSKDEERAVKDELLSEKPEIKQKWASRLLAKLRKDIRQEYREDFVLXVXGKKHPCCVLSNPDQKGKIRRIDCLRQADKVWRLDLVMVILFKGIPLESXDGERLMKSPHCXNPALCVQPHHIXVSVKELDLFLAYYVQEQDSGQSGSPSHNDPAKNPPGYLEDSFVKSGVFNVSELVRVSRXPIXQGXGVNFPIGEIPSQPYYHDMNSGVNLQRSLSSPPSSKRPKXISIDENMEPSPXGDFYPSPSSPAAGSRXWHERDQDMSSPXXMKKPEKPLFSSASPQDSSPRLSXFPQHHHPGIPGVAHSVISXRXPPPPSPLPFPXQAILPPAPSSYFSHPXIRYPPHLNPQDXLKNYVPSYDPSSPQXSQPNGSGQVVGKVPGHFXPVLAPSPHPSAVRPVXLSMXDXKPIXXSXEGEAASPXAXXYXASGXSQANRYVGLSPRDPSFLHQQQLRICDWXMNQNGRHLYPSXSEDXLGIXWQSPGXWASLVPFQVSNRXPILPANVQNYGLNIIGEPFLQAEXSN

SEQ ID NO: 17681 - protein, 200 aa, Homo sapiens
  MOD_RES (9)..(9): Selenocysteine
  MOD_RES (30)..(30): Selenocysteine
  MOD_RES (95)..(95): Selenocysteine
  MOD_RES (97)..(97): Selenocysteine
  MOD_RES (146)..(146): Selenocysteine
  MOD_RES (158)..(158): Selenocysteine
  MOD_RES (170)..(170): Selenocysteine
MMYSPICLXQDEFHPFIEALLPHVRAIAYXWFNLQARKRKYFKKHEKRMSKDEERAVKDELLSEKPEIKQKWASRLLAKLRKDIRQEYREDFVLXVXGKKHPCCVLSNPDQKGKIRRIDCLRQADKVWRLDLVMVILFKGIPLESXDGERLMKSPHCXNPALCVQPHHIXVSVKELDLFLAYYVQEQGKNFFSSNKCIKI

SEQ ID NO: 17682 - protein, 188 aa, Homo sapiens
  MOD_RES (9)..(9): Selenocysteine
  MOD_RES (30)..(30): Selenocysteine
  MOD_RES (95)..(95): Selenocysteine
  MOD_RES (97)..(97): Selenocysteine
  MOD_RES (146)..(146): Selenocysteine
  MOD_RES (158)..(158): Selenocysteine
  MOD_RES (170)..(170): Selenocysteine
MMYSPICLXQDEFHPFIEALLPHVRAIAYXWFNLQARKRKYFKKHEKRMSKDEERAVKDELLSEKPEIKQKWASRLLAKLRKDIRQEYREDFVLXVXGKKHPCCVLSNPDQKGKIRRIDCLRQADKVWRLDLVMVILFKGIPLESXDGERLMKSPHCXNPALCVQPHHIXVSVKELDLFLAYYVQEQR

SEQ ID NO: 17683 - protein, 309 aa, Homo sapiens
  MOD_RES (22)..(22): Selenocysteine
  MOD_RES (34)..(34): Selenocysteine
  MOD_RES (50)..(50): Selenocysteine
  MOD_RES (62)..(63): Selenocysteine
  MOD_RES (86)..(86): Selenocysteine
  MOD_RES (105)..(105): Selenocysteine
  MOD_RES (107)..(107): Selenocysteine
  MOD_RES (118)..(118): Selenocysteine
  MOD_RES (134)..(134): Selenocysteine
  MOD_RES (146)..(146): Selenocysteine
  MOD_RES (161)..(161): Selenocysteine
  MOD_RES (179)..(179): Selenocysteine
  MOD_RES (195)..(195): Selenocysteine
  MOD_RES (199)..(199): Selenocysteine
  MOD_RES (201)..(201): Selenocysteine
  MOD_RES (205)..(206): Selenocysteine
  MOD_RES (208)..(208): Selenocysteine
  MOD_RES (212)..(212): Selenocysteine
  MOD_RES (216)..(216): Selenocysteine
  MOD_RES (244)..(244): Selenocysteine
  MOD_RES (256)..(256): Selenocysteine
  MOD_RES (260)..(260): Selenocysteine
  MOD_RES (264)..(264): Selenocysteine
  MOD_RES (270)..(270): Selenocysteine
  MOD_RES (283)..(283): Selenocysteine
  MOD_RES (307)..(307): Selenocysteine
MNSGVNLQRSLSSPPSSKRPKXISIDENMEPSPXGDFYPSPSSPAAGSRXWHERDQDMSSPXXMKKPEKPLFSSASPQDSSPRLSXFPQHHHPGIPGVAHSVISXRXPPPPSPLPFPXQAILPPAPSSYFSHPXIRYPPHLNPQDXLKNYVPSYDPSSPQXSQPNGSGQVVGKVPGHFXPVLAPSPHPSAVRPVXLSMXDXKPIXXSXEAYXASGXSQANRYVGLSPRDPSFLHQQQLRICDWXMNQNGRHLYPSXSEDXLGIXWQSPGXWASLVPFQVSNRXPILPANVQNYGLNIIGEPFLQAEXSN

SEQ ID NO: 17684 - protein, 168 aa, Homo sapiens
  MOD_RES (22)..(22): Selenocysteine
  MOD_RES (34)..(34): Selenocysteine
  MOD_RES (50)..(50): Selenocysteine
  MOD_RES (62)..(63): Selenocysteine
  MOD_RES (86)..(86): Selenocysteine
  MOD_RES (105)..(105): Selenocysteine
  MOD_RES (107)..(107): Selenocysteine
  MOD_RES (118)..(118): Selenocysteine
  MOD_RES (134)..(134): Selenocysteine
  MOD_RES (146)..(146): Selenocysteine
  MOD_RES (161)..(161): Selenocysteine
MNSGVNLQRSLSSPPSSKRPKXISIDENMEPSPXGDFYPSPSSPAAGSRXWHERDQDMSSPXXMKKPEKPLFSSASPQDSSPRLSXFPQHHHPGIPGVAHSVISXRXPPPPSPLPFPXQAILPPAPSSYFSHPXIRYPPHLNPQDXLKNYVPSYDPSSPQXSQSWYLG

SEQ ID NO: 17685 - protein, 424 aa, Homo sapiens
  MOD_RES (26)..(26): Selenocysteine
  MOD_RES (91)..(91): Selenocysteine
  MOD_RES (93)..(93): Selenocysteine
  MOD_RES (150)..(150): Selenocysteine
  MOD_RES (153)..(153): Selenocysteine
  MOD_RES (156)..(156): Selenocysteine
  MOD_RES (195)..(195): Selenocysteine
  MOD_RES (207)..(207): Selenocysteine
  MOD_RES (223)..(223): Selenocysteine
  MOD_RES (235)..(236): Selenocysteine
  MOD_RES (259)..(259): Selenocysteine
  MOD_RES (278)..(278): Selenocysteine
  MOD_RES (280)..(280): Selenocysteine
  MOD_RES (291)..(291): Selenocysteine
  MOD_RES (307)..(307): Selenocysteine
  MOD_RES (319)..(319): Selenocysteine
  MOD_RES (334)..(334): Selenocysteine
  MOD_RES (352)..(352): Selenocysteine
  MOD_RES (368)..(368): Selenocysteine
  MOD_RES (372)..(372): Selenocysteine
  MOD_RES (374)..(374): Selenocysteine
  MOD_RES (378)..(379): Selenocysteine
  MOD_RES (381)..(381): Selenocysteine
  MOD_RES (389)..(389): Selenocysteine
  MOD_RES (391)..(392): Selenocysteine
  MOD_RES (394)..(394): Selenocysteine
  MOD_RES (398)..(398): Selenocysteine
MQYSAMDEFHPFIEALLPHVRAIAYXWFNLQARKRKYFKKHEKRMSKDEERAVKDELLSEKPEIKQKWASRLLAKLRKDIRQEYREDFVLXVXGKKHPCCVLSNPDQKDSGQSGSPSHNDPAKNPPGYLEDSFVKSGVFNVSELVRVSRXPIXQGXGVNFPIGEIPSQPYYHDMNSGVNLQRSLSSPPSSKRPKXISIDENMEPSPXGDFYPSPSSPAAGSRXWHERDQDMSSPXXMKKPEKPLFSSASPQDSSPRLSXFPQHHHPGIPGVAHSVISXRXPPPPSPLPFPXQAILPPAPSSYFSHPXIRYPPHLNPQDXLKNYVPSYDPSSPQXSQPNGSGQVVGKVPGHFXPVLAPSPHPSAVRPVXLSMXDXKPIXXSXEGEAASPXAXXYXASGXSQANRYVGLSPRDPSFLHQQQSWYLG

SEQ ID NO: 17686 - protein, 416 aa, Homo sapiens
  MOD_RES (26)..(26): Selenocysteine
  MOD_RES (91)..(91): Selenocysteine
  MOD_RES (93)..(93): Selenocysteine
  MOD_RES (142)..(142): Selenocysteine
  MOD_RES (154)..(154): Selenocysteine
  MOD_RES (166)..(166): Selenocysteine
  MOD_RES (225)..(225): Selenocysteine
  MOD_RES (228)..(228): Selenocysteine
  MOD_RES (231)..(231): Selenocysteine
  MOD_RES (270)..(270): Selenocysteine
  MOD_RES (282)..(282): Selenocysteine
  MOD_RES (298)..(298): Selenocysteine
  MOD_RES (310)..(311): Selenocysteine
  MOD_RES (334)..(334): Selenocysteine
  MOD_RES (353)..(353): Selenocysteine
  MOD_RES (355)..(355): Selenocysteine
  MOD_RES (366)..(366): Selenocysteine
  MOD_RES (382)..(382): Selenocysteine
  MOD_RES (394)..(394): Selenocysteine
  MOD_RES (409)..(409): Selenocysteine
MQYSAMDEFHPFIEALLPHVRAIAYXWFNLQARKRKYFKKHEKRMSKDEERAVKDELLSEKPEIKQKWASRLLAKLRKDIRQEYREDFVLXVXGKKHPCCVLSNPDQKGKIRRIDCLRQADKVWRLDLVMVILFKGIPLESXDGERLMKSPHCXNPALCVQPHHIXVSVKELDLFLAYYVQEQDSGQSGSPSHNDPAKNPPGYLEDSFVKSGVFNVSELVRVSRXPIXQGXGVNFPIGEIPSQPYYHDMNSGVNLQRSLSSPPSSKRPKXISIDENMEPSPXGDFYPSPSSPAAGSRXWHERDQDMSSPXXMKKPEKPLFSSASPQDSSPRLSXFPQHHHPGIPGVAHSVISXRXPPPPSPLPFPXQAILPPAPSSYFSHPXIRYPPHLNPQDXLKNYVPSYDPSSPQXSQSWYLG

SEQ ID NO: 17687 - protein, 167 aa, Homo sapiens
  MOD_RES (25)..(25): Selenocysteine
  MOD_RES (90)..(90): Selenocysteine
  MOD_RES (92)..(92): Selenocysteine
  MOD_RES (141)..(141): Selenocysteine
  MOD_RES (153)..(153): Selenocysteine
  MOD_RES (165)..(165): Selenocysteine
MVLHSDEFHPFIEALLPHVRAIAYXWFNLQARKRKYFKKHEKRMSKDEERAVKDELLSEKPEIKQKWASRLLAKLRKDIRQEYREDFVLXVXGKKHPCCVLSNPDQKGKIRRIDCLRQADKVWRLDLVMVILFKGIPLESXDGERLMKSPHCXNPALCVQPHHIXVS

SEQ ID NO: 17688 - protein, 480 aa, Homo sapiens
  MOD_RES (1)..(1): Any amino acid
  MOD_RES (23)..(23): Selenocysteine
  MOD_RES (88)..(88): Selenocysteine
  MOD_RES (90)..(90): Selenocysteine
  MOD_RES (139)..(139): Selenocysteine
  MOD_RES (151)..(151): Selenocysteine
  MOD_RES (163)..(163): Selenocysteine
  MOD_RES (222)..(222): Selenocysteine
  MOD_RES (225)..(225): Selenocysteine
  MOD_RES (228)..(228): Selenocysteine
  MOD_RES (267)..(267): Selenocysteine
  MOD_RES (279)..(279): Selenocysteine
  MOD_RES (295)..(295): Selenocysteine
  MOD_RES (307)..(308): Selenocysteine
  MOD_RES (331)..(331): Selenocysteine
  MOD_RES (350)..(350): Selenocysteine
  MOD_RES (352)..(352): Selenocysteine
  MOD_RES (363)..(363): Selenocysteine
  MOD_RES (379)..(379): Selenocysteine
  MOD_RES (391)..(391): Selenocysteine
  MOD_RES (406)..(406): Selenocysteine
  MOD_RES (415)..(415): Selenocysteine
  MOD_RES (427)..(427): Selenocysteine
  MOD_RES (431)..(431): Selenocysteine
  MOD_RES (435)..(435): Selenocysteine
  MOD_RES (441)..(441): Selenocysteine
  MOD_RES (454)..(454): Selenocysteine
  MOD_RES (478)..(478): Selenocysteine
XAMDEFHPFIEALLPHVRAIAYXWFNLQARKRKYFKKHEKRMSKDEERAVKDELLSEKPEIKQKWASRLLAKLRKDIRQEYREDFVLXVXGKKHPCCVLSNPDQKGKIRRIDCLRQADKVWRLDLVMVILFKGIPLESXDGERLMKSPHCXNPALCVQPHHIXVSVKELDLFLAYYVQEQDSGQSGSPSHNDPAKNPPGYLEDSFVKSGVFNVSELVRVSRXPIXQGXGVNFPIGEIPSQPYYHDMNSGVNLQRSLSSPPSSKRPKXISIDENMEPSPXGDFYPSPSSPAAGSRXWHERDQDMSSPXXMKKPEKPLFSSASPQDSSPRLSXFPQHHHPGIPGVAHSVISXRXPPPPSPLPFPXQAILPPAPSSYFSHPXIRYPPHLNPQDXLKNYVPSYDPSSPQXSQLRICDWXMNQNGRHLYPSXSEDXLGIXWQSPGXWASLVPFQVSNRXPILPANVQNYGLNIIGEPFLQAEXSN

SEQ ID NO: 17689 - protein, 430 aa, Homo sapiens
  MOD_RES (21)..(21): Selenocysteine
  MOD_RES (88)..(88): Selenocysteine
  MOD_RES (137)..(137): Selenocysteine
  MOD_RES (188)..(188): Selenocysteine
  MOD_RES (201)..(201): Selenocysteine
  MOD_RES (204)..(205): Selenocysteine
  MOD_RES (213)..(213): Selenocysteine
  MOD_RES (220)..(220): Selenocysteine
  MOD_RES (228)..(228): Selenocysteine
  MOD_RES (232)..(232): Selenocysteine
  MOD_RES (234)..(234): Selenocysteine
  MOD_RES (256)..(256): Selenocysteine
  MOD_RES (261)..(261): Selenocysteine
  MOD_RES (265)..(265): Selenocysteine
  MOD_RES (284)..(284): Selenocysteine
  MOD_RES (292)..(292): Selenocysteine
  MOD_RES (298)..(298): Selenocysteine
  MOD_RES (305)..(305): Selenocysteine
  MOD_RES (319)..(319): Selenocysteine
  MOD_RES (341)..(341): Selenocysteine
  MOD_RES (368)..(369): Selenocysteine
  MOD_RES (375)..(375): Selenocysteine
  MOD_RES (378)..(378): Selenocysteine
  MOD_RES (383)..(383): Selenocysteine
  MOD_RES (416)..(416): Selenocysteine
  MOD_RES (420)..(420): Selenocysteine
  MOD_RES (425)..(425): Selenocysteine
MDEFHPFIEALLPHVRAFAYXWFNLQARKRKYFKKHEKRMSKDEERAVKDELLGEKPEVKQKWASRLLAKLRKDIRPECREDFVLSIXGKKAPGCVLSNPDQKGKMRRIDCLRQADKVWRLDLVMVILFKGIPLESXDGERLVKAAQCGHPVLCVQPHHIGVAVKELDLYLAYFVRERDAEQSGSPRXGMGSDQEDSKPIXLDXXDFQESFVXSGVFSVXELIQVSRXPVVXGXGPNFSLGELQGHLAYDLNPASXGLRRXLPSXSSSGSKRHKSGSMEEDVDXSPGGDYYXSPSSPXSSSRNWXEDMEGGISSPVKKXEMDKSPFNSPSPQDSPRLSSFXQHHRPVIAVHSGIARSPHPSSALHFPXXSILPQXASXYFPHXAIRYPPHLNPQDPLKDLVSLACDPASQQPGPPXLRPXRPLQXVPLWD

SEQ ID NO: 17690 - protein, 499 aa, Homo sapiens
  MOD_RES (21)..(21): Selenocysteine
  MOD_RES (88)..(88): Selenocysteine
  MOD_RES (137)..(137): Selenocysteine
  MOD_RES (188)..(188): Selenocysteine
  MOD_RES (201)..(201): Selenocysteine
  MOD_RES (204)..(205): Selenocysteine
  MOD_RES (213)..(213): Selenocysteine
  MOD_RES (220)..(220): Selenocysteine
  MOD_RES (228)..(228): Selenocysteine
  MOD_RES (232)..(232): Selenocysteine
  MOD_RES (234)..(234): Selenocysteine
  MOD_RES (256)..(256): Selenocysteine
  MOD_RES (261)..(261): Selenocysteine
  MOD_RES (265)..(265): Selenocysteine
  MOD_RES (284)..(284): Selenocysteine
  MOD_RES (292)..(292): Selenocysteine
  MOD_RES (298)..(298): Selenocysteine
  MOD_RES (305)..(305): Selenocysteine
  MOD_RES (319)..(319): Selenocysteine
  MOD_RES (341)..(341): Selenocysteine
  MOD_RES (368)..(369): Selenocysteine
  MOD_RES (375)..(375): Selenocysteine
  MOD_RES (378)..(378): Selenocysteine
  MOD_RES (383)..(383): Selenocysteine
  MOD_RES (449)..(449): Selenocysteine
  MOD_RES (453)..(454): Selenocysteine
  MOD_RES (460)..(460): Selenocysteine
  MOD_RES (463)..(463): Selenocysteine
  MOD_RES (472)..(472): Selenocysteine
MDEFHPFIEALLPHVRAFAYXWFNLQARKRKYFKKHEKRMSKDEERAVKDELLGEKPEVKQKWASRLLAKLRKDIRPECREDFVLSIXGKKAPGCVLSNPDQKGKMRRIDCLRQADKVWRLDLVMVILFKGIPLESXDGERLVKAAQCGHPVLCVQPHHIGVAVKELDLYLAYFVRERDAEQSGSPRXGMGSDQEDSKPIXLDXXDFQESFVXSGVFSVXELIQVSRXPVVXGXGPNFSLGELQGHLAYDLNPASXGLRRXLPSXSSSGSKRHKSGSMEEDVDXSPGGDYYXSPSSPXSSSRNWXEDMEGGISSPVKKXEMDKSPFNSPSPQDSPRLSSFXQHHRPVIAVHSGIARSPHPSSALHFPXXSILPQXASXYFPHXAIRYPPHLNPQDPLKDLVSLACDPASQQPGPLNGSGQLKMPSHCLSAQMLAPPPPGLPRLALPPAXKPAXXSEGGAXSPXSPSYSPPDXSPANRSFVGLGPRDPAGIYQAQSWYLG

SEQ ID NO: 17691 - protein, 406 aa, Homo sapiens
  MOD_RES (21)..(21): Selenocysteine
  MOD_RES (88)..(88): Selenocysteine
  MOD_RES (137)..(137): Selenocysteine
  MOD_RES (180)..(181): Selenocysteine
  MOD_RES (189)..(189): Selenocysteine
  MOD_RES (196)..(196): Selenocysteine
  MOD_RES (204)..(204): Selenocysteine
  MOD_RES (208)..(208): Selenocysteine
  MOD_RES (210)..(210): Selenocysteine
  MOD_RES (232)..(232): Selenocysteine
  MOD_RES (237)..(237): Selenocysteine
  MOD_RES (241)..(241): Selenocysteine
  MOD_RES (260)..(260): Selenocysteine
  MOD_RES (268)..(268): Selenocysteine
  MOD_RES (274)..(274): Selenocysteine
  MOD_RES (281)..(281): Selenocysteine
  MOD_RES (295)..(295): Selenocysteine
  MOD_RES (317)..(317): Selenocysteine
  MOD_RES (344)..(345): Selenocysteine
  MOD_RES (351)..(351): Selenocysteine
  MOD_RES (354)..(354): Selenocysteine
  MOD_RES (359)..(359): Selenocysteine
  MOD_RES (392)..(392): Selenocysteine
  MOD_RES (396)..(396): Selenocysteine
  MOD_RES (401)..(401): Selenocysteine
MDEFHPFIEALLPHVRAFAYXWFNLQARKRKYFKKHEKRMSKDEERAVKDELLGEKPEVKQKWASRLLAKLRKDIRPECREDFVLSIXGKKAPGCVLSNPDQKGKMRRIDCLRQADKVWRLDLVMVILFKGIPLESXDGERLVKAAQCGHPVLCVQPHHIGVAVKELDLYLAYFVRERDXXDFQESFVXSGVFSVXELIQVSRXPVVXGXGPNFSLGELQGHLAYDLNPASXGLRRXLPSXSSSGSKRHKSGSMEEDVDXSPGGDYYXSPSSPXSSSRNWXEDMEGGISSPVKKXEMDKSPFNSPSPQDSPRLSSFXQHHRPVIAVHSGIARSPHPSSALHFPXXSILPQXASXYFPHXAIRYPPHLNPQDPLKDLVSLACDPASQQPGPPXLRPXRPLQXVPLWD

SEQ ID NO: 17692 - protein, 428 aa, Homo sapiens
  MOD_RES (9)..(9): Selenocysteine
  MOD_RES (30)..(30): Selenocysteine
  MOD_RES (97)..(97): Selenocysteine
  MOD_RES (146)..(146): Selenocysteine
  MOD_RES (197)..(197): Selenocysteine
  MOD_RES (210)..(210): Selenocysteine
  MOD_RES (213)..(214): Selenocysteine
  MOD_RES (222)..(222): Selenocysteine
  MOD_RES (229)..(229): Selenocysteine
  MOD_RES (237)..(237): Selenocysteine
  MOD_RES (241)..(241): Selenocysteine
  MOD_RES (243)..(243): Selenocysteine
  MOD_RES (265)..(265): Selenocysteine
  MOD_RES (270)..(270): Selenocysteine
  MOD_RES (274)..(274): Selenocysteine
  MOD_RES (293)..(293): Selenocysteine
  MOD_RES (301)..(301): Selenocysteine
  MOD_RES (307)..(307): Selenocysteine
  MOD_RES (314)..(314): Selenocysteine
  MOD_RES (328)..(328): Selenocysteine
  MOD_RES (350)..(350): Selenocysteine
  MOD_RES (377)..(378): Selenocysteine
  MOD_RES (384)..(384): Selenocysteine
  MOD_RES (387)..(387): Selenocysteine
  MOD_RES (392)..(392): Selenocysteine
MYSSPLCLXQDEFHPFIEALLPHVRAFAYXWFNLQARKRKYFKKHEKRMSKDEERAVKDELLGEKPEVKQKWASRLLAKLRKDIRPECREDFVLSIXGKKAPGCVLSNPDQKGKMRRIDCLRQADKVWRLDLVMVILFKGIPLESXDGERLVKAAQCGHPVLCVQPHHIGVAVKELDLYLAYFVRERDAEQSGSPRXGMGSDQEDSKPIXLDXXDFQESFVXSGVFSVXELIQVSRXPVVXGXGPNFSLGELQGHLAYDLNPASXGLRRXLPSXSSSGSKRHKSGSMEEDVDXSPGGDYYXSPSSPXSSSRNWXEDMEGGISSPVKKXEMDKSPFNSPSPQDSPRLSSFXQHHRPVIAVHSGIARSPHPSSALHFPXXSILPQXASXYFPHXAIRYPPHLNPQDPLKDLVSLACDPASQQPGPSWYLG

SEQ ID NO: 17693 - protein, 439 aa, Homo sapiens
  MOD_RES (9)..(9): Selenocysteine
  MOD_RES (30)..(30): Selenocysteine
  MOD_RES (97)..(97): Selenocysteine
  MOD_RES (146)..(146): Selenocysteine
  MOD_RES (197)..(197): Selenocysteine
  MOD_RES (210)..(210): Selenocysteine
  MOD_RES (213)..(214): Selenocysteine
  MOD_RES (222)..(222): Selenocysteine
  MOD_RES (229)..(229): Selenocysteine
  MOD_RES (237)..(237): Selenocysteine
  MOD_RES (241)..(241): Selenocysteine
  MOD_RES (243)..(243): Selenocysteine
  MOD_RES (265)..(265): Selenocysteine
  MOD_RES (270)..(270): Selenocysteine
  MOD_RES (274)..(274): Selenocysteine
  MOD_RES (293)..(293): Selenocysteine
  MOD_RES (301)..(301): Selenocysteine
  MOD_RES (307)..(307): Selenocysteine
  MOD_RES (314)..(314): Selenocysteine
  MOD_RES (328)..(328): Selenocysteine
  MOD_RES (350)..(350): Selenocysteine
  MOD_RES (377)..(378): Selenocysteine
  MOD_RES (384)..(384): Selenocysteine
  MOD_RES (387)..(387): Selenocysteine
  MOD_RES (392)..(392): Selenocysteine
  MOD_RES (425)..(425): Selenocysteine
  MOD_RES (429)..(429): Selenocysteine
  MOD_RES (434)..(434): Selenocysteine
MYSSPLCLXQDEFHPFIEALLPHVRAFAYXWFNLQARKRKYFKKHEKRMSKDEERAVKDELLGEKPEVKQKWASRLLAKLRKDIRPECREDFVLSIXGKKAPGCVLSNPDQKGKMRRIDCLRQADKVWRLDLVMVILFKGIPLESXDGERLVKAAQCGHPVLCVQPHHIGVAVKELDLYLAYFVRERDAEQSGSPRXGMGSDQEDSKPIXLDXXDFQESFVXSGVFSVXELIQVSRXPVVXGXGPNFSLGELQGHLAYDLNPASXGLRRXLPSXSSSGSKRHKSGSMEEDVDXSPGGDYYXSPSSPXSSSRNWXEDMEGGISSPVKKXEMDKSPFNSPSPQDSPRLSSFXQHHRPVIAVHSGIARSPHPSSALHFPXXSILPQXASXYFPHXAIRYPPHLNPQDPLKDLVSLACDPASQQPGPPXLRPXRPLQXVPLWD

SEQ ID NO: 17694 - protein, 508 aa, Homo sapiens
  MOD_RES (9)..(9): Selenocysteine
  MOD_RES (30)..(30): Selenocysteine
  MOD_RES (97)..(97): Selenocysteine
  MOD_RES (146)..(146): Selenocysteine
  MOD_RES (197)..(197): Selenocysteine
  MOD_RES (210)..(210): Selenocysteine
  MOD_RES (213)..(214): Selenocysteine
  MOD_RES (222)..(222): Selenocysteine
  MOD_RES (229)..(229): Selenocysteine
  MOD_RES (237)..(237): Selenocysteine
  MOD_RES (241)..(241): Selenocysteine
  MOD_RES (243)..(243): Selenocysteine
  MOD_RES (265)..(265): Selenocysteine
  MOD_RES (270)..(270): Selenocysteine
  MOD_RES (274)..(274): Selenocysteine
  MOD_RES (293)..(293): Selenocysteine
  MOD_RES (301)..(301): Selenocysteine
  MOD_RES (307)..(307): Selenocysteine
  MOD_RES (314)..(314): Selenocysteine
  MOD_RES (328)..(328): Selenocysteine
  MOD_RES (350)..(350): Selenocysteine
  MOD_RES (377)..(378): Selenocysteine
  MOD_RES (384)..(384): Selenocysteine
  MOD_RES (387)..(387): Selenocysteine
  MOD_RES (392)..(392): Selenocysteine
  MOD_RES (458)..(458): Selenocysteine
  MOD_RES (462)..(463): Selenocysteine
  MOD_RES (469)..(469): Selenocysteine
  MOD_RES (472)..(472): Selenocysteine
  MOD_RES (481)..(481): Selenocysteine
MYSSPLCLXQDEFHPFIEALLPHVRAFAYXWFNLQARKRKYFKKHEKRMSKDEERAVKDELLGEKPEVKQKWASRLLAKLRKDIRPECREDFVLSIXGKKAPGCVLSNPDQKGKMRRIDCLRQADKVWRLDLVMVILFKGIPLESXDGERLVKAAQCGHPVLCVQPHHIGVAVKELDLYLAYFVRERDAEQSGSPRXGMGSDQEDSKPIXLDXXDFQESFVXSGVFSVXELIQVSRXPVVXGXGPNFSLGELQGHLAYDLNPASXGLRRXLPSXSSSGSKRHKSGSMEEDVDXSPGGDYYXSPSSPXSSSRNWXEDMEGGISSPVKKXEMDKSPFNSPSPQDSPRLSSFXQHHRPVIAVHSGIARSPHPSSALHFPXXSILPQXASXYFPHXAIRYPPHLNPQDPLKDLVSLACDPASQQPGPLNGSGQLKMPSHCLSAQMLAPPPPGLPRLALPPAXKPAXXSEGGAXSPXSPSYSPPDXSPANRSFVGLGPRDPAGIYQAQSWYLG

SEQ ID NO: 17695 - protein, 462 aa, Homo sapiens
  MOD_RES (8)..(8): Selenocysteine
  MOD_RES (33)..(33): Selenocysteine
  MOD_RES (40)..(41): Selenocysteine
  MOD_RES (114)..(114): Selenocysteine
  MOD_RES (132)..(132): Selenocysteine
  MOD_RES (145)..(145): Selenocysteine
  MOD_RES (154)..(154): Selenocysteine
  MOD_RES (199)..(199): Selenocysteine
  MOD_RES (229)..(229): Selenocysteine
  MOD_RES (240)..(240): Selenocysteine
  MOD_RES (274)..(274): Selenocysteine
  MOD_RES (277)..(277): Selenocysteine
  MOD_RES (311)..(311): Selenocysteine
  MOD_RES (348)..(348): Selenocysteine
  MOD_RES (358)..(358): Selenocysteine
  MOD_RES (379)..(379): Selenocysteine
  MOD_RES (386)..(386): Selenocysteine
  MOD_RES (407)..(407): Selenocysteine
  MOD_RES (413)..(413): Selenocysteine
  MOD_RES (453)..(453): Selenocysteine
MQLRKMQXVKKEQASLDASSNVDKMMVLNSALXEVSEDSXXGEELLLSEGSVGKNKSSACRRKREFIPDEKKDAMYWEKRRKNNEAAKRSREKRRLNDLVLENKLIALGEENAXLKAELLSLKLKFGLISSXAYAQEIQKLSNSXAVYFQDYQXSKSNVSSFVDEHEPSMVSSSCISVIKHSPQSSLSDVSEVSSVEHXQESSVQGSCRSPENKFQIIKQEPMELESYXREPRDDRGSYXASIYQNYMGNSFSGYSHSPPLLQVNRSSSNSPRXSEXDDGVVGKSSDGEDEQQVPKGPIHSPVELKHVHAXVVKVPEVNSSALPHKLRIKAKAMQIKVEAFDNEFEAXQKLSSPIDMXSKRHFELEKHSAPSMVHSSLXPFSVQVXNIQDWSLKSEHWHQKELSGKXQNSFKXGVVEMKDSGYKVSDPENLYLKQGIANLSAEVVSLKRLIAXQPISASDSG

SEQ ID NO: 17696 - protein, 433 aa, Homo sapiens
  MOD_RES (21)..(21): Selenocysteine
  MOD_RES (86)..(86): Selenocysteine
  MOD_RES (88)..(88): Selenocysteine
  MOD_RES (137)..(137): Selenocysteine
  MOD_RES (163)..(163): Selenocysteine
  MOD_RES (177)..(177): Selenocysteine
  MOD_RES (210)..(210): Selenocysteine
  MOD_RES (217)..(217): Selenocysteine
  MOD_RES (225)..(225): Selenocysteine
  MOD_RES (229)..(229): Selenocysteine
  MOD_RES (252)..(252): Selenocysteine
  MOD_RES (259)..(259): Selenocysteine
  MOD_RES (264)..(264): Selenocysteine
  MOD_RES (266)..(267): Selenocysteine
  MOD_RES (290)..(290): Selenocysteine
  MOD_RES (339)..(339): Selenocysteine
  MOD_RES (357)..(357): Selenocysteine
  MOD_RES (366)..(366): Selenocysteine
  MOD_RES (377)..(377): Selenocysteine
  MOD_RES (380)..(380): Selenocysteine
  MOD_RES (408)..(408): Selenocysteine
  MOD_RES (421)..(421): Selenocysteine
  MOD_RES (430)..(430): Selenocysteine
  MOD_RES (432)..(432): Selenocysteine
MDEFHPFIEALLPHVRAFSYXWFNLQARKRKYFKKHEKRMSKDEERAVKDELLGEKPEIKQKWASRLLAKLRKDIRPEFREDFVLXIXGKKPPCCVLSNPDQKGKIRRIDCLRQADKVWRLDLVMVILFKGIPLESXDGERLYKSPQCSNPGLCVQPHHIGVXIKELDLYLAYFVHXPESGQSDSSNQQGDADIKPLPNGHLSFQDCFVXSGVWNVXELVRVSQXPVAXASGPNFSLADLESPSYYNINQVXLGRRSIXSPPSXSXXKRPKSIDDSEMESPVDDVFYPGXGRSPAAGSSQSSGWPNDVDAGPASLKKSGKLDFCSALSSQGSSPRMAFXHHPLPVLAGVRPGSPRAXASALHFPSXSIIQQSSPYFXHPXIRYHHHHGQDSLKEFVQFVCSDGSGQAXGQHSQRQAPPLPXGLSASDPGXAXF

SEQ ID NO: 17697 - protein, 494 aa, Homo sapiens
  MOD_RES (21)..(21): Selenocysteine
  MOD_RES (86)..(86): Selenocysteine
  MOD_RES (88)..(88): Selenocysteine
  MOD_RES (137)..(137): Selenocysteine
  MOD_RES (163)..(163): Selenocysteine
  MOD_RES (177)..(177): Selenocysteine
  MOD_RES (210)..(210): Selenocysteine
  MOD_RES (217)..(217): Selenocysteine
  MOD_RES (225)..(225): Selenocysteine
  MOD_RES (229)..(229): Selenocysteine
  MOD_RES (252)..(252): Selenocysteine
  MOD_RES (259)..(259): Selenocysteine
  MOD_RES (264)..(264): Selenocysteine
  MOD_RES (266)..(267): Selenocysteine
  MOD_RES (290)..(290): Selenocysteine
  MOD_RES (339)..(339): Selenocysteine
  MOD_RES (357)..(357): Selenocysteine
  MOD_RES (366)..(366): Selenocysteine
  MOD_RES (377)..(377): Selenocysteine
  MOD_RES (380)..(380): Selenocysteine
  MOD_RES (408)..(408): Selenocysteine
  MOD_RES (445)..(445): Selenocysteine
  MOD_RES (447)..(447): Selenocysteine
  MOD_RES (455)..(455): Selenocysteine
  MOD_RES (463)..(464): Selenocysteine
MDEFHPFIEALLPHVRAFSYXWFNLQARKRKYFKKHEKRMSKDEERAVKDELLGEKPEIKQKWASRLLAKLRKDIRPEFREDFVLXIXGKKPPCCVLSNPDQKGKIRRIDCLRQADKVWRLDLVMVILFKGIPLESXDGERLYKSPQCSNPGLCVQPHHIGVXIKELDLYLAYFVHXPESGQSDSSNQQGDADIKPLPNGHLSFQDCFVXSGVWNVXELVRVSQXPVAXASGPNFSLADLESPSYYNINQVXLGRRSIXSPPSXSXXKRPKSIDDSEMESPVDDVFYPGXGRSPAAGSSQSSGWPNDVDAGPASLKKSGKLDFCSALSSQGSSPRMAFXHHPLPVLAGVRPGSPRAXASALHFPSXSIIQQSSPYFXHPXIRYHHHHGQDSLKEFVQFVCSDGSGQAXGQPNGSGQGKVPGSFLLPPPPPVARPVPLPMPDSKSXSXAPDGAALXPPSPSFAXXGASSANRFVSIGPRDGNFLNIPQQSQSWFL

SEQ ID NO: 17698 - protein, 403 aa, Homo sapiens
  MOD_RES (4)..(4): Selenocysteine
  MOD_RES (10)..(10): Selenocysteine
  MOD_RES (32)..(32): Selenocysteine
  MOD_RES (97)..(97): Selenocysteine
  MOD_RES (99)..(99): Selenocysteine
  MOD_RES (148)..(148): Selenocysteine
  MOD_RES (174)..(174): Selenocysteine
  MOD_RES (188)..(188): Selenocysteine
  MOD_RES (221)..(221): Selenocysteine
  MOD_RES (228)..(228): Selenocysteine
  MOD_RES (236)..(236): Selenocysteine
  MOD_RES (240)..(240): Selenocysteine
  MOD_RES (263)..(263): Selenocysteine
  MOD_RES (270)..(270): Selenocysteine
  MOD_RES (275)..(275): Selenocysteine
  MOD_RES (277)..(278): Selenocysteine
  MOD_RES (301)..(301): Selenocysteine
  MOD_RES (327)..(327): Selenocysteine
  MOD_RES (336)..(336): Selenocysteine
  MOD_RES (347)..(347): Selenocysteine
  MOD_RES (350)..(350): Selenocysteine
  MOD_RES (378)..(378): Selenocysteine
  MOD_RES (391)..(391): Selenocysteine
  MOD_RES (400)..(400): Selenocysteine
  MOD_RES (402)..(402): Selenocysteine
MGAXEPGGDXSSDEFHPFIEALLPHVRAFSYXWFNLQARKRKYFKKHEKRMSKDEERAVKDELLGEKPEIKQKWASRLLAKLRKDIRPEFREDFVLXIXGKKPPCCVLSNPDQKGKIRRIDCLRQADKVWRLDLVMVILFKGIPLESXDGERLYKSPQCSNPGLCVQPHHIGVXIKELDLYLAYFVHXPESGQSDSSNQQGDADIKPLPNGHLSFQDCFVXSGVWNVXELVRVSQXPVAXASGPNFSLADLESPSYYNINQVXLGRRSIXSPPSXSXXKRPKSIDDSEMESPVDDVFYPGXGRSPAAGSSQSSGWPNDVDAGSPRAXASALHFPSXSIIQQSSPYFXHPXIRYHHHHGQDSLKEFVQFVCSDGSGQAXGQHSQRQAPPLPXGLSASDPGXAXF

SEQ ID NO: 17699 - protein, 183 aa, Homo sapiens
  MOD_RES (4)..(4): Selenocysteine
  MOD_RES (10)..(10): Selenocysteine
  MOD_RES (17)..(17): Selenocysteine
  MOD_RES (19)..(19): Selenocysteine
  MOD_RES (45)..(45): Selenocysteine
  MOD_RES (110)..(110): Selenocysteine
  MOD_RES (112)..(112): Selenocysteine
  MOD_RES (161)..(161): Selenocysteine
MGAXEPGGDXSSVCVWXAXLSVRVCDEFHPFIEALLPHVRAFSYXWFNLQARKRKYFKKHEKRMSKDEERAVKDELLGEKPEIKQKWASRLLAKLRKDIRPEFREDFVLXIXGKKPPCCVLSNPDQKGKIRRIDCLRQADKVWRLDLVMVILFKGIPLESXDGERLYKSPQCSNPGLCVQPHH

SEQ ID NO: 17700 - protein, 59 aa, Homo sapiens
  MOD_RES (4)..(4): Selenocysteine
  MOD_RES (10)..(10): Selenocysteine
  MOD_RES (17)..(17): Selenocysteine
  MOD_RES (26)..(26): Selenocysteine
  MOD_RES (32)..(32): Selenocysteine
  MOD_RES (36)..(36): Selenocysteine
  MOD_RES (44)..(44): Selenocysteine
  MOD_RES (55)..(55): Selenocysteine
MGAXEPGGDXSSVMSSXRSSRHCCLXSALSPXPGSXCRRGSASXSRSMKSGCRRXRSGR

SEQ ID NO: 17701 - protein, 440 aa, Homo sapiens
  MOD_RES (28)..(28): Selenocysteine
  MOD_RES (93)..(93): Selenocysteine
  MOD_RES (95)..(95): Selenocysteine
  MOD_RES (144)..(144): Selenocysteine
  MOD_RES (170)..(170): Selenocysteine
  MOD_RES (184)..(184): Selenocysteine
  MOD_RES (217)..(217): Selenocysteine
  MOD_RES (224)..(224): Selenocysteine
  MOD_RES (232)..(232): Selenocysteine
  MOD_RES (236)..(236): Selenocysteine
  MOD_RES (259)..(259): Selenocysteine
  MOD_RES (266)..(266): Selenocysteine
  MOD_RES (271)..(271): Selenocysteine
  MOD_RES (273)..(274): Selenocysteine
  MOD_RES (297)..(297): Selenocysteine
  MOD_RES (346)..(346): Selenocysteine
  MOD_RES (364)..(364): Selenocysteine
  MOD_RES (373)..(373): Selenocysteine
  MOD_RES (384)..(384): Selenocysteine
  MOD_RES (387)..(387): Selenocysteine
  MOD_RES (415)..(415): Selenocysteine
  MOD_RES (428)..(428): Selenocysteine
  MOD_RES (437)..(437): Selenocysteine
  MOD_RES (439)..(439): Selenocysteine
MLPACRLQDEFHPFIEALLPHVRAFSYXWFNLQARKRKYFKKHEKRMSKDEERAVKDELLGEKPEIKQKWASRLLAKLRKDIRPEFREDFVLXIXGKKPPCCVLSNPDQKGKIRRIDCLRQADKVWRLDLVMVILFKGIPLESXDGERLYKSPQCSNPGLCVQPHHIGVXIKELDLYLAYFVHXPESGQSDSSNQQGDADIKPLPNGHLSFQDCFVXSGVWNVXELVRVSQXPVAXASGPNFSLADLESPSYYNINQVXLGRRSIXSPPSXSXXKRPKSIDDSEMESPVDDVFYPGXGRSPAAGSSQSSGWPNDVDAGPASLKKSGKLDFCSALSSQGSSPRMAFXHHPLPVLAGVRPGSPRAXASALHFPSXSIIQQSSPYFXHPXIRYHHHHGQDSLKEFVQFVCSDGSGQAXGQHSQRQAPPLPXGLSASDPGXAXF

SEQ ID NO: 17702 - protein, 101 aa, Homo sapiens
  MOD_RES (47)..(47): Selenocysteine
  MOD_RES (49)..(49): Selenocysteine
  MOD_RES (87)..(87): Selenocysteine
  MOD_RES (93)..(93): Selenocysteine
  MOD_RES (99)..(99): Selenocysteine
  MOD_RES (101)..(101): Selenocysteine
MSKDEERAVKDELLGEKPEIKQKWASRLLAKLRKDIRPEFREDFVLXIXGKKPPCCVLSNPDQKGKIRRIDCLRQADKNPDNQIVQXSKEMRXSNHCPXGX

SEQ ID NO: 17703 - protein, 125 aa, Homo sapiens
  MOD_RES (47)..(47): Selenocysteine
  MOD_RES (49)..(49): Selenocysteine
  MOD_RES (98)..(98): Selenocysteine
  MOD_RES (124)..(124): Selenocysteine
MSKDEERAVKDELLGEKPEIKQKWASRLLAKLRKDIRPEFREDFVLXIXGKKPPCCVLSNPDQKGKIRRIDCLRQADKVWRLDLVMVILFKGIPLESXDGERLYKSPQCSNPGLCVQPHHIGVXI

SEQ ID NO: 17704 - protein, 128 aa, Homo sapiens
  MOD_RES (47)..(47): Selenocysteine
  MOD_RES (49)..(49): Selenocysteine
  MOD_RES (98)..(98): Selenocysteine
  MOD_RES (124)..(124): Selenocysteine
MSKDEERAVKDELLGEKPEIKQKWASRLLAKLRKDIRPEFREDFVLXIXGKKPPCCVLSNPDQKGKIRRIDCLRQADKVWRLDLVMVILFKGIPLESXDGERLYKSPQCSNPGLCVQPHHIGVXIKEL

SEQ ID NO: 17705 - protein, 455 aa, Homo sapiens
  MOD_RES (47)..(47): Selenocysteine
  MOD_RES (49)..(49): Selenocysteine
  MOD_RES (98)..(98): Selenocysteine
  MOD_RES (124)..(124): Selenocysteine
  MOD_RES (138)..(138): Selenocysteine
  MOD_RES (171)..(171): Selenocysteine
  MOD_RES (178)..(178): Selenocysteine
  MOD_RES (186)..(186): Selenocysteine
  MOD_RES (190)..(190): Selenocysteine
  MOD_RES (213)..(213): Selenocysteine
  MOD_RES (220)..(220): Selenocysteine
  MOD_RES (225)..(225): Selenocysteine
  MOD_RES (227)..(228): Selenocysteine
  MOD_RES (251)..(251): Selenocysteine
  MOD_RES (300)..(300): Selenocysteine
  MOD_RES (318)..(318): Selenocysteine
  MOD_RES (327)..(327): Selenocysteine
  MOD_RES (338)..(338): Selenocysteine
  MOD_RES (341)..(341): Selenocysteine
  MOD_RES (369)..(369): Selenocysteine
  MOD_RES (406)..(406): Selenocysteine
  MOD_RES (408)..(408): Selenocysteine
  MOD_RES (416)..(416): Selenocysteine
  MOD_RES (424)..(425): Selenocysteine
MSKDEERAVKDELLGEKPEIKQKWASRLLAKLRKDIRPEFREDFVLXIXGKKPPCCVLSNPDQKGKIRRIDCLRQADKVWRLDLVMVILFKGIPLESXDGERLYKSPQCSNPGLCVQPHHIGVXIKELDLYLAYFVHXPESGQSDSSNQQGDADIKPLPNGHLSFQDCFVXSGVWNVXELVRVSQXPVAXASGPNFSLADLESPSYYNINQVXLGRRSIXSPPSXSXXKRPKSIDDSEMESPVDDVFYPGXGRSPAAGSSQSSGWPNDVDAGPASLKKSGKLDFCSALSSQGSSPRMAFXHHPLPVLAGVRPGSPRAXASALHFPSXSIIQQSSPYFXHPXIRYHHHHGQDSLKEFVQFVCSDGSGQAXGQPNGSGQGKVPGSFLLPPPPPVARPVPLPMPDSKSXSXAPDGAALXPPSPSFAXXGASSANRFVSIGPRDGNFLNIPQQSQSWFL

SEQ ID NO: 17706 - protein, 441 aa, Homo sapiens
  MOD_RES (8)..(8): Selenocysteine
  MOD_RES (29)..(29): Selenocysteine
  MOD_RES (94)..(94): Selenocysteine
  MOD_RES (96)..(96): Selenocysteine
  MOD_RES (145)..(145): Selenocysteine
  MOD_RES (171)..(171): Selenocysteine
  MOD_RES (185)..(185): Selenocysteine
  MOD_RES (218)..(218): Selenocysteine
  MOD_RES (225)..(225): Selenocysteine
  MOD_RES (233)..(233): Selenocysteine
  MOD_RES (237)..(237): Selenocysteine
  MOD_RES (260)..(260): Selenocysteine
  MOD_RES (267)..(267): Selenocysteine
  MOD_RES (272)..(272): Selenocysteine
  MOD_RES (274)..(275): Selenocysteine
  MOD_RES (298)..(298): Selenocysteine
  MOD_RES (347)..(347): Selenocysteine
  MOD_RES (365)..(365): Selenocysteine
  MOD_RES (374)..(374): Selenocysteine
  MOD_RES (385)..(385): Selenocysteine
  MOD_RES (388)..(388): Selenocysteine
  MOD_RES (416)..(416): Selenocysteine
  MOD_RES (429)..(429): Selenocysteine
  MOD_RES (438)..(438): Selenocysteine
  MOD_RES (440)..(440): Selenocysteine
MYSPYCLXQDEFHPFIEALLPHVRAFSYXWFNLQARKRKYFKKHEKRMSKDEERAVKDELLGEKPEIKQKWASRLLAKLRKDIRPEFREDFVLXIXGKKPPCCVLSNPDQKGKIRRIDCLRQADKVWRLDLVMVILFKGIPLESXDGERLYKSPQCSNPGLCVQPHHIGVXIKELDLYLAYFVHXPESGQSDSSNQQGDADIKPLPNGHLSFQDCFVXSGVWNVXELVRVSQXPVAXASGPNFSLADLESPSYYNINQVXLGRRSIXSPPSXSXXKRPKSIDDSEMESPVDDVFYPGXGRSPAAGSSQSSGWPNDVDAGPASLKKSGKLDFCSALSSQGSSPRMAFXHHPLPVLAGVRPGSPRAXASALHFPSXSIIQQSSPYFXHPXIRYHHHHGQDSLKEFVQFVCSDGSGQAXGQHSQRQAPPLPXGLSASDPGXAXF

SEQ ID NO: 17707 - protein, 502 aa, Homo sapiens
  MOD_RES (8)..(8): Selenocysteine
  MOD_RES (29)..(29): Selenocysteine
  MOD_RES (94)..(94): Selenocysteine
  MOD_RES (96)..(96): Selenocysteine
  MOD_RES (145)..(145): Selenocysteine
  MOD_RES (171)..(171): Selenocysteine
  MOD_RES (185)..(185): Selenocysteine
  MOD_RES (218)..(218): Selenocysteine
  MOD_RES (225)..(225): Selenocysteine
  MOD_RES (233)..(233): Selenocysteine
  MOD_RES (237)..(237): Selenocysteine
  MOD_RES (260)..(260): Selenocysteine
  MOD_RES (267)..(267): Selenocysteine
  MOD_RES (272)..(272): Selenocysteine
  MOD_RES (274)..(275): Selenocysteine
  MOD_RES (298)..(298): Selenocysteine
  MOD_RES (347)..(347): Selenocysteine
  MOD_RES (365)..(365): Selenocysteine
  MOD_RES (374)..(374): Selenocysteine
  MOD_RES (385)..(385): Selenocysteine
  MOD_RES (388)..(388): Selenocysteine
  MOD_RES (416)..(416): Selenocysteine
  MOD_RES (453)..(453): Selenocysteine
  MOD_RES (455)..(455): Selenocysteine
  MOD_RES (463)..(463): Selenocysteine
  MOD_RES (471)..(472): Selenocysteine
MYSPYCLXQDEFHPFIEALLPHVRAFSYXWFNLQARKRKYFKKHEKRMSKDEERAVKDELLGEKPEIKQKWASRLLAKLRKDIRPEFREDFVLXIXGKKPPCCVLSNPDQKGKIRRIDCLRQADKVWRLDLVMVILFKGIPLESXDGERLYKSPQCSNPGLCVQPHHIGVXIKELDLYLAYFVHXPESGQSDSSNQQGDADIKPLPNGHLSFQDCFVXSGVWNVXELVRVSQXPVAXASGPNFSLADLESPSYYNINQVXLGRRSIXSPPSXSXXKRPKSIDDSEMESPVDDVFYPGXGRSPAAGSSQSSGWPNDVDAGPASLKKSGKLDFCSALSSQGSSPRMAFXHHPLPVLAGVRPGSPRAXASALHFPSXSIIQQSSPYFXHPXIRYHHHHGQDSLKEFVQFVCSDGSGQAXGQPNGSGQGKVPGSFLLPPPPPVARPVPLPMPDSKSXSXAPDGAALXPPSPSFAXXGASSANRFVSIGPRDGNFLNIPQQSQSWFL

SEQ ID NO: 17708 - protein, 145 aa, Homo sapiens
  MOD_RES (22)..(22): Selenocysteine
  MOD_RES (24)..(24): Selenocysteine
  MOD_RES (39)..(39): Selenocysteine
  MOD_RES (102)..(102): Selenocysteine
  MOD_RES (125)..(125): Selenocysteine
  MOD_RES (127)..(127): Selenocysteine
MAEDDPYLGRPEQMFHLDPSLXHXIFNPEVFQPQMALPXADGPYLQILEQPKQRGFRFRYVCEGPSHGGLPGASSEKNKKSYPQVKICNYVGPAKVIVQLVXNGKNIHLHAHSLVGKHCEDGICXVXAGPKDMVVGFANLGILHV

SEQ ID NO: 17709 - protein, 969 aa, Homo sapiens
  MOD_RES (22)..(22): Selenocysteine
  MOD_RES (24)..(24): Selenocysteine
  MOD_RES (39)..(39): Selenocysteine
  MOD_RES (102)..(102): Selenocysteine
  MOD_RES (125)..(125): Selenocysteine
  MOD_RES (127)..(127): Selenocysteine
  MOD_RES (146)..(146): Selenocysteine
  MOD_RES (153)..(153): Selenocysteine
  MOD_RES (159)..(159): Selenocysteine
  MOD_RES (205)..(205): Selenocysteine
  MOD_RES (218)..(218): Selenocysteine
  MOD_RES (225)..(225): Selenocysteine
  MOD_RES (229)..(229): Selenocysteine
  MOD_RES (259)..(259): Selenocysteine
  MOD_RES (264)..(264): Selenocysteine
  MOD_RES (304)..(304): Selenocysteine
  MOD_RES (316)..(316): Selenocysteine
  MOD_RES (325)..(325): Selenocysteine
  MOD_RES (342)..(342): Selenocysteine
  MOD_RES (398)..(398): Selenocysteine
  MOD_RES (401)..(401): Selenocysteine
  MOD_RES (414)..(414): Selenocysteine
  MOD_RES (419)..(419): Selenocysteine
  MOD_RES (424)..(425): Selenocysteine
  MOD_RES (435)..(435): Selenocysteine
  MOD_RES (438)..(438): Selenocysteine
  MOD_RES (455)..(455): Selenocysteine
  MOD_RES (465)..(466): Selenocysteine
  MOD_RES (476)..(476): Selenocysteine
  MOD_RES (483)..(483): Selenocysteine
  MOD_RES (485)..(485): Selenocysteine
  MOD_RES (488)..(488): Selenocysteine
  MOD_RES (490)..(490): Selenocysteine
  MOD_RES (523)..(523): Selenocysteine
  MOD_RES (537)..(537): Selenocysteine
  MOD_RES (567)..(567): Selenocysteine
  MOD_RES (585)..(585): Selenocysteine
  MOD_RES (593)..(593): Selenocysteine
  MOD_RES (688)..(688): Selenocysteine
  MOD_RES (716)..(717): Selenocysteine
  MOD_RES (721)..(722): Selenocysteine
  MOD_RES (733)..(733): Selenocysteine
  MOD_RES (774)..(775): Selenocysteine
  MOD_RES (781)..(781): Selenocysteine
  MOD_RES (799)..(799): Selenocysteine
  MOD_RES (835)..(835): Selenocysteine
  MOD_RES (858)..(858): Selenocysteine
  MOD_RES (869)..(869): Selenocysteine
  MOD_RES (883)..(883): Selenocysteine
  MOD_RES (898)..(899): Selenocysteine
  MOD_RES (912)..(912): Selenocysteine
  MOD_RES (932)..(932): Selenocysteine
  MOD_RES (940)..(940): Selenocysteine
  MOD_RES (944)..(944): Selenocysteine
  MOD_RES (951)..(951): Selenocysteine
MAEDDPYLGRPEQMFHLDPSLXHXIFNPEVFQPQMALPXADGPYLQILEQPKQRGFRFRYVCEGPSHGGLPGASSEKNKKSYPQVKICNYVGPAKVIVQLVXNGKNIHLHAHSLVGKHCEDGICXVXAGPKDMVVGFANLGILHVXKKKVFEXLEARMXEACIRGYNPGLLVHPDLAYLQAEGGGDRQLGDREKELIRQAALQQXKEMDLSVVRLMFXAFLPDSXGSFXRRLEPVVSDAIYDSKAPNASNLKIVRMDRXAGCVXGGEEIYLLCDKVQKDDIQIRFYEEEENGGVWEGFGDFSPXDVHRQFAIVFKXPKYKDINIXKPASVFVQLRRKSDLEXSEPKPFLYYPEIKDKEEVQRKRQKLMPNFSDSFGGGSGAGAGGGGMFGSGGGGGGXGSXGPGYSFPHYGFPXYGGIXFHPGXXKSNAGMKHGXMDXESKKDPEGCDKSDDKNXVNLFGKVIEXXEQDQEPSEAXVGNGEVXLXYAXGXKEESAGVQDNLFLEKAMQLAKRHANALFDYAVXGDVKMLLAVQRHLXAVQDENGDSVLHLAIIHLHSQLVRDLLEVXSGLISDDIINMRNDLYQXPLHLAVIXKQEDVVEDLLRAGADLSLLDRLGNSVLHLAAKEGHDKVLSILLKHKKAALLLDHPNGDGLNAIHLAMMSNSLPCLLLLVAAGADVNAQEQKSGRXALHLAVEHDNISLAGCLLLEGDAHVDSXXYDGXXPLHIAAGRGSXRLAALLKAAGADPLVENFEPLYDLDDSWENAGEDEGVVPGXXPLDMAXSWQVFDILNGKPYEPEFXSDDLLAQGDMKQLAEDVKLQLYKLLEIPDPDKNWAXLAQKLGLGILNNAFRLSPAPSKXLMDNYEVSGGXVRELVEALRQMGYXEAIEVIQAASSPVKXXSQAHSLPLSPASXRQQIDELRDSDSVCDSGVEXSFRKLSFXESLXSGASLLXLNKMPHDYGQEGPLEGKI

SEQ ID NO: 17710 - protein, 968 aa, Homo sapiens
  MOD_RES (22)..(22): Selenocysteine
  MOD_RES (24)..(24): Selenocysteine
  MOD_RES (39)..(39): Selenocysteine
  MOD_RES (101)..(101): Selenocysteine
  MOD_RES (124)..(124): Selenocysteine
  MOD_RES (126)..(126): Selenocysteine
  MOD_RES (145)..(145): Selenocysteine
  MOD_RES (152)..(152): Selenocysteine
  MOD_RES (158)..(158): Selenocysteine
  MOD_RES (204)..(204): Selenocysteine
  MOD_RES (217)..(217): Selenocysteine
  MOD_RES (224)..(224): Selenocysteine
  MOD_RES (228)..(228): Selenocysteine
  MOD_RES (258)..(258): Selenocysteine
  MOD_RES (263)..(263): Selenocysteine
  MOD_RES (303)..(303): Selenocysteine
  MOD_RES (315)..(315): Selenocysteine
  MOD_RES (324)..(324): Selenocysteine
  MOD_RES (341)..(341): Selenocysteine
  MOD_RES (397)..(397): Selenocysteine
  MOD_RES (400)..(400): Selenocysteine
  MOD_RES (413)..(413): Selenocysteine
  MOD_RES (418)..(418): Selenocysteine
  MOD_RES (423)..(424): Selenocysteine
  MOD_RES (434)..(434): Selenocysteine
  MOD_RES (437)..(437): Selenocysteine
  MOD_RES (454)..(454): Selenocysteine
  MOD_RES (464)..(465): Selenocysteine
  MOD_RES (475)..(475): Selenocysteine
  MOD_RES (482)..(482): Selenocysteine
  MOD_RES (484)..(484): Selenocysteine
  MOD_RES (487)..(487): Selenocysteine
  MOD_RES (489)..(489): Selenocysteine
  MOD_RES (522)..(522): Selenocysteine
  MOD_RES (536)..(536): Selenocysteine
  MOD_RES (566)..(566): Selenocysteine
  MOD_RES (584)..(584): Selenocysteine
  MOD_RES (592)..(592): Selenocysteine
  MOD_RES (687)..(687): Selenocysteine
  MOD_RES (715)..(716): Selenocysteine
  MOD_RES (720)..(721): Selenocysteine
  MOD_RES (732)..(732): Selenocysteine
  MOD_RES (773)..(774): Selenocysteine
  MOD_RES (780)..(780): Selenocysteine
  MOD_RES (798)..(798): Selenocysteine
  MOD_RES (834)..(834): Selenocysteine
  MOD_RES (857)..(857): Selenocysteine
  MOD_RES (868)..(868): Selenocysteine
  MOD_RES (882)..(882): Selenocysteine
  MOD_RES (897)..(898): Selenocysteine
  MOD_RES (911)..(911): Selenocysteine
  MOD_RES (931)..(931): Selenocysteine
  MOD_RES (939)..(939): Selenocysteine
  MOD_RES (943)..(943): Selenocysteine
  MOD_RES (950)..(950): Selenocysteine
MAEDDPYLGRPEQMFHLDPSLXHXIFNPEVFQPQMALPXDGPYLQILEQPKQRGFRFRYVCEGPSHGGLPGASSEKNKKSYPQVKICNYVGPAKVIVQLVXNGKNIHLHAHSLVGKHCEDGICXVXAGPKDMVVGFANLGILHVXKKKVFEXLEARMXEACIRGYNPGLLVHPDLAYLQAEGGGDRQLGDREKELIRQAALQQXKEMDLSVVRLMFXAFLPDSXGSFXRRLEPVVSDAIYDSKAPNASNLKIVRMDRXAGCVXGGEEIYLLCDKVQKDDIQIRFYEEEENGGVWEGFGDFSPXDVHRQFAIVFKXPKYKDINIXKPASVFVQLRRKSDLEXSEPKPFLYYPEIKDKEEVQRKRQKLMPNFSDSFGGGSGAGAGGGGMFGSGGGGGGXGSXGPGYSFPHYGFPXYGGIXFHPGXXKSNAGMKHGXMDXESKKDPEGCDKSDDKNXVNLFGKVIEXXEQDQEPSEAXVGNGEVXLXYAXGXKEESAGVQDNLFLEKAMQLAKRHANALFDYAVXGDVKMLLAVQRHLXAVQDENGDSVLHLAIIHLHSQLVRDLLEVXSGLISDDIINMRNDLYQXPLHLAVIXKQEDVVEDLLRAGADLSLLDRLGNSVLHLAAKEGHDKVLSILLKHKKAALLLDHPNGDGLNAIHLAMMSNSLPCLLLLVAAGADVNAQEQKSGRXALHLAVEHDNISLAGCLLLEGDAHVDSXXYDGXXPLHIAAGRGSXRLAALLKAAGADPLVENFEPLYDLDDSWENAGEDEGVVPGXXPLDMAXSWQVFDILNGKPYEPEFXSDDLLAQGDMKQLAEDVKLQLYKLLEIPDPDKNWAXLAQKLGLGILNNAFRLSPAPSKXLMDNYEVSGGXVRELVEALRQMGYXEAIEVIQAASSPVKXXSQAHSLPLSPASXRQQIDELRDSDSVCDSGVEXSFRKLSFXESLXSGASLLXLNKMPHDYGQEGPLEGKI

SEQ ID NO: 17711 - protein, 196 aa, Homo sapiens
  MOD_RES (11)..(11): Selenocysteine
  MOD_RES (18)..(18): Selenocysteine
  MOD_RES (22)..(22): Selenocysteine
  MOD_RES (52)..(52): Selenocysteine
  MOD_RES (57)..(57): Selenocysteine
  MOD_RES (97)..(97): Selenocysteine
  MOD_RES (109)..(109): Selenocysteine
  MOD_RES (118)..(118): Selenocysteine
  MOD_RES (135)..(135): Selenocysteine
  MOD_RES (191)..(191): Selenocysteine
  MOD_RES (194)..(194): Selenocysteine
MDLSVVRLMFXAFLPDSXGSFXRRLEPVVSDAIYDSKAPNASNLKIVRMDRXAGCVXGGEEIYLLCDKVQKDDIQIRFYEEEENGGVWEGFGDFSPXDVHRQFAIVFKXPKYKDINIXKPASVFVQLRRKSDLEXSEPKPFLYYPEIKDKEEVQRKRQKLMPNFSDSFGGGSGAGAGGGGMFGSGGGGGGXGSXGP

SEQ ID NO: 17712 - protein, 198 aa, Homo sapiens
  MOD_RES (4)..(5): Selenocysteine
  MOD_RES (30)..(30): Selenocysteine
  MOD_RES (32)..(32): Selenocysteine
  MOD_RES (47)..(47): Selenocysteine
  MOD_RES (110)..(110): Selenocysteine
  MOD_RES (133)..(133): Selenocysteine
  MOD_RES (135)..(135): Selenocysteine
  MOD_RES (154)..(154): Selenocysteine
  MOD_RES (161)..(161): Selenocysteine
  MOD_RES (167)..(167): Selenocysteine
MKRXXSFRMAEDDPYLGRPEQMFHLDPSLXHXIFNPEVFQPQMALPXADGPYLQILEQPKQRGFRFRYVCEGPSHGGLPGASSEKNKKSYPQVKICNYVGPAKVIVQLVXNGKNIHLHAHSLVGKHCEDGICXVXAGPKDMVVGFANLGILHVXKKKVFEXLEARMXEACIRGYNPGLLVHPDLAYLQAEGGGDRQLG

SEQ ID NO: 17713 - protein, 74 aa, Homo sapiens
  MOD_RES (4)..(5): Selenocysteine
  MOD_RES (30)..(30): Selenocysteine
  MOD_RES (32)..(32): Selenocysteine
  MOD_RES (47)..(47): Selenocysteine
MKRXXSFRMAEDDPYLGRPEQMFHLDPSLXHXIFNPEVFQPQMALPXDGPYLQILEQPKQRGFRFRYVCEGPSH

SEQ ID NO: 17714 - protein, 788 aa, Homo sapiens
  MOD_RES (24)..(24): Selenocysteine
  MOD_RES (37)..(37): Selenocysteine
  MOD_RES (44)..(44): Selenocysteine
  MOD_RES (48)..(48): Selenocysteine
  MOD_RES (78)..(78): Selenocysteine
  MOD_RES (83)..(83): Selenocysteine
  MOD_RES (123)..(123): Selenocysteine
  MOD_RES (135)..(135): Selenocysteine
  MOD_RES (144)..(144): Selenocysteine
  MOD_RES (161)..(161): Selenocysteine
  MOD_RES (217)..(217): Selenocysteine
  MOD_RES (220)..(220): Selenocysteine
  MOD_RES (233)..(233): Selenocysteine
  MOD_RES (238)..(238): Selenocysteine
  MOD_RES (243)..(244): Selenocysteine
  MOD_RES (254)..(254): Selenocysteine
  MOD_RES (257)..(257): Selenocysteine
  MOD_RES (274)..(274): Selenocysteine
  MOD_RES (284)..(285): Selenocysteine
  MOD_RES (295)..(295): Selenocysteine
  MOD_RES (302)..(302): Selenocysteine
  MOD_RES (304)..(304): Selenocysteine
  MOD_RES (307)..(307): Selenocysteine
  MOD_RES (309)..(309): Selenocysteine
  MOD_RES (342)..(342): Selenocysteine
  MOD_RES (356)..(356): Selenocysteine
  MOD_RES (386)..(386): Selenocysteine
  MOD_RES (404)..(404): Selenocysteine
  MOD_RES (412)..(412): Selenocysteine
  MOD_RES (507)..(507): Selenocysteine
  MOD_RES (535)..(536): Selenocysteine
  MOD_RES (540)..(541): Selenocysteine
  MOD_RES (552)..(552): Selenocysteine
  MOD_RES (593)..(594): Selenocysteine
  MOD_RES (600)..(600): Selenocysteine
  MOD_RES (618)..(618): Selenocysteine
  MOD_RES (654)..(654): Selenocysteine
  MOD_RES (677)..(677): Selenocysteine
  MOD_RES (688)..(688): Selenocysteine
  MOD_RES (702)..(702): Selenocysteine
  MOD_RES (717)..(718): Selenocysteine
  MOD_RES (731)..(731): Selenocysteine
  MOD_RES (751)..(751): Selenocysteine
  MOD_RES (759)..(759): Selenocysteine
  MOD_RES (763)..(763): Selenocysteine
  MOD_RES (770)..(770): Selenocysteine
MNGLCCMALDREKELIRQAALQQXKEMDLSVVRLMFXAFLPDSXGSFXRRLEPVVSDAIYDSKAPNASNLKIVRMDRXAGCVXGGEEIYLLCDKVQKDDIQIRFYEEEENGGVWEGFGDFSPXDVHRQFAIVFKXPKYKDINIXKPASVFVQLRRKSDLEXSEPKPFLYYPEIKDKEEVQRKRQKLMPNFSDSFGGGSGAGAGGGGMFGSGGGGGGXGSXGPGYSFPHYGFPXYGGIXFHPGXXKSNAGMKHGXMDXESKKDPEGCDKSDDKNXVNLFGKVIEXXEQDQEPSEAXVGNGEVXLXYAXGXKEESAGVQDNLFLEKAMQLAKRHANALFDYAVXGDVKMLLAVQRHLXAVQDENGDSVLHLAIIHLHSQLVRDLLEVXSGLISDDIINMRNDLYQXPLHLAVIXKQEDVVEDLLRAGADLSLLDRLGNSVLHLAAKEGHDKVLSILLKHKKAALLLDHPNGDGLNAIHLAMMSNSLPCLLLLVAAGADVNAQEQKSGRXALHLAVEHDNISLAGCLLLEGDAHVDSXXYDGXXPLHIAAGRGSXRLAALLKAAGADPLVENFEPLYDLDDSWENAGEDEGVVPGXXPLDMAXSWQVFDILNGKPYEPEFXSDDLLAQGDMKQLAEDVKLQLYKLLEIPDPDKNWAXLAQKLGLGILNNAFRLSPAPSKXLMDNYEVSGGXVRELVEALRQMGYXEAIEVIQAASSPVKXXSQAHSLPLSPASXRQQIDELRDSDSVCDSGVEXSFRKLSFXESLXSGASLLXLNKMPHDYGQEGPLEGKI

SEQ ID NO: 17715 - protein, 22 aa, Homo sapiens
MESCYNPGLDGIIEYDDFKLNS

SEQ ID NO: 17716 - protein, 68 aa, Homo sapiens
  MOD_RES (34)..(34): Selenocysteine
MESCYNPGLDGIIEYDDFKLNSSIVEPKEPAPEXADGPYLVIVEQPKQRGFRFRYGCEGPSHGGLPGA

SEQ ID NO: 17717 - protein, 899 aa, Homo sapiens
  MOD_RES (34)..(34): Selenocysteine
  MOD_RES (76)..(76): Selenocysteine
  MOD_RES (79)..(79): Selenocysteine
  MOD_RES (97)..(97): Selenocysteine
  MOD_RES (130)..(130): Selenocysteine
  MOD_RES (142)..(142): Selenocysteine
  MOD_RES (149)..(149): Selenocysteine
  MOD_RES (167)..(167): Selenocysteine
  MOD_RES (236)..(236): Selenocysteine
  MOD_RES (279)..(279): Selenocysteine
  MOD_RES (291)..(291): Selenocysteine
  MOD_RES (304)..(304): Selenocysteine
  MOD_RES (324)..(324): Selenocysteine
  MOD_RES (345)..(345): Selenocysteine
  MOD_RES (410)..(410): Selenocysteine
  MOD_RES (429)..(429): Selenocysteine
  MOD_RES (467)..(467): Selenocysteine
  MOD_RES (482)..(482): Selenocysteine
  MOD_RES (490)..(490): Selenocysteine
  MOD_RES (501)..(501): Selenocysteine
  MOD_RES (523)..(523): Selenocysteine
  MOD_RES (529)..(529): Selenocysteine
  MOD_RES (537)..(537): Selenocysteine
  MOD_RES (540)..(540): Selenocysteine
  MOD_RES (629)..(629): Selenocysteine
  MOD_RES (636)..(636): Selenocysteine
  MOD_RES (642)..(642): Selenocysteine
  MOD_RES (651)..(651): Selenocysteine
  MOD_RES (655)..(655): Selenocysteine
  MOD_RES (665)..(665): Selenocysteine
  MOD_RES (670)..(670): Selenocysteine
  MOD_RES (682)..(682): Selenocysteine
  MOD_RES (684)..(684): Selenocysteine
  MOD_RES (710)..(710): Selenocysteine
  MOD_RES (724)..(724): Selenocysteine
  MOD_RES (732)..(732): Selenocysteine
  MOD_RES (737)..(737): Selenocysteine
  MOD_RES (740)..(740): Selenocysteine
  MOD_RES (744)..(744): Selenocysteine
  MOD_RES (753)..(753): Selenocysteine
  MOD_RES (759)..(759): Selenocysteine
  MOD_RES (773)..(773): Selenocysteine
  MOD_RES (806)..(806): Selenocysteine
  MOD_RES (810)..(811): Selenocysteine
  MOD_RES (852)..(852): Selenocysteine
  MOD_RES (859)..(859): Selenocysteine
MESCYNPGLDGIIEYDDFKLNSSIVEPKEPAPEXADGPYLVIVEQPKQRGFRFRYGCEGPSHGGLPGASSEKGRKXYPXVKICNYEGPAKIEVDLVXHSDPPRAHAHSLVGKQCSELGICAVSVGPKDMXAQFNNLGVLHVXKKNMMGXMIQKLQRQRLRSRPQGLXEAEQRELEQEAKELKKVMDLSIVRLRFSAFLRASDGSFSLPLKPVISQPIHDSKSPGASNLKISRMDKXAGSVRGGDEVYLLCDKVQKDDIEVRFYEDDENGWQAFGDFSPXDVHKQYAIVFRXPPYHKMKIERPVXVFLQLKRKRGGDVSDSKQFXYYPLVEDKEEVQRKRRKALPXFSQPFGGGSHMGGGSGGAAGGYGGAGGGGSLGFFPSSLAYSPYQSGAGPMGCYPGGGGGAQMAAXVPSRDSGEEAAEPSAPSRXPQCEPQAPEMLQRAREYNARLFGLAQRSARALLDYGVXADARALLAGQRHLLXAQDENGDXPLHLAIIHGQXSVIEQIVYVIHHAQDLGVVNLXNHLHQXPLHLAVIXGQXSVVSFLLRVGADPALLDRHGDSAMHLALRAGAGAPELLRALLQSGAPAVPQLLHMPDFEGLYPVHLAVRARSPECLDLLVDSGAEVEAXERQGGRXALHLAXEMEELGLVXHLVXKLRANVNARXFAGNXPLHLAAGLGYPXLXRLLLKAGADIHAENEEPLCPLPSPPXSDSDSDSEGPEKDXRSSFRGHXPLDLXCSXKVKXLLLNAAQNXMEPPLXPPSPAGPGLSLGDXALQNLEQLLDGPEAQGSWAELAERLGLRSLVDXYRQXXSPSGSLLRSYELAGGDLAGLLEALSDMGLEEGVRLLRGPEXRDKLPSXEVKEDSAYGSQSVEQEAEKLGPPPEPPGGLCHGHPQPQVH

SEQ ID NO: 17718 - protein, 900 aa, Homo sapiens
  MOD_RES (34)..(34): Selenocysteine
  MOD_RES (76)..(76): Selenocysteine
  MOD_RES (79)..(79): Selenocysteine
  MOD_RES (97)..(97): Selenocysteine
  MOD_RES (130)..(130): Selenocysteine
  MOD_RES (142)..(142): Selenocysteine
  MOD_RES (149)..(149): Selenocysteine
  MOD_RES (167)..(167): Selenocysteine
  MOD_RES (236)..(236): Selenocysteine
  MOD_RES (279)..(279): Selenocysteine
  MOD_RES (291)..(291): Selenocysteine
  MOD_RES (304)..(304): Selenocysteine
  MOD_RES (324)..(324): Selenocysteine
  MOD_RES (345)..(345): Selenocysteine
  MOD_RES (410)..(410): Selenocysteine
  MOD_RES (429)..(429): Selenocysteine
  MOD_RES (467)..(467): Selenocysteine
  MOD_RES (482)..(482): Selenocysteine
  MOD_RES (490)..(490): Selenocysteine
  MOD_RES (501)..(501): Selenocysteine
  MOD_RES (523)..(523): Selenocysteine
  MOD_RES (529)..(529): Selenocysteine
  MOD_RES (537)..(537): Selenocysteine
  MOD_RES (540)..(540): Selenocysteine
  MOD_RES (629)..(629): Selenocysteine
  MOD_RES (636)..(636): Selenocysteine
  MOD_RES (642)..(642): Selenocysteine
  MOD_RES (651)..(651): Selenocysteine
  MOD_RES (655)..(655): Selenocysteine
  MOD_RES (665)..(665): Selenocysteine
  MOD_RES (670)..(670): Selenocysteine
  MOD_RES (682)..(682): Selenocysteine
  MOD_RES (684)..(684): Selenocysteine
  MOD_RES (710)..(710): Selenocysteine
  MOD_RES (724)..(724): Selenocysteine
  MOD_RES (732)..(732): Selenocysteine
  MOD_RES (737)..(737): Selenocysteine
  MOD_RES (740)..(740): Selenocysteine
  MOD_RES (744)..(744): Selenocysteine
  MOD_RES (753)..(753): Selenocysteine
  MOD_RES (759)..(759): Selenocysteine
  MOD_RES (773)..(773): Selenocysteine
  MOD_RES (806)..(806): Selenocysteine
  MOD_RES (810)..(811): Selenocysteine
  MOD_RES (852)..(852): Selenocysteine
  MOD_RES (859)..(859): Selenocysteine
MESCYNPGLDGIIEYDDFKLNSSIVEPKEPAPEXADGPYLVIVEQPKQRGFRFRYGCEGPSHGGLPGASSEKGRKXYPXVKICNYEGPAKIEVDLVXHSDPPRAHAHSLVGKQCSELGICAVSVGPKDMXAQFNNLGVLHVXKKNMMGXMIQKLQRQRLRSRPQGLXEAEQRELEQEAKELKKVMDLSIVRLRFSAFLRASDGSFSLPLKPVISQPIHDSKSPGASNLKISRMDKXAGSVRGGDEVYLLCDKVQKDDIEVRFYEDDENGWQAFGDFSPXDVHKQYAIVFRXPPYHKMKIERPVXVFLQLKRKRGGDVSDSKQFXYYPLVEDKEEVQRKRRKALPXFSQPFGGGSHMGGGSGGAAGGYGGAGGGGSLGFFPSSLAYSPYQSGAGPMGCYPGGGGGAQMAAXVPSRDSGEEAAEPSAPSRXPQCEPQAPEMLQRAREYNARLFGLAQRSARALLDYGVXADARALLAGQRHLLXAQDENGDXPLHLAIIHGQXSVIEQIVYVIHHAQDLGVVNLXNHLHQXPLHLAVIXGQXSVVSFLLRVGADPALLDRHGDSAMHLALRAGAGAPELLRALLQSGAPAVPQLLHMPDFEGLYPVHLAVRARSPECLDLLVDSGAEVEAXERQGGRXALHLAXEMEELGLVXHLVXKLRANVNARXFAGNXPLHLAAGLGYPXLXRLLLKAGADIHAENEEPLCPLPSPPXSDSDSDSEGPEKDXRSSFRGHXPLDLXCSXKVKXLLLNAAQNXMEPPLXPPSPAGPGLSLGDXALQNLEQLLDGPEAQGSWAELAERLGLRSLVDXYRQXXSPSGSLLRSYELAGGDLAGLLEALSDMGLEEGVRLLRGPEXRDKLPSXAEVKEDSAYGSQSVEQEAEKLGPPPEPPGGLCHGHPQPQVH

SEQ ID NO: 17719 - protein, 227 aa, Homo sapiens
  MOD_RES (23)..(23): Selenocysteine
  MOD_RES (31)..(31): Selenocysteine
  MOD_RES (56)..(56): Selenocysteine
  MOD_RES (74)..(74): Selenocysteine
  MOD_RES (78)..(79): Selenocysteine
  MOD_RES (89)..(89): Selenocysteine
  MOD_RES (95)..(95): Selenocysteine
  MOD_RES (129)..(129): Selenocysteine
  MOD_RES (157)..(157): Selenocysteine
  MOD_RES (167)..(167): Selenocysteine
  MOD_RES (173)..(173): Selenocysteine
  MOD_RES (183)..(183): Selenocysteine
  MOD_RES (201)..(201): Selenocysteine
  MOD_RES (206)..(206): Selenocysteine
  MOD_RES (209)..(209): Selenocysteine
  MOD_RES (226)..(226): Selenocysteine
MEVIRQVKGDLAFLNFQNNLQQXPLHLAVIXNQPEIAEALLGAGCDPELRDFRGNXPLHLACEQGCLASVGVLXQSCXXPHLHSILKAXNYNGHXCLHLASIHGYLGIVELLVSLGADVNAQEPCNGRXALHLAVDLQNPDLVSLLLKCGADVNRVXYQGYSPYQLXWGRPSXRIQQQLGQLXLENLQMLPESEDEESYDXESEFXEFXEDELPYDDCVFGGQRLXL

SEQ ID NO: 17720 - protein, 69 aa, Homo sapiens
  MOD_RES (47)..(47): Selenocysteine
  MOD_RES (66)..(66): Selenocysteine
MFQAAERPQEWAMEGPRDGLKKERLLDDRHDSGLDSMKDEEYEQMLXEDGDSFLHLAIIHEEKALXMEV

SEQ ID NO: 17721 - protein, 317 aa, Homo sapiens
  MOD_RES (71)..(71): Selenocysteine
  MOD_RES (90)..(90): Selenocysteine
  MOD_RES (113)..(113): Selenocysteine
  MOD_RES (121)..(121): Selenocysteine
  MOD_RES (146)..(146): Selenocysteine
  MOD_RES (164)..(164): Selenocysteine
  MOD_RES (168)..(169): Selenocysteine
  MOD_RES (179)..(179): Selenocysteine
  MOD_RES (185)..(185): Selenocysteine
  MOD_RES (219)..(219): Selenocysteine
  MOD_RES (247)..(247): Selenocysteine
  MOD_RES (257)..(257): Selenocysteine
  MOD_RES (263)..(263): Selenocysteine
  MOD_RES (273)..(273): Selenocysteine
  MOD_RES (291)..(291): Selenocysteine
  MOD_RES (296)..(296): Selenocysteine
  MOD_RES (299)..(299): Selenocysteine
  MOD_RES (316)..(316): Selenocysteine
MFQAAERPQEWAMEGPRDGLKKERLLDDRHDSGLDSMKDEEYEQMVKELQEIRLEPQEVPRGSEPWKQQLXEDGDSFLHLAIIHEEKALXMEVIRQVKGDLAFLNFQNNLQQXPLHLAVIXNQPEIAEALLGAGCDPELRDFRGNXPLHLACEQGCLASVGVLXQSCXXPHLHSILKAXNYNGHXCLHLASIHGYLGIVELLVSLGADVNAQEPCNGRXALHLAVDLQNPDLVSLLLKCGADVNRVXYQGYSPYQLXWGRPSXRIQQQLGQLXLENLQMLPESEDEESYDXESEFXEFXEDELPYDDCVFGGQRLXL

SEQ ID NO: 17722 - protein, 274 aa, Homo sapiens
  MOD_RES (71)..(71): Selenocysteine
  MOD_RES (90)..(90): Selenocysteine
  MOD_RES (113)..(113): Selenocysteine
  MOD_RES (121)..(121): Selenocysteine
  MOD_RES (146)..(146): Selenocysteine
  MOD_RES (164)..(164): Selenocysteine
  MOD_RES (168)..(169): Selenocysteine
  MOD_RES (179)..(179): Selenocysteine
  MOD_RES (185)..(185): Selenocysteine
  MOD_RES (214)..(214): Selenocysteine
  MOD_RES (220)..(220): Selenocysteine
  MOD_RES (230)..(230): Selenocysteine
  MOD_RES (248)..(248): Selenocysteine
  MOD_RES (253)..(253): Selenocysteine
  MOD_RES (256)..(256): Selenocysteine
  MOD_RES (273)..(273): Selenocysteine
MFQAAERPQEWAMEGPRDGLKKERLLDDRHDSGLDSMKDEEYEQMVKELQEIRLEPQEVPRGSEPWKQQLXEDGDSFLHLAIIHEEKALXMEVIRQVKGDLAFLNFQNNLQQXPLHLAVIXNQPEIAEALLGAGCDPELRDFRGNXPLHLACEQGCLASVGVLXQSCXXPHLHSILKAXNYNGHXCLHLASIHGYLGIVELLVSLGADVNAQLXWGRPSXRIQQQLGQLXLENLQMLPESEDEESYDXESEFXEFXEDELPYDDCVFGGQRLXL

SEQ ID NO: 17723 - protein, 82 aa, Homo sapiens
  MOD_RES (71)..(71): Selenocysteine
  MOD_RES (80)..(80): Selenocysteine
MFQAAERPQEWAMEGPRDGLKKERLLDDRHDSGLDSMKDEEYEQMVKELQEIRLEPQEVPRGSEPWKQQLXEDGDSLHSXWL

SEQ ID NO: 17724 - protein, 338 aa, Homo sapiens
  MOD_RES (55)..(55): Selenocysteine
  MOD_RES (60)..(60): Selenocysteine
  MOD_RES (84)..(84): Selenocysteine
  MOD_RES (96)..(96): Selenocysteine
  MOD_RES (107)..(107): Selenocysteine
  MOD_RES (109)..(109): Selenocysteine
  MOD_RES (129)..(129): Selenocysteine
  MOD_RES (160)..(160): Selenocysteine
  MOD_RES (169)..(169): Selenocysteine
  MOD_RES (172)..(172): Selenocysteine
  MOD_RES (175)..(175): Selenocysteine
  MOD_RES (209)..(209): Selenocysteine
  MOD_RES (239)..(239): Selenocysteine
  MOD_RES (276)..(276): Selenocysteine
MAGVACLGKAADADEWCDSGLGSLGPDAAAPGGPGLGAELGPGLSWAPLVFGYVXEDGDXALHLAVIHQHEPFLDFLLGFSAGXEYMDLQNDLGQXALHLAAILGEXSXVEKLYAAGAGLCVAERRGHXALHLACRVGAHACARALLQPRPRRPREAPDXYLAQGPDRXPDXNHXPVALYPDSDLEKEEEESEEDWKLQLEAENYEGHXPLHVAVIHKDVEMVRLLRDAGADLDKPEPXCGRSPLHLAVEAQAADVLELLLRAGANPAARMYGGRXPLGSAMLRPNPILARLLRAHGAPEPEGEDEKSGPCSSSSDSDSGDEGVSQEERQGSPAGGSG

SEQ ID NO: 17725 - protein, 356 aa, Homo sapiens
  MOD_RES (55)..(55): Selenocysteine
  MOD_RES (60)..(60): Selenocysteine
  MOD_RES (84)..(84): Selenocysteine
  MOD_RES (96)..(96): Selenocysteine
  MOD_RES (107)..(107): Selenocysteine
  MOD_RES (109)..(109): Selenocysteine
  MOD_RES (129)..(129): Selenocysteine
  MOD_RES (160)..(160): Selenocysteine
  MOD_RES (169)..(169): Selenocysteine
  MOD_RES (172)..(172): Selenocysteine
  MOD_RES (175)..(175): Selenocysteine
  MOD_RES (209)..(209): Selenocysteine
  MOD_RES (239)..(239): Selenocysteine
  MOD_RES (276)..(276): Selenocysteine
  MOD_RES (338)..(338): Selenocysteine
  MOD_RES (343)..(343): Selenocysteine
MAGVACLGKAADADEWCDSGLGSLGPDAAAPGGPGLGAELGPGLSWAPLVFGYVXEDGDXALHLAVIHQHEPFLDFLLGFSAGXEYMDLQNDLGQXALHLAAILGEXSXVEKLYAAGAGLCVAERRGHXALHLACRVGAHACARALLQPRPRRPREAPDXYLAQGPDRXPDXNHXPVALYPDSDLEKEEEESEEDWKLQLEAENYEGHXPLHVAVIHKDVEMVRLLRDAGADLDKPEPXCGRSPLHLAVEAQAADVLELLLRAGANPAARMYGGRXPLGSAMLRPNPILARLLRAHGAPEPEGEDEKSGPCSSSSDSDSGDEGDEYDDIVVHSSRSQXRLPPXPASKPLPDDPRPV

SEQ ID NO: 17726 - protein, 65 aa, Homo sapiens
  MOD_RES (55)..(55): Selenocysteine
  MOD_RES (60)..(60): Selenocysteine
MAGVACLGKAADADEWCDSGLGSLGPDAAAPGGPGLGAELGPGLSWAPLVFGYVXEDGDXLLGRH

SEQ ID NO: 17727 - protein, 234 aa, Homo sapiens
  MOD_RES (10)..(10): Selenocysteine
  MOD_RES (21)..(21): Selenocysteine
  MOD_RES (23)..(23): Selenocysteine
  MOD_RES (43)..(43): Selenocysteine
  MOD_RES (74)..(74): Selenocysteine
  MOD_RES (83)..(83): Selenocysteine
  MOD_RES (86)..(86): Selenocysteine
  MOD_RES (89)..(89): Selenocysteine
  MOD_RES (123)..(123): Selenocysteine
  MOD_RES (153)..(153): Selenocysteine
  MOD_RES (190)..(190): Selenocysteine
MDLQNDLGQXALHLAAILGEXSXVEKLYAAGAGLCVAERRGHXALHLACRVGAHACARALLQPRPRRPREAPDXYLAQGPDRXPDXNHXPVALYPDSDLEKEEEESEEDWKLQLEAENYEGHXPLHVAVIHKDVEMVRLLRDAGADLDKPEPXCGRSPLHLAVEAQAADVLELLLRAGANPAARMYGGRXPLGSAMLRPNPILARLLRAHGAPEPEGEDEKSGPCSSSSDSDSG

SEQ ID NO: 17728 - protein, 270 aa, Homo sapiens
  MOD_RES (10)..(10): Selenocysteine
  MOD_RES (21)..(21): Selenocysteine
  MOD_RES (23)..(23): Selenocysteine
  MOD_RES (43)..(43): Selenocysteine
  MOD_RES (74)..(74): Selenocysteine
  MOD_RES (83)..(83): Selenocysteine
  MOD_RES (86)..(86): Selenocysteine
  MOD_RES (89)..(89): Selenocysteine
  MOD_RES (123)..(123): Selenocysteine
  MOD_RES (153)..(153): Selenocysteine
  MOD_RES (190)..(190): Selenocysteine
  MOD_RES (252)..(252): Selenocysteine
  MOD_RES (257)..(257): Selenocysteine
MDLQNDLGQXALHLAAILGEXSXVEKLYAAGAGLCVAERRGHXALHLACRVGAHACARALLQPRPRRPREAPDXYLAQGPDRXPDXNHXPVALYPDSDLEKEEEESEEDWKLQLEAENYEGHXPLHVAVIHKDVEMVRLLRDAGADLDKPEPXCGRSPLHLAVEAQAADVLELLLRAGANPAARMYGGRXPLGSAMLRPNPILARLLRAHGAPEPEGEDEKSGPCSSSSDSDSGDEGDEYDDIVVHSSRSQXRLPPXPASKPLPDDPRPV

SEQ ID NO: 17729 - protein, 149 aa, Homo sapiens
  MOD_RES (8)..(8): Selenocysteine
  MOD_RES (20)..(20): Selenocysteine
  MOD_RES (31)..(31): Selenocysteine
  MOD_RES (33)..(33): Selenocysteine
  MOD_RES (53)..(53): Selenocysteine
  MOD_RES (84)..(84): Selenocysteine
  MOD_RES (93)..(93): Selenocysteine
  MOD_RES (96)..(96): Selenocysteine
  MOD_RES (99)..(99): Selenocysteine
  MOD_RES (133)..(133): Selenocysteine
MNGFSAGXEYMDLQNDLGQXALHLAAILGEXSXVEKLYAAGAGLCVAERRGHXALHLACRVGAHACARALLQPRPRRPREAPDXYLAQGPDRXPDXNHXPVALYPDSDLEKEEEESEEDWKLQLEAENYEGHXPLHVAVIHKDVEMVRL

SEQ ID NO: 17730 - protein, 313 aa, Homo sapiens
  MOD_RES (51)..(51): Selenocysteine
  MOD_RES (87)..(87): Selenocysteine
  MOD_RES (127)..(127): Selenocysteine
  MOD_RES (155)..(155): Selenocysteine
  MOD_RES (159)..(159): Selenocysteine
  MOD_RES (180)..(180): Selenocysteine
  MOD_RES (200)..(200): Selenocysteine
  MOD_RES (209)..(209): Selenocysteine
  MOD_RES (221)..(221): Selenocysteine
  MOD_RES (236)..(236): Selenocysteine
  MOD_RES (246)..(246): Selenocysteine
  MOD_RES (275)..(275): Selenocysteine
MEAGPWRVSAPPSGPPQFPAVVPGPSLEVARAHMLALGPQQLLAQDEEGDXLLHLFAARGLRWAAYAAAEVLQVYRRLDIREHKGKXPLLVAAAANQPLIVEDLLNLGAEPNAADHQGRSVLHVAAXYGLPGVLLAVLNSGVQVDLEARDFEGLXPLHXAILALNVAMRPSDLCPRVLSXQARDRLDCVHMLLQMGANHXSQEIKSNKXVLHLAVQAANPXLVQLLLELPRGDLRXFVNMKAHGNXALHMAAALPPGPAQEAIVRHLLAAGADPXLRNLENEQPVHLLRPGPGPEGLRQLLKRSRVAPPGLSS

SEQ ID NO: 17731 - protein, 150 aa, Homo sapiens
  MOD_RES (7)..(7): Selenocysteine
  MOD_RES (66)..(66): Selenocysteine
  MOD_RES (102)..(102): Selenocysteine
  MOD_RES (142)..(142): Selenocysteine
MEDPPDXQFYVGSSLPQAGPWRVSAPPSGPPQFPAVVPGPSLEVARAHMLALGPQQLLAQDEEGDXLLHLFAARGLRWAAYAAAEVLQVYRRLDIREHKGKXPLLVAAAANQPLIVEDLLNLGAEPNAADHQGRSVLHVAAXYGLPGVLL

SEQ ID NO: 17732 - protein, 65 aa, Homo sapiens
  MOD_RES (1)..(1): Any amino acid
  MOD_RES (17)..(17): Selenocysteine
  MOD_RES (21)..(21): Selenocysteine
  MOD_RES (42)..(42): Selenocysteine
  MOD_RES (62)..(62): Selenocysteine
XSGVQVDLEARDFEGLXPLHXAILALNVAMRPSDLCPRVLSXQARDRLDCVHMLLQMGANHXSQR

SEQ ID NO: 17733 - protein, 358 aa, Homo sapiens
  MOD_RES (4)..(4): Selenocysteine
  MOD_RES (77)..(77): Selenocysteine
  MOD_RES (91)..(91): Selenocysteine
  MOD_RES (114)..(114): Selenocysteine
  MOD_RES (169)..(169): Selenocysteine
  MOD_RES (254)..(254): Selenocysteine
  MOD_RES (333)..(333): Selenocysteine
  MOD_RES (344)..(344): Selenocysteine
MASXSRRQRRERRFRRYLSAGRLVRAQALLQRHPGLDVDAGQPPPLHRACARHDAPALCLLLRLGADPAHQDRHGDXALHAAARQGPDAYXDFFLPLLSRCPSAMGIKNKDGEXPGQILGWGPPWDSAEEEEEDDASKEREWRQKLQGELEDEWQEVMGRFEGDASHEXQEPESFSAWSDRLAREHAQKCQQQQREAEGSCRPPRAEGSSQSWRQQEEEQRLFRERARAKEEELRESRARRAQEALGDREPKPXRAGPREEHPRGAGRGSLWRFGDVPWPCPGGGDPEAMAAALVARGPPLEEQGALRRYLRVQQVRWHPDRFLQRFRSQIEXWELGRVMGAVXALSQALNRHAEALK

SEQ ID NO: 17734 - protein, 358 aa, Homo sapiens
  MOD_RES (4)..(4): Selenocysteine
  MOD_RES (77)..(77): Selenocysteine
  MOD_RES (91)..(91): Selenocysteine
  MOD_RES (114)..(114): Selenocysteine
  MOD_RES (169)..(169): Selenocysteine
  MOD_RES (254)..(254): Selenocysteine
  MOD_RES (333)..(333): Selenocysteine
  MOD_RES (344)..(344): Selenocysteine
MASXSRRQRRERRFRRYLSAGRLVRAQALLQRHPGLDVDAGQPPPLHRACARHDAPALCLLLRLGADPAHQDRHGDXALHAAARQGPDAYXDFFLPLLSRCPSAMGIKNKDGEXPGQILGWGPPWDSAEEEEEDDASKEREWRQKLQGELEDEWQEVMGRFEGDASHEXQEPESFSAWSDRLAREHAQKCQQQQREAEGSRRPPRAEGSSQSWRQQEEEQRLFRERARAKEEELRESRARRAQEALGDREPKPXRAGPREEHPRGAGRGSLWRFGDVPWPCPGGGDPEAMAAALVARGPPLEEQGALRRYLRVQQVRWHPDRFLQRFRSQIEXWELGRVMGAVXALSQALNRHAEALK

SEQ ID NO: 17735 - protein, 366 aa, Homo sapiens
  MOD_RES (15)..(15): Selenocysteine
  MOD_RES (27)..(27): Selenocysteine
  MOD_RES (100)..(100): Selenocysteine
  MOD_RES (114)..(114): Selenocysteine
  MOD_RES (137)..(137): Selenocysteine
  MOD_RES (177)..(177): Selenocysteine
  MOD_RES (262)..(262): Selenocysteine
  MOD_RES (341)..(341): Selenocysteine
  MOD_RES (352)..(352): Selenocysteine
MSNPSPQVPEEEASXSVCRPKSSMASXSRRQRRERRFRRYLSAGRLVRAQALLQRHPGLDVDAGQPPPLHRACARHDAPALCLLLRLGADPAHQDRHGDXALHAAARQGPDAYXDFFLPLLSRCPSAMGIKNKDGEXPGQILGWGPPWDSAEEEEEDDASKEREWRQKLQGDASHEXQEPESFSAWSDRLAREHAQKCQQQQREAEGSCRPPRAEGSSQSWRQQEEEQRLFRERARAKEEELRESRARRAQEALGDREPKPXRAGPREEHPRGAGRGSLWRFGDVPWPCPGGGDPEAMAAALVARGPPLEEQGALRRYLRVQQVRWHPDRFLQRFRSQIEXWELGRVMGAVXALSQALNRHAEALK

SEQ ID NO: 17736 - protein, 366 aa, Homo sapiens
  MOD_RES (15)..(15): Selenocysteine
  MOD_RES (27)..(27): Selenocysteine
  MOD_RES (100)..(100): Selenocysteine
  MOD_RES (114)..(114): Selenocysteine
  MOD_RES (137)..(137): Selenocysteine
  MOD_RES (177)..(177): Selenocysteine
  MOD_RES (262)..(262): Selenocysteine
  MOD_RES (341)..(341): Selenocysteine
  MOD_RES (352)..(352): Selenocysteine
MSNPSPQVPEEEASXSVCRPKSSMASXSRRQRRERRFRRYLSAGRLVRAQALLQRHPGLDVDAGQPPPLHRACARHDAPALCLLLRLGADPAHQDRHGDXALHAAARQGPDAYXDFFLPLLSRCPSAMGIKNKDGEXPGQILGWGPPWDSAEEEEEDDASKEREWRQKLQGDASHEXQEPESFSAWSDRLAREHAQKCQQQQREAEGSRRPPRAEGSSQSWRQQEEEQRLFRERARAKEEELRESRARRAQEALGDREPKPXRAGPREEHPRGAGRGSLWRFGDVPWPCPGGGDPEAMAAALVARGPPLEEQGALRRYLRVQQVRWHPDRFLQRFRSQIEXWELGRVMGAVXALSQALNRHAEALK

SEQ ID NO: 17737 - protein, 381 aa, Homo sapiens
  MOD_RES (15)..(15): Selenocysteine
  MOD_RES (27)..(27): Selenocysteine
  MOD_RES (100)..(100): Selenocysteine
  MOD_RES (114)..(114): Selenocysteine
  MOD_RES (137)..(137): Selenocysteine
  MOD_RES (192)..(192): Selenocysteine
  MOD_RES (277)..(277): Selenocysteine
  MOD_RES (356)..(356): Selenocysteine
  MOD_RES (367)..(367): Selenocysteine
MSNPSPQVPEEEASXSVCRPKSSMASXSRRQRRERRFRRYLSAGRLVRAQALLQRHPGLDVDAGQPPPLHRACARHDAPALCLLLRLGADPAHQDRHGDXALHAAARQGPDAYXDFFLPLLSRCPSAMGIKNKDGEXPGQILGWGPPWDSAEEEEEDDASKEREWRQKLQGELEDEWQEVMGRFEGDASHEXQEPESFSAWSDRLAREHAQKCQQQQREAEGSCRPPRAEGSSQSWRQQEEEQRLFRERARAKEEELRESRARRAQEALGDREPKPXRAGPREEHPRGAGRGSLWRFGDVPWPCPGGGDPEAMAAALVARGPPLEEQGALRRYLRVQQVRWHPDRFLQRFRSQIEXWELGRVMGAVXALSQALNRHAEALK

SEQ ID NO: 17738 - protein, 381 aa, Homo sapiens
  MOD_RES (15)..(15): Selenocysteine
  MOD_RES (27)..(27): Selenocysteine
  MOD_RES (100)..(100): Selenocysteine
  MOD_RES (114)..(114): Selenocysteine
  MOD_RES (137)..(137): Selenocysteine
  MOD_RES (192)..(192): Selenocysteine
  MOD_RES (277)..(277): Selenocysteine
  MOD_RES (356)..(356): Selenocysteine
  MOD_RES (367)..(367): Selenocysteine
MSNPSPQVPEEEASXSVCRPKSSMASXSRRQRRERRFRRYLSAGRLVRAQALLQRHPGLDVDAGQPPPLHRACARHDAPALCLLLRLGADPAHQDRHGDXALHAAARQGPDAYXDFFLPLLSRCPSAMGIKNKDGEXPGQILGWGPPWDSAEEEEEDDASKEREWRQKLQGELEDEWQEVMGRFEGDASHEXQEPESFSAWSDRLAREHAQKCQQQQREAEGSRRPPRAEGSSQSWRQQEEEQRLFRERARAKEEELRESRARRAQEALGDREPKPXRAGPREEHPRGAGRGSLWRFGDVPWPCPGGGDPEAMAAALVARGPPLEEQGALRRYLRVQQVRWHPDRFLQRFRSQIEXWELGRVMGAVXALSQALNRHAEALK

SEQ ID NO: 17739 - protein, 222 aa, Homo sapiens
  MOD_RES (15)..(15): Selenocysteine
  MOD_RES (27)..(27): Selenocysteine
  MOD_RES (100)..(100): Selenocysteine
  MOD_RES (114)..(114): Selenocysteine
  MOD_RES (137)..(137): Selenocysteine
  MOD_RES (190)..(190): Selenocysteine
  MOD_RES (209)..(209): Selenocysteine
MSNPSPQVPEEEASXSVCRPKSSMASXSRRQRRERRFRRYLSAGRLVRAQALLQRHPGLDVDAGQPPPLHRACARHDAPALCLLLRLGADPAHQDRHGDXALHAAARQGPDAYXDFFLPLLSRCPSAMGIKNKDGEXPGQILGWGPPWDSAEEEEEDDASKEREWRQKLQGELEDEWQEVMGRFEGEKSXAIHSCPSPLAAFHLHECVXLGSSAPSSVLPCF

SEQ ID NO: 17740 - protein, 125 aa, Homo sapiens
  MOD_RES (15)..(15): Selenocysteine
  MOD_RES (27)..(27): Selenocysteine
  MOD_RES (100)..(100): Selenocysteine
MSNPSPQVPEEEASXSVCRPKSSMASXSRRQRRERRFRRYLSAGRLVRAQALLQRHPGLDVDAGQPPPLHRACARHDAPALCLLLRLGADPAHQDRHGDXALHAAARQGPDGQQSFGKSLLCRRP

SEQ ID NO: 17741 - protein, 833 aa, Homo sapiens
  MOD_RES (10)..(10): Selenocysteine
  MOD_RES (15)..(15): Selenocysteine
  MOD_RES (34)..(34): Selenocysteine
  MOD_RES (85)..(85): Selenocysteine
  MOD_RES (128)..(128): Selenocysteine
  MOD_RES (131)..(131): Selenocysteine
  MOD_RES (138)..(138): Selenocysteine
  MOD_RES (144)..(144): Selenocysteine
  MOD_RES (172)..(172): Selenocysteine
  MOD_RES (196)..(197): Selenocysteine
  MOD_RES (208)..(208): Selenocysteine
  MOD_RES (270)..(270): Selenocysteine
  MOD_RES (294)..(294): Selenocysteine
  MOD_RES (316)..(316): Selenocysteine
  MOD_RES (342)..(342): Selenocysteine
  MOD_RES (344)..(344): Selenocysteine
  MOD_RES (352)..(353): Selenocysteine
  MOD_RES (368)..(368): Selenocysteine
  MOD_RES (418)..(418): Selenocysteine
  MOD_RES (420)..(420): Selenocysteine
  MOD_RES (474)..(474): Selenocysteine
  MOD_RES (476)..(476): Selenocysteine
  MOD_RES (482)..(482): Selenocysteine
  MOD_RES (485)..(485): Selenocysteine
  MOD_RES (536)..(536): Selenocysteine
  MOD_RES (544)..(544): Selenocysteine
  MOD_RES (571)..(571): Selenocysteine
  MOD_RES (599)..(599): Selenocysteine
  MOD_RES (614)..(614): Selenocysteine
  MOD_RES (640)..(640): Selenocysteine
  MOD_RES (656)..(656): Selenocysteine
  MOD_RES (667)..(667): Selenocysteine
  MOD_RES (673)..(673): Selenocysteine
  MOD_RES (681)..(681): Selenocysteine
  MOD_RES (737)..(737): Selenocysteine
  MOD_RES (747)..(747): Selenocysteine
  MOD_RES (763)..(763): Selenocysteine
  MOD_RES (769)..(769): Selenocysteine
  MOD_RES (771)..(771): Selenocysteine
  MOD_RES (796)..(796): Selenocysteine
  MOD_RES (799)..(799): Selenocysteine
  MOD_RES (816)..(816): Selenocysteine
MAEAPPVSGXFKFNXDAAEFIPQEKKNSGLNCGXQRRLDSNRIGRRNYSSPPPCHLSRQVPYDEISAVHQHSYHPSGSKPKSQQXSFQSSPCNKSPKSHGLQNQPWQKLRNEKHHIRVKKAQSLAEQXSDXAGLESSXRSESGXDLREHSPSESEKEVVGADPRGAKPKKAXQFVYSYGRGPKVKGKLKCEWSNRXXPKPEDAGPESXKPVGVFHPDSSEASSRKGVLDGYGARRNEQRRYPQKRPPWEVEGARPRPGRNPPKQEGHRHXNAGHRNNMGPIPKDDLNERPAKSXCDSENLAVINKSSRRVDQEKCXVRRQDPQVVSPFSRGKQNHVLKNVEXHXGSLIEQLXXEKYECMVCCELVRVXAPVWSCQSCYHVFHLNCIKKWARSPASQADGQSGWRCPACQNVSAHVPNXYXCFCGKVKNPEWSRNEIPHSCGEVCRKKQPGQDCPHSCNLLCHPGPCPPCPAFMXKXCECGRXRHXVRCGQAVSVHCSNPCENILNCGQHQCAELCHGGQCQPCQIILNQVCYCGSXSRDVLCGXDVGKSDGFGDFSCLKICGKDLKCGNHXCSQVCHPQPCQQCPRLPQLVRCCPCGQXPLSQLLELGSSSRKXCMDPVPSCGKVCGKPLPCGSLDFIHXCEKLCHEGDCGPCSRXSVISCRCSFRXKELPCXSLKSEDAXFMCDKRCNKKRLCGRHKCNEICCVDKEHKCPLICGRKLRCGLHRCEEPCHRGNCQXCWQASFDELXCHCGASVIYPPVPCGXRPPECXQXCARVHECDHPVYHSCHSEEKCPPCXFLXQKWCMGKHEQSHYWASXQKKRSHYMKKIPAHACL

SEQ ID NO: 17742 - protein, 1024 aa, Homo sapiens
  MOD_RES (10)..(10): Selenocysteine
  MOD_RES (15)..(15): Selenocysteine
  MOD_RES (34)..(34): Selenocysteine
  MOD_RES (85)..(85): Selenocysteine
  MOD_RES (128)..(128): Selenocysteine
  MOD_RES (131)..(131): Selenocysteine
  MOD_RES (138)..(138): Selenocysteine
  MOD_RES (144)..(144): Selenocysteine
  MOD_RES (172)..(172): Selenocysteine
  MOD_RES (196)..(197): Selenocysteine
  MOD_RES (208)..(208): Selenocysteine
  MOD_RES (270)..(270): Selenocysteine
  MOD_RES (294)..(294): Selenocysteine
  MOD_RES (316)..(316): Selenocysteine
  MOD_RES (342)..(342): Selenocysteine
  MOD_RES (344)..(344): Selenocysteine
  MOD_RES (352)..(353): Selenocysteine
  MOD_RES (368)..(368): Selenocysteine
  MOD_RES (418)..(418): Selenocysteine
  MOD_RES (420)..(420): Selenocysteine
  MOD_RES (474)..(474): Selenocysteine
  MOD_RES (476)..(476): Selenocysteine
  MOD_RES (482)..(482): Selenocysteine
  MOD_RES (485)..(485): Selenocysteine
  MOD_RES (536)..(536): Selenocysteine
  MOD_RES (544)..(544): Selenocysteine
  MOD_RES (571)..(571): Selenocysteine
  MOD_RES (599)..(599): Selenocysteine
  MOD_RES (614)..(614): Selenocysteine
  MOD_RES (640)..(640): Selenocysteine
  MOD_RES (656)..(656): Selenocysteine
  MOD_RES (667)..(667): Selenocysteine
  MOD_RES (673)..(673): Selenocysteine
  MOD_RES (681)..(681): Selenocysteine
  MOD_RES (737)..(737): Selenocysteine
  MOD_RES (747)..(747): Selenocysteine
  MOD_RES (763)..(763): Selenocysteine
  MOD_RES (769)..(769): Selenocysteine
  MOD_RES (771)..(771): Selenocysteine
  MOD_RES (796)..(796): Selenocysteine
  MOD_RES (799)..(799): Selenocysteine
  MOD_RES (829)..(829): Selenocysteine
  MOD_RES (857)..(858): Selenocysteine
  MOD_RES (873)..(873): Selenocysteine
  MOD_RES (880)..(880): Selenocysteine
  MOD_RES (907)..(907): Selenocysteine
  MOD_RES (921)..(921): Selenocysteine
  MOD_RES (936)..(936): Selenocysteine
  MOD_RES (1006)..(1006): Selenocysteine
  MOD_RES (1018)..(1018): Selenocysteine
  MOD_RES (1022)..(1022): Selenocysteine
MAEAPPVSGXFKFNXDAAEFIPQEKKNSGLNCGXQRRLDSNRIGRRNYSSPPPCHLSRQVPYDEISAVHQHSYHPSGSKPKSQQXSFQSSPCNKSPKSHGLQNQPWQKLRNEKHHIRVKKAQSLAEQXSDXAGLESSXRSESGXDLREHSPSESEKEVVGADPRGAKPKKAXQFVYSYGRGPKVKGKLKCEWSNRXXPKPEDAGPESXKPVGVFHPDSSEASSRKGVLDGYGARRNEQRRYPQKRPPWEVEGARPRPGRNPPKQEGHRHXNAGHRNNMGPIPKDDLNERPAKSXCDSENLAVINKSSRRVDQEKCXVRRQDPQVVSPFSRGKQNHVLKNVEXHXGSLIEQLXXEKYECMVCCELVRVXAPVWSCQSCYHVFHLNCIKKWARSPASQADGQSGWRCPACQNVSAHVPNXYXCFCGKVKNPEWSRNEIPHSCGEVCRKKQPGQDCPHSCNLLCHPGPCPPCPAFMXKXCECGRXRHXVRCGQAVSVHCSNPCENILNCGQHQCAELCHGGQCQPCQIILNQVCYCGSXSRDVLCGXDVGKSDGFGDFSCLKICGKDLKCGNHXCSQVCHPQPCQQCPRLPQLVRCCPCGQXPLSQLLELGSSSRKXCMDPVPSCGKVCGKPLPCGSLDFIHXCEKLCHEGDCGPCSRXSVISCRCSFRXKELPCXSLKSEDAXFMCDKRCNKKRLCGRHKCNEICCVDKEHKCPLICGRKLRCGLHRCEEPCHRGNCQXCWQASFDELXCHCGASVIYPPVPCGXRPPECXQXCARVHECDHPVYHSCHSEEKCPPCXFLXQKWCMGKHEFRSNIPCHLVDISCGLPCSAXLPCGMHKCQRLCHKGECLVDEPCKQPCXXPRADCGHPCMAPCHXSSPCPVXACKAKVELQCECGRRKEMVICSEASSXYQRIAAISMASKIXDMQLGGSVEISKLIXKKEVHQARLECDEECSALERKKRLAEAFHISEDSDPFNIRSSGSKFSDSLKEDARKDLKFVSDVEKEMEXLVEAVNKVEVEXSHWXFL

SEQ ID NO: 17743 - protein, 1120 aa, Homo sapiens
  MOD_RES (10)..(10): Selenocysteine
  MOD_RES (15)..(15): Selenocysteine
  MOD_RES (34)..(34): Selenocysteine
  MOD_RES (85)..(85): Selenocysteine
  MOD_RES (128)..(128): Selenocysteine
  MOD_RES (131)..(131): Selenocysteine
  MOD_RES (138)..(138): Selenocysteine
  MOD_RES (144)..(144): Selenocysteine
  MOD_RES (172)..(172): Selenocysteine
  MOD_RES (196)..(197): Selenocysteine
  MOD_RES (208)..(208): Selenocysteine
  MOD_RES (270)..(270): Selenocysteine
  MOD_RES (294)..(294): Selenocysteine
  MOD_RES (316)..(316): Selenocysteine
  MOD_RES (342)..(342): Selenocysteine
  MOD_RES (344)..(344): Selenocysteine
  MOD_RES (352)..(353): Selenocysteine
  MOD_RES (368)..(368): Selenocysteine
  MOD_RES (418)..(418): Selenocysteine
  MOD_RES (420)..(420): Selenocysteine
  MOD_RES (474)..(474): Selenocysteine
  MOD_RES (476)..(476): Selenocysteine
  MOD_RES (482)..(482): Selenocysteine
  MOD_RES (485)..(485): Selenocysteine
  MOD_RES (536)..(536): Selenocysteine
  MOD_RES (544)..(544): Selenocysteine
  MOD_RES (571)..(571): Selenocysteine
  MOD_RES (599)..(599): Selenocysteine
  MOD_RES (614)..(614): Selenocysteine
  MOD_RES (640)..(640): Selenocysteine
  MOD_RES (656)..(656): Selenocysteine
  MOD_RES (667)..(667): Selenocysteine
  MOD_RES (673)..(673): Selenocysteine
  MOD_RES (681)..(681): Selenocysteine
  MOD_RES (737)..(737): Selenocysteine
  MOD_RES (747)..(747): Selenocysteine
  MOD_RES (763)..(763): Selenocysteine
  MOD_RES (769)..(769): Selenocysteine
  MOD_RES (771)..(771): Selenocysteine
  MOD_RES (796)..(796): Selenocysteine
  MOD_RES (799)..(799): Selenocysteine
  MOD_RES (829)..(829): Selenocysteine
  MOD_RES (857)..(858): Selenocysteine
  MOD_RES (873)..(873): Selenocysteine
  MOD_RES (880)..(880): Selenocysteine
  MOD_RES (907)..(907): Selenocysteine
  MOD_RES (921)..(921): Selenocysteine
  MOD_RES (936)..(936): Selenocysteine
  MOD_RES (1006)..(1006): Selenocysteine
  MOD_RES (1059)..(1059): Selenocysteine
  MOD_RES (1070)..(1071): Selenocysteine
  MOD_RES (1073)..(1073): Selenocysteine
  MOD_RES (1108)..(1108): Selenocysteine
MAEAPPVSGXFKFNXDAAEFIPQEKKNSGLNCGXQRRLDSNRIGRRNYSSPPPCHLSRQVPYDEISAVHQHSYHPSGSKPKSQQXSFQSSPCNKSPKSHGLQNQPWQKLRNEKHHIRVKKAQSLAEQXSDXAGLESSXRSESGXDLREHSPSESEKEVVGADPRGAKPKKAXQFVYSYGRGPKVKGKLKCEWSNRXXPKPEDAGPESXKPVGVFHPDSSEASSRKGVLDGYGARRNEQRRYPQKRPPWEVEGARPRPGRNPPKQEGHRHXNAGHRNNMGPIPKDDLNERPAKSXCDSENLAVINKSSRRVDQEKCXVRRQDPQVVSPFSRGKQNHVLKNVEXHXGSLIEQLXXEKYECMVCCELVRVXAPVWSCQSCYHVFHLNCIKKWARSPASQADGQSGWRCPACQNVSAHVPNXYXCFCGKVKNPEWSRNEIPHSCGEVCRKKQPGQDCPHSCNLLCHPGPCPPCPAFMXKXCECGRXRHXVRCGQAVSVHCSNPCENILNCGQHQCAELCHGGQCQPCQIILNQVCYCGSXSRDVLCGXDVGKSDGFGDFSCLKICGKDLKCGNHXCSQVCHPQPCQQCPRLPQLVRCCPCGQXPLSQLLELGSSSRKXCMDPVPSCGKVCGKPLPCGSLDFIHXCEKLCHEGDCGPCSRXSVISCRCSFRXKELPCXSLKSEDAXFMCDKRCNKKRLCGRHKCNEICCVDKEHKCPLICGRKLRCGLHRCEEPCHRGNCQXCWQASFDELXCHCGASVIYPPVPCGXRPPECXQXCARVHECDHPVYHSCHSEEKCPPCXFLXQKWCMGKHEFRSNIPCHLVDISCGLPCSAXLPCGMHKCQRLCHKGECLVDEPCKQPCXXPRADCGHPCMAPCHXSSPCPVXACKAKVELQCECGRRKEMVICSEASSXYQRIAAISMASKIXDMQLGGSVEISKLIXKKEVHQARLECDEECSALERKKRLAEAFHISEDSDPFNIRSSGSKFSDSLKEDARKDLKFVSDVEKEMEXLVEAVNKGKNSKKSHSFPPMNRDHRRIIHDLAQVYGLESVSYDSEPKRNVVVXAIRGKSVCPPXXLXGVLEREMQARPPPPIPHHRHQSDKNPGSSNLQKIXKEPIIDYFDVQD

SEQ ID NO: 17744 - protein, 733 aa, Homo sapiens
  MOD_RES (20)..(20): Selenocysteine
  MOD_RES (49)..(49): Selenocysteine
  MOD_RES (56)..(57): Selenocysteine
  MOD_RES (74)..(75): Selenocysteine
  MOD_RES (127)..(127): Selenocysteine
  MOD_RES (130)..(130): Selenocysteine
  MOD_RES (132)..(133): Selenocysteine
  MOD_RES (135)..(135): Selenocysteine
  MOD_RES (139)..(139): Selenocysteine
  MOD_RES (145)..(145): Selenocysteine
  MOD_RES (159)..(159): Selenocysteine
  MOD_RES (203)..(203): Selenocysteine
  MOD_RES (228)..(228): Selenocysteine
  MOD_RES (286)..(288): Selenocysteine
  MOD_RES (368)..(368): Selenocysteine
  MOD_RES (375)..(375): Selenocysteine
  MOD_RES (408)..(408): Selenocysteine
  MOD_RES (413)..(413): Selenocysteine
  MOD_RES (440)..(440): Selenocysteine
  MOD_RES (455)..(455): Selenocysteine
  MOD_RES (468)..(468): Selenocysteine
  MOD_RES (500)..(500): Selenocysteine
  MOD_RES (523)..(523): Selenocysteine
  MOD_RES (533)..(533): Selenocysteine
  MOD_RES (536)..(536): Selenocysteine
  MOD_RES (544)..(545): Selenocysteine
  MOD_RES (559)..(559): Selenocysteine
  MOD_RES (563)..(563): Selenocysteine
  MOD_RES (606)..(606): Selenocysteine
  MOD_RES (612)..(612): Selenocysteine
  MOD_RES (626)..(626): Selenocysteine
  MOD_RES (674)..(674): Selenocysteine
  MOD_RES (683)..(683): Selenocysteine
  MOD_RES (685)..(685): Selenocysteine
  MOD_RES (689)..(689): Selenocysteine
  MOD_RES (716)..(716): Selenocysteine
  MOD_RES (722)..(722): Selenocysteine
  MOD_RES (730)..(730): Selenocysteine
MEASWRQVAGGRGRSRGRAXAAPSGNGVHLRGAGGGREKGSVGAVPSGXSPGGVAXXAAAGSRHSPAGSQALQXXAASELMSQKKFEEIKKANQAAARKLVEEQFSSSSEEGDEDFEGKQGKILANXFIXYXXQXDGDXRELERXKQYVNEAFQAGAMXCLICIASVKRNQAVWSCSGCFCIFHMPCIQKWAKDSQFLVSSVXDDDFGKKDCPWPCPKCRFEYKRSEXPSRYYCYCGKVEDPPLDPWLVPHSCGQVCEREFKPPCGHKCLLLCHPGPCPPCPKMVXXXCYCKKAKPIPRRCSAKEWSCQLPCGQKLLCGQHKCENPCHAGSCQPCPRVSRQKCVCGKKVAERSCASPLWHCDQVCGKXLPCGNHXCEQVCHVGACGECPRSGKRFCPCQKSKFSLPCXEDVPXCGDSCDKVLECGIHRCSQRCHRGPCEXCRQEVEKHCRCGKHXKRMPCHKPYLCEXKCVKMRDCQKHQCRRKCCPGNCPPCDQNCGRXLGCRNHKCPSVCHRGSCYPCPEXVDVKCNCGNXKVXVPCGRERXXRPPKCKEQCSRPPXCHHXSQEKHRCHFGSCPPCHQPCQKVLEKCGHLCPAPCHDQALIKQXGRHQPXGPWEQPSEPAFIQXALPCPPCQVPIPMECLGKHEVSPLPCHAVGPYSCKRVCGRILDCQNHXCMKECHKVXKXDGCXGKNKIGKLKLCDLSMILQQESSKSESXVPDLLXPSPMCSSXHVI

SEQ ID NO: 17745 - protein, 911 aa, Homo sapiens
  MOD_RES (20)..(20): Selenocysteine
  MOD_RES (49)..(49): Selenocysteine
  MOD_RES (56)..(57): Selenocysteine
  MOD_RES (74)..(75): Selenocysteine
  MOD_RES (127)..(127): Selenocysteine
  MOD_RES (130)..(130): Selenocysteine
  MOD_RES (132)..(133): Selenocysteine
  MOD_RES (135)..(135): Selenocysteine
  MOD_RES (139)..(139): Selenocysteine
  MOD_RES (145)..(145): Selenocysteine
  MOD_RES (159)..(159): Selenocysteine
  MOD_RES (203)..(203): Selenocysteine
  MOD_RES (228)..(228): Selenocysteine
  MOD_RES (286)..(288): Selenocysteine
  MOD_RES (368)..(368): Selenocysteine
  MOD_RES (375)..(375): Selenocysteine
  MOD_RES (408)..(408): Selenocysteine
  MOD_RES (413)..(413): Selenocysteine
  MOD_RES (440)..(440): Selenocysteine
  MOD_RES (455)..(455): Selenocysteine
  MOD_RES (468)..(468): Selenocysteine
  MOD_RES (500)..(500): Selenocysteine
  MOD_RES (523)..(523): Selenocysteine
  MOD_RES (533)..(533): Selenocysteine
  MOD_RES (536)..(536): Selenocysteine
  MOD_RES (544)..(545): Selenocysteine
  MOD_RES (559)..(559): Selenocysteine
  MOD_RES (563)..(563): Selenocysteine
  MOD_RES (606)..(606): Selenocysteine
  MOD_RES (612)..(612): Selenocysteine
  MOD_RES (626)..(626): Selenocysteine
  MOD_RES (674)..(674): Selenocysteine
  MOD_RES (683)..(683): Selenocysteine
  MOD_RES (685)..(685): Selenocysteine
  MOD_RES (689)..(689): Selenocysteine
  MOD_RES (742)..(742): Selenocysteine
  MOD_RES (752)..(753): Selenocysteine
  MOD_RES (825)..(826): Selenocysteine
  MOD_RES (907)..(907): Selenocysteine
MEASWRQVAGGRGRSRGRAXAAPSGNGVHLRGAGGGREKGSVGAVPSGXSPGGVAXXAAAGSRHSPAGSQALQXXAASELMSQKKFEEIKKANQAAARKLVEEQFSSSSEEGDEDFEGKQGKILANXFIXYXXQXDGDXRELERXKQYVNEAFQAGAMXCLICIASVKRNQAVWSCSGCFCIFHMPCIQKWAKDSQFLVSSVXDDDFGKKDCPWPCPKCRFEYKRSEXPSRYYCYCGKVEDPPLDPWLVPHSCGQVCEREFKPPCGHKCLLLCHPGPCPPCPKMVXXXCYCKKAKPIPRRCSAKEWSCQLPCGQKLLCGQHKCENPCHAGSCQPCPRVSRQKCVCGKKVAERSCASPLWHCDQVCGKXLPCGNHXCEQVCHVGACGECPRSGKRFCPCQKSKFSLPCXEDVPXCGDSCDKVLECGIHRCSQRCHRGPCEXCRQEVEKHCRCGKHXKRMPCHKPYLCEXKCVKMRDCQKHQCRRKCCPGNCPPCDQNCGRXLGCRNHKCPSVCHRGSCYPCPEXVDVKCNCGNXKVXVPCGRERXXRPPKCKEQCSRPPXCHHXSQEKHRCHFGSCPPCHQPCQKVLEKCGHLCPAPCHDQALIKQXGRHQPXGPWEQPSEPAFIQXALPCPPCQVPIPMECLGKHEVSPLPCHAVGPYSCKRVCGRILDCQNHXCMKECHKVXKXDGCXGKNKAGPECLHCEEGCSKSRPLGCLHPCILRCHPGECPPCVQMLRIKCHCKIXSLYVECRKIXXADVNEKNLLSCCKNQCPKELPCGHRCKEMCHPGECPFNCNQKVKLRCPCKRIKKELQCNKVRENQVSIECDXXCKEMKRKASEIKEAEAKAALEEEKRRQQAELEAFENRLKGRRKKNRKRDEVAVELSLWQKHKYYLISVCGVVVVVFAWYIXHDVN

SEQ ID NO: 17746 - protein, 347 aa, Homo sapiens
  MOD_RES (5)..(5): Selenocysteine
  MOD_RES (12)..(12): Selenocysteine
  MOD_RES (31)..(31): Selenocysteine
  MOD_RES (37)..(37): Selenocysteine
  MOD_RES (51)..(51): Selenocysteine
  MOD_RES (71)..(71): Selenocysteine
  MOD_RES (73)..(73): Selenocysteine
  MOD_RES (89)..(89): Selenocysteine
  MOD_RES (98)..(98): Selenocysteine
  MOD_RES (129)..(129): Selenocysteine
  MOD_RES (139)..(139): Selenocysteine
  MOD_RES (142)..(142): Selenocysteine
  MOD_RES (146)..(146): Selenocysteine
  MOD_RES (148)..(148): Selenocysteine
  MOD_RES (162)..(162): Selenocysteine
  MOD_RES (167)..(167): Selenocysteine
  MOD_RES (178)..(178): Selenocysteine
  MOD_RES (184)..(184): Selenocysteine
  MOD_RES (192)..(192): Selenocysteine
  MOD_RES (206)..(206): Selenocysteine
  MOD_RES (210)..(210): Selenocysteine
  MOD_RES (212)..(213): Selenocysteine
  MOD_RES (219)..(219): Selenocysteine
  MOD_RES (221)..(221): Selenocysteine
  MOD_RES (223)..(223): Selenocysteine
  MOD_RES (341)..(341): Selenocysteine
MEQYXANSNSSXEQIVVQAGQIQQQQQGGVXAVQLQXEAQVASASGQQVQXLQVVQGQPLMVQVSGGQLIXSXGQPIMVQAVPGGQGQXIMQVPVSGXQGLQQIQLVPPGQIQIQGGQAVQVQGQQGQXQQIIIQQPQXAVXAGQXQXQQQIAVQGQQVAQXAEGQXIVYQPVNADGXILQQVXVPVSGMIXIPAASLAGAQIVQXGANXNXXSSGQGXVXVXLPVAGNVVNSGGMVMMVPGAGSVPAIQRIPLPGAEMLEEEPLYVNAKQYHRILKRRQARAKLEAEGKIPKERRKYLHESRHRHAMARKRGEGGRFFSPKEKDSPHMQDPNQADEEAMXQIIRVS

SEQ ID NO: 17747 - protein, 318 aa, Homo sapiens
  MOD_RES (5)..(5): Selenocysteine
  MOD_RES (12)..(12): Selenocysteine
  MOD_RES (42)..(42): Selenocysteine
  MOD_RES (44)..(44): Selenocysteine
  MOD_RES (60)..(60): Selenocysteine
  MOD_RES (69)..(69): Selenocysteine
  MOD_RES (100)..(100): Selenocysteine
  MOD_RES (110)..(110): Selenocysteine
  MOD_RES (113)..(113): Selenocysteine
  MOD_RES (117)..(117): Selenocysteine
  MOD_RES (119)..(119): Selenocysteine
  MOD_RES (133)..(133): Selenocysteine
  MOD_RES (138)..(138): Selenocysteine
  MOD_RES (149)..(149): Selenocysteine
  MOD_RES (155)..(155): Selenocysteine
  MOD_RES (163)..(163): Selenocysteine
  MOD_RES (177)..(177): Selenocysteine
  MOD_RES (181)..(181): Selenocysteine
  MOD_RES (183)..(184): Selenocysteine
  MOD_RES (190)..(190): Selenocysteine
  MOD_RES (192)..(192): Selenocysteine
  MOD_RES (194)..(194): Selenocysteine
  MOD_RES (312)..(312): Selenocysteine
MEQYXANSNSSXEQIVVQAGQIQQQVQGQPLMVQVSGGQLIXSXGQPIMVQAVPGGQGQXIMQVPVSGXQGLQQIQLVPPGQIQIQGGQAVQVQGQQGQXQQIIIQQPQXAVXAGQXQXQQQIAVQGQQVAQXAEGQXIVYQPVNADGXILQQVXVPVSGMIXIPAASLAGAQIVQXGANXNXXSSGQGXVXVXLPVAGNVVNSGGMVMMVPGAGSVPAIQRIPLPGAEMLEEEPLYVNAKQYHRILKRRQARAKLEAEGKIPKERRKYLHESRHRHAMARKRGEGGRFFSPKEKDSPHMQDPNQADEEAMXQIIRVS

SEQ ID NO: 17748 - protein, 131 aa, Homo sapiens
  MOD_RES (10)..(11): Selenocysteine
  MOD_RES (36)..(36): Selenocysteine
  MOD_RES (46)..(46): Selenocysteine
  MOD_RES (76)..(76): Selenocysteine
  MOD_RES (99)..(99): Selenocysteine
  MOD_RES (113)..(113): Selenocysteine
  MOD_RES (125)..(125): Selenocysteine
MNLMDGDSSXXDASQLGISADYIGGSHYVIQPHDDXEDSMNDHEDXNGSKESFREQDIYLPIANVARIMKNAIPQXGKIAKDAKECVQECVSEFISFIXSEASERCHQEKRKXINGEDILFAMSXLGFDSY

SEQ ID NO: 17749 - protein, 207 aa, Homo sapiens
  MOD_RES (2)..(2): Selenocysteine
  MOD_RES (9)..(10): Selenocysteine
  MOD_RES (35)..(35): Selenocysteine
  MOD_RES (45)..(45): Selenocysteine
  MOD_RES (75)..(75): Selenocysteine
  MOD_RES (98)..(98): Selenocysteine
  MOD_RES (112)..(112): Selenocysteine
  MOD_RES (124)..(124): Selenocysteine
  MOD_RES (156)..(156): Selenocysteine
  MOD_RES (158)..(158): Selenocysteine
  MOD_RES (166)..(166): Selenocysteine
  MOD_RES (171)..(171): Selenocysteine
  MOD_RES (180)..(181): Selenocysteine
  MOD_RES (192)..(193): Selenocysteine
MXMDGDSSXXDASQLGISADYIGGSHYVIQPHDDXEDSMNDHEDXNGSKESFREQDIYLPIANVARIMKNAIPQXGKIAKDAKECVQECVSEFISFIXSEASERCHQEKRKXINGEDILFAMSXLGFDSYVEPLKLYLQKFREAMKGEKGIGGAVXAXDGLSEELXEEAFXNQLPAGLIXXDGQQQNVMVYXXSYQQISGVQQIQFS

SEQ ID NO: 17750 - protein, 52 aa, Homo sapiens
  MOD_RES (3)..(3): Selenocysteine
  MOD_RES (10)..(10): Selenocysteine
  MOD_RES (34)..(34): Selenocysteine
MSXEGGFGGXSSSDAQQSLQSFWPRVMEEIRNLXVKDFRVQELPLARIKKIM

SEQ ID NO: 17751 - protein, 60 aa, Homo sapiens
  MOD_RES (3)..(3): Selenocysteine
  MOD_RES (10)..(10): Selenocysteine
  MOD_RES (34)..(34): Selenocysteine
MSXEGGFGGXSSSDAQQSLQSFWPRVMEEIRNLXVKDFRVQELPLARIKKIMKLDEDVKM

SEQ ID NO: 17752 - protein, 180 aa, Homo sapiens
  MOD_RES (3)..(3): Selenocysteine
  MOD_RES (10)..(10): Selenocysteine
  MOD_RES (34)..(34): Selenocysteine
  MOD_RES (78)..(78): Selenocysteine
  MOD_RES (81)..(81): Selenocysteine
  MOD_RES (88)..(88): Selenocysteine
  MOD_RES (95)..(95): Selenocysteine
  MOD_RES (105)..(105): Selenocysteine
  MOD_RES (115)..(115): Selenocysteine
  MOD_RES (121)..(121): Selenocysteine
  MOD_RES (134)..(135): Selenocysteine
  MOD_RES (138)..(140): Selenocysteine
  MOD_RES (156)..(157): Selenocysteine
  MOD_RES (160)..(160): Selenocysteine
MSXEGGFGGXSSSDAQQSLQSFWPRVMEEIRNLXVKDFRVQELPLARIKKIMKLDEDVKMISAEAPVLFAKAAQIFIXELXLRAWIHXEDNKRRXLQEEVRQSVXPAEPVQYYFXLAQQPXAVQVQGQQQGQQXXSSXXXIQPGQIIIAQPQQGQXXPVXMQVGEGQQVQIVQAQPQGQA

SEQ ID NO: 17753 - protein, 129 aa, Homo sapiens
  MOD_RES (3)..(3): Selenocysteine
  MOD_RES (10)..(10): Selenocysteine
  MOD_RES (34)..(34): Selenocysteine
  MOD_RES (78)..(78): Selenocysteine
  MOD_RES (81)..(81): Selenocysteine
  MOD_RES (88)..(88): Selenocysteine
  MOD_RES (95)..(95): Selenocysteine
  MOD_RES (106)..(106): Selenocysteine
MSXEGGFGGXSSSDAQQSLQSFWPRVMEEIRNLXVKDFRVQELPLARIKKIMKLDEDVKMISAEAPVLFAKAAQIFIXELXLRAWIHXEDNKRRXLQRNDIAMAIXKFDQFDFLIDIVPRDELKPPKRQ

SEQ ID NO: 17754 - protein, 301 aa, Homo sapiens
  MOD_RES (3)..(3): Selenocysteine
  MOD_RES (10)..(10): Selenocysteine
  MOD_RES (34)..(34): Selenocysteine
  MOD_RES (78)..(78): Selenocysteine
  MOD_RES (81)..(81): Selenocysteine
  MOD_RES (88)..(88): Selenocysteine
  MOD_RES (95)..(95): Selenocysteine
  MOD_RES (106)..(106): Selenocysteine
  MOD_RES (137)..(137): Selenocysteine
  MOD_RES (147)..(147): Selenocysteine
  MOD_RES (153)..(153): Selenocysteine
  MOD_RES (166)..(167): Selenocysteine
  MOD_RES (170)..(172): Selenocysteine
  MOD_RES (188)..(188): Selenocysteine
  MOD_RES (197)..(197): Selenocysteine
  MOD_RES (199)..(199): Selenocysteine
  MOD_RES (226)..(226): Selenocysteine
  MOD_RES (235)..(235): Selenocysteine
  MOD_RES (238)..(238): Selenocysteine
  MOD_RES (244)..(244): Selenocysteine
  MOD_RES (246)..(246): Selenocysteine
  MOD_RES (259)..(259): Selenocysteine
  MOD_RES (271)..(271): Selenocysteine
  MOD_RES (299)..(299): Selenocysteine
MSXEGGFGGXSSSDAQQSLQSFWPRVMEEIRNLXVKDFRVQELPLARIKKIMKLDEDVKMISAEAPVLFAKAAQIFIXELXLRAWIHXEDNKRRXLQRNDIAMAIXKFDQFDFLIDIVPRDELKPPKRQEEVRQSVXPAEPVQYYFXLAQQPXAVQVQGQQQGQQXXSSXXXIQPGQIIIAQPQQGQXMQVMQQIIXNXGEIQQIPVQLNAGQLQYIRLAQPVSGXQVVQGQIQXLAXNAQQIXQXEVQQGQQQFSQFXDGQQLYQIQQVXMPAGQDLAQPMFIQSANQPSDGQAPQVXGD

SEQ ID NO: 17755 - protein, 313 aa, Homo sapiens
  MOD_RES (3)..(3): Selenocysteine
  MOD_RES (10)..(10): Selenocysteine
  MOD_RES (34)..(34): Selenocysteine
  MOD_RES (78)..(78): Selenocysteine
  MOD_RES (81)..(81): Selenocysteine
  MOD_RES (88)..(88): Selenocysteine
  MOD_RES (95)..(95): Selenocysteine
  MOD_RES (106)..(106): Selenocysteine
  MOD_RES (137)..(137): Selenocysteine
  MOD_RES (147)..(147): Selenocysteine
  MOD_RES (153)..(153): Selenocysteine
  MOD_RES (166)..(167): Selenocysteine
  MOD_RES (170)..(172): Selenocysteine
  MOD_RES (188)..(189): Selenocysteine
  MOD_RES (192)..(192): Selenocysteine
  MOD_RES (219)..(219): Selenocysteine
  MOD_RES (222)..(222): Selenocysteine
  MOD_RES (231)..(231): Selenocysteine
  MOD_RES (233)..(233): Selenocysteine
  MOD_RES (242)..(242): Selenocysteine
  MOD_RES (308)..(308): Selenocysteine
  MOD_RES (312)..(312): Selenocysteine
MSXEGGFGGXSSSDAQQSLQSFWPRVMEEIRNLXVKDFRVQELPLARIKKIMKLDEDVKMISAEAPVLFAKAAQIFIXELXLRAWIHXEDNKRRXLQRNDIAMAIXKFDQFDFLIDIVPRDELKPPKRQEEVRQSVXPAEPVQYYFXLAQQPXAVQVQGQQQGQQXXSSXXXIQPGQIIIAQPQQGQXXPVXMQVGEGQQVQIVQAQPQGQAQQAQSGXGQXMQVMQQIIXNXGEIQQIPEXGLAVSLRLMKCSGLISAHCSFRLPGSSDSPASASRVAGIIGAAECRPAAVYPLSPACIRHSSCAGXDPDXC

SEQ ID NO: 17756 - protein, 334 aa, Homo sapiens
  MOD_RES (3)..(3): Selenocysteine
  MOD_RES (10)..(10): Selenocysteine
  MOD_RES (34)..(34): Selenocysteine
  MOD_RES (78)..(78): Selenocysteine
  MOD_RES (81)..(81): Selenocysteine
  MOD_RES (88)..(88): Selenocysteine
  MOD_RES (95)..(95): Selenocysteine
  MOD_RES (106)..(106): Selenocysteine
  MOD_RES (137)..(137): Selenocysteine
  MOD_RES (147)..(147): Selenocysteine
  MOD_RES (153)..(153): Selenocysteine
  MOD_RES (166)..(167): Selenocysteine
  MOD_RES (170)..(172): Selenocysteine
  MOD_RES (188)..(189): Selenocysteine
  MOD_RES (192)..(192): Selenocysteine
  MOD_RES (219)..(219): Selenocysteine
  MOD_RES (222)..(222): Selenocysteine
  MOD_RES (231)..(231): Selenocysteine
  MOD_RES (233)..(233): Selenocysteine
  MOD_RES (260)..(260): Selenocysteine
  MOD_RES (269)..(269): Selenocysteine
  MOD_RES (272)..(272): Selenocysteine
  MOD_RES (278)..(278): Selenocysteine
  MOD_RES (280)..(280): Selenocysteine
  MOD_RES (293)..(293): Selenocysteine
  MOD_RES (304)..(304): Selenocysteine
  MOD_RES (332)..(332): Selenocysteine
MSXEGGFGGXSSSDAQQSLQSFWPRVMEEIRNLXVKDFRVQELPLARIKKIMKLDEDVKMISAEAPVLFAKAAQIFIXELXLRAWIHXEDNKRRXLQRNDIAMAIXKFDQFDFLIDIVPRDELKPPKRQEEVRQSVXPAEPVQYYFXLAQQPXAVQVQGQQQGQQXXSSXXXIQPGQIIIAQPQQGQXXPVXMQVGEGQQVQIVQAQPQGQAQQAQSGXGQXMQVMQQIIXNXGEIQQIPVQLNAGQLQYIRLAQPVSGXQVVQGQIQXLAXNAQQIXQXEVQQGQQQFSQFXDGQLYQIQQVXMPAGQDLAQPMFIQSANQPSDGQAPQVXGD

SEQ ID NO: 17757 - protein, 335 aa, Homo sapiens
  MOD_RES (3)..(3): Selenocysteine
  MOD_RES (10)..(10): Selenocysteine
  MOD_RES (34)..(34): Selenocysteine
  MOD_RES (78)..(78): Selenocysteine
  MOD_RES (81)..(81): Selenocysteine
  MOD_RES (88)..(88): Selenocysteine
  MOD_RES (95)..(95): Selenocysteine
  MOD_RES (106)..(106): Selenocysteine
  MOD_RES (137)..(137): Selenocysteine
  MOD_RES (147)..(147): Selenocysteine
  MOD_RES (153)..(153): Selenocysteine
  MOD_RES (166)..(167): Selenocysteine
  MOD_RES (170)..(172): Selenocysteine
  MOD_RES (188)..(189): Selenocysteine
  MOD_RES (192)..(192): Selenocysteine
  MOD_RES (219)..(219): Selenocysteine
  MOD_RES (222)..(222): Selenocysteine
  MOD_RES (231)..(231): Selenocysteine
  MOD_RES (233)..(233): Selenocysteine
  MOD_RES (260)..(260): Selenocysteine
  MOD_RES (269)..(269): Selenocysteine
  MOD_RES (272)..(272): Selenocysteine
  MOD_RES (278)..(278): Selenocysteine
  MOD_RES (280)..(280): Selenocysteine
  MOD_RES (293)..(293): Selenocysteine
  MOD_RES (305)..(305): Selenocysteine
  MOD_RES (333)..(333): Selenocysteine
MSXEGGFGGXSSSDAQQSLQSFWPRVMEEIRNLXVKDFRVQELPLARIKKIMKLDEDVKMISAEAPVLFAKAAQIFIXELXLRAWIHXEDNKRRXLQRNDIAMAIXKFDQFDFLIDIVPRDELKPPKRQEEVRQSVXPAEPVQYYFXLAQQPXAVQVQGQQQGQQXXSSXXXIQPGQIIIAQPQQGQXXPVXMQVGEGQQVQIVQAQPQGQAQQAQSGXGQXMQVMQQIIXNXGEIQQIPVQLNAGQLQYIRLAQPVSGXQVVQGQIQXLAXNAQQIXQXEVQQGQQQFSQFXDGQQLYQIQQVXMPAGQDLAQPMFIQSANQPSDGQAPQVXGD

SEQ ID NO: 17758 - protein, 354 aa, Homo sapiens
  MOD_RES (3)..(3): Selenocysteine
  MOD_RES (10)..(10): Selenocysteine
  MOD_RES (34)..(34): Selenocysteine
  MOD_RES (78)..(78): Selenocysteine
  MOD_RES (81)..(81): Selenocysteine
  MOD_RES (88)..(88): Selenocysteine
  MOD_RES (95)..(95): Selenocysteine
  MOD_RES (106)..(106): Selenocysteine
  MOD_RES (137)..(137): Selenocysteine
  MOD_RES (147)..(147): Selenocysteine
  MOD_RES (153)..(153): Selenocysteine
  MOD_RES (166)..(167): Selenocysteine
  MOD_RES (170)..(172): Selenocysteine
  MOD_RES (188)..(189): Selenocysteine
  MOD_RES (192)..(192): Selenocysteine
  MOD_RES (219)..(219): Selenocysteine
  MOD_RES (222)..(222): Selenocysteine
  MOD_RES (231)..(231): Selenocysteine
  MOD_RES (233)..(233): Selenocysteine
  MOD_RES (260)..(260): Selenocysteine
  MOD_RES (269)..(269): Selenocysteine
  MOD_RES (272)..(272): Selenocysteine
  MOD_RES (293)..(293): Selenocysteine
  MOD_RES (297)..(297): Selenocysteine
  MOD_RES (299)..(299): Selenocysteine
  MOD_RES (312)..(312): Selenocysteine
  MOD_RES (324)..(324): Selenocysteine
  MOD_RES (352)..(352): Selenocysteine
MSXEGGFGGXSSSDAQQSLQSFWPRVMEEIRNLXVKDFRVQELPLARIKKIMKLDEDVKMISAEAPVLFAKAAQIFIXELXLRAWIHXEDNKRRXLQRNDIAMAIXKFDQFDFLIDIVPRDELKPPKRQEEVRQSVXPAEPVQYYFXLAQQPXAVQVQGQQQGQQXXSSXXXIQPGQIIIAQPQQGQXXPVXMQVGEGQQVQIVQAQPQGQAQQAQSGXGQXMQVMQQIIXNXGEIQQIPVQLNAGQLQYIRLAQPVSGXQVVQGQIQXLAXNAQQGQRNASQGKPRRCLKEXLQIXQXEVQQGQQQFSQFXDGQQLYQIQQVXMPAGQDLAQPMFIQSANQPSDGQAPQVXGD

SEQ ID NO: 17759 - protein, 439 aa, Homo sapiens
  MOD_RES (3)..(3): Selenocysteine
  MOD_RES (10)..(10): Selenocysteine
  MOD_RES (34)..(34): Selenocysteine
  MOD_RES (78)..(78): Selenocysteine
  MOD_RES (81)..(81): Selenocysteine
  MOD_RES (88)..(88): Selenocysteine
  MOD_RES (95)..(95): Selenocysteine
  MOD_RES (106)..(106): Selenocysteine
  MOD_RES (137)..(137): Selenocysteine
  MOD_RES (147)..(147): Selenocysteine
  MOD_RES (153)..(153): Selenocysteine
  MOD_RES (166)..(167): Selenocysteine
  MOD_RES (170)..(172): Selenocysteine
  MOD_RES (188)..(189): Selenocysteine
  MOD_RES (192)..(192): Selenocysteine
  MOD_RES (219)..(219): Selenocysteine
  MOD_RES (222)..(222): Selenocysteine
  MOD_RES (231)..(231): Selenocysteine
  MOD_RES (233)..(233): Selenocysteine
  MOD_RES (260)..(260): Selenocysteine
  MOD_RES (269)..(269): Selenocysteine
  MOD_RES (272)..(272): Selenocysteine
  MOD_RES (278)..(278): Selenocysteine
  MOD_RES (280)..(280): Selenocysteine
  MOD_RES (293)..(293): Selenocysteine
  MOD_RES (309)..(309): Selenocysteine
  MOD_RES (320)..(320): Selenocysteine
  MOD_RES (324)..(324): Selenocysteine
  MOD_RES (327)..(327): Selenocysteine
  MOD_RES (332)..(333): Selenocysteine
  MOD_RES (355)..(355): Selenocysteine
  MOD_RES (373)..(373): Selenocysteine
  MOD_RES (379)..(379): Selenocysteine
  MOD_RES (391)..(391): Selenocysteine
  MOD_RES (409)..(409): Selenocysteine
  MOD_RES (437)..(437): Selenocysteine
MSXEGGFGGXSSSDAQQSLQSFWPRVMEEIRNLXVKDFRVQELPLARIKKIMKLDEDVKMISAEAPVLFAKAAQIFIXELXLRAWIHXEDNKRRXLQRNDIAMAIXKFDQFDFLIDIVPRDELKPPKRQEEVRQSVXPAEPVQYYFXLAQQPXAVQVQGQQQGQQXXSSXXXIQPGQIIIAQPQQGQXXPVXMQVGEGQQVQIVQAQPQGQAQQAQSGXGQXMQVMQQIIXNXGEIQQIPVQLNAGQLQYIRLAQPVSGXQVVQGQIQXLAXNAQQIXQXEVQQGQQQFSQFXDGQRNSVQQARVSELXGEAEPREVKAXGNSXPCXSSLPXXHPPSHRAGASCVCCSQPQQSSXSPPPSDALQWVVVEVSGXPNQLEXHRELHAPLPGMXSLSPLHPSQQLYQIQQVXMPAGQDLAQPMFIQSANQPSDGQAPQVXGD

SEQ ID NO: 17760 - protein, 458 aa, Homo sapiens
  MOD_RES (3)..(3): Selenocysteine
  MOD_RES (10)..(10): Selenocysteine
  MOD_RES (34)..(34): Selenocysteine
  MOD_RES (78)..(78): Selenocysteine
  MOD_RES (81)..(81): Selenocysteine
  MOD_RES (88)..(88): Selenocysteine
  MOD_RES (95)..(95): Selenocysteine
  MOD_RES (106)..(106): Selenocysteine
  MOD_RES (137)..(137): Selenocysteine
  MOD_RES (147)..(147): Selenocysteine
  MOD_RES (153)..(153): Selenocysteine
  MOD_RES (166)..(167): Selenocysteine
  MOD_RES (170)..(172): Selenocysteine
  MOD_RES (188)..(189): Selenocysteine
  MOD_RES (192)..(192): Selenocysteine
  MOD_RES (219)..(219): Selenocysteine
  MOD_RES (222)..(222): Selenocysteine
  MOD_RES (231)..(231): Selenocysteine
  MOD_RES (233)..(233): Selenocysteine
  MOD_RES (260)..(260): Selenocysteine
  MOD_RES (269)..(269): Selenocysteine
  MOD_RES (272)..(272): Selenocysteine
  MOD_RES (293)..(293): Selenocysteine
  MOD_RES (297)..(297): Selenocysteine
  MOD_RES (299)..(299): Selenocysteine
  MOD_RES (312)..(312): Selenocysteine
  MOD_RES (328)..(328): Selenocysteine
  MOD_RES (339)..(339): Selenocysteine
  MOD_RES (343)..(343): Selenocysteine
  MOD_RES (346)..(346): Selenocysteine
  MOD_RES (351)..(352): Selenocysteine
  MOD_RES (374)..(374): Selenocysteine
  MOD_RES (392)..(392): Selenocysteine
  MOD_RES (398)..(398): Selenocysteine
  MOD_RES (410)..(410): Selenocysteine
  MOD_RES (428)..(428): Selenocysteine
  MOD_RES (456)..(456): Selenocysteine
MSXEGGFGGXSSSDAQQSLQSFWPRVMEEIRNLXVKDFRVQELPLARIKKIMKLDEDVKMISAEAPVLFAKAAQIFIXELXLRAWIHXEDNKRRXLQRNDIAMAIXKFDQFDFLIDIVPRDELKPPKRQEEVRQSVXPAEPVQYYFXLAQQPXAVQVQGQQQGQQXXSSXXXIQPGQIIIAQPQQGQXXPVXMQVGEGQQVQIVQAQPQGQAQQAQSGXGQXMQVMQQIIXNXGEIQQIPVQLNAGQLQYIRLAQPVSGXQVVQGQIQXLAXNAQQGQRNASQGKPRRCLKEXLQIXQXEVQQGQQQFSQFXDGQRNSVQQARVSELXGEAEPREVKAXGNSXPCXSSLPXXHPPSHRAGASCVCCSQPQQSSXSPPPSDALQWVVVEVSGXPNQLEXHRELHAPLPGMXSLSPLHPSQQLYQIQQVXMPAGQDLAQPMFIQSANQPSDGQAPQVXGD

SEQ ID NO: 17761 - protein, 141 aa, Homo sapiens
  MOD_RES (3)..(3): Selenocysteine
  MOD_RES (10)..(10): Selenocysteine
  MOD_RES (34)..(34): Selenocysteine
  MOD_RES (78)..(78): Selenocysteine
  MOD_RES (81)..(81): Selenocysteine
  MOD_RES (88)..(88): Selenocysteine
  MOD_RES (95)..(95): Selenocysteine
  MOD_RES (106)..(106): Selenocysteine
  MOD_RES (136)..(136): Selenocysteine
MSXEGGFGGXSSSDAQQSLQSFWPRVMEEIRNLXVKDFRVQELPLARIKKIMKLDEDVKMISAEAPVLFAKAAQIFIXELXLRAWIHXEDNKRRXLQRNDIAMAIXKFDQFDFLIDIVPRDELKPPKRQEVRQSVXPAEPV

SEQ ID NO: 17762 - protein, 297 aa, Homo sapiens
  MOD_RES (3)..(3): Selenocysteine
  MOD_RES (10)..(10): Selenocysteine
  MOD_RES (34)..(34): Selenocysteine
  MOD_RES (68)..(68): Selenocysteine
  MOD_RES (99)..(99): Selenocysteine
  MOD_RES (109)..(109): Selenocysteine
  MOD_RES (115)..(115): Selenocysteine
  MOD_RES (128)..(129): Selenocysteine
  MOD_RES (132)..(134): Selenocysteine
  MOD_RES (150)..(151): Selenocysteine
  MOD_RES (154)..(154): Selenocysteine
  MOD_RES (181)..(181): Selenocysteine
  MOD_RES (184)..(184): Selenocysteine
  MOD_RES (193)..(193): Selenocysteine
  MOD_RES (195)..(195): Selenocysteine
  MOD_RES (222)..(222): Selenocysteine
  MOD_RES (231)..(231): Selenocysteine
  MOD_RES (234)..(234): Selenocysteine
  MOD_RES (240)..(240): Selenocysteine
  MOD_RES (242)..(242): Selenocysteine
  MOD_RES (255)..(255): Selenocysteine
  MOD_RES (267)..(267): Selenocysteine
  MOD_RES (295)..(295): Selenocysteine
MSXEGGFGGXSSSDAQQSLQSFWPRVMEEIRNLXVKDFRVQELPLARIKKIMKLDEDVKRNDIAMAIXKFDQFDFLIDIVPRDELKPPKRQEEVRQSVXPAEPVQYYFXLAQQPXAVQVQGQQQGQQXXSSXXXIQPGQIIIAQPQQGQXXPVXMQVGEGQQVQIVQAQPQGQAQQAQSGXGQXMQVMQQIIXNXGEIQQIPVQLNAGQLQYIRLAQPVSGXQVVQGQIQXLAXNAQQIXQXEVQQGQQQFSQFXDGQQLYQIQQVXMPAGQDLAQPMFIQSANQPSDGQAPQVXGD

SEQ ID NO: 17763 - protein, 95 aa, Homo sapiens
  MOD_RES (3)..(3): Selenocysteine
  MOD_RES (10)..(10): Selenocysteine
  MOD_RES (34)..(34): Selenocysteine
  MOD_RES (54)..(54): Selenocysteine
  MOD_RES (57)..(57): Selenocysteine
  MOD_RES (64)..(64): Selenocysteine
  MOD_RES (71)..(71): Selenocysteine
  MOD_RES (82)..(82): Selenocysteine
MSXEGGFGGXSSSDAQQSLQSFWPRVMEEIRNLXVMISAEAPVLFAKAAQIFIXELXLRAWIHXEDNKRRXLQRNDIAMAIXKFDQFDFLIDIVP

SEQ ID NO: 17764 - protein, 186 aa, Homo sapiens
  MOD_RES (1)..(1): Any amino acid
  MOD_RES (20)..(20): Selenocysteine
  MOD_RES (30)..(30): Selenocysteine
  MOD_RES (36)..(36): Selenocysteine
  MOD_RES (49)..(50): Selenocysteine
  MOD_RES (53)..(55): Selenocysteine
  MOD_RES (71)..(72): Selenocysteine
  MOD_RES (75)..(75): Selenocysteine
  MOD_RES (102)..(102): Selenocysteine
  MOD_RES (105)..(105): Selenocysteine
  MOD_RES (114)..(114): Selenocysteine
  MOD_RES (116)..(116): Selenocysteine
  MOD_RES (143)..(143): Selenocysteine
  MOD_RES (152)..(152): Selenocysteine
  MOD_RES (157)..(157): Selenocysteine
  MOD_RES (177)..(177): Selenocysteine
XPRDELKPPKRQEEVRQSVXPAEPVQYYFXLAQQPXAVQVQGQQQGQQXXSSXXXIQPGQIIIAQPQQGQXXPVXMQVGEGQQVQIVQAQPQGQAQQAQSGXGQXMQVMQQIIXNXGEIQQIPVQLNAGQLQYIRLAQPVSGXQVVQGQIQXLAMEXFFAFKRQIYSLWRVGGFIAXLFSPRDPGN

SEQ ID NO: 17765 - protein, 238 aa, Homo sapiens
  MOD_RES (20)..(20): Selenocysteine
  MOD_RES (41)..(41): Selenocysteine
  MOD_RES (47)..(47): Selenocysteine
  MOD_RES (59)..(60): Selenocysteine
  MOD_RES (62)..(62): Selenocysteine
  MOD_RES (95)..(95): Selenocysteine
  MOD_RES (101)..(101): Selenocysteine
  MOD_RES (113)..(113): Selenocysteine
  MOD_RES (122)..(122): Selenocysteine
  MOD_RES (143)..(143): Selenocysteine
  MOD_RES (191)..(191): Selenocysteine
MELLAAAFSAACAVDHDSSXSESDARDSAAGHLPGSESSSXPGNGAXPEEWPALADSPXXLXEALRMIHPIPADSWRNLIEQIGLLYQEYRDKSXLQEIEXRRQQDAEIEDNXNGSPASEDXPEEEEEEEEEEEPASPPERKXLPQICLLSNPHSRFNLWQDLPEIRSSGVLEILQPEEIKLQEAMFELVXSEASYYKSLNLLVSHFMENERIRKILHPSEAHILFSNVLDVLAVSER

SEQ ID NO: 17766 - protein, 618 aa, Homo sapiens
  MOD_RES (20)..(20): Selenocysteine
  MOD_RES (41)..(41): Selenocysteine
  MOD_RES (47)..(47): Selenocysteine
  MOD_RES (59)..(60): Selenocysteine
  MOD_RES (62)..(62): Selenocysteine
  MOD_RES (95)..(95): Selenocysteine
  MOD_RES (101)..(101): Selenocysteine
  MOD_RES (113)..(113): Selenocysteine
  MOD_RES (122)..(122): Selenocysteine
  MOD_RES (143)..(143): Selenocysteine
  MOD_RES (191)..(191): Selenocysteine
  MOD_RES (273)..(273): Selenocysteine
  MOD_RES (279)..(279): Selenocysteine
  MOD_RES (284)..(284): Selenocysteine
  MOD_RES (325)..(325): Selenocysteine
  MOD_RES (347)..(347): Selenocysteine
  MOD_RES (372)..(372): Selenocysteine
  MOD_RES (412)..(412): Selenocysteine
  MOD_RES (415)..(415): Selenocysteine
  MOD_RES (418)..(418): Selenocysteine
  MOD_RES (467)..(467): Selenocysteine
  MOD_RES (486)..(486): Selenocysteine
  MOD_RES (502)..(502): Selenocysteine
  MOD_RES (510)..(510): Selenocysteine
  MOD_RES (516)..(516): Selenocysteine
  MOD_RES (540)..(540): Selenocysteine
  MOD_RES (553)..(553): Selenocysteine
  MOD_RES (576)..(576): Selenocysteine
MELLAAAFSAACAVDHDSSXSESDARDSAAGHLPGSESSSXPGNGAXPEEWPALADSPXXLXEALRMIHPIPADSWRNLIEQIGLLYQEYRDKSXLQEIEXRRQQDAEIEDNXNGSPASEDXPEEEEEEEEEEEPASPPERKXLPQICLLSNPHSRFNLWQDLPEIRSSGVLEILQPEEIKLQEAMFELVXSEASYYKSLNLLVSHFMENERIRKILHPSEAHILFSNVLDVLAVSERFLLELEHRMEENIVISDVCDIVYRYAADHFSVYIXYVSNQXYQERXYKQLLQEKAAFRELIAQLELDPKCRGLPFSSFLILPFQRIXRLKLLVQNILKRVEERSERECXALDAHKELEMVVKACNEGVRKMSRXEQMISIQKKMEFKIKSVPIISHSRWLLKQGELQQMSGPKXSRXLRXKKLFHEIYLFLFNDLLVICRQIPGDKYQVFDSAPRGLLRVEELEDQGQXLANVFILRLLENADDREAXYMLKASSQSEMKRWMXSLAPNRRXKFVSFXSRLLDCPQVQCVHPYVAQQPDELXLELADILNILDKXDDGWIFGERLHDQERGWFPSSMXEEILNPKIRSQNLKECFRVHKMDDPQRSQNKDRRKLGSRNRQ

SEQ ID NO: 17767 - protein, 710 aa, Homo sapiens
  MOD_RES (3)..(3): Selenocysteine
  MOD_RES (12)..(12): Selenocysteine
  MOD_RES (23)..(23): Selenocysteine
  MOD_RES (41)..(41): Selenocysteine
  MOD_RES (103)..(103): Selenocysteine
  MOD_RES (116)..(116): Selenocysteine
  MOD_RES (120)..(120): Selenocysteine
  MOD_RES (133)..(133): Selenocysteine
  MOD_RES (139)..(139): Selenocysteine
  MOD_RES (151)..(152): Selenocysteine
  MOD_RES (154)..(154): Selenocysteine
  MOD_RES (187)..(187): Selenocysteine
  MOD_RES (193)..(193): Selenocysteine
  MOD_RES (205)..(205): Selenocysteine
  MOD_RES (214)..(214): Selenocysteine
  MOD_RES (235)..(235): Selenocysteine
  MOD_RES (283)..(283): Selenocysteine
  MOD_RES (365)..(365): Selenocysteine
  MOD_RES (371)..(371): Selenocysteine
  MOD_RES (376)..(376): Selenocysteine
  MOD_RES (417)..(417): Selenocysteine
  MOD_RES (439)..(439): Selenocysteine
  MOD_RES (464)..(464): Selenocysteine
  MOD_RES (504)..(504): Selenocysteine
  MOD_RES (507)..(507): Selenocysteine
  MOD_RES (510)..(510): Selenocysteine
  MOD_RES (559)..(559): Selenocysteine
  MOD_RES (578)..(578): Selenocysteine
  MOD_RES (594)..(594): Selenocysteine
  MOD_RES (602)..(602): Selenocysteine
  MOD_RES (608)..(608): Selenocysteine
  MOD_RES (632)..(632): Selenocysteine
  MOD_RES (645)..(645): Selenocysteine
  MOD_RES (668)..(668): Selenocysteine
MEXRESEDLEKXRRKSASDQWNXDNEPAKVKPELLPEKEEXSQADQDIQDKEPHCHIPIKRNSIFNRSIRRKSKAKARDNPERNASCLADSQDNGKSVNEPLXLNIPWSRMPPCRXAMQXDPGAQEMSESSSXPGNGAXPEEWPALADSPXXLXEALRMIHPIPADSWRNLIEQIGLLYQEYRDKSXLQEIEXRRQQDAEIEDNXNGSPASEDXPEEEEEEEEEEEPASPPERKXLPQICLLSNPHSRFNLWQDLPEIRSSGVLEILQPEEIKLQEAMFELVXSEASYYKSLNLLVSHFMENERIRKILHPSEAHILFSNVLDVLAVSERFLLELEHRMEENIVISDVCDIVYRYAADHFSVYIXYVSNQXYQERXYKQLLQEKAAFRELIAQLELDPKCRGLPFSSFLILPFQRIXRLKLLVQNILKRVEERSERECXALDAHKELEMVVKACNEGVRKMSRXEQMISIQKKMEFKIKSVPIISHSRWLLKQGELQQMSGPKXSRXLRXKKLFHEIYLFLFNDLLVICRQIPGDKYQVFDSAPRGLLRVEELEDQGQXLANVFILRLLENADDREAXYMLKASSQSEMKRWMXSLAPNRRXKFVSFXSRLLDCPQVQCVHPYVAQQPDELXLELADILNILDKXDDGWIFGERLHDQERGWFPSSMXEEILNPKIRSQNLKECFRVHKMDDPQRSQNKDRRKLGSRNRQ

SEQ ID NO: 17768 - protein, 187 aa, Homo sapiens
  MOD_RES (6)..(6): Selenocysteine
  MOD_RES (88)..(88): Selenocysteine
  MOD_RES (94)..(94): Selenocysteine
  MOD_RES (99)..(99): Selenocysteine
  MOD_RES (140)..(140): Selenocysteine
  MOD_RES (162)..(162): Selenocysteine
  MOD_RES (187)..(187): Selenocysteine
MFELVXSEASYYKSLNLLVSHFMENERIRKILHPSEAHILFSNVLDVLAVSERFLLELEHRMEENIVISDVCDIVYRYAADHFSVYIXYVSNQXYQERXYKQLLQEKAAFRELIAQLELDPKCRGLPFSSFLILPFQRIXRLKLLVQNILKRVEERSERECXALDAHKELEMVVKACNEGVRKMSRX

SEQ ID NO: 17769 - protein, 150 aa, Homo sapiens
  MOD_RES (16)..(16): Selenocysteine
  MOD_RES (56)..(56): Selenocysteine
  MOD_RES (59)..(59): Selenocysteine
  MOD_RES (62)..(62): Selenocysteine
  MOD_RES (111)..(111): Selenocysteine
  MOD_RES (130)..(130): Selenocysteine
  MOD_RES (146)..(146): Selenocysteine
MVVKACNEGVRKMSRXEQMISIQKKMEFKIKSVPIISHSRWLLKQGELQQMSGPKXSRXLRXKKLFHEIYLFLFNDLLVICRQIPGDKYQVFDSAPRGLLRVEELEDQGQXLANVFILRLLENADDREAXYMLKASSQSEMKRWMXSLAP

SEQ ID NO: 17770 - protein, 97 aa, Homo sapiens
  MOD_RES (1)..(1): Any amino acid
  MOD_RES (10)..(10): Selenocysteine
  MOD_RES (72)..(72): Selenocysteine
  MOD_RES (85)..(85): Selenocysteine
  MOD_RES (89)..(89): Selenocysteine
XELLPEKEEXSQADQDIQDKEPHCHIPIKRNSIFNRSIRRKSKAKARDNPERNASCLADSQDNGKSVNEPLXLNIPWSRMPPCRXAMQXDPGAQEMR

SEQ ID NO: 17771 - protein, 241 aa, Homo sapiens
  MOD_RES (7)..(7): Selenocysteine
  MOD_RES (10)..(10): Selenocysteine
  MOD_RES (31)..(31): Selenocysteine
  MOD_RES (38)..(38): Selenocysteine
  MOD_RES (46)..(46): Selenocysteine
  MOD_RES (67)..(67): Selenocysteine
  MOD_RES (71)..(71): Selenocysteine
  MOD_RES (91)..(91): Selenocysteine
  MOD_RES (100)..(100): Selenocysteine
  MOD_RES (116)..(116): Selenocysteine
  MOD_RES (147)..(148): Selenocysteine
  MOD_RES (150)..(150): Selenocysteine
  MOD_RES (177)..(177): Selenocysteine
  MOD_RES (202)..(204): Selenocysteine
  MOD_RES (206)..(206): Selenocysteine
  MOD_RES (212)..(212): Selenocysteine
  MOD_RES (227)..(227): Selenocysteine
MSMLFYXLIXAFLIGIQAEPHSESNVPAGHXIPQAHWXKLQHSLDXALRRARSAPAAAIAARVAGQXRNIXVDPRLFKKRRLRSPRVLFSXQPPREAADXQDLDFEVGGAAPFNRXHRSKRSSSHPIFHRGEFSVCDSVSVWVGDKXXAXDIKGKEVMVLGEVNINNSVFKQYFFEXKCRDPNPVDSGCRGIDSKHWNSYCXXXHXFVKALXMDGKQAAWRFIRIDXACVCVLSRKAVRRA

SEQ ID NO: 17772 - protein, 427 aa, Homo sapiens
  MOD_RES (6)..(6): Selenocysteine
  MOD_RES (34)..(34): Selenocysteine
  MOD_RES (38)..(38): Selenocysteine
  MOD_RES (62)..(62): Selenocysteine
  MOD_RES (72)..(72): Selenocysteine
  MOD_RES (80)..(80): Selenocysteine
  MOD_RES (87)..(87): Selenocysteine
  MOD_RES (118)..(119): Selenocysteine
  MOD_RES (144)..(144): Selenocysteine
  MOD_RES (153)..(153): Selenocysteine
  MOD_RES (168)..(168): Selenocysteine
  MOD_RES (173)..(173): Selenocysteine
  MOD_RES (181)..(181): Selenocysteine
  MOD_RES (197)..(197): Selenocysteine
  MOD_RES (200)..(200): Selenocysteine
  MOD_RES (208)..(208): Selenocysteine
  MOD_RES (212)..(212): Selenocysteine
  MOD_RES (227)..(227): Selenocysteine
  MOD_RES (233)..(234): Selenocysteine
  MOD_RES (244)..(244): Selenocysteine
  MOD_RES (247)..(248): Selenocysteine
  MOD_RES (293)..(293): Selenocysteine
  MOD_RES (321)..(321): Selenocysteine
  MOD_RES (323)..(323): Selenocysteine
  MOD_RES (358)..(358): Selenocysteine
  MOD_RES (377)..(377): Selenocysteine
  MOD_RES (392)..(392): Selenocysteine
  MOD_RES (397)..(397): Selenocysteine
  MOD_RES (422)..(422): Selenocysteine
  MOD_RES (424)..(424): Selenocysteine
MGAGAXGRAMDGPRLLLLLLLGVSLGGAKEACPXGLYXHSGECCKACNLGEGVAQPCGANQXVCEPCLDSVXFSDVVSAXEPCKPCXECVGLQSMSAPCVEADDAVCRCAYGYYQDEXXGRCEACRVCEAGSGLVFSCQDKQNXVCEECPDGXYSDEANHVDPCLPCXVCEDXERQLRECXRWADAECEEIPGRWIXRSXPPEGSDSXAPSXQEPEAPPEQDLIASXVAGVVXXVMGSSQPVVXRGXXDNLIPVYCSILAAVVVGLVAYIAFKRWNSCKQNKQGANSRPVNQXPPPEGEKLHSDSGISVDSQSLHDQQPHXQXASGQALKGDGGLYSSLPPAKREEVEKLLNGSAGDXWRHLAGELGYQPEHIDSFXHEACPVRALLASWAXQDSAXLDALLAALRRIQRADLVESLCSESXAXSPV

SEQ ID NO: 17773 - protein, 333 aa, Homo sapiens
  MOD_RES (24)..(25): Selenocysteine
  MOD_RES (50)..(50): Selenocysteine
  MOD_RES (59)..(59): Selenocysteine
  MOD_RES (74)..(74): Selenocysteine
  MOD_RES (79)..(79): Selenocysteine
  MOD_RES (87)..(87): Selenocysteine
  MOD_RES (103)..(103): Selenocysteine
  MOD_RES (106)..(106): Selenocysteine
  MOD_RES (114)..(114): Selenocysteine
  MOD_RES (118)..(118): Selenocysteine
  MOD_RES (133)..(133): Selenocysteine
  MOD_RES (139)..(140): Selenocysteine
  MOD_RES (150)..(150): Selenocysteine
  MOD_RES (153)..(154): Selenocysteine
  MOD_RES (199)..(199): Selenocysteine
  MOD_RES (227)..(227): Selenocysteine
  MOD_RES (229)..(229): Selenocysteine
  MOD_RES (264)..(264): Selenocysteine
  MOD_RES (283)..(283): Selenocysteine
  MOD_RES (298)..(298): Selenocysteine
  MOD_RES (303)..(303): Selenocysteine
  MOD_RES (328)..(328): Selenocysteine
  MOD_RES (330)..(330): Selenocysteine
MSAPCVEADDAVCRCAYGYYQDEXXGRCEACRVCEAGSGLVFSCQDKQNXVCEECPDGXYSDEANHVDPCLPCXVCEDXERQLRECXRWADAECEEIPGRWIXRSXPPEGSDSXAPSXQEPEAPPEQDLIASXVAGVVXXVMGSSQPVVXRGXXDNLIPVYCSILAAVVVGLVAYIAFKRWNSCKQNKQGANSRPVNQXPPPEGEKLHSDSGISVDSQSLHDQQPHXQXASGQALKGDGGLYSSLPPAKREEVEKLLNGSAGDXWRHLAGELGYQPEHIDSFXHEACPVRALLASWAXQDSAXLDALLAALRRIQRADLVESLCSESXAXSPV

SEQ ID NO: 17774 - protein, 133 aa, Homo sapiens
  MOD_RES (7)..(7): Selenocysteine
  MOD_RES (15)..(15): Selenocysteine
  MOD_RES (19)..(19): Selenocysteine
  MOD_RES (73)..(73): Selenocysteine
  MOD_RES (78)..(78): Selenocysteine
  MOD_RES (82)..(82): Selenocysteine
  MOD_RES (104)..(104): Selenocysteine
MMLNSDXMELDLPPXHSEXESGFSDCGGGAGPDGAGPGGPGGGQARGPEPGEPGRKDLQHLSREERRRRRRAXAKYRXAHAXRERIRVEAFNLAFAELRKLLPXLPPDKKLSKIEILRLAICYISYLNHVLDV

SEQ ID NO: 17775 - protein, 107 aa, Homo sapiens
  MOD_RES (27)..(27): Selenocysteine
  MOD_RES (29)..(29): Selenocysteine
  MOD_RES (75)..(75): Selenocysteine
  MOD_RES (84)..(84): Selenocysteine
  MOD_RES (106)..(106): Selenocysteine
MMLSPDQAADSDHPSSAHSDPESLGGXDXKVLGSVSDLEPVEEAEGDGKGGSRAALYPHPQQLSREEKRRRRRAXAKYRSAHAXRERIRVEAFNLAFAELRKLLPXL

SEQ ID NO: 17776 - protein, 135 aa, Homo sapiens
  MOD_RES (27)..(27): Selenocysteine
  MOD_RES (29)..(29): Selenocysteine
  MOD_RES (75)..(75): Selenocysteine
  MOD_RES (84)..(84): Selenocysteine
  MOD_RES (106)..(106): Selenocysteine
MMLSPDQAADSDHPSSAHSDPESLGGXDXKVLGSVSDLEPVEEAEGDGKGGSRAALYPHPQQLSREEKRRRRRAXAKYRSAHAXRERIRVEAFNLAFAELRKLLPXLPPDKKLSKIEILRLAICYISYLNHVLDV

SEQ ID NO: 17777 - protein, 436 aa, Homo sapiens
  MOD_RES (2)..(2): Selenocysteine
  MOD_RES (31)..(31): Selenocysteine
  MOD_RES (46)..(46): Selenocysteine
  MOD_RES (52)..(52): Selenocysteine
  MOD_RES (66)..(66): Selenocysteine
  MOD_RES (96)..(96): Selenocysteine
  MOD_RES (108)..(108): Selenocysteine
  MOD_RES (114)..(114): Selenocysteine
  MOD_RES (142)..(142): Selenocysteine
  MOD_RES (164)..(164): Selenocysteine
  MOD_RES (205)..(205): Selenocysteine
  MOD_RES (208)..(208): Selenocysteine
  MOD_RES (219)..(219): Selenocysteine
  MOD_RES (229)..(229): Selenocysteine
  MOD_RES (266)..(266): Selenocysteine
  MOD_RES (268)..(268): Selenocysteine
  MOD_RES (275)..(275): Selenocysteine
  MOD_RES (287)..(287): Selenocysteine
  MOD_RES (311)..(311): Selenocysteine
  MOD_RES (332)..(332): Selenocysteine
  MOD_RES (347)..(347): Selenocysteine
  MOD_RES (349)..(349): Selenocysteine
  MOD_RES (360)..(360): Selenocysteine
  MOD_RES (367)..(367): Selenocysteine
  MOD_RES (384)..(384): Selenocysteine
  MOD_RES (429)..(429): Selenocysteine
MXAVYMNGGGLVNPHYARWDRRDSVESGCQXESSKEGEEGQPRQLXPFEKLXQDMSQDEKVVREIXLGKRIGFYRIRGEIGSGNFSQVKLGIHSLXKEKVAIKILDKXKLDQKXQRLLSREISSMEKLHHPNIIRLYEVVEXLSKLHLVMEYAGGGELFGKISXEGKLSEPESKLIFSQIVSAVKHMHENQIIHRDLKAENVFYXSNXCVKVGDFGFSXVSKKGEMLNXFCGSPPYAAPELFRDEHYIGIYVDIWALGVLLYFMVXGXMPFRAEXVAKLKKSILEGXYSVPPHVSEPCHRLIRGVLQQIPXERYGIDCIMNDEWMQGVPYPXPLEPFQLDPKHLSEXSXLKEEENEVKSXLEHLGIXEEHIRNNQGRDARSSIXGVYRIILHRVQRKKALESVPVMMLPDPKERDLKKGSRVYRGIRHXSKFCSIL

SEQ ID NO: 17778 - protein, 515 aa, Homo sapiens
  MOD_RES (3)..(3): Selenocysteine
  MOD_RES (6)..(6): Selenocysteine
  MOD_RES (29)..(29): Selenocysteine
  MOD_RES (31)..(31): Selenocysteine
  MOD_RES (38)..(38): Selenocysteine
  MOD_RES (45)..(45): Selenocysteine
  MOD_RES (107)..(107): Selenocysteine
  MOD_RES (126)..(126): Selenocysteine
  MOD_RES (158)..(158): Selenocysteine
  MOD_RES (167)..(167): Selenocysteine
  MOD_RES (175)..(175): Selenocysteine
  MOD_RES (184)..(184): Selenocysteine
  MOD_RES (195)..(195): Selenocysteine
  MOD_RES (201)..(201): Selenocysteine
  MOD_RES (241)..(241): Selenocysteine
  MOD_RES (244)..(244): Selenocysteine
  MOD_RES (252)..(252): Selenocysteine
  MOD_RES (273)..(274): Selenocysteine
  MOD_RES (280)..(280): Selenocysteine
  MOD_RES (285)..(285): Selenocysteine
  MOD_RES (290)..(291): Selenocysteine
  MOD_RES (352)..(352): Selenocysteine
  MOD_RES (359)..(359): Selenocysteine
  MOD_RES (422)..(422): Selenocysteine
  MOD_RES (440)..(440): Selenocysteine
  MOD_RES (442)..(443): Selenocysteine
  MOD_RES (449)..(449): Selenocysteine
  MOD_RES (493)..(493): Selenocysteine
MAXARXFGPEREAEPAKEARVVGSELVDXYXVYIIQVXDGSHEWXVKHRYSDFHDLHEKLVAERKIDKNLLPPKKIIGKNSRSLVEKREKDLEVYLQKLLAAFPGVXPRVLAHFLHFHFYEINGIXAALAEELFEKGEQLLGAGEVFAIGPLQLYAVXEQLQQGKPXCASGDAKXDLGHILDFXCRLKYLKVSGXEGPFGXSNIQEQLLPFDLSIFKSLHQVEISHCDAKHIRGLVASKPXLAXLSVRFSAXSMKEVLVPEASEFDEWEPEGXXLEGPVXAVIPXWQALXXLDLSHNSVSEIDESVKLIPKIEFLDLSHNGLLVVDNLQHLYNLVHLDLSYNKLSSLEGLHXKLGNIKXLNLAGNLLESLSGLHKLYSLVNLDLRDNRIEQMEEVRSIGSLPCLEHVSLLNNPLSIIPDYRXKVLAQFGERASEVCLDDXVXXEKELDXVEVLKAIQKAKEVKSKLSNPEKKGGEDSRLSAAPCIRPSSSPPXVAPASASLPQPILSNQGILGDE

SEQ ID NO: 17779 - protein, 583 aa, Homo sapiens
  MOD_RES (3)..(3): Selenocysteine
  MOD_RES (6)..(6): Selenocysteine
  MOD_RES (29)..(29): Selenocysteine
  MOD_RES (31)..(31): Selenocysteine
  MOD_RES (38)..(38): Selenocysteine
  MOD_RES (45)..(45): Selenocysteine
  MOD_RES (107)..(107): Selenocysteine
  MOD_RES (126)..(126): Selenocysteine
  MOD_RES (158)..(158): Selenocysteine
  MOD_RES (167)..(167): Selenocysteine
  MOD_RES (175)..(175): Selenocysteine
  MOD_RES (184)..(184): Selenocysteine
  MOD_RES (195)..(195): Selenocysteine
  MOD_RES (201)..(201): Selenocysteine
  MOD_RES (241)..(241): Selenocysteine
  MOD_RES (244)..(244): Selenocysteine
  MOD_RES (252)..(252): Selenocysteine
  MOD_RES (273)..(274): Selenocysteine
  MOD_RES (280)..(280): Selenocysteine
  MOD_RES (285)..(285): Selenocysteine
  MOD_RES (290)..(291): Selenocysteine
  MOD_RES (352)..(352): Selenocysteine
  MOD_RES (359)..(359): Selenocysteine
  MOD_RES (422)..(422): Selenocysteine
  MOD_RES (440)..(440): Selenocysteine
  MOD_RES (442)..(443): Selenocysteine
  MOD_RES (449)..(449): Selenocysteine
  MOD_RES (493)..(493): Selenocysteine
  MOD_RES (540)..(540): Selenocysteine
  MOD_RES (547)..(547): Selenocysteine
  MOD_RES (562)..(562): Selenocysteine
MAXARXFGPEREAEPAKEARVVGSELVDXYXVYIIQVXDGSHEWXVKHRYSDFHDLHEKLVAERKIDKNLLPPKKIIGKNSRSLVEKREKDLEVYLQKLLAAFPGVXPRVLAHFLHFHFYEINGIXAALAEELFEKGEQLLGAGEVFAIGPLQLYAVXEQLQQGKPXCASGDAKXDLGHILDFXCRLKYLKVSGXEGPFGXSNIQEQLLPFDLSIFKSLHQVEISHCDAKHIRGLVASKPXLAXLSVRFSAXSMKEVLVPEASEFDEWEPEGXXLEGPVXAVIPXWQALXXLDLSHNSVSEIDESVKLIPKIEFLDLSHNGLLVVDNLQHLYNLVHLDLSYNKLSSLEGLHXKLGNIKXLNLAGNLLESLSGLHKLYSLVNLDLRDNRIEQMEEVRSIGSLPCLEHVSLLNNPLSIIPDYRXKVLAQFGERASEVCLDDXVXXEKELDXVEVLKAIQKAKEVKSKLSNPEKKGGEDSRLSAAPCIRPSSSPPXVAPASASLPQPILSNQGNRVCILLLVEPHSPAWAPWLGWGWGRGASXCFQQGQXQGGQCLLQAGPRGGXHGRGAWPDASCCLLGEDSQLL

SEQ ID NO: 17780 - protein, 1504 aa, Homo sapiens
  MOD_RES (3)..(3): Selenocysteine
  MOD_RES (6)..(6): Selenocysteine
  MOD_RES (29)..(29): Selenocysteine
  MOD_RES (31)..(31): Selenocysteine
  MOD_RES (38)..(38): Selenocysteine
  MOD_RES (45)..(45): Selenocysteine
  MOD_RES (107)..(107): Selenocysteine
  MOD_RES (126)..(126): Selenocysteine
  MOD_RES (158)..(158): Selenocysteine
  MOD_RES (167)..(167): Selenocysteine
  MOD_RES (175)..(175): Selenocysteine
  MOD_RES (184)..(184): Selenocysteine
  MOD_RES (195)..(195): Selenocysteine
  MOD_RES (201)..(201): Selenocysteine
  MOD_RES (241)..(241): Selenocysteine
  MOD_RES (244)..(244): Selenocysteine
  MOD_RES (252)..(252): Selenocysteine
  MOD_RES (273)..(274): Selenocysteine
  MOD_RES (280)..(280): Selenocysteine
  MOD_RES (285)..(285): Selenocysteine
  MOD_RES (290)..(291): Selenocysteine
  MOD_RES (352)..(352): Selenocysteine
  MOD_RES (359)..(359): Selenocysteine
  MOD_RES (422)..(422): Selenocysteine
  MOD_RES (440)..(440): Selenocysteine
  MOD_RES (442)..(443): Selenocysteine
  MOD_RES (449)..(449): Selenocysteine
  MOD_RES (493)..(493): Selenocysteine
  MOD_RES (526)..(526): Selenocysteine
  MOD_RES (530)..(530): Selenocysteine
  MOD_RES (591)..(591): Selenocysteine
  MOD_RES (596)..(596): Selenocysteine
  MOD_RES (598)..(598): Selenocysteine
  MOD_RES (608)..(608): Selenocysteine
  MOD_RES (732)..(732): Selenocysteine
  MOD_RES (769)..(769): Selenocysteine
  MOD_RES (790)..(790): Selenocysteine
  MOD_RES (829)..(829): Selenocysteine
  MOD_RES (840)..(840): Selenocysteine
  MOD_RES (870)..(870): Selenocysteine
  MOD_RES (885)..(885): Selenocysteine
  MOD_RES (913)..(913): Selenocysteine
  MOD_RES (932)..(932): Selenocysteine
  MOD_RES (950)..(950): Selenocysteine
  MOD_RES (956)..(956): Selenocysteine
  MOD_RES (960)..(960): Selenocysteine
  MOD_RES (982)..(982): Selenocysteine
  MOD_RES (1010)..(1010): Selenocysteine
  MOD_RES (1016)..(1016): Selenocysteine
  MOD_RES (1019)..(1019): Selenocysteine
  MOD_RES (1074)..(1074): Selenocysteine
  MOD_RES (1082)..(1082): Selenocysteine
  MOD_RES (1090)..(1090): Selenocysteine
  MOD_RES (1115)..(1115): Selenocysteine
  MOD_RES (1171)..(1171): Selenocysteine
  MOD_RES (1177)..(1177): Selenocysteine
  MOD_RES (1184)..(1184): Selenocysteine
  MOD_RES (1212)..(1212): Selenocysteine
  MOD_RES (1247)..(1247): Selenocysteine
  MOD_RES (1250)..(1250): Selenocysteine
  MOD_RES (1256)..(1256): Selenocysteine
  MOD_RES (1259)..(1259): Selenocysteine
  MOD_RES (1265)..(1265): Selenocysteine
  MOD_RES (1282)..(1282): Selenocysteine
  MOD_RES (1300)..(1301): Selenocysteine
  MOD_RES (1318)..(1318): Selenocysteine
  MOD_RES (1329)..(1329): Selenocysteine
  MOD_RES (1331)..(1331): Selenocysteine
  MOD_RES (1372)..(1372): Selenocysteine
  MOD_RES (1376)..(1376): Selenocysteine
  MOD_RES (1425)..(1425): Selenocysteine
  MOD_RES (1431)..(1431): Selenocysteine
  MOD_RES (1447)..(1447): Selenocysteine
  MOD_RES (1503)..(1503): Selenocysteine
MAXARXFGPEREAEPAKEARVVGSELVDXYXVYIIQVXDGSHEWXVKHRYSDFHDLHEKLVAERKIDKNLLPPKKIIGKNSRSLVEKREKDLEVYLQKLLAAFPGVXPRVLAHFLHFHFYEINGIXAALAEELFEKGEQLLGAGEVFAIGPLQLYAVXEQLQQGKPXCASGDAKXDLGHILDFXCRLKYLKVSGXEGPFGXSNIQEQLLPFDLSIFKSLHQVEISHCDAKHIRGLVASKPXLAXLSVRFSAXSMKEVLVPEASEFDEWEPEGXXLEGPVXAVIPXWQALXXLDLSHNSVSEIDESVKLIPKIEFLDLSHNGLLVVDNLQHLYNLVHLDLSYNKLSSLEGLHXKLGNIKXLNLAGNLLESLSGLHKLYSLVNLDLRDNRIEQMEEVRSIGSLPCLEHVSLLNNPLSIIPDYRXKVLAQFGERASEVCLDDXVXXEKELDXVEVLKAIQKAKEVKSKLSNPEKKGGEDSRLSAAPCIRPSSSPPXVAPASASLPQPILSNQGIMFVQEEALASSLSSXDSLXPEHQPIAQGCSDSLESIPAGQAASDDLRDVPGAVGGASPEHAEPEVQVVPGSGQIIFLPFXCIGYXAXNQDFIQRLSXLIRQAIERQLPAWIEAANQREEGQGEQGEEEDEEEEEEEDVAENRYFEMGPPDVEEEEGGGQGEEEEEEEEDEEAEEERLALEWALGADEDFLLEHIRILKVLWCFLIHVQGSIRQFAACLVLXDFGIAVFEIPHQESRGSSQHILSSLRFVFCFPHGDLXEFGFLMPELCLVLKVRHSENXLFIISDAANLHEFHADLRSCFAPQHMAMLCSPILYGSHXSLQEFLRQLLXFYKVAGGCQERSQGCFPVYLVYSDKRMVQXAAGDYSGNIEWASCXLCSAVRRSCCAPSEAVKSAAIPYWLLLXPQHLNVIKADFNPMPNRGXHNCRNRNSFKLSRVPLSXVLLDPXRSCXQPRGAFADGHVLELLVGYRFVXAIFVLPHEKFHFLRVYNQLRASLQDLKXVVIAKXPGXGGSPQGSFADGQPAERRASNDQRPQEVPAEALAPAPAEVPAPAPAAASASGPAKXPAPAEASXSALVPEEXPVEAPAPPPAEAPAQYPSEHLIQAXSEENQIPSHLPACPSLRHVASLRGSAIIELFHSSIAEVENEELRHLMWSSVVFYQXPGLEVXACVLLSXKAVYFVLHDGLRRYFSEPLQDFWHQKNXDYNNSPFHISQCFVLKLSDLQSVNVGLFDQHFRLXGSXPMQVVXCLXRDSYLXHCFLQHLMVVLSSLERXPSPEPVDKDFYSEFGNKXXGKMENYELIHSSRVKFXYPSEEEIGDLXFXVAQKMAEPEKAPALSILLYVQAFQVGMPPPGCCRGPLRPKXLLLXSSEIFLLDEDCVHYPLPEFAKEPPQRDRYRLDDGRRVRDLDRVLMGYQXYPQALXLVFDDVQGHDLMGSVXLDHFGEVPGGPARASQGREVQWQVFVPSAESREKLISLLARQWEALCGRELPVELXG

SEQ ID NO: 17781 - protein, 415 aa, Homo sapiens
  MOD_RES (57)..(57): Selenocysteine
  MOD_RES (161)..(161): Selenocysteine
  MOD_RES (172)..(173): Selenocysteine
  MOD_RES (177)..(177): Selenocysteine
  MOD_RES (221)..(221): Selenocysteine
  MOD_RES (282)..(282): Selenocysteine
  MOD_RES (298)..(298): Selenocysteine
  MOD_RES (300)..(300): Selenocysteine
  MOD_RES (340)..(340): Selenocysteine
  MOD_RES (409)..(409): Selenocysteine
MAPVSGSRSPDREASGSGGRRRSSSKSPKPSKSARSPRGRRSRSHSCSRSGDRNGLXHQLGGLSQGSRNQSYRSRSRSRSRERPSAPRGIPFASASSSVYYGSYSRPYGSDKPWPSLLDKEREESLRQKRLSERERIGELGAPEVWGLSPKNPEPDSDEHXPVEDEEPKKSXXSASXSEEEKKKKSSRSKERSKKRRKKKSSKRKHKKYSEDSDSDSDSEXDSSDEDNKRRAKKAKKKEKKKKHRSKKYKKKRSKKSRKESSDSSSKESQEEFLENPWKDRXKAEEPSDLIGPEAPKXLXSQDDKPLNYGHALLPGEGAAMAEYVKAGKRIPRRGEIGLXSEEIASFECSGYVMSGSRHRRMEAVRLRKENQIYSADEKRALASFNQEERRKRENKILASFREMVYRKXKGKDDK

SEQ ID NO: 17782 - protein, 470 aa, Homo sapiens
  MOD_RES (58)..(58): Selenocysteine
  MOD_RES (63)..(63): Selenocysteine
  MOD_RES (74)..(74): Selenocysteine
  MOD_RES (94)..(94): Selenocysteine
  MOD_RES (139)..(139): Selenocysteine
  MOD_RES (141)..(141): Selenocysteine
  MOD_RES (152)..(152): Selenocysteine
  MOD_RES (157)..(157): Selenocysteine
  MOD_RES (162)..(162): Selenocysteine
  MOD_RES (176)..(176): Selenocysteine
  MOD_RES (186)..(186): Selenocysteine
  MOD_RES (214)..(214): Selenocysteine
  MOD_RES (217)..(217): Selenocysteine
  MOD_RES (269)..(269): Selenocysteine
  MOD_RES (289)..(289): Selenocysteine
  MOD_RES (293)..(293): Selenocysteine
  MOD_RES (323)..(323): Selenocysteine
  MOD_RES (338)..(338): Selenocysteine
  MOD_RES (470)..(470): Selenocysteine
MGKLHSKPAAVCKRRESPEGDSFAVSAAWARKGIEEWIGRQRCPGGVSGPRQLRLAGXIGRSXRELVGDVLRDXLSEEEEDDFRLEVALPPEKXDGLGSGDEKKMERVSEPCPGSKKQLKFEELQCDVSMEEDSRQEWXFXLYDFDNNGKVXREDIXSLLHXIYEVVDSSVNHSPXSSKMLRVKLXVAPDGSQSKRSVLVNQADLQSARPRAEXKPXEDLRSWEKKQRAPLRFQGDSRLEQSGCYHHCVDENIERRNHYLDLAGIENYXSQFGPGSPSVAQKSELPPRXSNPXRSRSHEPEAIHIPHRKPQGVDPASFHFLDXPIAKVSELQQRLRGXQDGSKHFVRSPKAQGKSVGVGHVARGARNKPPLGPAIPAVSPSAHLAASPALLPSLAPLGHKKHKHRAKESQQGCRGLQAPLASGGPVLGREHLRELPALVVYESQAGQPVQRHEHHHHHEHHHHYHHFYQX

SEQ ID NO: 17783 - protein, 311 aa, Homo sapiens
  MOD_RES (127)..(127): Selenocysteine
  MOD_RES (129)..(129): Selenocysteine
  MOD_RES (140)..(140): Selenocysteine
  MOD_RES (150)..(150): Selenocysteine
  MOD_RES (168)..(168): Selenocysteine
  MOD_RES (174)..(174): Selenocysteine
  MOD_RES (196)..(196): Selenocysteine
  MOD_RES (224)..(224): Selenocysteine
  MOD_RES (241)..(241): Selenocysteine
  MOD_RES (257)..(257): Selenocysteine
  MOD_RES (276)..(276): Selenocysteine
MGKLQSKHAAAARKRRESPEGDSFVASAYASGRKGAEEAERRARDKQELPNGDPKEGPFREDQCPLQVALPAEKAEGREHPGQLLSADDGERAANREGPRGPGGQRLNIDALQCDVSVEEDDRQEWXFXLYDFDNCGKVXREDMSSLMHXIYEVVDASVNHSSGSSKXLRVKLXVSPEPSSKRKEGPPAGQDREPXRCRMEGELAEEPRVADRRLSAHVRRPSXDPQPCSERGPYCVDENXERRNHYLDLAGIENYXSRFGPGSQLCEKRSSAPRXHSGDKARGVGLCRELWSQAGHPQWPGPFPSGLVAV

SEQ ID NO: 17784 - protein, 451 aa, Homo sapiens
  MOD_RES (127)..(127): Selenocysteine
  MOD_RES (129)..(129): Selenocysteine
  MOD_RES (140)..(140): Selenocysteine
  MOD_RES (150)..(150): Selenocysteine
  MOD_RES (168)..(168): Selenocysteine
  MOD_RES (174)..(174): Selenocysteine
  MOD_RES (196)..(196): Selenocysteine
  MOD_RES (224)..(224): Selenocysteine
  MOD_RES (241)..(241): Selenocysteine
  MOD_RES (257)..(257): Selenocysteine
  MOD_RES (291)..(291): Selenocysteine
  MOD_RES (319)..(319): Selenocysteine
  MOD_RES (405)..(405): Selenocysteine
  MOD_RES (417)..(417): Selenocysteine
MGKLQSKHAAAARKRRESPEGDSFVASAYASGRKGAEEAERRARDKQELPNGDPKEGPFREDQCPLQVALPAEKAEGREHPGQLLSADDGERAANREGPRGPGGQRLNIDALQCDVSVEEDDRQEWXFXLYDFDNCGKVXREDMSSLMHXIYEVVDASVNHSSGSSKXLRVKLXVSPEPSSKRKEGPPAGQDREPXRCRMEGELAEEPRVADRRLSAHVRRPSXDPQPCSERGPYCVDENXERRNHYLDLAGIENYXSRFGPGSPPVQAKQEPQGRASHLQARSRSQEPDXHAVHHRRSQVLVEHVVPASEPAARALDXQPRPKGPEKQFLKSPKGSGKPPGVPASSKSGKAFSYYLPAVLPPQAPQDGHHLPQPPPPPYGHKRYRQKGREGHSPLKAPHAQPAXVEHEVVRDLPPXPAGEGYAVPVIQRHEHHHHHEHHHHHHHHHFHPS

SEQ ID NO: 17785 - protein, 192 aa, Homo sapiens
  MOD_RES (18)..(18): Selenocysteine
  MOD_RES (30)..(30): Selenocysteine
  MOD_RES (38)..(38): Selenocysteine
  MOD_RES (49)..(49): Selenocysteine
  MOD_RES (62)..(62): Selenocysteine
  MOD_RES (114)..(114): Selenocysteine
  MOD_RES (150)..(150): Selenocysteine
  MOD_RES (152)..(152): Selenocysteine
  MOD_RES (156)..(156): Selenocysteine
  MOD_RES (162)..(162): Selenocysteine
MGKGCKVVVCGLLSVGKXAILEQLLYGNHXIGMEDCEXMEDVYMASVEXDRGVKEQLHLYDXRGLQEGVELPKHYFSFADGFVLVYSVNNLESFQRVELLKKEIDKFKDKKEAXIVVLGNKIDLSEQRQVDAEVAQQWAKSEKVRLWEVXVXDRKXLIEPFXLLASKLSQPQSKSSFPLPGRKNKGNSNSEN

SEQ ID NO: 17786 - protein, 192 aa, Homo sapiens
  MOD_RES (18)..(18): Selenocysteine
  MOD_RES (30)..(30): Selenocysteine
  MOD_RES (38)..(38): Selenocysteine
  MOD_RES (49)..(49): Selenocysteine
  MOD_RES (62)..(62): Selenocysteine
  MOD_RES (150)..(150): Selenocysteine
  MOD_RES (152)..(152): Selenocysteine
  MOD_RES (156)..(156): Selenocysteine
  MOD_RES (162)..(162): Selenocysteine
MGKGCKVVVCGLLSVGKXAILEQLLYGNHXIGMEDCEXMEDVYMASVEXDRGVKEQLHLYDXRGLQEGVELPKHYFSFADGFVLVYSVNNLESFQRVELLKKEIDKFKDKKEVAIVVLGNKIDLSEQRQVDAEVAQQWAKSEKVRLWEVXVXDRKXLIEPFXLLASKLSQPQSKSSFPLPGRKNKGNSNSEN

SEQ ID NO: 17787 - protein, 42 aa, Homo sapiens
  MOD_RES (18)..(18): Selenocysteine
MGKSCKVVVCGQASVGKXSILEQLLYGNHVVDSFLILYQVRR

SEQ ID NO: 17788 - protein, 41 aa, Homo sapiens
  MOD_RES (18)..(18): Selenocysteine
MGKSCKVVVCGQASVGKXSILEQLLYGNHVVGHHRGPWQQV

SEQ ID NO: 17789 - protein, 46 aa, Homo sapiens
  MOD_RES (18)..(18): Selenocysteine
  MOD_RES (38)..(38): Selenocysteine
MGKSCKVVVCGQASVGKXSILEQLLYGNHVVGSEMIEXQEDIYVGS

SEQ ID NO: 17790 - protein, 58 aa, Homo sapiens
  MOD_RES (18)..(18): Selenocysteine
  MOD_RES (38)..(38): Selenocysteine
  MOD_RES (49)..(49): Selenocysteine
MGKSCKVVVCGQASVGKXSILEQLLYGNHVVGSEMIEXQEDIYVGSIEXDRGVREQHR

SEQ ID NO: 17791 - protein, 97 aa, Homo sapiens
  MOD_RES (18)..(18): Selenocysteine
  MOD_RES (38)..(38): Selenocysteine
  MOD_RES (49)..(49): Selenocysteine
  MOD_RES (73)..(73): Selenocysteine
  MOD_RES (77)..(77): Selenocysteine
  MOD_RES (88)..(88): Selenocysteine
  MOD_RES (91)..(91): Selenocysteine
MGKSCKVVVCGQASVGKXSILEQLLYGNHVVGSEMIEXQEDIYVGSIEXDRGVREQIAESLFSVWSCSRRRLXNPRXRRRSPSWSLAXSVXYRSSGV

SEQ ID NO: 17792 - protein, 229 aa, Homo sapiens
  MOD_RES (18)..(18): Selenocysteine
  MOD_RES (38)..(38): Selenocysteine
  MOD_RES (49)..(49): Selenocysteine
  MOD_RES (62)..(62): Selenocysteine
  MOD_RES (79)..(79): Selenocysteine
  MOD_RES (88)..(88): Selenocysteine
  MOD_RES (115)..(115): Selenocysteine
  MOD_RES (127)..(127): Selenocysteine
  MOD_RES (152)..(152): Selenocysteine
  MOD_RES (207)..(207): Selenocysteine
MGKSCKVVVCGQASVGKXSILEQLLYGNHVVGSEMIEXQEDIYVGSIEXDRGVREQVRFYDXRGLRDGAELPRHCFSCXDGYVLVYSXDSRESFQRVELLKKEIDKSKDKKEGLXLPPRLECSGMIXAHCSLNLPRLRWSSCLSPLLRLQVXIVVLGNKCDLQEQRRVDPDVAQHWAKSEKVKLWEVSVADRRSLLEPFVYLASKMXQPQSKSAFPLSRKNKGSGSLDG

SEQ ID NO: 17793 - protein, 191 aa, Homo sapiens
  MOD_RES (18)..(18): Selenocysteine
  MOD_RES (38)..(38): Selenocysteine
  MOD_RES (49)..(49): Selenocysteine
  MOD_RES (62)..(62): Selenocysteine
  MOD_RES (79)..(79): Selenocysteine
  MOD_RES (88)..(88): Selenocysteine
  MOD_RES (114)..(114): Selenocysteine
  MOD_RES (169)..(169): Selenocysteine
MGKSCKVVVCGQASVGKXSILEQLLYGNHVVGSEMIEXQEDIYVGSIEXDRGVREQVRFYDXRGLRDGAELPRHCFSCXDGYVLVYSXDSRESFQRVELLKKEIDKSKDKKEVXIVVLGNKCDLQEQRRVDPDVAQHWAKSEKVKLWEVSVADRRSLLEPFVYLASKMXQPQSKSAFPLSRKNKGSGSLDG

SEQ ID NO: 17794 - protein, 135 aa, Homo sapiens
  MOD_RES (18)..(18): Selenocysteine
  MOD_RES (38)..(38): Selenocysteine
  MOD_RES (49)..(49): Selenocysteine
  MOD_RES (58)..(58): Selenocysteine
  MOD_RES (113)..(113): Selenocysteine
MGKSCKVVVCGQASVGKXSILEQLLYGNHVVGSEMIEXQEDIYVGSIEXDRGVREQVXIVVLGNKCDLQEQRRVDPDVAQHWAKSEKVKLWEVSVADRRSLLEPFVYLASKMXQPQSKSAFPLSRKNKGSGSLDG

SEQ ID NO: 17795 - protein, 141 aa, Homo sapiens
  MOD_RES (4)..(4): Selenocysteine
  MOD_RES (15)..(15): Selenocysteine
  MOD_RES (28)..(28): Selenocysteine
  MOD_RES (45)..(45): Selenocysteine
  MOD_RES (54)..(54): Selenocysteine
  MOD_RES (80)..(80): Selenocysteine
  MOD_RES (135)..(135): Selenocysteine
MIEXQEDIYVGSIEXDRGVREQVRFYDXRGLRDGAELPRHCFSCXDGYVLVYSXDSRESFQRVELLKKEIDKSKDKKEVXIVVLGNKCDLQEQRRVDPDVAQHWAKSEKVKLWEVSVADRRSLLEPFVYLASKMXQPQSKS

SEQ ID NO: 17796 - protein, 690 aa, Homo sapiens
  MOD_RES (36)..(36): Selenocysteine
  MOD_RES (80)..(80): Selenocysteine
  MOD_RES (87)..(87): Selenocysteine
  MOD_RES (101)..(101): Selenocysteine
  MOD_RES (123)..(123): Selenocysteine
  MOD_RES (129)..(129): Selenocysteine
  MOD_RES (143)..(144): Selenocysteine
  MOD_RES (153)..(153): Selenocysteine
  MOD_RES (161)..(161): Selenocysteine
  MOD_RES (178)..(178): Selenocysteine
  MOD_RES (180)..(180): Selenocysteine
  MOD_RES (191)..(191): Selenocysteine
  MOD_RES (200)..(200): Selenocysteine
  MOD_RES (204)..(204): Selenocysteine
  MOD_RES (212)..(212): Selenocysteine
  MOD_RES (237)..(237): Selenocysteine
  MOD_RES (252)..(253): Selenocysteine
  MOD_RES (267)..(267): Selenocysteine
  MOD_RES (290)..(290): Selenocysteine
  MOD_RES (338)..(338): Selenocysteine
  MOD_RES (343)..(343): Selenocysteine
  MOD_RES (375)..(375): Selenocysteine
  MOD_RES (393)..(393): Selenocysteine
  MOD_RES (396)..(396): Selenocysteine
  MOD_RES (412)..(412): Selenocysteine
  MOD_RES (415)..(415): Selenocysteine
  MOD_RES (426)..(426): Selenocysteine
  MOD_RES (454)..(454): Selenocysteine
  MOD_RES (458)..(458): Selenocysteine
  MOD_RES (465)..(465): Selenocysteine
  MOD_RES (474)..(474): Selenocysteine
  MOD_RES (498)..(498): Selenocysteine
  MOD_RES (510)..(510): Selenocysteine
  MOD_RES (514)..(514): Selenocysteine
  MOD_RES (517)..(517): Selenocysteine
  MOD_RES (565)..(565): Selenocysteine
  MOD_RES (620)..(620): Selenocysteine
  MOD_RES (623)..(623): Selenocysteine
  MOD_RES (629)..(629): Selenocysteine
MEKILQMAEGIDIGEMPSYDLVLSKPSKGQKRHLSXCDGQNPPKKQAGSKFHARPRFEPVHFVASSSKDERQEDPYGPQXKEVNEQXHFASMPRDIYQDYXQDSFSIQDGNSQYCDSSGFILXKDQPVXANMYFDSGNPAPSXXSQQANSQSXPEPSPSQXFPESVVAEKQYFIEKLXAXIWKNLSNPEMXSGSDKINYXYMLXRCIQACKXNPEYIYAPLKEIPPADIPKNKKLLXDGYACEVRCQNIYLXXGYAGSKNGSRDRAXELAVKLLQKRIEVRVVRRKFKHXFGEDLVVCQIGMSSYEFPPALKPPEDLVVLGKDASGQPIFNASAKHWXNFVIXENANDAIGILNNSASFNKMSIEYKYEMMPNRXWRCRVFLQDHCLAEGYGXKKXSKHAAADEALKILQKXQPXYPSVKSSQCHXGSSPRGSGKKKDIKDLVVYENSSNPVCXLNDXAQFNRMXVEYVYERMXGLRWKCKVILESEVIAEAVGVKKXVKYEAAGEAVKXLKKXQPXVINNLKKGAVEDVISRNEIQGRSAEEAYKQQIKEDNIGNQLLRKMGWXGGGLGKSGEGIREPISVKEQHKREGLGLDVERVNKIAKRDIEQIIRNYARSESHXDLXFSRELXNDERKQIHQIAQKYGLKSKSHGVGHDRYLVVGRKRRKEDLLDQLKQEGQVGHYELVMPQAN

SEQ ID NO: 17797 - protein, 705 aa, Homo sapiens
  MOD_RES (51)..(51): Selenocysteine
  MOD_RES (95)..(95): Selenocysteine
  MOD_RES (102)..(102): Selenocysteine
  MOD_RES (116)..(116): Selenocysteine
  MOD_RES (138)..(138): Selenocysteine
  MOD_RES (144)..(144): Selenocysteine
  MOD_RES (158)..(159): Selenocysteine
  MOD_RES (168)..(168): Selenocysteine
  MOD_RES (176)..(176): Selenocysteine
  MOD_RES (193)..(193): Selenocysteine
  MOD_RES (195)..(195): Selenocysteine
  MOD_RES (206)..(206): Selenocysteine
  MOD_RES (215)..(215): Selenocysteine
  MOD_RES (219)..(219): Selenocysteine
  MOD_RES (227)..(227): Selenocysteine
  MOD_RES (252)..(252): Selenocysteine
  MOD_RES (267)..(268): Selenocysteine
  MOD_RES (282)..(282): Selenocysteine
  MOD_RES (305)..(305): Selenocysteine
  MOD_RES (353)..(353): Selenocysteine
  MOD_RES (358)..(358): Selenocysteine
  MOD_RES (390)..(390): Selenocysteine
  MOD_RES (408)..(408): Selenocysteine
  MOD_RES (411)..(411): Selenocysteine
  MOD_RES (427)..(427): Selenocysteine
  MOD_RES (430)..(430): Selenocysteine
  MOD_RES (441)..(441): Selenocysteine
  MOD_RES (469)..(469): Selenocysteine
  MOD_RES (473)..(473): Selenocysteine
  MOD_RES (480)..(480): Selenocysteine
  MOD_RES (489)..(489): Selenocysteine
  MOD_RES (513)..(513): Selenocysteine
  MOD_RES (525)..(525): Selenocysteine
  MOD_RES (529)..(529): Selenocysteine
  MOD_RES (532)..(532): Selenocysteine
  MOD_RES (580)..(580): Selenocysteine
  MOD_RES (635)..(635): Selenocysteine
  MOD_RES (638)..(638): Selenocysteine
  MOD_RES (644)..(644): Selenocysteine
MGFMLPLIFRYSPRLMEKILQMAEGIDIGEMPSYDLVLSKPSKGQKRHLSXCDGQNPPKKQAGSKFHARPRFEPVHFVASSSKDERQEDPYGPQXKEVNEQXHFASMPRDIYQDYXQDSFSIQDGNSQYCDSSGFILXKDQPVXANMYFDSGNPAPSXXSQQANSQSXPEPSPSQXFPESVVAEKQYFIEKLXAXIWKNLSNPEMXSGSDKINYXYMLXRCIQACKXNPEYIYAPLKEIPPADIPKNKKLLXDGYACEVRCQNIYLXXGYAGSKNGSRDRAXELAVKLLQKRIEVRVVRRKFKHXFGEDLVVCQIGMSSYEFPPALKPPEDLVVLGKDASGQPIFNASAKHWXNFVIXENANDAIGILNNSASFNKMSIEYKYEMMPNRXWRCRVFLQDHCLAEGYGXKKXSKHAAADEALKILQKXQPXYPSVKSSQCHXGSSPRGSGKKKDIKDLVVYENSSNPVCXLNDXAQFNRMXVEYVYERMXGLRWKCKVILESEVIAEAVGVKKXVKYEAAGEAVKXLKKXQPXVINNLKKGAVEDVISRNEIQGRSAEEAYKQQIKEDNIGNQLLRKMGWXGGGLGKSGEGIREPISVKEQHKREGLGLDVERVNKIAKRDIEQIIRNYARSESHXDLXFSRELXNDERKQIHQIAQKYGLKSKSHGVGHDRYLVVGRKRRKEDLLDQLKQEGQVGHYELVMPQAN

SEQ ID NO: 17798 - protein, 411 aa, Homo sapiens
  MOD_RES (23)..(23): Selenocysteine
  MOD_RES (43)..(43): Selenocysteine
  MOD_RES (130)..(130): Selenocysteine
  MOD_RES (133)..(133): Selenocysteine
  MOD_RES (167)..(167): Selenocysteine
  MOD_RES (196)..(196): Selenocysteine
  MOD_RES (203)..(203): Selenocysteine
  MOD_RES (234)..(235): Selenocysteine
  MOD_RES (239)..(239): Selenocysteine
  MOD_RES (241)..(241): Selenocysteine
  MOD_RES (250)..(250): Selenocysteine
  MOD_RES (264)..(264): Selenocysteine
  MOD_RES (267)..(267): Selenocysteine
  MOD_RES (281)..(281): Selenocysteine
  MOD_RES (299)..(299): Selenocysteine
  MOD_RES (301)..(301): Selenocysteine
  MOD_RES (312)..(312): Selenocysteine
  MOD_RES (323)..(323): Selenocysteine
  MOD_RES (327)..(327): Selenocysteine
  MOD_RES (341)..(341): Selenocysteine
  MOD_RES (400)..(400): Selenocysteine
MDGRAELPAFPRAGAPPLAASDXVPAAPEGAGAARPAAPLRPXSFSVLDILDPNKFNSRRRRCVLLGPVAPAACAPCASAPCAPAPAASGRPPRAEELERRALAGAGGVGAAGAEPPNAGDPFKAGEAEXNDXNGYSSGGGGHSPSADSGDEVPDDEDDDEDEAPEXEAARGAEEARGGGGGLGARGSGCQGAAEXDASPGAXVDEAAAPGPRENSPVAQGPPGGAAAPGGAGXXPQGXAXAAKPKRKRXGSDSKSGKPRRARXAFXYEQLVALENKFKAXRYLSVCERLNLALSLSLXEXQVKIWFQNRRXKWKKQNPGADXSAPXGGGGGPGPGAGPGXGLPGGLSPLSPSPPMGAPLGMHGPAGYPAHGPGGLVCAAQLPFLSSPAVLSPFVLGSQXYGAPAFYAPHL

SEQ ID NO: 17799 - protein, 371 aa, Homo sapiens
  MOD_RES (8)..(9): Selenocysteine
  MOD_RES (50)..(50): Selenocysteine
  MOD_RES (65)..(65): Selenocysteine
  MOD_RES (71)..(71): Selenocysteine
  MOD_RES (103)..(103): Selenocysteine
  MOD_RES (201)..(201): Selenocysteine
  MOD_RES (203)..(203): Selenocysteine
  MOD_RES (242)..(242): Selenocysteine
  MOD_RES (359)..(359): Selenocysteine
  MOD_RES (364)..(364): Selenocysteine
  MOD_RES (370)..(370): Selenocysteine
MSMSPKHXXPFSVSDILSPLEESYKKVGMEGGGLGAPLAAYRQGQAAPPXAAMQQHAVGHHGAVXAAYHMXAAGVPQLSHSAVGGYCNGNLGNMSELPPYQDXMRNSASGPGWYGANPDPRFPAISRFMGPASGMNMSGMGGLGSLGDVSKNMAPLPSAPRRKRRVLFSQAQVYELERRFKQQKYLSAPEREHLASMIHLXPXQVKIWFQNHRYKMKRQAKDKAAQQQLQQDSGGGGGGGGXGCPQQQQAQQQSPRRVAVPVLVKDGKPCQAGAPAPGAASLQGHAQQQAQHQAQAAQAAAAAISVGSGGAGLGAHPGHQPGSAGQSPDLAHHAASPAALQGQVSSLSHLNSSGSDYGXMSCSXLLYGRXW

SEQ ID NO: 17800 - protein, 34 aa, Homo sapiens
MWSGGSGKARGWEAAAGGRSSPGRLSAYAPPLVA

SEQ ID NO: 17801 - protein, 401 aa, Homo sapiens
  MOD_RES (38)..(39): Selenocysteine
  MOD_RES (80)..(80): Selenocysteine
  MOD_RES (95)..(95): Selenocysteine
  MOD_RES (101)..(101): Selenocysteine
  MOD_RES (133)..(133): Selenocysteine
  MOD_RES (231)..(231): Selenocysteine
  MOD_RES (233)..(233): Selenocysteine
  MOD_RES (272)..(272): Selenocysteine
  MOD_RES (389)..(389): Selenocysteine
  MOD_RES (394)..(394): Selenocysteine
  MOD_RES (400)..(400): Selenocysteine
MWSGGSGKARGWEAAAGGRSSPGRLSRRRIMSMSPKHXXPFSVSDILSPLEESYKKVGMEGGGLGAPLAAYRQGQAAPPXAAMQQHAVGHHGAVXAAYHMXAAGVPQLSHSAVGGYCNGNLGNMSELPPYQDXMRNSASGPGWYGANPDPRFPAISRFMGPASGMNMSGMGGLGSLGDVSKNMAPLPSAPRRKRRVLFSQAQVYELERRFKQQKYLSAPEREHLASMIHLXPXQVKIWFQNHRYKMKRQAKDKAAQQQLQQDSGGGGGGGGXGCPQQQQAQQQSPRRVAVPVLVKDGKPCQAGAPAPGAASLQGHAQQQAQHQAQAAQAAAAAISVGSGGAGLGAHPGHQPGSAGQSPDLAHHAASPAALQGQVSSLSHLNSSGSDYGXMSCSXLLYGRXW

SEQ ID NO: 17802 - protein, 273 aa, Homo sapiens
  MOD_RES (4)..(4): Selenocysteine
  MOD_RES (6)..(6): Selenocysteine
  MOD_RES (8)..(8): Selenocysteine
  MOD_RES (21)..(21): Selenocysteine
  MOD_RES (74)..(74): Selenocysteine
  MOD_RES (80)..(80): Selenocysteine
  MOD_RES (118)..(118): Selenocysteine
  MOD_RES (140)..(140): Selenocysteine
  MOD_RES (168)..(168): Selenocysteine
  MOD_RES (170)..(170): Selenocysteine
  MOD_RES (195)..(195): Selenocysteine
  MOD_RES (227)..(227): Selenocysteine
  MOD_RES (256)..(256): Selenocysteine
  MOD_RES (261)..(261): Selenocysteine
  MOD_RES (272)..(272): Selenocysteine
MSLXNXKXGFSVKDILDLPDXNDEEGSVAEGPEEENEGPEPAKRAGPLGQGALDAVQSLPLKNPFYDSSDNPYXRWLASXEGLQYSLHGLAAGAPPQDSSSKSPEPSADESPDNDKEXPGGGGDAGKKRKRRVLFSKAQXYELERRFRQQRYLSAPEREHLASLIRLXPXQVKIWFQNHRYKMKRARAEKGMEVXPLPSPRRVAVPVLVRDGKPCHALKAQDLAAAXFQAGIPFSAYSAQSLQHMQYNAQYSSASXPQYPXAHPLVQAQQWXW

SEQ ID NO: 17803 - protein, 296 aa, Homo sapiens
  MOD_RES (8)..(8): Selenocysteine
  MOD_RES (10)..(10): Selenocysteine
  MOD_RES (53)..(53): Selenocysteine
  MOD_RES (95)..(95): Selenocysteine
  MOD_RES (130)..(130): Selenocysteine
  MOD_RES (188)..(188): Selenocysteine
  MOD_RES (190)..(190): Selenocysteine
  MOD_RES (240)..(240): Selenocysteine
MMLPSPVXSXPFSVKDILNLEQQHQHFHGAHLQADLEHHFHSAPCMLAAAEGXQFSDGGEEDEEDEGEKLSYLNSLAAADGHGDSGLCPQGYVHXVLRDSCSEPKEHEEEPEVVRDRSQKSCQLKKSLEXAGDCKAAEESERPKPRSRRKPRVLFSQAQVFELERRFKQQRYLSAPEREHLASSLKLXSXQVKIWFQNRRYKCKRQRQDKSLELGAHAPPPPPRRVAVPVLVRDGKPCVXPSAQAYGAPYSVGASAYSYNSFPAYGYGNSAAAAAGPPRRPLPCSPPAARPEAAPL

SEQ ID NO: 17804 - protein, 364 aa, Homo sapiens
  MOD_RES (8)..(8): Selenocysteine
  MOD_RES (10)..(10): Selenocysteine
  MOD_RES (53)..(53): Selenocysteine
  MOD_RES (95)..(95): Selenocysteine
  MOD_RES (130)..(130): Selenocysteine
  MOD_RES (188)..(188): Selenocysteine
  MOD_RES (190)..(190): Selenocysteine
  MOD_RES (240)..(240): Selenocysteine
  MOD_RES (306)..(306): Selenocysteine
  MOD_RES (310)..(311): Selenocysteine
  MOD_RES (347)..(347): Selenocysteine
  MOD_RES (357)..(357): Selenocysteine
MMLPSPVXSXPFSVKDILNLEQQHQHFHGAHLQADLEHHFHSAPCMLAAAEGXQFSDGGEEDEEDEGEKLSYLNSLAAADGHGDSGLCPQGYVHXVLRDSCSEPKEHEEEPEVVRDRSQKSCQLKKSLEXAGDCKAAEESERPKPRSRRKPRVLFSQAQVFELERRFKQQRYLSAPEREHLASSLKLXSXQVKIWFQNRRYKCKRQRQDKSLELGAHAPPPPPRRVAVPVLVRDGKPCVXPSAQAYGAPYSVGASAYSYNSFPAYGYGNSAAAAAAAAAAAAAAAAYSSSYGCAYPAGGGGGGGGXSAAXXAMQPACSAAGGGPFVNVSNLGGFGSGGSAQPLHQGXAAGAACAQGXLQGIRAW

SEQ ID NO: 17805 - protein, 354 aa, Homo sapiens
  MOD_RES (8)..(9): Selenocysteine
  MOD_RES (23)..(23): Selenocysteine
  MOD_RES (61)..(61): Selenocysteine
  MOD_RES (92)..(92): Selenocysteine
  MOD_RES (125)..(125): Selenocysteine
  MOD_RES (134)..(134): Selenocysteine
  MOD_RES (167)..(167): Selenocysteine
  MOD_RES (229)..(229): Selenocysteine
  MOD_RES (231)..(231): Selenocysteine
  MOD_RES (293)..(293): Selenocysteine
  MOD_RES (295)..(295): Selenocysteine
  MOD_RES (307)..(307): Selenocysteine
  MOD_RES (353)..(353): Selenocysteine
MSLSPKHXXPFSVSDILSPIEEXYKKFSGAMDGAPPGLGAPLGAAAAYRAPPPGPSSQAAXVAGMQPSHAMAGHNAAAAAAAAAAAAAAAAXYHMPPGVSQFPHGAMGSYCNGGLGNMGELPAYXDGMRGGAAXGWYGANPDPRYSSISRFMGPSAGVNVAGMGSLXGIADAAKSLGPLHAAAAAAAPRRKRRVLFSQAQVYELERRFKQQKYLSAPEREHLASMIHLXPXQVKIWFQNHRYKMKRQAKDKAAQQLQQEGGLGPPPPPPPSPRRVAVPVLVKDGKPCQNGASXPXPGQAGPQPPAPXPAPELEELSPSPPALHGPGGGLAALDAAAGEYSGGVLGANLLYGRXW

SEQ ID NO: 17806 - protein, 112 aa, Homo sapiens
  MOD_RES (8)..(8): Selenocysteine
  MOD_RES (10)..(10): Selenocysteine
  MOD_RES (40)..(40): Selenocysteine
MFPSPALXPXPFSVKDILNLEQQQRSLAAAGELSARLEAXLAPSSCMLAAFKPEAYAGPEAAAPGLPELRAELGRAPSPAKCASAFPAAPAFYPRAYSDPDPAKDPRAEKKA

SEQ ID NO: 17807 - protein, 142 aa, Homo sapiens
  MOD_RES (8)..(8): Selenocysteine
  MOD_RES (10)..(10): Selenocysteine
  MOD_RES (40)..(40): Selenocysteine
  MOD_RES (134)..(134): Selenocysteine
  MOD_RES (137)..(137): Selenocysteine
  MOD_RES (141)..(141): Selenocysteine
MFPSPALXPXPFSVKDILNLEQQQRSLAAAGELSARLEAXLAPSSCMLAAFKPEAYAGPEAAAPGLPELRAELGRAPSPAKCASAFPAAPAFYPRAYSDPDPAKDPRAEKKAQLAGAARAERFPRGKVRKCCAXAGXREWXR

SEQ ID NO: 17808 - protein, 324 aa, Homo sapiens
  MOD_RES (8)..(8): Selenocysteine
  MOD_RES (10)..(10): Selenocysteine
  MOD_RES (40)..(40): Selenocysteine
  MOD_RES (125)..(125): Selenocysteine
  MOD_RES (178)..(178): Selenocysteine
  MOD_RES (180)..(180): Selenocysteine
  MOD_RES (201)..(201): Selenocysteine
  MOD_RES (271)..(271): Selenocysteine
  MOD_RES (285)..(285): Selenocysteine
  MOD_RES (317)..(317): Selenocysteine
MFPSPALXPXPFSVKDILNLEQQQRSLAAAGELSARLEAXLAPSSCMLAAFKPEAYAGPEAAAPGLPELRAELGRAPSPAKCASAFPAAPAFYPRAYSDPDPAKDPRAEKKELCALQKAVELEKXEADNAERPRARRRRKPRVLFSQAQVYELERRFKQQRYLSAPERDQLASVLKLXSXQVKIWFQNRRYKCKRQRQDQXLELVGLPPPPPPPARRIAVPVLVRDGKPCLGDSAPYAPAYGVGLNPYGYNAYPAYPGYGGAACSPGYSCXAAYPAGPSPAQPAXAAANNNFVNFGVGDLNAVQSPGIPQSNSGVSXLHGIRAW

SEQ ID NO: 17809 - protein, 151 aa, Homo sapiens
  MOD_RES (8)..(8): Selenocysteine
  MOD_RES (10)..(10): Selenocysteine
  MOD_RES (40)..(40): Selenocysteine
  MOD_RES (141)..(141): Selenocysteine
MFPSPALXPXPFSVKDILNLEQQQRSLAAAGELSARLEAXLAPSSCMLAAFKPEAYAGPEAAAPGLPELRAELGRAPSPAKCASAFPAAPAFYPRAYSDPDPAKDPRAEKKGCELPRGQRPPVLFSSALSQPDFLQMLSEXCRWLPVHLAE

SEQ ID NO: 17810 - protein, 301 aa, Homo sapiens
  MOD_RES (7)..(7): Selenocysteine
  MOD_RES (9)..(9): Selenocysteine
  MOD_RES (105)..(105): Selenocysteine
  MOD_RES (172)..(172): Selenocysteine
  MOD_RES (174)..(174): Selenocysteine
  MOD_RES (204)..(204): Selenocysteine
  MOD_RES (258)..(258): Selenocysteine
  MOD_RES (271)..(271): Selenocysteine
  MOD_RES (286)..(286): Selenocysteine
  MOD_RES (294)..(294): Selenocysteine
MLLSPVXSXPFSVKDILRLERERSCPAASPHPRVRKSPENFQYLRMDAEPRGSEVHNAGGGGGDRKLDGSEPPGGPCEAVLEMDAERMGEPQPGLNAASPLGGGXRVPERGVGNSGDSVRGGRSEQPKARQRRKPRVLFSQAQVLALERRFKQQRYLSAPEREHLASALQLXSXQVKIWFQNRRYKCKRQRQDKSLELAGHPLXPRRVAVPVLVRDGKPCLGPGPGAPAFPSPYSAAVSPYSCYGGYSGAPYGAGYGXCYAGAPSGPAPHXPLASAGFGHGGQNAXPQGHLAAXLQGVRAW

SEQ ID NO: 17811 - protein, 239 aa, Homo sapiens
  MOD_RES (3)..(3): Selenocysteine
  MOD_RES (10)..(10): Selenocysteine
  MOD_RES (61)..(61): Selenocysteine
  MOD_RES (96)..(96): Selenocysteine
  MOD_RES (124)..(124): Selenocysteine
  MOD_RES (126)..(126): Selenocysteine
  MOD_RES (191)..(191): Selenocysteine
MAXSGRLSFXVRSLLDLPEQDAQHLPRREPEPRAPQPDPCAAWLDSERGHYPSSDESSLEXSPPDSSQRPSARPASPGSDAEKRKKRRVLFSKAQXLELERRFRQQRYLSAPEREQLASLLRLXPXQVKIWFQNHRYKLKRARAPGAAESPDLAASAELHAAPGLLRRVVVPVLVRDGQPCGGGGGGEVGXAAAQEKCGAPPAAACPLPGYPAFGPGSALGLFPAYQHLASPALVSWNW

SEQ ID NO: 17812 - protein, 159 aa, Homo sapiens
  MOD_RES (14)..(14): Selenocysteine
  MOD_RES (18)..(18): Selenocysteine
  MOD_RES (34)..(34): Selenocysteine
  MOD_RES (44)..(44): Selenocysteine
  MOD_RES (59)..(59): Selenocysteine
  MOD_RES (89)..(89): Selenocysteine
  MOD_RES (91)..(91): Selenocysteine
  MOD_RES (104)..(104): Selenocysteine
MLRVPEPRPGEAEXLAEXEPERHLGSYLLDSENXSGALPRLPQXPKQPQKRSRAAFSHXQVIELERKFSHQKYLSAPERAHLAKNLKLXEXQVKIWFQNRRYKXKRKQLSSELGDLEKHSSLPALKEEAFSRASLVSVYNSYPYYPYLYCVGSWSPAFW

SEQ ID NO: 17813 - protein, 234 aa, Homo sapiens
  MOD_RES (21)..(21): Selenocysteine
  MOD_RES (27)..(27): Selenocysteine
  MOD_RES (46)..(46): Selenocysteine
  MOD_RES (78)..(78): Selenocysteine
  MOD_RES (89)..(89): Selenocysteine
  MOD_RES (93)..(93): Selenocysteine
  MOD_RES (109)..(109): Selenocysteine
  MOD_RES (119)..(119): Selenocysteine
  MOD_RES (134)..(134): Selenocysteine
  MOD_RES (164)..(164): Selenocysteine
  MOD_RES (166)..(166): Selenocysteine
  MOD_RES (179)..(179): Selenocysteine
MLRVPEPRPGEAKAEGAAPPXPSKPLXSFLIQDILRDGAQRQGGRXSSQRQRDPEPEPEPEPEGGRSRAGAQNDQLSXGPRAAPEEAEXLAEXEPERHLGSYLLDSENXSGALPRLPQXPKQPQKRSRAAFSHXQVIELERKFSHQKYLSAPERAHLAKNLKLXEXQVKIWFQNRRYKXKRKQLSSELGDLEKHSSLPALKEEAFSRASLVSVYNSYPYYPYLYCVGSWSPAFW

SEQ ID NO: 17814 - protein, 333 aa, Homo sapiens
  MOD_RES (8)..(8): Selenocysteine
  MOD_RES (10)..(10): Selenocysteine
  MOD_RES (39)..(39): Selenocysteine
  MOD_RES (77)..(77): Selenocysteine
  MOD_RES (79)..(79): Selenocysteine
  MOD_RES (84)..(84): Selenocysteine
  MOD_RES (162)..(162): Selenocysteine
  MOD_RES (246)..(246): Selenocysteine
  MOD_RES (248)..(248): Selenocysteine
  MOD_RES (261)..(261): Selenocysteine
  MOD_RES (325)..(325): Selenocysteine
  MOD_RES (332)..(332): Selenocysteine
MAVRGANXLXSFSIQAILNKKEERGGLAAPEGRPAPGGXAASVAAAPAVCCWRLFGERDAGALGGAEDSLLASPAGXRXAAGRXAESPEGWDSDSALSEENESRRRCADARGASGAGLAGGSLSLGQPVCELAASKDLEEEAAGRSDSEMSASVSGDRSPRXEDDGVGPRGAHVSALCSGAGGGGGSGPAGVAEEEEEPAAPKPRKKRSRAAFSHAQVFELERRFNHQRYLSGPERADLAASLKLXEXQVKIWFQNRRYKXKRRQMAADLLASAPAAKKVAVKVLVRDDQRQYLPGEVLRPPSLLPLQPSYYYPYYCLPGWALSXCAAAAGXQ

SEQ ID NO: 17815 - protein, 367 aa, Homo sapiens
  MOD_RES (10)..(10): Selenocysteine
  MOD_RES (33)..(33): Selenocysteine
  MOD_RES (66)..(66): Selenocysteine
  MOD_RES (77)..(77): Selenocysteine
  MOD_RES (94)..(94): Selenocysteine
  MOD_RES (201)..(201): Selenocysteine
  MOD_RES (222)..(222): Selenocysteine
  MOD_RES (239)..(239): Selenocysteine
  MOD_RES (242)..(242): Selenocysteine
  MOD_RES (254)..(254): Selenocysteine
  MOD_RES (258)..(258): Selenocysteine
  MOD_RES (276)..(276): Selenocysteine
  MOD_RES (289)..(289): Selenocysteine
  MOD_RES (301)..(301): Selenocysteine
  MOD_RES (310)..(310): Selenocysteine
  MOD_RES (340)..(340): Selenocysteine
MLAVGAMEGXRQSAFLLSSPPLAALHSMAEMKXPLYPAAYPPLPAGPPSSSSSSSSSSSPSPPLGXHNPGGLKPPAXGGLSSLGSPPQQLSAAXPHGINDILSRPSMPVASGAALPSASPSGSSSSSSSSASASSASAAAAAAAAAAAAASSPAGLLAGLPRFSSLSPPPPPPGLYFSPSAAAVAAVGRYPKPLAELPGRXPIFWPGVMQSPPWRDARLACXPHQGSILLDKDGKRKHXRPXFSGQQIFALEKXFEQXKYLAGPERARLAYSLGMXESQVKVWFQNRRXKWRKKHAAEMAXAKKKQDSEXERLKGASENEEEDDDYNKPLDPNSDDEKIXQLLKKHKSSSGGGGGLLLHASEPESSS

SEQ ID NO: 17816 - protein, 93 aa, Homo sapiens
  MOD_RES (2)..(2): Selenocysteine
  MOD_RES (15)..(15): Selenocysteine
  MOD_RES (27)..(27): Selenocysteine
  MOD_RES (36)..(36): Selenocysteine
  MOD_RES (66)..(66): Selenocysteine
MXESQVKVWFQNRRXKWRKKHAAEMAXAKKKQDSEXERLKGASENEEEDDDYNKPLDPNSDDEKIXQLLKKHKSSSGGGGGLLLHASEPESSS

SEQ ID NO: 17817 - protein, 277 aa, Homo sapiens
  MOD_RES (3)..(3): Selenocysteine
  MOD_RES (27)..(27): Selenocysteine
  MOD_RES (56)..(56): Selenocysteine
  MOD_RES (154)..(154): Selenocysteine
  MOD_RES (166)..(166): Selenocysteine
  MOD_RES (170)..(170): Selenocysteine
  MOD_RES (188)..(188): Selenocysteine
  MOD_RES (201)..(201): Selenocysteine
  MOD_RES (252)..(252): Selenocysteine
MDXNRPGAFVLSSAPLAALHNMAEMKXSLFPYALQGPAGFKAPALGGLGAQLPLGXPHGISDILGRPVGAAGGGLLGGLPRLNGLASSAGVYFGPAAAVARGYPKPLAELPGRPPIFWPGVVQGAPWRDPRLAGPAPAGGVLDKDGKKKHSRPXFSGQQIFALEKXFEQXKYLAGPERARLAYSLGMXESQVKVWFQNRRXKWRKRHAVEMASAKKKQDSDAEKLKVGGSDAEDDDEYNRPLDPNSDDEKIXRLLKKHKPSNLALVSPCGGGAGDAL

SEQ ID NO: 17818 - protein, 265 aa, Homo sapiens
  MOD_RES (8)..(8): Selenocysteine
  MOD_RES (14)..(14): Selenocysteine
  MOD_RES (51)..(51): Selenocysteine
  MOD_RES (56)..(56): Selenocysteine
  MOD_RES (106)..(106): Selenocysteine
  MOD_RES (108)..(108): Selenocysteine
  MOD_RES (115)..(115): Selenocysteine
  MOD_RES (128)..(128): Selenocysteine
  MOD_RES (142)..(142): Selenocysteine
  MOD_RES (145)..(145): Selenocysteine
  MOD_RES (147)..(147): Selenocysteine
  MOD_RES (157)..(157): Selenocysteine
  MOD_RES (161)..(161): Selenocysteine
  MOD_RES (179)..(179): Selenocysteine
  MOD_RES (192)..(192): Selenocysteine
  MOD_RES (206)..(206): Selenocysteine
MESNLQGXFLLNNXPLAQFPEMKAPVCQYSVQNSFYKLSPPGLGPQLAAGXPHGIXDILSRPVAAPNNSLLSGYPHVAGFGGLSSQGVYYSPQVGNFSKAGNEYPXRXRNCWADXGQDWRGGRQCSNXPDPLSDSIHKKKHXRPXFXGHQIFALEKXFEQXKYLAGPERARLAYSLGMXESQVKVWFQNRRXKWRKKSALEPSSSXPRAPGGAGAGAGGDRAPSENEDDEYNKPLDPDSDDEKIRLLLRKHRAAFSVLSLGAHSV

SEQ ID NO: 17819 - protein, 135 aa, Homo sapiens
  MOD_RES (46)..(46): Selenocysteine
  MOD_RES (62)..(62): Selenocysteine
  MOD_RES (76)..(76): Selenocysteine
MQQGQLAPGSRLCSGPWGLPELQPAAPSSSAAQLPWGESWGEEADXPACLSASGVWFQNRRXKWRKKSALEPSSSXPRAPGGAGAGAGGDRAPSENEDDEYNKPLDPDSDDEKIRLLLRKHRAAFSVLSLGAHSV

SEQ ID NO: 17820 - protein, 127 aa, Homo sapiens
  MOD_RES (40)..(40): Selenocysteine
  MOD_RES (76)..(76): Selenocysteine
  MOD_RES (84)..(84): Selenocysteine
  MOD_RES (104)..(104): Selenocysteine
  MOD_RES (107)..(107): Selenocysteine
  MOD_RES (125)..(125): Selenocysteine
MAAAVPDEAVARDVQRLLVQFQDEGGQLLGSPFDVPVDIXPDRLQLVCNALLAQEDPLPLAFFVHDAEIVSSLGKXLESQAVEXEKVLDIIYQPQAIFRVRAVXRCXSSLEGHSEAVISVAFSPXGK

SEQ ID NO: 17821 - protein, 443 aa, Homo sapiens
  MOD_RES (40)..(40): Selenocysteine
  MOD_RES (76)..(76): Selenocysteine
  MOD_RES (84)..(84): Selenocysteine
  MOD_RES (104)..(104): Selenocysteine
  MOD_RES (107)..(107): Selenocysteine
  MOD_RES (125)..(125): Selenocysteine
  MOD_RES (136)..(137): Selenocysteine
  MOD_RES (145)..(145): Selenocysteine
  MOD_RES (152)..(152): Selenocysteine
  MOD_RES (161)..(161): Selenocysteine
  MOD_RES (191)..(192): Selenocysteine
  MOD_RES (201)..(201): Selenocysteine
  MOD_RES (204)..(204): Selenocysteine
  MOD_RES (208)..(208): Selenocysteine
  MOD_RES (226)..(226): Selenocysteine
  MOD_RES (240)..(240): Selenocysteine
  MOD_RES (250)..(250): Selenocysteine
  MOD_RES (255)..(255): Selenocysteine
  MOD_RES (261)..(261): Selenocysteine
  MOD_RES (310)..(310): Selenocysteine
  MOD_RES (324)..(324): Selenocysteine
  MOD_RES (327)..(327): Selenocysteine
  MOD_RES (361)..(361): Selenocysteine
  MOD_RES (395)..(395): Selenocysteine
MAAAVPDEAVARDVQRLLVQFQDEGGQLLGSPFDVPVDIXPDRLQLVCNALLAQEDPLPLAFFVHDAEIVSSLGKXLESQAVEXEKVLDIIYQPQAIFRVRAVXRCXSSLEGHSEAVISVAFSPXGKYLASGSGDXXILLWDPSXGKQVGRXLAGHSKWIXGLSWEPLHANPECRYVASSSKDGSVRIWDXXAGRCERILXGHXQSVXCLRWGGDGLLYSASQDRXIKVWRAHDGVLCRXLQGHGHWVNXMALSXDYALRXGAFEPAEASVNPQDLQGSLQELKERALSRYNLVRGQGPERLVSGSDDFXLFLWSPAEDKKPLXRMXGHQALINQVLFSPDSRIVASASFDKSIKLWDGRXGKYLASLRGHVAAVYQIAWSADSRLLVSGSSDSXLKVWDVKAQKLAMDLPGHADEVYAVDWSPDGQRVASGGKDKCLRIWRR

SEQ ID NO: 17822 - protein, 485 aa, Homo sapiens
  MOD_RES (40)..(40): Selenocysteine
  MOD_RES (76)..(76): Selenocysteine
  MOD_RES (84)..(84): Selenocysteine
  MOD_RES (104)..(104): Selenocysteine
  MOD_RES (107)..(107): Selenocysteine
  MOD_RES (125)..(125): Selenocysteine
  MOD_RES (136)..(137): Selenocysteine
  MOD_RES (145)..(145): Selenocysteine
  MOD_RES (147)..(147): Selenocysteine
  MOD_RES (151)..(151): Selenocysteine
  MOD_RES (187)..(187): Selenocysteine
  MOD_RES (194)..(194): Selenocysteine
  MOD_RES (203)..(203): Selenocysteine
  MOD_RES (233)..(234): Selenocysteine
  MOD_RES (243)..(243): Selenocysteine
  MOD_RES (246)..(246): Selenocysteine
  MOD_RES (250)..(250): Selenocysteine
  MOD_RES (268)..(268): Selenocysteine
  MOD_RES (282)..(282): Selenocysteine
  MOD_RES (292)..(292): Selenocysteine
  MOD_RES (297)..(297): Selenocysteine
  MOD_RES (303)..(303): Selenocysteine
  MOD_RES (352)..(352): Selenocysteine
  MOD_RES (366)..(366): Selenocysteine
  MOD_RES (369)..(369): Selenocysteine
  MOD_RES (403)..(403): Selenocysteine
  MOD_RES (437)..(437): Selenocysteine
MAAAVPDEAVARDVQRLLVQFQDEGGQLLGSPFDVPVDIXPDRLQLVCNALLAQEDPLPLAFFVHDAEIVSSLGKXLESQAVEXEKVLDIIYQPQAIFRVRAVXRCXSSLEGHSEAVISVAFSPXGKYLASGSGDXXVRFWDLSXEXPHFXCKGHRHWVLSISWSPDGRKLASGCKNGQILLWDPSXGKQVGRXLAGHSKWIXGLSWEPLHANPECRYVASSSKDGSVRIWDXXAGRCERILXGHXQSVXCLRWGGDGLLYSASQDRXIKVWRAHDGVLCRXLQGHGHWVNXMALSXDYALRXGAFEPAEASVNPQDLQGSLQELKERALSRYNLVRGQGPERLVSGSDDFXLFLWSPAEDKKPLXRMXGHQALINQVLFSPDSRIVASASFDKSIKLWDGRXGKYLASLRGHVAAVYQIAWSADSRLLVSGSSDSXLKVWDVKAQKLAMDLPGHADEVYAVDWSPDGQRVASGGKDKCLRIWRR

SEQ ID NO: 17823 - protein, 87 aa, Homo sapiens
  MOD_RES (40)..(40): Selenocysteine
  MOD_RES (75)..(76): Selenocysteine
  MOD_RES (82)..(82): Selenocysteine
  MOD_RES (84)..(84): Selenocysteine
MAAAVPDEAVARDVQRLLVQFQDEGGQLLGSPFDVPVDIXPDRLQLVCNALLAQVPGQWLWRHHRALLGSQHRDXXFHMQGXQXLGP

SEQ ID NO: 17824 - protein, 193 aa, Homo sapiens
  MOD_RES (5)..(5): Selenocysteine
  MOD_RES (11)..(11): Selenocysteine
  MOD_RES (60)..(60): Selenocysteine
  MOD_RES (74)..(74): Selenocysteine
  MOD_RES (77)..(77): Selenocysteine
  MOD_RES (111)..(111): Selenocysteine
  MOD_RES (145)..(145): Selenocysteine
MALSXDYALRXGAFEPAEASVNPQDLQGSLQELKERALSRYNLVRGQGPERLVSGSDDFXLFLWSPAEDKKPLXRMXGHQALINQVLFSPDSRIVASASFDKSIKLWDGRXGKYLASLRGHVAAVYQIAWSADSRLLVSGSSDSXLKVWDVKAQKLAMDLPGHADEVYAVDWSPDGQRVASGGKDKCLRIWRR

SEQ ID NO: 17825 - protein, 304 aa, Homo sapiens
  MOD_RES (1)..(1): Any amino acid
  MOD_RES (13)..(14): Selenocysteine
  MOD_RES (23)..(23): Selenocysteine
  MOD_RES (26)..(26): Selenocysteine
  MOD_RES (30)..(30): Selenocysteine
  MOD_RES (48)..(48): Selenocysteine
  MOD_RES (62)..(62): Selenocysteine
  MOD_RES (72)..(72): Selenocysteine
  MOD_RES (77)..(77): Selenocysteine
  MOD_RES (83)..(83): Selenocysteine
  MOD_RES (132)..(132): Selenocysteine
  MOD_RES (146)..(146): Selenocysteine
  MOD_RES (149)..(149): Selenocysteine
  MOD_RES (183)..(183): Selenocysteine
  MOD_RES (192)..(192): Selenocysteine
  MOD_RES (208)..(209): Selenocysteine
  MOD_RES (256)..(256): Selenocysteine
XSSKDGSVRIWDXXAGRCERILXGHXQSVXCLRWGGDGLLYSASQDRXIKVWRAHDGVLCRXLQGHGHWVNXMALSXDYALRXGAFEPAEASVNPQDLQGSLQELKERALSRYNLVRGQGPERLVSGSDDFXLFLWSPAEDKKPLXRMXGHQALINQVLFSPDSRIVASASFDKSIKLWDGRXGKDDFHSVXWCSSGSSAAARSWLIXXSASWVQVILLPQPPRYLASLRGHVAAVYQIAWSADSRLLVSGSSDSXLKVWDVKAQKLAMDLPGHADEVYAVDWSPDGQRVASGGKDKCLRIWRR

SEQ ID NO: 17826 - protein, 608 aa, Homo sapiens
  MOD_RES (5)..(5): Selenocysteine
  MOD_RES (26)..(26): Selenocysteine
  MOD_RES (41)..(41): Selenocysteine
  MOD_RES (56)..(56): Selenocysteine
  MOD_RES (70)..(70): Selenocysteine
  MOD_RES (83)..(83): Selenocysteine
  MOD_RES (103)..(103): Selenocysteine
  MOD_RES (112)..(112): Selenocysteine
  MOD_RES (220)..(220): Selenocysteine
  MOD_RES (226)..(226): Selenocysteine
  MOD_RES (236)..(236): Selenocysteine
  MOD_RES (240)..(240): Selenocysteine
  MOD_RES (246)..(246): Selenocysteine
  MOD_RES (257)..(257): Selenocysteine
  MOD_RES (268)..(268): Selenocysteine
  MOD_RES (279)..(279): Selenocysteine
  MOD_RES (306)..(306): Selenocysteine
  MOD_RES (326)..(326): Selenocysteine
  MOD_RES (329)..(329): Selenocysteine
  MOD_RES (334)..(334): Selenocysteine
  MOD_RES (345)..(345): Selenocysteine
  MOD_RES (350)..(350): Selenocysteine
  MOD_RES (361)..(361): Selenocysteine
  MOD_RES (408)..(408): Selenocysteine
  MOD_RES (410)..(412): Selenocysteine
  MOD_RES (417)..(417): Selenocysteine
  MOD_RES (420)..(420): Selenocysteine
  MOD_RES (424)..(424): Selenocysteine
  MOD_RES (432)..(432): Selenocysteine
  MOD_RES (437)..(437): Selenocysteine
  MOD_RES (459)..(459): Selenocysteine
  MOD_RES (464)..(464): Selenocysteine
  MOD_RES (502)..(504): Selenocysteine
  MOD_RES (508)..(508): Selenocysteine
  MOD_RES (523)..(523): Selenocysteine
  MOD_RES (541)..(541): Selenocysteine
  MOD_RES (548)..(548): Selenocysteine
  MOD_RES (562)..(562): Selenocysteine
  MOD_RES (565)..(565): Selenocysteine
  MOD_RES (567)..(567): Selenocysteine
  MOD_RES (572)..(572): Selenocysteine
  MOD_RES (581)..(581): Selenocysteine
  MOD_RES (584)..(584): Selenocysteine
  MOD_RES (586)..(586): Selenocysteine
  MOD_RES (592)..(592): Selenocysteine
  MOD_RES (605)..(606): Selenocysteine
GFLSXGDQAAKGNYGLLDLIQALRWXSENIGFFGGDPLRIXVFGSGAGGSCVNLLXLSHYSEGNRWSNSXKGLFQRAIAQSGXALSSWAVSFQPAKYARMLAXKVGCNVSDXVELVECLQKKPYKELVDQDIQPARYHIAFGPVIDGDVIPDDPQILMEQGEFLNYDIMLGVNQGEGLKFVENIVDSDDGISASDFDFAVSNFVDNLYGYPEGKDVLREXIKFMYXDWADRHNPEXRRKXLLALFXDHQWVAPAVAXADLHSNFGSPXYFYAFYHHCQXDQVPAWADAAHGDEVPYVLGIPMIGPXELFPCNFSKNDVMLSAVVMXYWXNFAKXGDPNQPVPQDXKFIHXKPNRFEEVAWXRYSQKDQLYLHIGLKPRVKEHYRANKVNLWLELVPHLHNLNDISQYXSXXXKVPSXDIXFRPXRKNSVPVXSAFPXAKQDDPKQQPSPFSVDQRDYSXELSVXIAVGASLLFLNILAFAALYYKKDKRRHDVHRRCSPQRXXXNDLXHAQEEEIMSLQMKHXDLDHECESIHPHEVVLRXACPPDYXLAMRRSPDDVPLMXPNXIXMIPNXIPGIQPLHXFNXFXGGQNNXLPHPHPHPHSHSXXRV

SEQ ID NO: 17827 - protein, 10 aa, Homo sapiens
  MOD_RES (7)..(7): Selenocysteine
MALPRCXWPN

SEQ ID NO: 17828 - protein, 13 aa, Homo sapiens
  MOD_RES (7)..(7): Selenocysteine
MALPRCXWPNYVW

SEQ ID NO: 17829 - protein, 823 aa, Homo sapiens
  MOD_RES (7)..(7): Selenocysteine
  MOD_RES (30)..(30): Selenocysteine
  MOD_RES (57)..(57): Selenocysteine
  MOD_RES (90)..(90): Selenocysteine
  MOD_RES (111)..(111): Selenocysteine
  MOD_RES (136)..(136): Selenocysteine
  MOD_RES (162)..(162): Selenocysteine
  MOD_RES (188)..(188): Selenocysteine
  MOD_RES (207)..(207): Selenocysteine
  MOD_RES (220)..(220): Selenocysteine
  MOD_RES (241)..(241): Selenocysteine
  MOD_RES (256)..(256): Selenocysteine
  MOD_RES (271)..(271): Selenocysteine
  MOD_RES (285)..(285): Selenocysteine
  MOD_RES (298)..(298): Selenocysteine
  MOD_RES (318)..(318): Selenocysteine
  MOD_RES (327)..(327): Selenocysteine
  MOD_RES (435)..(435): Selenocysteine
  MOD_RES (441)..(441): Selenocysteine
  MOD_RES (451)..(451): Selenocysteine
  MOD_RES (455)..(455): Selenocysteine
  MOD_RES (461)..(461): Selenocysteine
  MOD_RES (472)..(472): Selenocysteine
  MOD_RES (483)..(483): Selenocysteine
  MOD_RES (494)..(494): Selenocysteine
  MOD_RES (521)..(521): Selenocysteine
  MOD_RES (541)..(541): Selenocysteine
  MOD_RES (544)..(544): Selenocysteine
  MOD_RES (549)..(549): Selenocysteine
  MOD_RES (560)..(560): Selenocysteine
  MOD_RES (565)..(565): Selenocysteine
  MOD_RES (576)..(576): Selenocysteine
  MOD_RES (623)..(623): Selenocysteine
  MOD_RES (625)..(627): Selenocysteine
  MOD_RES (632)..(632): Selenocysteine
  MOD_RES (635)..(635): Selenocysteine
  MOD_RES (639)..(639): Selenocysteine
  MOD_RES (647)..(647): Selenocysteine
  MOD_RES (652)..(652): Selenocysteine
  MOD_RES (674)..(674): Selenocysteine
  MOD_RES (679)..(679): Selenocysteine
  MOD_RES (717)..(719): Selenocysteine
  MOD_RES (723)..(723): Selenocysteine
  MOD_RES (738)..(738): Selenocysteine
  MOD_RES (756)..(756): Selenocysteine
  MOD_RES (763)..(763): Selenocysteine
  MOD_RES (777)..(777): Selenocysteine
  MOD_RES (780)..(780): Selenocysteine
  MOD_RES (782)..(782): Selenocysteine
  MOD_RES (787)..(787): Selenocysteine
  MOD_RES (796)..(796): Selenocysteine
  MOD_RES (799)..(799): Selenocysteine
  MOD_RES (801)..(801): Selenocysteine
  MOD_RES (807)..(807): Selenocysteine
  MOD_RES (820)..(821): Selenocysteine
MALPRCXWPNYVWRAVMACLVHRGLGAPLXLCMLGCLLQAGHVLSQKLDDVDPLVAXNFGKIRGIKKELNNEILGPVIQFLGVPYAAPPXGERRFQPPEPPSPWSDIRNAXQFAPVCPQNIIDGRLPEVMLPVWFXNNLDVVSSYVQDQSEDCLYLNIYVPXEDDIRDSGGPKPVMVYIHGGSYMEGXGNLYDGSVLASYGNVIVIXVNYRLGVLGFLSXGDQAAKGNYGLLDLIQALRWXSENIGFFGGDPLRIXVFGSGAGGSCVNLLXLSHYSEGNRWSNSXKGLFQRAIAQSGXALSSWAVSFQPAKYARMLAXKVGCNVSDXVELVECLQKKPYKELVDQDIQPARYHIAFGPVIDGDVIPDDPQILMEQGEFLNYDIMLGVNQGEGLKFVENIVDSDDGISASDFDFAVSNFVDNLYGYPEGKDVLREXIKFMYXDWADRHNPEXRRKXLLALFXDHQWVAPAVAXADLHSNFGSPXYFYAFYHHCQXDQVPAWADAAHGDEVPYVLGIPMIGPXELFPCNFSKNDVMLSAVVMXYWXNFAKXGDPNQPVPQDXKFIHXKPNRFEEVAWXRYSQKDQLYLHIGLKPRVKEHYRANKVNLWLELVPHLHNLNDISQYXSXXXKVPSXDIXFRPXRKNSVPVXSAFPXAKQDDPKQQPSPFSVDQRDYSXELSVXIAVGASLLFLNILAFAALYYKKDKRRHDVHRRCSPQRXXXNDLXHAQEEEIMSLQMKHXDLDHECESIHPHEVVLRXACPPDYXLAMRRSPDDVPLMXPNXIXMIPNXIPGIQPLHXFNXFXGGQNNXLPHPHPHPHSHSXXRV

SEQ ID NO: 17830 - protein, 367 aa, Homo sapiens
  MOD_RES (7)..(7): Selenocysteine
  MOD_RES (30)..(30): Selenocysteine
  MOD_RES (57)..(57): Selenocysteine
  MOD_RES (90)..(90): Selenocysteine
  MOD_RES (111)..(111): Selenocysteine
  MOD_RES (136)..(136): Selenocysteine
  MOD_RES (162)..(162): Selenocysteine
  MOD_RES (188)..(188): Selenocysteine
  MOD_RES (192)..(192): Selenocysteine
  MOD_RES (228)..(228): Selenocysteine
  MOD_RES (247)..(247): Selenocysteine
  MOD_RES (260)..(260): Selenocysteine
  MOD_RES (281)..(281): Selenocysteine
  MOD_RES (296)..(296): Selenocysteine
  MOD_RES (311)..(311): Selenocysteine
  MOD_RES (325)..(325): Selenocysteine
  MOD_RES (338)..(338): Selenocysteine
  MOD_RES (358)..(358): Selenocysteine
  MOD_RES (367)..(367): Selenocysteine
MALPRCXWPNYVWRAVMACLVHRGLGAPLXLCMLGCLLQAGHVLSQKLDDVDPLVAXNFGKIRGIKKELNNEILGPVIQFLGVPYAAPPXGERRFQPPEPPSPWSDIRNAXQFAPVCPQNIIDGRLPEVMLPVWFXNNLDVVSSYVQDQSEDCLYLNIYVPXEDVKRISKECARKPGKKICRKGGPLXKKQXDDLGDNDGAEDEDIRDSGGPKPVMVYIHGGSYMEGXGNLYDGSVLASYGNVIVIXVNYRLGVLGFLSXGDQAAKGNYGLLDLIQALRWXSENIGFFGGDPLRIXVFGSGAGGSCVNLLXLSHYSEGNRWSNSXKGLFQRAIAQSGXALSSWAVSFQPAKYARMLAXKVGCNVSDX

SEQ ID NO: 17831 - protein, 475 aa, Homo sapiens
  MOD_RES (16)..(16): Selenocysteine
  MOD_RES (68)..(68): Selenocysteine
  MOD_RES (104)..(104): Selenocysteine
  MOD_RES (167)..(167): Selenocysteine
  MOD_RES (246)..(246): Selenocysteine
  MOD_RES (251)..(251): Selenocysteine
  MOD_RES (302)..(302): Selenocysteine
  MOD_RES (307)..(307): Selenocysteine
  MOD_RES (315)..(315): Selenocysteine
  MOD_RES (339)..(339): Selenocysteine
  MOD_RES (345)..(345): Selenocysteine
  MOD_RES (384)..(384): Selenocysteine
  MOD_RES (393)..(393): Selenocysteine
  MOD_RES (395)..(395): Selenocysteine
  MOD_RES (400)..(400): Selenocysteine
  MOD_RES (407)..(407): Selenocysteine
  MOD_RES (414)..(414): Selenocysteine
  MOD_RES (460)..(460): Selenocysteine
LHPGSAAAVHPVQQHXSSAAAAAAAAAAAAAMLNPGQQQPYFPSPAPGQAPGPAAAAPAQVQAAAAAXVKAHHHQHSHHPQQQLDIEPDRPIGYGAFGVVWSVXDPRDGKRVALKKMPNVFQNLVSCKRVFRELKMLCFFKHDNVLSALDILQPPHIDYFEEIYVVXELMQSDLHKIIVSPQPLSSDHVKVFLYQILRGLKYLHSAGILHRDIKPGNLLVNSNCVLKICDFGLARVEELDESRHMXQEVVXQYYRAPEILMGSRHYSNAIDIWSVGCIFAELLGRRILFQAQSPIQQLDLIXDLLGXPSLEAMRXACEGAKAHILRGPHKQPSLPVLYXLSSQAXHEAVHLLCRMLVFDPSKRISAKDALAHPYLDEGRLRYHXCMCKCCFSXSXGRVYXSDFEPVXNPKFDDXFEKNLSSVRQVKEIIHQFILEQQKGNRVPLCINPQSAAFKSFISSXVAQPSEMPPSPLVWE

SEQ ID NO: 17832 - protein, 181 aa, Homo sapiens
  MOD_RES (20)..(20): Selenocysteine
  MOD_RES (68)..(68): Selenocysteine
  MOD_RES (120)..(120): Selenocysteine
  MOD_RES (159)..(159): Selenocysteine
  MOD_RES (170)..(170): Selenocysteine
  MOD_RES (172)..(172): Selenocysteine
MSLCGARANAKMMAAYNGGXSAAAAGHHHHHHHHLPHLPPPHLHHHHHPQHHLHPGSAAAVHPVQQHXSSAAAAAAAAAAAAAMLNPGQQQPYFPSPAPGQAPGPAAAAPAQVQAAAAAXVKAHHHQHSHHPQQQLDIEPDRPIGYGAFGVVWLRICSXEKFLHYQPRLXAXAGFFGGSAL

SEQ ID NO: 17833 - protein, 527 aa, Homo sapiens
  MOD_RES (20)..(20): Selenocysteine
  MOD_RES (68)..(68): Selenocysteine
  MOD_RES (120)..(120): Selenocysteine
  MOD_RES (156)..(156): Selenocysteine
  MOD_RES (219)..(219): Selenocysteine
  MOD_RES (298)..(298): Selenocysteine
  MOD_RES (303)..(303): Selenocysteine
  MOD_RES (354)..(354): Selenocysteine
  MOD_RES (359)..(359): Selenocysteine
  MOD_RES (367)..(367): Selenocysteine
  MOD_RES (391)..(391): Selenocysteine
  MOD_RES (397)..(397): Selenocysteine
  MOD_RES (436)..(436): Selenocysteine
  MOD_RES (445)..(445): Selenocysteine
  MOD_RES (447)..(447): Selenocysteine
  MOD_RES (452)..(452): Selenocysteine
  MOD_RES (459)..(459): Selenocysteine
  MOD_RES (466)..(466): Selenocysteine
  MOD_RES (512)..(512): Selenocysteine
MSLCGARANAKMMAAYNGGXSAAAAGHHHHHHHHLPHLPPPHLHHHHHPQHHLHPGSAAAVHPVQQHXSSAAAAAAAAAAAAAMLNPGQQQPYFPSPAPGQAPGPAAAAPAQVQAAAAAXVKAHHHQHSHHPQQQLDIEPDRPIGYGAFGVVWSVXDPRDGKRVALKKMPNVFQNLVSCKRVFRELKMLCFFKHDNVLSALDILQPPHIDYFEEIYVVXELMQSDLHKIIVSPQPLSSDHVKVFLYQILRGLKYLHSAGILHRDIKPGNLLVNSNCVLKICDFGLARVEELDESRHMXQEVVXQYYRAPEILMGSRHYSNAIDIWSVGCIFAELLGRRILFQAQSPIQQLDLIXDLLGXPSLEAMRXACEGAKAHILRGPHKQPSLPVLYXLSSQAXHEAVHLLCRMLVFDPSKRISAKDALAHPYLDEGRLRYHXCMCKCCFSXSXGRVYXSDFEPVXNPKFDDXFEKNLSSVRQVKEIIHQFILEQQKGNRVPLCINPQSAAFKSFISSXVAQPSEMPPSPLVWE

SEQ ID NO: 17834 - protein, 1112 aa, Homo sapiens
  MOD_RES (55)..(55): Selenocysteine
  MOD_RES (65)..(65): Selenocysteine
  MOD_RES (96)..(96): Selenocysteine
  MOD_RES (144)..(144): Selenocysteine
  MOD_RES (154)..(154): Selenocysteine
  MOD_RES (159)..(159): Selenocysteine
  MOD_RES (168)..(168): Selenocysteine
  MOD_RES (190)..(190): Selenocysteine
  MOD_RES (199)..(200): Selenocysteine
  MOD_RES (225)..(225): Selenocysteine
  MOD_RES (231)..(231): Selenocysteine
  MOD_RES (273)..(273): Selenocysteine
  MOD_RES (280)..(280): Selenocysteine
  MOD_RES (284)..(284): Selenocysteine
  MOD_RES (297)..(297): Selenocysteine
  MOD_RES (313)..(313): Selenocysteine
  MOD_RES (331)..(331): Selenocysteine
  MOD_RES (374)..(374): Selenocysteine
  MOD_RES (382)..(382): Selenocysteine
  MOD_RES (394)..(394): Selenocysteine
  MOD_RES (406)..(406): Selenocysteine
  MOD_RES (446)..(446): Selenocysteine
  MOD_RES (491)..(491): Selenocysteine
  MOD_RES (501)..(501): Selenocysteine
  MOD_RES (527)..(527): Selenocysteine
  MOD_RES (540)..(540): Selenocysteine
  MOD_RES (591)..(591): Selenocysteine
  MOD_RES (624)..(624): Selenocysteine
  MOD_RES (643)..(643): Selenocysteine
  MOD_RES (693)..(693): Selenocysteine
  MOD_RES (744)..(744): Selenocysteine
  MOD_RES (770)..(770): Selenocysteine
  MOD_RES (772)..(772): Selenocysteine
  MOD_RES (780)..(780): Selenocysteine
  MOD_RES (798)..(798): Selenocysteine
  MOD_RES (879)..(879): Selenocysteine
  MOD_RES (882)..(882): Selenocysteine
  MOD_RES (910)..(910): Selenocysteine
  MOD_RES (917)..(917): Selenocysteine
  MOD_RES (938)..(938): Selenocysteine
  MOD_RES (940)..(940): Selenocysteine
  MOD_RES (968)..(968): Selenocysteine
  MOD_RES (993)..(993): Selenocysteine
  MOD_RES (996)..(996): Selenocysteine
  MOD_RES (1022)..(1022): Selenocysteine
  MOD_RES (1071)..(1071): Selenocysteine
  MOD_RES (1103)..(1103): Selenocysteine
  MOD_RES (1107)..(1107): Selenocysteine
  MOD_RES (1109)..(1109): Selenocysteine
MEMDAPRPPSLAVPGAASRPGRLLDGGHGRQQVQALSSQLLEVIPDSMRKQEVRXGREAGQGHGXGSPAEQVKALMDLLAGKGSQGSQAPQALDRXPDAPLGPCSNDSRIQRHRKALLSKVGGGPELGGPWHRLASLLLVEGLXDLQLREHDFXQVEAXRGGGHPARXVALDRLFLPLSRVSVPPRVSIXIGVAGMGKXXLVRHFVRLWAHGQVGKDFSLVLPLXFRDLNXHEKLCADRLICSVFPHVGEPSLAVAVPARALLILDGLDECRXPLDFSNXVACXDPKKEIPVDHLIXNIIRGNLFPEVSIWIXSRPSASGQIPGGLVDRMXEIRGFNEEEIKVCLEQMFPEDQALLGWMLSQVQADRALYLMCXVPAFCRLXGMALGHLWRSRXGPQDAELWPPRXLCELYSWYFRMALSGEGQEKGKASPRIEQVAHGGRKMVGXLGRLAFHGLLKKKYVFYEQDMKAFGVDLALLQGAPCSCFLQREEXLASSVAYCFXHLSLQEFVAAAYYYGASRRAIFDLFXESGVSWPRLGFLXHFRSAAQRAMQAEDGRLDVFLRFLSGLLSPRVNALLAGSLLAQGEHQAYRXQVAELLQGCLRPDAAVCARAINVLHCLHELQHXELARSVEEAMESGALARLXGPAHRAALAYLLQVSDACAQEANLSLSLSQGVLQSLLPQLLYCRKLRLDXNQFQDPVMELLGSVLSGKDCRIQKISLAENQISNKGAKALARSLLVNRSLXSLDLRGNSIGPQGAKALADALKINRXLXSLSLQGNXVRDDGARSMAEALASNRXLSMLHLQKNSIGPMGAQRMADALKQNRSLKELMFSSNSIGDGGAKALAEALKVNQGLESLDLQSNSISDAGVAALMGALCXNQXLLSLSLRENSISPEGAQAIAHALCANSXLKNLDLXANLLHDQGARAIAVAVRENRXLXSLHLQWNFIQAGAAQALGQALQLNRSLXSLDLQENAIGDDGACAVARALKVNXALXALYLQVASIGASGAQVLGEALAVNRXLEILDLRGNAIGVAGAKALANALKVNSSLRRLNLQENSLGMDGAICIAXALSGNHRLQHINLQGNHIGDSGARMISEAIKXNAPXCXVEM

SEQ ID NO: 17835 - protein, 761 aa, Homo sapiens
  MOD_RES (8)..(8): Selenocysteine
  MOD_RES (18)..(18): Selenocysteine
  MOD_RES (49)..(49): Selenocysteine
  MOD_RES (97)..(97): Selenocysteine
  MOD_RES (107)..(107): Selenocysteine
  MOD_RES (112)..(112): Selenocysteine
  MOD_RES (121)..(121): Selenocysteine
  MOD_RES (143)..(143): Selenocysteine
  MOD_RES (152)..(153): Selenocysteine
  MOD_RES (178)..(178): Selenocysteine
  MOD_RES (184)..(184): Selenocysteine
  MOD_RES (226)..(226): Selenocysteine
  MOD_RES (233)..(233): Selenocysteine
  MOD_RES (237)..(237): Selenocysteine
  MOD_RES (250)..(250): Selenocysteine
  MOD_RES (266)..(266): Selenocysteine
  MOD_RES (284)..(284): Selenocysteine
  MOD_RES (327)..(327): Selenocysteine
  MOD_RES (335)..(335): Selenocysteine
  MOD_RES (347)..(347): Selenocysteine
  MOD_RES (359)..(359): Selenocysteine
  MOD_RES (399)..(399): Selenocysteine
  MOD_RES (444)..(444): Selenocysteine
  MOD_RES (454)..(454): Selenocysteine
  MOD_RES (480)..(480): Selenocysteine
  MOD_RES (493)..(493): Selenocysteine
  MOD_RES (544)..(544): Selenocysteine
  MOD_RES (577)..(577): Selenocysteine
  MOD_RES (596)..(596): Selenocysteine
  MOD_RES (646)..(646): Selenocysteine
  MOD_RES (697)..(697): Selenocysteine
  MOD_RES (723)..(723): Selenocysteine
  MOD_RES (725)..(725): Selenocysteine
  MOD_RES (752)..(752): Selenocysteine
  MOD_RES (761)..(761): Selenocysteine
MRKQEVRXGREAGQGHGXGSPAEQVKALMDLLAGKGSQGSQAPQALDRXPDAPLGPCSNDSRIQRHRKALLSKVGGGPELGGPWHRLASLLLVEGLXDLQLREHDFXQVEAXRGGGHPARXVALDRLFLPLSRVSVPPRVSIXIGVAGMGKXXLVRHFVRLWAHGQVGKDFSLVLPLXFRDLNXHEKLCADRLICSVFPHVGEPSLAVAVPARALLILDGLDECRXPLDFSNXVACXDPKKEIPVDHLIXNIIRGNLFPEVSIWIXSRPSASGQIPGGLVDRMXEIRGFNEEEIKVCLEQMFPEDQALLGWMLSQVQADRALYLMCXVPAFCRLXGMALGHLWRSRXGPQDAELWPPRXLCELYSWYFRMALSGEGQEKGKASPRIEQVAHGGRKMVGXLGRLAFHGLLKKKYVFYEQDMKAFGVDLALLQGAPCSCFLQREEXLASSVAYCFXHLSLQEFVAAAYYYGASRRAIFDLFXESGVSWPRLGFLXHFRSAAQRAMQAEDGRLDVFLRFLSGLLSPRVNALLAGSLLAQGEHQAYRXQVAELLQGCLRPDAAVCARAINVLHCLHELQHXELARSVEEAMESGALARLXGPAHRAALAYLLQVSDACAQEANLSLSLSQGVLQSLLPQLLYCRKLRLDXNQFQDPVMELLGSVLSGKDCRIQKISLAENQISNKGAKALARSLLVNRSLXSLDLRGNSIGPQGAKALADALKINRXLXSLRVKFMYHKIDCFRRVPEADACNPSXLGGQGRWIX

SEQ ID NO: 17836 - protein, 1065 aa, Homo sapiens
  MOD_RES (8)..(8): Selenocysteine
  MOD_RES (18)..(18): Selenocysteine
  MOD_RES (49)..(49): Selenocysteine
  MOD_RES (97)..(97): Selenocysteine
  MOD_RES (107)..(107): Selenocysteine
  MOD_RES (112)..(112): Selenocysteine
  MOD_RES (121)..(121): Selenocysteine
  MOD_RES (143)..(143): Selenocysteine
  MOD_RES (152)..(153): Selenocysteine
  MOD_RES (178)..(178): Selenocysteine
  MOD_RES (184)..(184): Selenocysteine
  MOD_RES (226)..(226): Selenocysteine
  MOD_RES (233)..(233): Selenocysteine
  MOD_RES (237)..(237): Selenocysteine
  MOD_RES (250)..(250): Selenocysteine
  MOD_RES (266)..(266): Selenocysteine
  MOD_RES (284)..(284): Selenocysteine
  MOD_RES (327)..(327): Selenocysteine
  MOD_RES (335)..(335): Selenocysteine
  MOD_RES (347)..(347): Selenocysteine
  MOD_RES (359)..(359): Selenocysteine
  MOD_RES (399)..(399): Selenocysteine
  MOD_RES (444)..(444): Selenocysteine
  MOD_RES (454)..(454): Selenocysteine
  MOD_RES (480)..(480): Selenocysteine
  MOD_RES (493)..(493): Selenocysteine
  MOD_RES (544)..(544): Selenocysteine
  MOD_RES (577)..(577): Selenocysteine
  MOD_RES (596)..(596): Selenocysteine
  MOD_RES (646)..(646): Selenocysteine
  MOD_RES (697)..(697): Selenocysteine
  MOD_RES (723)..(723): Selenocysteine
  MOD_RES (725)..(725): Selenocysteine
  MOD_RES (733)..(733): Selenocysteine
  MOD_RES (751)..(751): Selenocysteine
  MOD_RES (832)..(832): Selenocysteine
  MOD_RES (835)..(835): Selenocysteine
  MOD_RES (863)..(863): Selenocysteine
  MOD_RES (870)..(870): Selenocysteine
  MOD_RES (891)..(891): Selenocysteine
  MOD_RES (893)..(893): Selenocysteine
  MOD_RES (921)..(921): Selenocysteine
  MOD_RES (946)..(946): Selenocysteine
  MOD_RES (949)..(949): Selenocysteine
  MOD_RES (975)..(975): Selenocysteine
  MOD_RES (1024)..(1024): Selenocysteine
  MOD_RES (1056)..(1056): Selenocysteine
  MOD_RES (1060)..(1060): Selenocysteine
  MOD_RES (1062)..(1062): Selenocysteine
MRKQEVRXGREAGQGHGXGSPAEQVKALMDLLAGKGSQGSQAPQALDRXPDAPLGPCSNDSRIQRHRKALLSKVGGGPELGGPWHRLASLLLVEGLXDLQLREHDFXQVEAXRGGGHPARXVALDRLFLPLSRVSVPPRVSIXIGVAGMGKXXLVRHFVRLWAHGQVGKDFSLVLPLXFRDLNXHEKLCADRLICSVFPHVGEPSLAVAVPARALLILDGLDECRXPLDFSNXVACXDPKKEIPVDHLIXNIIRGNLFPEVSIWIXSRPSASGQIPGGLVDRMXEIRGFNEEEIKVCLEQMFPEDQALLGWMLSQVQADRALYLMCXVPAFCRLXGMALGHLWRSRXGPQDAELWPPRXLCELYSWYFRMALSGEGQEKGKASPRIEQVAHGGRKMVGXLGRLAFHGLLKKKYVFYEQDMKAFGVDLALLQGAPCSCFLQREEXLASSVAYCFXHLSLQEFVAAAYYYGASRRAIFDLFXESGVSWPRLGFLXHFRSAAQRAMQAEDGRLDVFLRFLSGLLSPRVNALLAGSLLAQGEHQAYRXQVAELLQGCLRPDAAVCARAINVLHCLHELQHXELARSVEEAMESGALARLXGPAHRAALAYLLQVSDACAQEANLSLSLSQGVLQSLLPQLLYCRKLRLDXNQFQDPVMELLGSVLSGKDCRIQKISLAENQISNKGAKALARSLLVNRSLXSLDLRGNSIGPQGAKALADALKINRXLXSLSLQGNXVRDDGARSMAEALASNRXLSMLHLQKNSIGPMGAQRMADALKQNRSLKELMFSSNSIGDGGAKALAEALKVNQGLESLDLQSNSISDAGVAALMGALCXNQXLLSLSLRENSISPEGAQAIAHALCANSXLKNLDLXANLLHDQGARAIAVAVRENRXLXSLHLQWNFIQAGAAQALGQALQLNRSLXSLDLQENAIGDDGACAVARALKVNXALXALYLQVASIGASGAQVLGEALAVNRXLEILDLRGNAIGVAGAKALANALKVNSSLRRLNLQENSLGMDGAICIAXALSGNHRLQHINLQGNHIGDSGARMISEAIKXNAPXCXVEM

SEQ ID NO: 17837 - protein, 196 aa, Homo sapiens
  MOD_RES (1)..(1): Any amino acid
  MOD_RES (24)..(24): Selenocysteine
  MOD_RES (26)..(26): Selenocysteine
  MOD_RES (34)..(34): Selenocysteine
  MOD_RES (52)..(52): Selenocysteine
  MOD_RES (133)..(133): Selenocysteine
  MOD_RES (136)..(136): Selenocysteine
  MOD_RES (164)..(164): Selenocysteine
  MOD_RES (194)..(194): Selenocysteine
XLRGNSIGPQGAKALADALKINRXLXSLSLQGNXVRDDGARSMAEALASNRXLSMLHLQKNSIGPMGAQRMADALKQNRSLKELMFSSNSIGDGGAKALAEALKVNQGLESLDLQSNSISDAGVAALMGALCXNQXLLSLSLRENSISPEGAQAIAHALCANSXLKNLDLQWNFIQAGAAQALGQALQLNRSLXSL

SEQ ID NO: 17838 - protein, 359 aa, Homo sapiens
  MOD_RES (18)..(18): Selenocysteine
  MOD_RES (24)..(24): Selenocysteine
  MOD_RES (91)..(91): Selenocysteine
  MOD_RES (101)..(101): Selenocysteine
  MOD_RES (134)..(134): Selenocysteine
  MOD_RES (217)..(217): Selenocysteine
  MOD_RES (255)..(255): Selenocysteine
  MOD_RES (257)..(257): Selenocysteine
  MOD_RES (309)..(309): Selenocysteine
  MOD_RES (330)..(330): Selenocysteine
  MOD_RES (351)..(351): Selenocysteine
  MOD_RES (358)..(358): Selenocysteine
MNFIKDNSRALIQRMGMXVIKQIXDDLFVWNVLNREEVNIICCEKVEQDAARGIIHMILKKGSESCNLFLKSLKEWNYPLFQDLNGQSGLXDSLGNLKNLXKLIMDNIKMNEEDAIKLAEGLKNLKKMCLFHLXHLSDIGEGMDYIVKSLSSEPCDLEEIQLVSCCLSANAVKILAQNLHNLVKLSILDLSENYLEKDGNEALHELIDRMNVLEQLXALMLPWGCDVQGSLSSLLKHLEEVPQLVKLGLKNWRLXDXEIRILGAFFGKNPLKNFQQLNLAGNRVSSDGWLAFMGVFENLKQLVFFDFSXKEFLPDPALVRKLSQVLSKLXFLQEARLVGWQFDDDDLSVIXGAFKLVXA

SEQ ID NO: 17839 - protein, 1024 aa, Homo sapiens
  MOD_RES (18)..(18): Selenocysteine
  MOD_RES (24)..(24): Selenocysteine
  MOD_RES (93)..(93): Selenocysteine
  MOD_RES (111)..(111): Selenocysteine
  MOD_RES (133)..(133): Selenocysteine
  MOD_RES (135)..(135): Selenocysteine
  MOD_RES (153)..(153): Selenocysteine
  MOD_RES (177)..(177): Selenocysteine
  MOD_RES (195)..(195): Selenocysteine
  MOD_RES (215)..(215): Selenocysteine
  MOD_RES (226)..(226): Selenocysteine
  MOD_RES (231)..(231): Selenocysteine
  MOD_RES (278)..(281): Selenocysteine
  MOD_RES (294)..(294): Selenocysteine
  MOD_RES (301)..(301): Selenocysteine
  MOD_RES (337)..(337): Selenocysteine
  MOD_RES (344)..(344): Selenocysteine
  MOD_RES (358)..(358): Selenocysteine
  MOD_RES (360)..(361): Selenocysteine
  MOD_RES (365)..(365): Selenocysteine
  MOD_RES (423)..(424): Selenocysteine
  MOD_RES (431)..(431): Selenocysteine
  MOD_RES (450)..(450): Selenocysteine
  MOD_RES (460)..(460): Selenocysteine
  MOD_RES (468)..(468): Selenocysteine
  MOD_RES (484)..(484): Selenocysteine
  MOD_RES (486)..(486): Selenocysteine
  MOD_RES (494)..(494): Selenocysteine
  MOD_RES (502)..(502): Selenocysteine
  MOD_RES (540)..(541): Selenocysteine
  MOD_RES (566)..(566): Selenocysteine
  MOD_RES (631)..(631): Selenocysteine
  MOD_RES (642)..(642): Selenocysteine
  MOD_RES (661)..(661): Selenocysteine
  MOD_RES (665)..(665): Selenocysteine
  MOD_RES (688)..(688): Selenocysteine
  MOD_RES (710)..(710): Selenocysteine
  MOD_RES (725)..(725): Selenocysteine
  MOD_RES (733)..(733): Selenocysteine
  MOD_RES (736)..(736): Selenocysteine
  MOD_RES (740)..(740): Selenocysteine
  MOD_RES (756)..(756): Selenocysteine
  MOD_RES (766)..(766): Selenocysteine
  MOD_RES (799)..(799): Selenocysteine
  MOD_RES (882)..(882): Selenocysteine
  MOD_RES (920)..(920): Selenocysteine
  MOD_RES (922)..(922): Selenocysteine
  MOD_RES (974)..(974): Selenocysteine
  MOD_RES (995)..(995): Selenocysteine
  MOD_RES (1016)..(1016): Selenocysteine
  MOD_RES (1023)..(1023): Selenocysteine
MNFIKDNSRALIQRMGMXVIKQIXDDLFVWNVLNREEVNIICCEKVEQDAARGIIHMILKKGSESCNLFLKSLKEWNYPLFQDLNGQSLFHQXSEGDLDDLAQDLKDLYHXPSFLNFYPLGEDIDIIFNLKSXFXEPVLWRKDQHHHRVEQLXLNGLLQALQSPCIIEGESGKGKSXLLQRIAMLWGSGKCKALXKFKFVFFLRLSRAQGGLFEXLCDQLLDIPGXIRKQXFMAMLLKLRQRVLFLLDGYNEFKPQNCPEIEALIKENHRFKNMVIVXXXXECLRHIRQFGALXAEVGDMXEDSAQALIREVLIKELAEGLLLQIQKSRCLRNLMKXPLFVVIXCAIQMGESEFHSHXQXXLFHXFYDLLIQKNKHKHKGVAASDFIRSLDHCGDLALEGVFSHKFDFELQDVSSVNEDVLLXXGLLCKYXAQRFKPKYKFFHKSFQEYXAGRRLSSLLXSHEPEEVXKGNGYLQKMVSISDIXSXYSSLLRYXCGSSVEAXRAVMKHLAAVYQHGCLLGLSIAKRPLWRQESLQSVKNXXEQEILKAININSFVECGIHLYQESXSKSALSQEFEAFFQGKSLYINSGNIPDYLFDFFEHLPNCASALDFIKLDFYGGAMASWEKAAEDXGGIHMEEAPEXYIPSRAVSLFFNWKQEFRXLEVXLRDFSKLNKQDIRYLGKIFSSAXSLRLQIKRCAGVAGSLSLVLSXCKNIYSLMVEASPLXIEDERHIXSVXNLKXLSIHDLQNQRLPGGLXDSLGNLKNLXKLIMDNIKMNEEDAIKLAEGLKNLKKMCLFHLXHLSDIGEGMDYIVKSLSSEPCDLEEIQLVSCCLSANAVKILAQNLHNLVKLSILDLSENYLEKDGNEALHELIDRMNVLEQLXALMLPWGCDVQGSLSSLLKHLEEVPQLVKLGLKNWRLXDXEIRILGAFFGKNPLKNFQQLNLAGNRVSSDGWLAFMGVFENLKQLVFFDFSXKEFLPDPALVRKLSQVLSKLXFLQEARLVGWQFDDDDLSVIXGAFKLVXA

SEQ ID NO: 17840 - protein, 631 aa, Homo sapiens
  MOD_RES (2)..(2): Selenocysteine
  MOD_RES (4)..(4): Selenocysteine
  MOD_RES (8)..(8): Selenocysteine
  MOD_RES (10)..(10): Selenocysteine
  MOD_RES (67)..(67): Selenocysteine
  MOD_RES (85)..(85): Selenocysteine
  MOD_RES (95)..(95): Selenocysteine
  MOD_RES (98)..(98): Selenocysteine
  MOD_RES (117)..(117): Selenocysteine
  MOD_RES (119)..(120): Selenocysteine
  MOD_RES (145)..(145): Selenocysteine
  MOD_RES (226)..(226): Selenocysteine
  MOD_RES (238)..(238): Selenocysteine
  MOD_RES (281)..(281): Selenocysteine
  MOD_RES (357)..(357): Selenocysteine
  MOD_RES (380)..(380): Selenocysteine
  MOD_RES (394)..(394): Selenocysteine
  MOD_RES (399)..(399): Selenocysteine
  MOD_RES (423)..(423): Selenocysteine
  MOD_RES (442)..(442): Selenocysteine
  MOD_RES (455)..(455): Selenocysteine
  MOD_RES (474)..(474): Selenocysteine
  MOD_RES (492)..(492): Selenocysteine
  MOD_RES (538)..(538): Selenocysteine
  MOD_RES (556)..(556): Selenocysteine
  MOD_RES (565)..(565): Selenocysteine
  MOD_RES (568)..(568): Selenocysteine
  MOD_RES (570)..(570): Selenocysteine
  MOD_RES (599)..(599): Selenocysteine
  MOD_RES (602)..(602): Selenocysteine
  MOD_RES (609)..(609): Selenocysteine
LXCXDLAXLXNILEHREAPIHLDFDGCPLEPHCPEALVGCGQIENLSFKSRKCGDAFAEALSRSLPXMGRLQMLGLSSNSICVSXLLCLARVAVXCPXVRMLQAREADLIFLLSPPXEXXAELQRAPDLQESDGQRKGAQSRSLXLRLQKCQLQVHDAEALIALLQEGPHLEEVDLSGNQLEDEGCRLMAEAASQLHIARKLDLSNNGLSVAGVHCVLRAVSACWXLAELHISLQHKXVIFMFAQEPEEQKGPQERAAFLDSLMLQMPSELPLSSRRMRLXHCGLQEKHLEQLCKALGGSCHLGHLHLDFSGNALGDEGAARLAQLLPGLGALQSLNLSENGLSLDAVLGLVRCFSXLQWLFRLDISFESQHILLRGDKXSSLSECPLEPPSLXRLCAXLKDCPGPLELQLSCEFLSDQSLEXLLDCLPQLPQLSLLQLSQXGLSPKSPFLLANXLSLCPRVKKVDLRSLHHAXLHFRSNEEEEGVCCGRFXGCSLSQEHVESLCWLLSKCKDLSQVDLGSEQSFRIHFSREDQAGKXLRLSECSFRPEHVSRLAXGLSKSLQLXELXLXQCCLGQKQLAILLSLVGRPAGLFSLRDSXRHXEKLSFPXLEACALGFKKKRKKERKKVSED

SEQ ID NO: 17841 - protein, 885 aa, Homo sapiens
  MOD_RES (2)..(2): Selenocysteine
  MOD_RES (8)..(8): Selenocysteine
  MOD_RES (15)..(15): Selenocysteine
  MOD_RES (20)..(20): Selenocysteine
  MOD_RES (43)..(43): Selenocysteine
  MOD_RES (45)..(45): Selenocysteine
  MOD_RES (49)..(49): Selenocysteine
  MOD_RES (58)..(58): Selenocysteine
  MOD_RES (70)..(70): Selenocysteine
  MOD_RES (79)..(79): Selenocysteine
  MOD_RES (111)..(111): Selenocysteine
  MOD_RES (115)..(115): Selenocysteine
  MOD_RES (129)..(129): Selenocysteine
  MOD_RES (138)..(138): Selenocysteine
  MOD_RES (154)..(154): Selenocysteine
  MOD_RES (156)..(156): Selenocysteine
  MOD_RES (160)..(160): Selenocysteine
  MOD_RES (162)..(162): Selenocysteine
  MOD_RES (219)..(219): Selenocysteine
  MOD_RES (234)..(234): Selenocysteine
  MOD_RES (293)..(293): Selenocysteine
  MOD_RES (303)..(303): Selenocysteine
  MOD_RES (306)..(306): Selenocysteine
  MOD_RES (325)..(325): Selenocysteine
  MOD_RES (327)..(328): Selenocysteine
  MOD_RES (353)..(353): Selenocysteine
  MOD_RES (434)..(434): Selenocysteine
  MOD_RES (446)..(446): Selenocysteine
  MOD_RES (489)..(489): Selenocysteine
  MOD_RES (565)..(565): Selenocysteine
  MOD_RES (588)..(588): Selenocysteine
  MOD_RES (602)..(602): Selenocysteine
  MOD_RES (607)..(607): Selenocysteine
  MOD_RES (631)..(631): Selenocysteine
  MOD_RES (650)..(650): Selenocysteine
  MOD_RES (663)..(663): Selenocysteine
  MOD_RES (682)..(682): Selenocysteine
  MOD_RES (699)..(699): Selenocysteine
  MOD_RES (770)..(770): Selenocysteine
  MOD_RES (803)..(803): Selenocysteine
  MOD_RES (821)..(821): Selenocysteine
  MOD_RES (830)..(830): Selenocysteine
  MOD_RES (833)..(833): Selenocysteine
  MOD_RES (835)..(835): Selenocysteine
  MOD_RES (864)..(864): Selenocysteine
  MOD_RES (867)..(867): Selenocysteine
  MOD_RES (874)..(874): Selenocysteine
LXSFCVCXGPGHQQXGYAFXHLSLQEFLAALHLMASPKVNKDXLXQYVXLHSRWVQRXKARLGLSDHLPXFLAGLASCXCRPFLSHLAQGNEDCVGAKQAAVVQVLKKLAXRKLXGPKVVELCHCVDEXQEPELASLXAQSLPYQLPFHNFPLXCXDLAXLXNILEHREAPIHLDFDGCPLEPHCPEALVGCGQIENLSFKSRKCGDAFAEALSRSLPXMGRLQMLGLAGSKIXARGISHLVKALPLCPQLKEVSFRDNQLSDQVVLNIVEVLPHLPRLRKLDLSSNSICVSXLLCLARVAVXCPXVRMLQAREADLIFLLSPPXEXXAELQRAPDLQESDGQRKGAQSRSLXLRLQKCQLQVHDAEALIALLQEGPHLEEVDLSGNQLEDEGCRLMAEAASQLHIARKLDLSNNGLSVAGVHCVLRAVSACWXLAELHISLQHKXVIFMFAQEPEEQKGPQERAAFLDSLMLQMPSELPLSSRRMRLXHCGLQEKHLEQLCKALGGSCHLGHLHLDFSGNALGDEGAARLAQLLPGLGALQSLNLSENGLSLDAVLGLVRCFSXLQWLFRLDISFESQHILLRGDKXSSLSECPLEPPSLXRLCAXLKDCPGPLELQLSCEFLSDQSLEXLLDCLPQLPQLSLLQLSQXGLSPKSPFLLANXLSLCPRVKKVDLRSLHHAXLHFRSNEEEEGVCCGFXGCSLSQEHVESLCWLLSKCKDLSQVDLSANLLGDSGLRCLLECLPQVPISGLLDLSHNSISQESALYLLEXLPSCPRVREASVNLGSEQSFRIHFSREDQAGKXLRLSECSFRPEHVSRLAXGLSKSLQLXELXLXQCCLGQKQLAILLSLVGRPAGLFSLRDSXRHXEKLSFPXLEACALGFKKK

SEQ ID NO: 17842 - protein, 19 aa, Homo sapiens
MDPVGLQLGNKNLWSCLVR

SEQ ID NO: 17843 - protein, 74 aa, Homo sapiens
  MOD_RES (22)..(22): Selenocysteine
  MOD_RES (39)..(39): Selenocysteine
  MOD_RES (47)..(47): Selenocysteine
  MOD_RES (68)..(68): Selenocysteine
MDPVGLQLGNKNLWSCLVRLLXKDPEWLNAKMKFFLPNXDLDSRNEXLDPEQRVILQLNKLHVQGSDXWQSFIH

SEQ ID NO: 17844 - protein, 720 aa, Homo sapiens
  MOD_RES (22)..(22): Selenocysteine
  MOD_RES (39)..(39): Selenocysteine
  MOD_RES (47)..(47): Selenocysteine
  MOD_RES (68)..(68): Selenocysteine
  MOD_RES (93)..(93): Selenocysteine
  MOD_RES (101)..(101): Selenocysteine
  MOD_RES (153)..(153): Selenocysteine
  MOD_RES (185)..(185): Selenocysteine
  MOD_RES (190)..(190): Selenocysteine
  MOD_RES (215)..(215): Selenocysteine
  MOD_RES (224)..(224): Selenocysteine
  MOD_RES (235)..(236): Selenocysteine
  MOD_RES (268)..(268): Selenocysteine
  MOD_RES (272)..(272): Selenocysteine
  MOD_RES (290)..(290): Selenocysteine
  MOD_RES (326)..(326): Selenocysteine
  MOD_RES (335)..(335): Selenocysteine
  MOD_RES (345)..(345): Selenocysteine
  MOD_RES (395)..(395): Selenocysteine
  MOD_RES (436)..(436): Selenocysteine
  MOD_RES (454)..(454): Selenocysteine
  MOD_RES (470)..(470): Selenocysteine
  MOD_RES (490)..(490): Selenocysteine
  MOD_RES (495)..(495): Selenocysteine
  MOD_RES (501)..(501): Selenocysteine
  MOD_RES (508)..(508): Selenocysteine
  MOD_RES (513)..(513): Selenocysteine
  MOD_RES (536)..(536): Selenocysteine
  MOD_RES (538)..(538): Selenocysteine
  MOD_RES (542)..(542): Selenocysteine
  MOD_RES (551)..(551): Selenocysteine
  MOD_RES (563)..(563): Selenocysteine
  MOD_RES (572)..(572): Selenocysteine
  MOD_RES (604)..(604): Selenocysteine
  MOD_RES (608)..(608): Selenocysteine
  MOD_RES (622)..(622): Selenocysteine
  MOD_RES (631)..(631): Selenocysteine
  MOD_RES (647)..(647): Selenocysteine
  MOD_RES (649)..(649): Selenocysteine
  MOD_RES (653)..(653): Selenocysteine
  MOD_RES (655)..(655): Selenocysteine
  MOD_RES (712)..(712): Selenocysteine
MDPVGLQLGNKNLWSCLVRLLXKDPEWLNAKMKFFLPNXDLDSRNEXLDPEQRVILQLNKLHVQGSDXWQSFIHCVCMQLEVPLDLEVLLLSXFGYDDGFXSQLGAEGKSQPESQLHHGLKRPHQSCGSSPRRKQCKKQQLELAKKYLQLLRXSAQQRYRSQIPGSGQPHAFHQVYVPPILRRAXASLDXPEGAIMGDVKVEDGADVSISDLFNXRVNKGPRVXVLLGKAGMGKXXLAHRLCQKWAEGHLNCFQALFLFEFRQLNLIXRFLXPSELLFDLYLSPESDHDXVFQYLEKNADQVLLIFDGLDEALQPMGPDGPGPVLXLFSHLCNGXLLPGCRVMAXSRPGKLPACLPAEAAMVHMLGFDGPRVEEYVNHFFSAQPSREGALVELQXNGRLRSLCAVPALCQVACLCLHHLLPDHAPGQSVALLPNMXQLYMQMVLALSPPGHLPXSSLLDLGEVALRGLEXGKVIFYAKDIAPPLIAFGAXHSLLXSFCVCXGPGHQQXGYAFXHLSLQEFLAALHLMASPKVNKDXLXQYVXLHSRWVQRXKARLGLSDHLPXFLAGLASCXCRPFLSHLAQGNEDCVGAKQAAVVQVLKKLAXRKLXGPKVVELCHCVDEXQEPELASLXAQSLPYQLPFHNFPLXCXDLAXLXNILEHREAPIHLDFDGCPLEPHCPEALVGCGQIENLSFKSRKCGDAFAEALSRSLPXMGRLQMLG

SEQ ID NO: 17845 - protein, 1837 aa, Homo sapiens
  MOD_RES (22)..(22): Selenocysteine
  MOD_RES (39)..(39): Selenocysteine
  MOD_RES (47)..(47): Selenocysteine
  MOD_RES (68)..(68): Selenocysteine
  MOD_RES (93)..(93): Selenocysteine
  MOD_RES (101)..(101): Selenocysteine
  MOD_RES (153)..(153): Selenocysteine
  MOD_RES (185)..(185): Selenocysteine
  MOD_RES (190)..(190): Selenocysteine
  MOD_RES (215)..(215): Selenocysteine
  MOD_RES (224)..(224): Selenocysteine
  MOD_RES (235)..(236): Selenocysteine
  MOD_RES (268)..(268): Selenocysteine
  MOD_RES (272)..(272): Selenocysteine
  MOD_RES (290)..(290): Selenocysteine
  MOD_RES (326)..(326): Selenocysteine
  MOD_RES (335)..(335): Selenocysteine
  MOD_RES (345)..(345): Selenocysteine
  MOD_RES (395)..(395): Selenocysteine
  MOD_RES (436)..(436): Selenocysteine
  MOD_RES (454)..(454): Selenocysteine
  MOD_RES (470)..(470): Selenocysteine
  MOD_RES (490)..(490): Selenocysteine
  MOD_RES (495)..(495): Selenocysteine
  MOD_RES (501)..(501): Selenocysteine
  MOD_RES (508)..(508): Selenocysteine
  MOD_RES (513)..(513): Selenocysteine
  MOD_RES (536)..(536): Selenocysteine
  MOD_RES (538)..(538): Selenocysteine
  MOD_RES (542)..(542): Selenocysteine
  MOD_RES (551)..(551): Selenocysteine
  MOD_RES (563)..(563): Selenocysteine
  MOD_RES (572)..(572): Selenocysteine
  MOD_RES (604)..(604): Selenocysteine
  MOD_RES (608)..(608): Selenocysteine
  MOD_RES (622)..(622): Selenocysteine
  MOD_RES (631)..(631): Selenocysteine
  MOD_RES (647)..(647): Selenocysteine
  MOD_RES (649)..(649): Selenocysteine
  MOD_RES (653)..(653): Selenocysteine
  MOD_RES (655)..(655): Selenocysteine
  MOD_RES (712)..(712): Selenocysteine
  MOD_RES (727)..(727): Selenocysteine
  MOD_RES (786)..(786): Selenocysteine
  MOD_RES (796)..(796): Selenocysteine
  MOD_RES (799)..(799): Selenocysteine
  MOD_RES (818)..(818): Selenocysteine
  MOD_RES (820)..(821): Selenocysteine
  MOD_RES (846)..(846): Selenocysteine
  MOD_RES (927)..(927): Selenocysteine
  MOD_RES (939)..(939): Selenocysteine
  MOD_RES (982)..(982): Selenocysteine
  MOD_RES (1058)..(1058): Selenocysteine
  MOD_RES (1081)..(1081): Selenocysteine
  MOD_RES (1088)..(1088): Selenocysteine
  MOD_RES (1125)..(1125): Selenocysteine
  MOD_RES (1130)..(1130): Selenocysteine
  MOD_RES (1154)..(1154): Selenocysteine
  MOD_RES (1173)..(1173): Selenocysteine
  MOD_RES (1186)..(1186): Selenocysteine
  MOD_RES (1205)..(1205): Selenocysteine
  MOD_RES (1265)..(1265): Selenocysteine
  MOD_RES (1298)..(1298): Selenocysteine
  MOD_RES (1316)..(1316): Selenocysteine
  MOD_RES (1325)..(1325): Selenocysteine
  MOD_RES (1328)..(1328): Selenocysteine
  MOD_RES (1330)..(1330): Selenocysteine
  MOD_RES (1382)..(1382): Selenocysteine
  MOD_RES (1389)..(1389): Selenocysteine
  MOD_RES (1432)..(1432): Selenocysteine
  MOD_RES (1469)..(1469): Selenocysteine
  MOD_RES (1473)..(1473): Selenocysteine
  MOD_RES (1479)..(1479): Selenocysteine
  MOD_RES (1510)..(1510): Selenocysteine
  MOD_RES (1537)..(1537): Selenocysteine
  MOD_RES (1542)..(1542): Selenocysteine
  MOD_RES (1549)..(1549): Selenocysteine
  MOD_RES (1577)..(1577): Selenocysteine
  MOD_RES (1599)..(1599): Selenocysteine
  MOD_RES (1649)..(1649): Selenocysteine
  MOD_RES (1727)..(1727): Selenocysteine
  MOD_RES (1732)..(1732): Selenocysteine
  MOD_RES (1736)..(1736): Selenocysteine
  MOD_RES (1780)..(1780): Selenocysteine
  MOD_RES (1837)..(1837): Selenocysteine
MDPVGLQLGNKNLWSCLVRLLXKDPEWLNAKMKFFLPNXDLDSRNEXLDPEQRVILQLNKLHVQGSDXWQSFIHCVCMQLEVPLDLEVLLLSXFGYDDGFXSQLGAEGKSQPESQLHHGLKRPHQSCGSSPRRKQCKKQQLELAKKYLQLLRXSAQQRYRSQIPGSGQPHAFHQVYVPPILRRAXASLDXPEGAIMGDVKVEDGADVSISDLFNXRVNKGPRVXVLLGKAGMGKXXLAHRLCQKWAEGHLNCFQALFLFEFRQLNLIXRFLXPSELLFDLYLSPESDHDXVFQYLEKNADQVLLIFDGLDEALQPMGPDGPGPVLXLFSHLCNGXLLPGCRVMAXSRPGKLPACLPAEAAMVHMLGFDGPRVEEYVNHFFSAQPSREGALVELQXNGRLRSLCAVPALCQVACLCLHHLLPDHAPGQSVALLPNMXQLYMQMVLALSPPGHLPXSSLLDLGEVALRGLEXGKVIFYAKDIAPPLIAFGAXHSLLXSFCVCXGPGHQQXGYAFXHLSLQEFLAALHLMASPKVNKDXLXQYVXLHSRWVQRXKARLGLSDHLPXFLAGLASCXCRPFLSHLAQGNEDCVGAKQAAVVQVLKKLAXRKLXGPKVVELCHCVDEXQEPELASLXAQSLPYQLPFHNFPLXCXDLAXLXNILEHREAPIHLDFDGCPLEPHCPEALVGCGQIENLSFKSRKCGDAFAEALSRSLPXMGRLQMLGLAGSKIXARGISHLVKALPLCPQLKEVSFRDNQLSDQVVLNIVEVLPHLPRLRKLDLSSNSICVSXLLCLARVAVXCPXVRMLQAREADLIFLLSPPXEXXAELQRAPDLQESDGQRKGAQSRSLXLRLQKCQLQVHDAEALIALLQEGPHLEEVDLSGNQLEDEGCRLMAEAASQLHIARKLDLSNNGLSVAGVHCVLRAVSACWXLAELHISLQHKXVIFMFAQEPEEQKGPQERAAFLDSLMLQMPSELPLSSRRMRLXHCGLQEKHLEQLCKALGGSCHLGHLHLDFSGNALGDEGAARLAQLLPGLGALQSLNLSENGLSLDAVLGLVRCFSXLQWLFRLDISFESQHILLRGDKXSRDMWAXGSLPDFPAAAKFLGFRQRCIPRSLCLSECPLEPPSLXRLCAXLKDCPGPLELQLSCEFLSDQSLEXLLDCLPQLPQLSLLQLSQXGLSPKSPFLLANXLSLCPRVKKVDLRSLHHAXLHFRSNEEEEGVCCGLSANLLGDSGLRCLLECLPQVPISGLLDLSHNSISQESALYLLEXLPSCPRVREASVNLGSEQSFRIHFSREDQAGKXLRLSECSFRPEHVSRLAXGLSKSLQLXELXLXQCCLGQKQLAILLSLVGRPAGLFSLRVQEPWADRARVLSLLEVCAQASGSVXEISISEXQQQLCVQLEFPRQEENPEAVALRLAHCDLGAHHSLLVGQLMEXCARLQQLSLSQVNLCEDDDASSLLLQSLLLSLSELKXFRLXSSCVSXEGLAHLASGLGHCHHLEELDLSNNQFDEEGXKALMRALEGKWMLKRLDLSHLLLNSSXLALLXHRLSQMXCLQSLRLNRNSIGDVGCCHLSEALRAAXSLEELDLSHNQIGDAGVQHLAXILPGLPELRKIDLSGNSISSAGGVQLAESLVLCRRLEELMLGCNALGDPXALGLAQELPQHLRVLHLPFSHLGPGGALSLAQALDGSPHLEEISLAENNLAGGVLRFCMELPLLRQIDLVSCKIDNQXAKLLXSSFXSCPALEVILLSWNLLGDEAAAELAQVLPQMGRLKRVDLEKNQIXALGAWLLAEGLAQGSSIQVIRLWNNPIPCDMAQHLKSQEPRLDFAFFDNQPQAPWGX

SEQ ID NO: 17846 - protein, 1866 aa, Homo sapiens
  MOD_RES (22)..(22): Selenocysteine
  MOD_RES (39)..(39): Selenocysteine
  MOD_RES (47)..(47): Selenocysteine
  MOD_RES (68)..(68): Selenocysteine
  MOD_RES (93)..(93): Selenocysteine
  MOD_RES (101)..(101): Selenocysteine
  MOD_RES (153)..(153): Selenocysteine
  MOD_RES (185)..(185): Selenocysteine
  MOD_RES (190)..(190): Selenocysteine
  MOD_RES (215)..(215): Selenocysteine
  MOD_RES (224)..(224): Selenocysteine
  MOD_RES (235)..(236): Selenocysteine
  MOD_RES (268)..(268): Selenocysteine
  MOD_RES (272)..(272): Selenocysteine
  MOD_RES (290)..(290): Selenocysteine
  MOD_RES (326)..(326): Selenocysteine
  MOD_RES (335)..(335): Selenocysteine
  MOD_RES (345)..(345): Selenocysteine
  MOD_RES (395)..(395): Selenocysteine
  MOD_RES (436)..(436): Selenocysteine
  MOD_RES (454)..(454): Selenocysteine
  MOD_RES (470)..(470): Selenocysteine
  MOD_RES (490)..(490): Selenocysteine
  MOD_RES (495)..(495): Selenocysteine
  MOD_RES (501)..(501): Selenocysteine
  MOD_RES (508)..(508): Selenocysteine
  MOD_RES (513)..(513): Selenocysteine
  MOD_RES (536)..(536): Selenocysteine
  MOD_RES (538)..(538): Selenocysteine
  MOD_RES (542)..(542): Selenocysteine
  MOD_RES (551)..(551): Selenocysteine
  MOD_RES (563)..(563): Selenocysteine
  MOD_RES (572)..(572): Selenocysteine
  MOD_RES (604)..(604): Selenocysteine
  MOD_RES (608)..(608): Selenocysteine
  MOD_RES (622)..(622): Selenocysteine
  MOD_RES (631)..(631): Selenocysteine
  MOD_RES (647)..(647): Selenocysteine
  MOD_RES (649)..(649): Selenocysteine
  MOD_RES (653)..(653): Selenocysteine
  MOD_RES (655)..(655): Selenocysteine
  MOD_RES (712)..(712): Selenocysteine
  MOD_RES (727)..(727): Selenocysteine
  MOD_RES (786)..(786): Selenocysteine
  MOD_RES (796)..(796): Selenocysteine
  MOD_RES (799)..(799): Selenocysteine
  MOD_RES (818)..(818): Selenocysteine
  MOD_RES (820)..(821): Selenocysteine
  MOD_RES (846)..(846): Selenocysteine
  MOD_RES (927)..(927): Selenocysteine
  MOD_RES (939)..(939): Selenocysteine
  MOD_RES (982)..(982): Selenocysteine
  MOD_RES (1058)..(1058): Selenocysteine
  MOD_RES (1081)..(1081): Selenocysteine
  MOD_RES (1088)..(1088): Selenocysteine
  MOD_RES (1125)..(1125): Selenocysteine
  MOD_RES (1130)..(1130): Selenocysteine
  MOD_RES (1154)..(1154): Selenocysteine
  MOD_RES (1173)..(1173): Selenocysteine
  MOD_RES (1186)..(1186): Selenocysteine
  MOD_RES (1205)..(1205): Selenocysteine
  MOD_RES (1223)..(1223): Selenocysteine
  MOD_RES (1294)..(1294): Selenocysteine
  MOD_RES (1327)..(1327): Selenocysteine
  MOD_RES (1345)..(1345): Selenocysteine
  MOD_RES (1354)..(1354): Selenocysteine
  MOD_RES (1357)..(1357): Selenocysteine
  MOD_RES (1359)..(1359): Selenocysteine
  MOD_RES (1411)..(1411): Selenocysteine
  MOD_RES (1418)..(1418): Selenocysteine
  MOD_RES (1461)..(1461): Selenocysteine
  MOD_RES (1498)..(1498): Selenocysteine
  MOD_RES (1502)..(1502): Selenocysteine
  MOD_RES (1508)..(1508): Selenocysteine
  MOD_RES (1539)..(1539): Selenocysteine
  MOD_RES (1566)..(1566): Selenocysteine
  MOD_RES (1571)..(1571): Selenocysteine
  MOD_RES (1578)..(1578): Selenocysteine
  MOD_RES (1606)..(1606): Selenocysteine
  MOD_RES (1628)..(1628): Selenocysteine
  MOD_RES (1678)..(1678): Selenocysteine
  MOD_RES (1756)..(1756): Selenocysteine
  MOD_RES (1761)..(1761): Selenocysteine
  MOD_RES (1765)..(1765): Selenocysteine
  MOD_RES (1809)..(1809): Selenocysteine
  MOD_RES (1866)..(1866): Selenocysteine
MDPVGLQLGNKNLWSCLVRLLXKDPEWLNAKMKFFLPNXDLDSRNEXLDPEQRVILQLNKLHVQGSDXWQSFIHCVCMQLEVPLDLEVLLLSXFGYDDGFXSQLGAEGKSQPESQLHHGLKRPHQSCGSSPRRKQCKKQQLELAKKYLQLLRXSAQQRYRSQIPGSGQPHAFHQVYVPPILRRAXASLDXPEGAIMGDVKVEDGADVSISDLFNXRVNKGPRVXVLLGKAGMGKXXLAHRLCQKWAEGHLNCFQALFLFEFRQLNLIXRFLXPSELLFDLYLSPESDHDXVFQYLEKNADQVLLIFDGLDEALQPMGPDGPGPVLXLFSHLCNGXLLPGCRVMAXSRPGKLPACLPAEAAMVHMLGFDGPRVEEYVNHFFSAQPSREGALVELQXNGRLRSLCAVPALCQVACLCLHHLLPDHAPGQSVALLPNMXQLYMQMVLALSPPGHLPXSSLLDLGEVALRGLEXGKVIFYAKDIAPPLIAFGAXHSLLXSFCVCXGPGHQQXGYAFXHLSLQEFLAALHLMASPKVNKDXLXQYVXLHSRWVQRXKARLGLSDHLPXFLAGLASCXCRPFLSHLAQGNEDCVGAKQAAVVQVLKKLAXRKLXGPKVVELCHCVDEXQEPELASLXAQSLPYQLPFHNFPLXCXDLAXLXNILEHREAPIHLDFDGCPLEPHCPEALVGCGQIENLSFKSRKCGDAFAEALSRSLPXMGRLQMLGLAGSKIXARGISHLVKALPLCPQLKEVSFRDNQLSDQVVLNIVEVLPHLPRLRKLDLSSNSICVSXLLCLARVAVXCPXVRMLQAREADLIFLLSPPXEXXAELQRAPDLQESDGQRKGAQSRSLXLRLQKCQLQVHDAEALIALLQEGPHLEEVDLSGNQLEDEGCRLMAEAASQLHIARKLDLSNNGLSVAGVHCVLRAVSACWXLAELHISLQHKXVIFMFAQEPEEQKGPQERAAFLDSLMLQMPSELPLSSRRMRLXHCGLQEKHLEQLCKALGGSCHLGHLHLDFSGNALGDEGAARLAQLLPGLGALQSLNLSENGLSLDAVLGLVRCFSXLQWLFRLDISFESQHILLRGDKXSRDMWAXGSLPDFPAAAKFLGFRQRCIPRSLCLSECPLEPPSLXRLCAXLKDCPGPLELQLSCEFLSDQSLEXLLDCLPQLPQLSLLQLSQXGLSPKSPFLLANXLSLCPRVKKVDLRSLHHAXLHFRSNEEEEGVCCGRFXGCSLSQEHVESLCWLLSKCKDLSQVDLSANLLGDSGLRCLLECLPQVPISGLLDLSHNSISQESALYLLEXLPSCPRVREASVNLGSEQSFRIHFSREDQAGKXLRLSECSFRPEHVSRLAXGLSKSLQLXELXLXQCCLGQKQLAILLSLVGRPAGLFSLRVQEPWADRARVLSLLEVCAQASGSVXEISISEXQQQLCVQLEFPRQEENPEAVALRLAHCDLGAHHSLLVGQLMEXCARLQQLSLSQVNLCEDDDASSLLLQSLLLSLSELKXFRLXSSCVSXEGLAHLASGLGHCHHLEELDLSNNQFDEEGXKALMRALEGKWMLKRLDLSHLLLNSSXLALLXHRLSQMXCLQSLRLNRNSIGDVGCCHLSEALRAAXSLEELDLSHNQIGDAGVQHLAXILPGLPELRKIDLSGNSISSAGGVQLAESLVLCRRLEELMLGCNALGDPXALGLAQELPQHLRVLHLPFSHLGPGGALSLAQALDGSPHLEEISLAENNLAGGVLRFCMELPLLRQIDLVSCKIDNQXAKLLXSSFXSCPALEVILLSWNLLGDEAAAELAQVLPQMGRLKRVDLEKNQIXALGAWLLAEGLAQGSSIQVIRLWNNPIPCDMAQHLKSQEPRLDFAFFDNQPQAPWGX

SEQ ID NO: 17847 - protein, 702 aa, Homo sapiens
  MOD_RES (78)..(78): Selenocysteine
  MOD_RES (90)..(90): Selenocysteine
  MOD_RES (133)..(133): Selenocysteine
  MOD_RES (209)..(209): Selenocysteine
  MOD_RES (232)..(232): Selenocysteine
  MOD_RES (239)..(239): Selenocysteine
  MOD_RES (276)..(276): Selenocysteine
  MOD_RES (281)..(281): Selenocysteine
  MOD_RES (305)..(305): Selenocysteine
  MOD_RES (324)..(324): Selenocysteine
  MOD_RES (337)..(337): Selenocysteine
  MOD_RES (356)..(356): Selenocysteine
  MOD_RES (374)..(374): Selenocysteine
  MOD_RES (445)..(445): Selenocysteine
  MOD_RES (478)..(478): Selenocysteine
  MOD_RES (496)..(496): Selenocysteine
  MOD_RES (505)..(505): Selenocysteine
  MOD_RES (508)..(508): Selenocysteine
  MOD_RES (510)..(510): Selenocysteine
  MOD_RES (562)..(562): Selenocysteine
  MOD_RES (569)..(569): Selenocysteine
  MOD_RES (612)..(612): Selenocysteine
  MOD_RES (649)..(649): Selenocysteine
QKCQLQVHDAEALIALLQEGPHLEEVDLSGNQLEDEGCRLMAEAASQLHIARKLDLSNNGLSVAGVHCVLRAVSACWXLAELHISLQHKXVIFMFAQEPEEQKGPQERAAFLDSLMLQMPSELPLSSRRMRLXHCGLQEKHLEQLCKALGGSCHLGHLHLDFSGNALGDEGAARLAQLLPGLGALQSLNLSENGLSLDAVLGLVRCFSXLQWLFRLDISFESQHILLRGDKXSRDMWAXGSLPDFPAAAKFLGFRQRCIPRSLCLSECPLEPPSLXRLCAXLKDCPGPLELQLSCEFLSDQSLEXLLDCLPQLPQLSLLQLSQXGLSPKSPFLLANXLSLCPRVKKVDLRSLHHAXLHFRSNEEEEGVCCGRFXGCSLSQEHVESLCWLLSKCKDLSQVDLSANLLGDSGLRCLLECLPQVPISGLLDLSHNSISQESALYLLEXLPSCPRVREASVNLGSEQSFRIHFSREDQAGKXLRLSECSFRPEHVSRLAXGLSKSLQLXELXLXQCCLGQKQLAILLSLVGRPAGLFSLRVQEPWADRARVLSLLEVCAQASGSVXEISISEXQQQLCVQLEFPRQEENPEAVALRLAHCDLGAHHSLLVGQLMEXCARLQQLSLSQVNLCEDDDASSLLLQSLLLSLSELKXFRIQSSQDPGRLLPDLLPFDPHQADLQLCEHRGPRPPGIWSGPLPPLGGAGLV

SEQ ID NO: 17848 - protein, 110 aa, Homo sapiens
  MOD_RES (1)..(1): Any amino acid
  MOD_RES (26)..(26): Selenocysteine
  MOD_RES (53)..(53): Selenocysteine
  MOD_RES (58)..(58): Selenocysteine
  MOD_RES (65)..(65): Selenocysteine
  MOD_RES (73)..(73): Selenocysteine
  MOD_RES (109)..(109): Selenocysteine
XASGLGHCHHLEELDLSNNQFDEEGXKALMRALEGKWMLKRLDLSHLLLNSSXLALLXHRLSQMXCLQSLSLXLSPRLECSGMISLHCNLCLLGSSDSGASAAQVAGIXD

SEQ ID NO: 17849 - protein, 387 aa, Homo sapiens
  MOD_RES (1)..(1): Any amino acid
  MOD_RES (13)..(13): Selenocysteine
  MOD_RES (89)..(89): Selenocysteine
  MOD_RES (112)..(112): Selenocysteine
  MOD_RES (119)..(119): Selenocysteine
  MOD_RES (156)..(156): Selenocysteine
  MOD_RES (161)..(161): Selenocysteine
  MOD_RES (185)..(185): Selenocysteine
  MOD_RES (204)..(204): Selenocysteine
  MOD_RES (217)..(217): Selenocysteine
  MOD_RES (236)..(236): Selenocysteine
  MOD_RES (296)..(296): Selenocysteine
  MOD_RES (329)..(329): Selenocysteine
  MOD_RES (347)..(347): Selenocysteine
  MOD_RES (356)..(356): Selenocysteine
  MOD_RES (359)..(359): Selenocysteine
  MOD_RES (361)..(361): Selenocysteine
XELPLSSRRMRLXHCGLQEKHLEQLCKALGGSCHLGHLHLDFSGNALGDEGAARLAQLLPGLGALQSLNLSENGLSLDAVLGLVRCFSXLQWLFRLDISFESQHILLRGDKXSRDMWAXGSLPDFPAAAKFLGFRQRCIPRSLCLSECPLEPPSLXRLCAXLKDCPGPLELQLSCEFLSDQSLEXLLDCLPQLPQLSLLQLSQXGLSPKSPFLLANXLSLCPRVKKVDLRSLHHAXLHFRSNEEEEGVCCGLSANLLGDSGLRCLLECLPQVPISGLLDLSHNSISQESALYLLEXLPSCPRVREASVNLGSEQSFRIHFSREDQAGKXLRLSECSFRPEHVSRLAXGLSKSLQLXELXLXQCCLGQKQLAILLSLVGRPAGLFSLS

SEQ ID NO: 17850 - protein, 1180 aa, Homo sapiens
  MOD_RES (1)..(1): Any amino acid
  MOD_RES (21)..(21): Selenocysteine
  MOD_RES (25)..(25): Selenocysteine
  MOD_RES (43)..(43): Selenocysteine
  MOD_RES (79)..(79): Selenocysteine
  MOD_RES (88)..(88): Selenocysteine
  MOD_RES (98)..(98): Selenocysteine
  MOD_RES (148)..(148): Selenocysteine
  MOD_RES (189)..(189): Selenocysteine
  MOD_RES (207)..(207): Selenocysteine
  MOD_RES (223)..(223): Selenocysteine
  MOD_RES (243)..(243): Selenocysteine
  MOD_RES (248)..(248): Selenocysteine
  MOD_RES (254)..(254): Selenocysteine
  MOD_RES (261)..(261): Selenocysteine
  MOD_RES (266)..(266): Selenocysteine
  MOD_RES (289)..(289): Selenocysteine
  MOD_RES (291)..(291): Selenocysteine
  MOD_RES (295)..(295): Selenocysteine
  MOD_RES (304)..(304): Selenocysteine
  MOD_RES (316)..(316): Selenocysteine
  MOD_RES (325)..(325): Selenocysteine
  MOD_RES (357)..(357): Selenocysteine
  MOD_RES (361)..(361): Selenocysteine
  MOD_RES (375)..(375): Selenocysteine
  MOD_RES (384)..(384): Selenocysteine
  MOD_RES (400)..(400): Selenocysteine
  MOD_RES (402)..(402): Selenocysteine
  MOD_RES (406)..(406): Selenocysteine
  MOD_RES (408)..(408): Selenocysteine
  MOD_RES (465)..(465): Selenocysteine
  MOD_RES (480)..(480): Selenocysteine
  MOD_RES (539)..(539): Selenocysteine
  MOD_RES (549)..(549): Selenocysteine
  MOD_RES (552)..(552): Selenocysteine
  MOD_RES (571)..(571): Selenocysteine
  MOD_RES (573)..(574): Selenocysteine
  MOD_RES (599)..(599): Selenocysteine
  MOD_RES (680)..(680): Selenocysteine
  MOD_RES (692)..(692): Selenocysteine
  MOD_RES (735)..(735): Selenocysteine
  MOD_RES (811)..(811): Selenocysteine
  MOD_RES (834)..(834): Selenocysteine
  MOD_RES (841)..(841): Selenocysteine
  MOD_RES (878)..(878): Selenocysteine
  MOD_RES (883)..(883): Selenocysteine
  MOD_RES (907)..(907): Selenocysteine
  MOD_RES (926)..(926): Selenocysteine
  MOD_RES (939)..(939): Selenocysteine
  MOD_RES (958)..(958): Selenocysteine
  MOD_RES (975)..(975): Selenocysteine
  MOD_RES (1046)..(1046): Selenocysteine
  MOD_RES (1079)..(1079): Selenocysteine
  MOD_RES (1097)..(1097): Selenocysteine
  MOD_RES (1106)..(1106): Selenocysteine
  MOD_RES (1109)..(1109): Selenocysteine
  MOD_RES (1111)..(1111): Selenocysteine
  MOD_RES (1140)..(1140): Selenocysteine
  MOD_RES (1143)..(1143): Selenocysteine
  MOD_RES (1150)..(1150): Selenocysteine
  MOD_RES (1173)..(1173): Selenocysteine
  MOD_RES (1177)..(1177): Selenocysteine
XHLNCFQALFLFEFRQLNLIXRFLXPSELLFDLYLSPESDHDXVFQYLEKNADQVLLIFDGLDEALQPMGPDGPGPVLXLFSHLCNGXLLPGCRVMAXSRPGKLPACLPAEAAMVHMLGFDGPRVEEYVNHFFSAQPSREGALVELQXNGRLRSLCAVPALCQVACLCLHHLLPDHAPGQSVALLPNMXQLYMQMVLALSPPGHLPXSSLLDLGEVALRGLEXGKVIFYAKDIAPPLIAFGAXHSLLXSFCVCXGPGHQQXGYAFXHLSLQEFLAALHLMASPKVNKDXLXQYVXLHSRWVQRXKARLGLSDHLPXFLAGLASCXCRPFLSHLAQGNEDCVGAKQAAVVQVLKKLAXRKLXGPKVVELCHCVDEXQEPELASLXAQSLPYQLPFHNFPLXCXDLAXLXNILEHREAPIHLDFDGCPLEPHCPEALVGCGQIENLSFKSRKCGDAFAEALSRSLPXMGRLQMLGLAGSKIXARGISHLVKALPLCPQLKEVSFRDNQLSDQVVLNIVEVLPHLPRLRKLDLSSNSICVSXLLCLARVAVXCPXVRMLQAREADLIFLLSPPXEXXAELQRAPDLQESDGQRKGAQSRSLXLRLQKCQLQVHDAEALIALLQEGPHLEEVDLSGNQLEDEGCRLMAEAASQLHIARKLDLSNNGLSVAGVHCVLRAVSACWXLAELHISLQHKXVIFMFAQEPEEQKGPQERAAFLDSLMLQMPSELPLSSRRMRLXHCGLQEKHLEQLCKALGGSCHLGHLHLDFSGNALGDEGAARLAQLLPGLGALQSLNLSENGLSLDAVLGLVRCFSXLQWLFRLDISFESQHILLRGDKXSRDMWAXGSLPDFPAAAKFLGFRQRCIPRSLCLSECPLEPPSLXRLCAXLKDCPGPLELQLSCEFLSDQSLEXLLDCLPQLPQLSLLQLSQXGLSPKSPFLLANXLSLCPRVKKVDLRSLHHAXLHFRSNEEEEGVCCGFXGCSLSQEHVESLCWLLSKCKDLSQVDLSANLLGDSGLRCLLECLPQVPISGLLDLSHNSISQESALYLLEXLPSCPRVREASVNLGSEQSFRIHFSREDQAGKXLRLSECSFRPEHVSRLAXGLSKSLQLXELXLXQCCLGQKQLAILLSLVGRPAGLFSLRDSXRHXEKLSFPXLEACALGFKKKRKKERKKVSEDXELRXKIN

SEQ ID NO: 17851 - protein, 157 aa, Homo sapiens
  MOD_RES (1)..(1): Any amino acid
  MOD_RES (46)..(46): Selenocysteine
  MOD_RES (79)..(79): Selenocysteine
  MOD_RES (97)..(97): Selenocysteine
  MOD_RES (106)..(106): Selenocysteine
  MOD_RES (109)..(109): Selenocysteine
  MOD_RES (111)..(111): Selenocysteine
  MOD_RES (145)..(145): Selenocysteine
  MOD_RES (150)..(150): Selenocysteine
XLSANLLGDSGLRCLLECLPQVPISGLLDLSHNSISQESALYLLEXLPSCPRVREASVNLGSEQSFRIHFSREDQAGKXLRLSECSFRPEHVSRLAXGLSKSLQLXELXLXQCCLGQKQLAILLSLVGRPAGLFSLRLHKAHREXVLPHXGGLCFGI

SEQ ID NO: 17852 - protein, 1057 aa, Homo sapiens
  MOD_RES (1)..(1): Any amino acid
  MOD_RES (18)..(18): Selenocysteine
  MOD_RES (54)..(54): Selenocysteine
  MOD_RES (63)..(63): Selenocysteine
  MOD_RES (73)..(73): Selenocysteine
  MOD_RES (123)..(123): Selenocysteine
  MOD_RES (164)..(164): Selenocysteine
  MOD_RES (182)..(182): Selenocysteine
  MOD_RES (198)..(198): Selenocysteine
  MOD_RES (218)..(218): Selenocysteine
  MOD_RES (223)..(223): Selenocysteine
  MOD_RES (229)..(229): Selenocysteine
  MOD_RES (236)..(236): Selenocysteine
  MOD_RES (241)..(241): Selenocysteine
  MOD_RES (264)..(264): Selenocysteine
  MOD_RES (266)..(266): Selenocysteine
  MOD_RES (270)..(270): Selenocysteine
  MOD_RES (279)..(279): Selenocysteine
  MOD_RES (291)..(291): Selenocysteine
  MOD_RES (300)..(300): Selenocysteine
  MOD_RES (332)..(332): Selenocysteine
  MOD_RES (336)..(336): Selenocysteine
  MOD_RES (350)..(350): Selenocysteine
  MOD_RES (359)..(359): Selenocysteine
  MOD_RES (375)..(375): Selenocysteine
  MOD_RES (377)..(377): Selenocysteine
  MOD_RES (381)..(381): Selenocysteine
  MOD_RES (383)..(383): Selenocysteine
  MOD_RES (440)..(440): Selenocysteine
  MOD_RES (455)..(455): Selenocysteine
  MOD_RES (514)..(514): Selenocysteine
  MOD_RES (524)..(524): Selenocysteine
  MOD_RES (527)..(527): Selenocysteine
  MOD_RES (546)..(546): Selenocysteine
  MOD_RES (548)..(549): Selenocysteine
  MOD_RES (574)..(574): Selenocysteine
  MOD_RES (655)..(655): Selenocysteine
  MOD_RES (667)..(667): Selenocysteine
  MOD_RES (710)..(710): Selenocysteine
  MOD_RES (786)..(786): Selenocysteine
  MOD_RES (809)..(809): Selenocysteine
  MOD_RES (816)..(816): Selenocysteine
  MOD_RES (853)..(853): Selenocysteine
  MOD_RES (858)..(858): Selenocysteine
  MOD_RES (882)..(882): Selenocysteine
  MOD_RES (901)..(901): Selenocysteine
  MOD_RES (914)..(914): Selenocysteine
  MOD_RES (933)..(933): Selenocysteine
  MOD_RES (951)..(951): Selenocysteine
  MOD_RES (1022)..(1022): Selenocysteine
XSELLFDLYLSPESDHDXVFQYLEKNADQVLLIFDGLDEALQPMGPDGPGPVLXLFSHLCNGXLLPGCRVMAXSRPGKLPACLPAEAAMVHMLGFDGPRVEEYVNHFFSAQPSREGALVELQXNGRLRSLCAVPALCQVACLCLHHLLPDHAPGQSVALLPNMXQLYMQMVLALSPPGHLPXSSLLDLGEVALRGLEXGKVIFYAKDIAPPLIAFGAXHSLLXSFCVCXGPGHQQXGYAFXHLSLQEFLAALHLMASPKVNKDXLXQYVXLHSRWVQRXKARLGLSDHLPXFLAGLASCXCRPFLSHLAQGNEDCVGAKQAAVVQVLKKLAXRKLXGPKVVELCHCVDEXQEPELASLXAQSLPYQLPFHNFPLXCXDLAXLXNILEHREAPIHLDFDGCPLEPHCPEALVGCGQIENLSFKSRKCGDAFAEALSRSLPXMGRLQMLGLAGSKIXARGISHLVKALPLCPQLKEVSFRDNQLSDQVVLNIVEVLPHLPRLRKLDLSSNSICVSXLLCLARVAVXCPXVRMLQAREADLIFLLSPPXEXXAELQRAPDLQESDGQRKGAQSRSLXLRLQKCQLQVHDAEALIALLQEGPHLEEVDLSGNQLEDEGCRLMAEAASQLHIARKLDLSNNGLSVAGVHCVLRAVSACWXLAELHISLQHKXVIFMFAQEPEEQKGPQERAAFLDSLMLQMPSELPLSSRRMRLXHCGLQEKHLEQLCKALGGSCHLGHLHLDFSGNALGDEGAARLAQLLPGLGALQSLNLSENGLSLDAVLGLVRCFSXLQWLFRLDISFESQHILLRGDKXSRDMWAXGSLPDFPAAAKFLGFRQRCIPRSLCLSECPLEPPSLXRLCAXLKDCPGPLELQLSCEFLSDQSLEXLLDCLPQLPQLSLLQLSQXGLSPKSPFLLANXLSLCPRVKKVDLRSLHHAXLHFRSNEEEEGVCCGRFXGCSLSQEHVESLCWLLSKCKDLSQVDLSANLLGDSGLRCLLECLPQVPISGLLDLSHNSISQESALYLLEXLPSCPRVREASVKCLGSWHVWAPCFPRPFSLQPGL

SEQ ID NO: 17853 - protein, 325 aa, Homo sapiens
  MOD_RES (1)..(1): Any amino acid
  MOD_RES (22)..(22): Selenocysteine
  MOD_RES (29)..(29): Selenocysteine
  MOD_RES (66)..(66): Selenocysteine
  MOD_RES (71)..(71): Selenocysteine
  MOD_RES (95)..(95): Selenocysteine
  MOD_RES (114)..(114): Selenocysteine
  MOD_RES (127)..(127): Selenocysteine
  MOD_RES (146)..(146): Selenocysteine
  MOD_RES (163)..(163): Selenocysteine
  MOD_RES (234)..(234): Selenocysteine
  MOD_RES (267)..(267): Selenocysteine
  MOD_RES (285)..(285): Selenocysteine
  MOD_RES (294)..(294): Selenocysteine
  MOD_RES (297)..(297): Selenocysteine
  MOD_RES (299)..(299): Selenocysteine
XWLFRLDISFESQHILLRGDKXSRDMWAXGSLPDFPAAAKFLGFRQRCIPRSLCLSECPLEPPSLXRLCAXLKDCPGPLELQLSCEFLSDQSLEXLLDCLPQLPQLSLLQLSQXGLSPKSPFLLANXLSLCPRVKKVDLRSLHHAXLHFRSNEEEEGVCCGFXGCSLSQEHVESLCWLLSKCKDLSQVDLSANLLGDSGLRCLLECLPQVPISGLLDLSHNSISQESALYLLEXLPSCPRVREASVNLGSEQSFRIHFSREDQAGKXLRLSECSFRPEHVSRLAXGLSKSLQLXELXLXQCCLGQKQLAILLSLVGRPAGLFSLS

SEQ ID NO: 17854 - protein, 892 aa, Homo sapiens
  MOD_RES (4)..(4): Selenocysteine
  MOD_RES (15)..(15): Selenocysteine
  MOD_RES (34)..(34): Selenocysteine
  MOD_RES (36)..(36): Selenocysteine
  MOD_RES (62)..(62): Selenocysteine
  MOD_RES (76)..(76): Selenocysteine
  MOD_RES (98)..(98): Selenocysteine
  MOD_RES (111)..(111): Selenocysteine
  MOD_RES (120)..(120): Selenocysteine
  MOD_RES (128)..(128): Selenocysteine
  MOD_RES (158)..(158): Selenocysteine
  MOD_RES (179)..(179): Selenocysteine
  MOD_RES (186)..(186): Selenocysteine
  MOD_RES (198)..(198): Selenocysteine
  MOD_RES (212)..(212): Selenocysteine
  MOD_RES (260)..(260): Selenocysteine
  MOD_RES (320)..(320): Selenocysteine
  MOD_RES (341)..(342): Selenocysteine
  MOD_RES (345)..(345): Selenocysteine
  MOD_RES (399)..(399): Selenocysteine
  MOD_RES (412)..(412): Selenocysteine
  MOD_RES (427)..(427): Selenocysteine
  MOD_RES (430)..(432): Selenocysteine
  MOD_RES (542)..(542): Selenocysteine
  MOD_RES (546)..(546): Selenocysteine
  MOD_RES (559)..(559): Selenocysteine
  MOD_RES (571)..(571): Selenocysteine
  MOD_RES (605)..(605): Selenocysteine
  MOD_RES (669)..(669): Selenocysteine
  MOD_RES (686)..(686): Selenocysteine
  MOD_RES (696)..(696): Selenocysteine
  MOD_RES (712)..(712): Selenocysteine
  MOD_RES (774)..(774): Selenocysteine
  MOD_RES (826)..(826): Selenocysteine
  MOD_RES (836)..(836): Selenocysteine
  MOD_RES (861)..(861): Selenocysteine
  MOD_RES (874)..(874): Selenocysteine
  MOD_RES (884)..(884): Selenocysteine
MLRXAGRDGLCRLSXYLEELEAVELKKFKLYLGXAXELGEGKIPWGSMEKAGPLEMAQLLIXHFGPEEAWRLALSXFERINRKDLWERGQREDLVRDXPPGGPSSLGNQSXCLLEVSLVXPRKDPQEXYRDYVRRKFRLMEDRNARLGECVNLSHRYXRLLLVKEHSNPMQVQQQLLDXGRGHARXVGHQASPIKIEXLFEPDEERPEPPRXVVMQGAAGIGKSMLAHKVMLDWADGKLFQGRFDYLFYINCREMNQSAXECSMQDLIFSCWPEPSAPLQELIRVPERLLFIIDGFDELKPSFHDPQGPWCLCWEEKRPXELLLNSLIRKKLLPELSLLIXXRPXALEKLHRLLEHPRHVEILGFSEAERKEYFYKYFHNAEQAGQVFNYVRDNEPLFXMCFVPLVCWVVCXCLQQQLEGGGLLRQXSRXXXAVYMLYLLSLMQPKPGAPRLQPPPNQRGLCSLAADGLWNQKILFEEQDLRKHGLDGEDVSAFLNMNIFQKDINCERYYSFIHLSFQEFFAAMYYILDEGEGGAGPDQDVXRLLXEYAFSERSFLALXSRFLFGLLNEEXRSHLEKSLCWKVSPHIKMDLLQWIQSKAQSDGSXLQQGSLEFFSCLYEIQEEEFIQQALSHFQVIVVSNIASKMEHMVSSFCLKRCRSAQVLHLYGAXYSADGEDRARCSAGAHXLLVQLRPERXVLLDAYSEHLAAALCXNPNLIELSLYRNALGSRGVKLLCQGLRHPNCKLQNLRLKRCRISSSACEDLSAALIANKNLXRMDLSGNGVGFPGMMLLCEGLRHPQCRLQMIQLRKCQLESGACQEMASVLGXNPHLVELDLXGNALEDLGLRLLCQGLRHPVCRLRXLWWLFGMDLNKMXHSRLAALRVXKPYLDIGC

SEQ ID NO: 17855 - protein, 1004 aa, Homo sapiens
  MOD_RES (4)..(4): Selenocysteine
  MOD_RES (15)..(15): Selenocysteine
  MOD_RES (34)..(34): Selenocysteine
  MOD_RES (36)..(36): Selenocysteine
  MOD_RES (62)..(62): Selenocysteine
  MOD_RES (76)..(76): Selenocysteine
  MOD_RES (98)..(98): Selenocysteine
  MOD_RES (111)..(111): Selenocysteine
  MOD_RES (120)..(120): Selenocysteine
  MOD_RES (128)..(128): Selenocysteine
  MOD_RES (158)..(158): Selenocysteine
  MOD_RES (179)..(179): Selenocysteine
  MOD_RES (186)..(186): Selenocysteine
  MOD_RES (198)..(198): Selenocysteine
  MOD_RES (212)..(212): Selenocysteine
  MOD_RES (260)..(260): Selenocysteine
  MOD_RES (320)..(320): Selenocysteine
  MOD_RES (341)..(342): Selenocysteine
  MOD_RES (345)..(345): Selenocysteine
  MOD_RES (399)..(399): Selenocysteine
  MOD_RES (412)..(412): Selenocysteine
  MOD_RES (427)..(427): Selenocysteine
  MOD_RES (430)..(432): Selenocysteine
  MOD_RES (542)..(542): Selenocysteine
  MOD_RES (546)..(546): Selenocysteine
  MOD_RES (559)..(559): Selenocysteine
  MOD_RES (571)..(571): Selenocysteine
  MOD_RES (605)..(605): Selenocysteine
  MOD_RES (669)..(669): Selenocysteine
  MOD_RES (686)..(686): Selenocysteine
  MOD_RES (695)..(695): Selenocysteine
  MOD_RES (711)..(711): Selenocysteine
  MOD_RES (773)..(773): Selenocysteine
  MOD_RES (825)..(825): Selenocysteine
  MOD_RES (835)..(835): Selenocysteine
  MOD_RES (860)..(860): Selenocysteine
  MOD_RES (869)..(869): Selenocysteine
  MOD_RES (879)..(879): Selenocysteine
  MOD_RES (912)..(912): Selenocysteine
  MOD_RES (917)..(917): Selenocysteine
  MOD_RES (926)..(926): Selenocysteine
  MOD_RES (936)..(936): Selenocysteine
  MOD_RES (942)..(942): Selenocysteine
  MOD_RES (944)..(944): Selenocysteine
  MOD_RES (949)..(949): Selenocysteine
  MOD_RES (956)..(956): Selenocysteine
  MOD_RES (986)..(986): Selenocysteine
  MOD_RES (996)..(996): Selenocysteine
MLRXAGRDGLCRLSXYLEELEAVELKKFKLYLGXAXELGEGKIPWGSMEKAGPLEMAQLLIXHFGPEEAWRLALSXFERINRKDLWERGQREDLVRDXPPGGPSSLGNQSXCLLEVSLVXPRKDPQEXYRDYVRRKFRLMEDRNARLGECVNLSHRYXRLLLVKEHSNPMQVQQQLLDXGRGHARXVGHQASPIKIEXLFEPDEERPEPPRXVVMQGAAGIGKSMLAHKVMLDWADGKLFQGRFDYLFYINCREMNQSAXECSMQDLIFSCWPEPSAPLQELIRVPERLLFIIDGFDELKPSFHDPQGPWCLCWEEKRPXELLLNSLIRKKLLPELSLLIXXRPXALEKLHRLLEHPRHVEILGFSEAERKEYFYKYFHNAEQAGQVFNYVRDNEPLFXMCFVPLVCWVVCXCLQQQLEGGGLLRQXSRXXXAVYMLYLLSLMQPKPGAPRLQPPPNQRGLCSLAADGLWNQKILFEEQDLRKHGLDGEDVSAFLNMNIFQKDINCERYYSFIHLSFQEFFAAMYYILDEGEGGAGPDQDVXRLLXEYAFSERSFLALXSRFLFGLLNEEXRSHLEKSLCWKVSPHIKMDLLQWIQSKAQSDGSXLQQGSLEFFSCLYEIQEEEFIQQALSHFQVIVVSNIASKMEHMVSSFCLKRCRSAQVLHLYGAXYSADGEDRARCSAGAHXLLVQLPERXVLLDAYSEHLAAALCXNPNLIELSLYRNALGSRGVKLLCQGLRHPNCKLQNLRLKRCRISSSACEDLSAALIANKNLXRMDLSGNGVGFPGMMLLCEGLRHPQCRLQMIQLRKCQLESGACQEMASVLGXNPHLVELDLXGNALEDLGLRLLCQGLRHPVCRLRXLWLKICRLXAAACDELASXLSVNQSLRELDLSLNELGDLGVLLLCEGLRHPXCKLQXLRLDSCGLXAKACENLYFXLGINQXLXDLYLXNNALGDXGVRLLCKRLSHPGCKLRVLWLFGMDLNKMXHSRLAALRVXKPYLDIGC

SEQ ID NO: 17856 - protein, 1006 aa, Homo sapiens
  MOD_RES (4)..(4): Selenocysteine
  MOD_RES (15)..(15): Selenocysteine
  MOD_RES (34)..(34): Selenocysteine
  MOD_RES (36)..(36): Selenocysteine
  MOD_RES (62)..(62): Selenocysteine
  MOD_RES (76)..(76): Selenocysteine
  MOD_RES (98)..(98): Selenocysteine
  MOD_RES (111)..(111): Selenocysteine
  MOD_RES (120)..(120): Selenocysteine
  MOD_RES (128)..(128): Selenocysteine
  MOD_RES (158)..(158): Selenocysteine
  MOD_RES (179)..(179): Selenocysteine
  MOD_RES (186)..(186): Selenocysteine
  MOD_RES (198)..(198): Selenocysteine
  MOD_RES (212)..(212): Selenocysteine
  MOD_RES (260)..(260): Selenocysteine
  MOD_RES (320)..(320): Selenocysteine
  MOD_RES (341)..(342): Selenocysteine
  MOD_RES (345)..(345): Selenocysteine
  MOD_RES (399)..(399): Selenocysteine
  MOD_RES (412)..(412): Selenocysteine
  MOD_RES (427)..(427): Selenocysteine
  MOD_RES (430)..(432): Selenocysteine
  MOD_RES (542)..(542): Selenocysteine
  MOD_RES (546)..(546): Selenocysteine
  MOD_RES (559)..(559): Selenocysteine
  MOD_RES (571)..(571): Selenocysteine
  MOD_RES (605)..(605): Selenocysteine
  MOD_RES (669)..(669): Selenocysteine
  MOD_RES (686)..(686): Selenocysteine
  MOD_RES (696)..(696): Selenocysteine
  MOD_RES (712)..(712): Selenocysteine
  MOD_RES (774)..(774): Selenocysteine
  MOD_RES (826)..(826): Selenocysteine
  MOD_RES (836)..(836): Selenocysteine
  MOD_RES (861)..(861): Selenocysteine
  MOD_RES (870)..(870): Selenocysteine
  MOD_RES (880)..(880): Selenocysteine
  MOD_RES (913)..(913): Selenocysteine
  MOD_RES (918)..(918): Selenocysteine
  MOD_RES (988)..(988): Selenocysteine
  MOD_RES (998)..(998): Selenocysteine
MLRXAGRDGLCRLSXYLEELEAVELKKFKLYLGXAXELGEGKIPWGSMEKAGPLEMAQLLIXHFGPEEAWRLALSXFERINRKDLWERGQREDLVRDXPPGGPSSLGNQSXCLLEVSLVXPRKDPQEXYRDYVRRKFRLMEDRNARLGECVNLSHRYXRLLLVKEHSNPMQVQQQLLDXGRGHARXVGHQASPIKIEXLFEPDEERPEPPRXVVMQGAAGIGKSMLAHKVMLDWADGKLFQGRFDYLFYINCREMNQSAXECSMQDLIFSCWPEPSAPLQELIRVPERLLFIIDGFDELKPSFHDPQGPWCLCWEEKRPXELLLNSLIRKKLLPELSLLIXXRPXALEKLHRLLEHPRHVEILGFSEAERKEYFYKYFHNAEQAGQVFNYVRDNEPLFXMCFVPLVCWVVCXCLQQQLEGGGLLRQXSRXXXAVYMLYLLSLMQPKPGAPRLQPPPNQRGLCSLAADGLWNQKILFEEQDLRKHGLDGEDVSAFLNMNIFQKDINCERYYSFIHLSFQEFFAAMYYILDEGEGGAGPDQDVXRLLXEYAFSERSFLALXSRFLFGLLNEEXRSHLEKSLCWKVSPHIKMDLLQWIQSKAQSDGSXLQQGSLEFFSCLYEIQEEEFIQQALSHFQVIVVSNIASKMEHMVSSFCLKRCRSAQVLHLYGAXYSADGEDRARCSAGAHXLLVQLRPERXVLLDAYSEHLAAALCXNPNLIELSLYRNALGSRGVKLLCQGLRHPNCKLQNLRLKRCRISSSACEDLSAALIANKNLXRMDLSGNGVGFPGMMLLCEGLRHPQCRLQMIQLRKCQLESGACQEMASVLGXNPHLVELDLXGNALEDLGLRLLCQGLRHPVCRLRXLWLKICRLXAAACDELASXLSVNQSLRELDLSLNELGDLGVLLLCEGLRHPXCKLQXLRLGICRLGSAACEGLSVVLQANHNLRELDLSFNDLGDWGLWLLAEGLQHPACRLQKLWWLFGMDLNKMXHSRLAALRVXKPYLDIGC

SEQ ID NO: 17857 - protein, 1061 aa, Homo sapiens
  MOD_RES (4)..(4): Selenocysteine
  MOD_RES (15)..(15): Selenocysteine
  MOD_RES (34)..(34): Selenocysteine
  MOD_RES (36)..(36): Selenocysteine
  MOD_RES (62)..(62): Selenocysteine
  MOD_RES (76)..(76): Selenocysteine
  MOD_RES (98)..(98): Selenocysteine
  MOD_RES (111)..(111): Selenocysteine
  MOD_RES (120)..(120): Selenocysteine
  MOD_RES (128)..(128): Selenocysteine
  MOD_RES (158)..(158): Selenocysteine
  MOD_RES (179)..(179): Selenocysteine
  MOD_RES (186)..(186): Selenocysteine
  MOD_RES (198)..(198): Selenocysteine
  MOD_RES (212)..(212): Selenocysteine
  MOD_RES (260)..(260): Selenocysteine
  MOD_RES (320)..(320): Selenocysteine
  MOD_RES (341)..(342): Selenocysteine
  MOD_RES (345)..(345): Selenocysteine
  MOD_RES (399)..(399): Selenocysteine
  MOD_RES (412)..(412): Selenocysteine
  MOD_RES (427)..(427): Selenocysteine
  MOD_RES (430)..(432): Selenocysteine
  MOD_RES (542)..(542): Selenocysteine
  MOD_RES (546)..(546): Selenocysteine
  MOD_RES (559)..(559): Selenocysteine
  MOD_RES (571)..(571): Selenocysteine
  MOD_RES (605)..(605): Selenocysteine
  MOD_RES (669)..(669): Selenocysteine
  MOD_RES (686)..(686): Selenocysteine
  MOD_RES (695)..(695): Selenocysteine
  MOD_RES (711)..(711): Selenocysteine
  MOD_RES (773)..(773): Selenocysteine
  MOD_RES (825)..(825): Selenocysteine
  MOD_RES (835)..(835): Selenocysteine
  MOD_RES (860)..(860): Selenocysteine
  MOD_RES (869)..(869): Selenocysteine
  MOD_RES (879)..(879): Selenocysteine
  MOD_RES (912)..(912): Selenocysteine
  MOD_RES (917)..(917): Selenocysteine
  MOD_RES (983)..(983): Selenocysteine
  MOD_RES (993)..(993): Selenocysteine
  MOD_RES (999)..(999): Selenocysteine
  MOD_RES (1001)..(1001): Selenocysteine
  MOD_RES (1006)..(1006): Selenocysteine
  MOD_RES (1013)..(1013): Selenocysteine
  MOD_RES (1043)..(1043): Selenocysteine
  MOD_RES (1053)..(1053): Selenocysteine
MLRXAGRDGLCRLSXYLEELEAVELKKFKLYLGXAXELGEGKIPWGSMEKAGPLEMAQLLIXHFGPEEAWRLALSXFERINRKDLWERGQREDLVRDXPPGGPSSLGNQSXCLLEVSLVXPRKDPQEXYRDYVRRKFRLMEDRNARLGECVNLSHRYXRLLLVKEHSNPMQVQQQLLDXGRGHARXVGHQASPIKIEXLFEPDEERPEPPRXVVMQGAAGIGKSMLAHKVMLDWADGKLFQGRFDYLFYINCREMNQSAXECSMQDLIFSCWPEPSAPLQELIRVPERLLFIIDGFDELKPSFHDPQGPWCLCWEEKRPXELLLNSLIRKKLLPELSLLIXXRPXALEKLHRLLEHPRHVEILGFSEAERKEYFYKYFHNAEQAGQVFNYVRDNEPLFXMCFVPLVCWVVCXCLQQQLEGGGLLRQXSRXXXAVYMLYLLSLMQPKPGAPRLQPPPNQRGLCSLAADGLWNQKILFEEQDLRKHGLDGEDVSAFLNMNIFQKDINCERYYSFIHLSFQEFFAAMYYILDEGEGGAGPDQDVXRLLXEYAFSERSFLALXSRFLFGLLNEEXRSHLEKSLCWKVSPHIKMDLLQWIQSKAQSDGSXLQQGSLEFFSCLYEIQEEEFIQQALSHFQVIVVSNIASKMEHMVSSFCLKRCRSAQVLHLYGAXYSADGEDRARCSAGAHXLLVQLPERXVLLDAYSEHLAAALCXNPNLIELSLYRNALGSRGVKLLCQGLRHPNCKLQNLRLKRCRISSSACEDLSAALIANKNLXRMDLSGNGVGFPGMMLLCEGLRHPQCRLQMIQLRKCQLESGACQEMASVLGXNPHLVELDLXGNALEDLGLRLLCQGLRHPVCRLRXLWLKICRLXAAACDELASXLSVNQSLRELDLSLNELGDLGVLLLCEGLRHPXCKLQXLRLGICRLGSAACEGLSVVLQANHNLRELDLSFNDLGDWGLWLLAEGLQHPACRLQKLWLDSCGLXAKACENLYFXLGINQXLXDLYLXNNALGDXGVRLLCKRLSHPGCKLRVLWLFGMDLNKMXHSRLAALRVXKPYLDIGC

SEQ ID NO: 17858 - protein, 1062 aa, Homo sapiens
  MOD_RES (4)..(4): Selenocysteine
  MOD_RES (15)..(15): Selenocysteine
  MOD_RES (34)..(34): Selenocysteine
  MOD_RES (36)..(36): Selenocysteine
  MOD_RES (62)..(62): Selenocysteine
  MOD_RES (76)..(76): Selenocysteine
  MOD_RES (98)..(98): Selenocysteine
  MOD_RES (111)..(111): Selenocysteine
  MOD_RES (120)..(120): Selenocysteine
  MOD_RES (128)..(128): Selenocysteine
  MOD_RES (158)..(158): Selenocysteine
  MOD_RES (179)..(179): Selenocysteine
  MOD_RES (186)..(186): Selenocysteine
  MOD_RES (198)..(198): Selenocysteine
  MOD_RES (212)..(212): Selenocysteine
  MOD_RES (260)..(260): Selenocysteine
  MOD_RES (320)..(320): Selenocysteine
  MOD_RES (341)..(342): Selenocysteine
  MOD_RES (345)..(345): Selenocysteine
  MOD_RES (399)..(399): Selenocysteine
  MOD_RES (412)..(412): Selenocysteine
  MOD_RES (427)..(427): Selenocysteine
  MOD_RES (430)..(432): Selenocysteine
  MOD_RES (542)..(542): Selenocysteine
  MOD_RES (546)..(546): Selenocysteine
  MOD_RES (559)..(559): Selenocysteine
  MOD_RES (571)..(571): Selenocysteine
  MOD_RES (605)..(605): Selenocysteine
  MOD_RES (669)..(669): Selenocysteine
  MOD_RES (686)..(686): Selenocysteine
  MOD_RES (696)..(696): Selenocysteine
  MOD_RES (712)..(712): Selenocysteine
  MOD_RES (774)..(774): Selenocysteine
  MOD_RES (826)..(826): Selenocysteine
  MOD_RES (836)..(836): Selenocysteine
  MOD_RES (861)..(861): Selenocysteine
  MOD_RES (870)..(870): Selenocysteine
  MOD_RES (880)..(880): Selenocysteine
  MOD_RES (913)..(913): Selenocysteine
  MOD_RES (918)..(918): Selenocysteine
  MOD_RES (984)..(984): Selenocysteine
  MOD_RES (994)..(994): Selenocysteine
  MOD_RES (1000)..(1000): Selenocysteine
  MOD_RES (1002)..(1002): Selenocysteine
  MOD_RES (1007)..(1007): Selenocysteine
  MOD_RES (1014)..(1014): Selenocysteine
  MOD_RES (1044)..(1044): Selenocysteine
  MOD_RES (1054)..(1054): Selenocysteine
MLRXAGRDGLCRLSXYLEELEAVELKKFKLYLGXAXELGEGKIPWGSMEKAGPLEMAQLLIXHFGPEEAWRLALSXFERINRKDLWERGQREDLVRDXPPGGPSSLGNQSXCLLEVSLVXPRKDPQEXYRDYVRRKFRLMEDRNARLGECVNLSHRYXRLLLVKEHSNPMQVQQQLLDXGRGHARXVGHQASPIKIEXLFEPDEERPEPPRXVVMQGAAGIGKSMLAHKVMLDWADGKLFQGRFDYLFYINCREMNQSAXECSMQDLIFSCWPEPSAPLQELIRVPERLLFIIDGFDELKPSFHDPQGPWCLCWEEKRPXELLLNSLIRKKLLPELSLLIXXRPXALEKLHRLLEHPRHVEILGFSEAERKEYFYKYFHNAEQAGQVFNYVRDNEPLFXMCFVPLVCWVVCXCLQQQLEGGGLLRQXSRXXXAVYMLYLLSLMQPKPGAPRLQPPPNQRGLCSLAADGLWNQKILFEEQDLRKHGLDGEDVSAFLNMNIFQKDINCERYYSFIHLSFQEFFAAMYYILDEGEGGAGPDQDVXRLLXEYAFSERSFLALXSRFLFGLLNEEXRSHLEKSLCWKVSPHIKMDLLQWIQSKAQSDGSXLQQGSLEFFSCLYEIQEEEFIQQALSHFQVIVVSNIASKMEHMVSSFCLKRCRSAQVLHLYGAXYSADGEDRARCSAGAHXLLVQLRPERXVLLDAYSEHLAAALCXNPNLIELSLYRNALGSRGVKLLCQGLRHPNCKLQNLRLKRCRISSSACEDLSAALIANKNLXRMDLSGNGVGFPGMMLLCEGLRHPQCRLQMIQLRKCQLESGACQEMASVLGXNPHLVELDLXGNALEDLGLRLLCQGLRHPVCRLRXLWLKICRLXAAACDELASXLSVNQSLRELDLSLNELGDLGVLLLCEGLRHPXCKLQXLRLGICRLGSAACEGLSVVLQANHNLRELDLSFNDLGDWGLWLLAEGLQHPACRLQKLWLDSCGLXAKACENLYFXLGINQXLXDLYLXNNALGDXGVRLLCKRLSHPGCKLRVLWLFGMDLNKMXHSRLAALRVXKPYLDIGC

SEQ ID NO: 17859 - protein, 45 aa, Homo sapiens
  MOD_RES (32)..(32): Selenocysteine
  MOD_RES (45)..(45): Selenocysteine
MVSSAQLDFNLQALLGQLSQDDLCKFKSLIRXVSLGNELQKIPQX

SEQ ID NO: 17860 - protein, 922 aa, Homo sapiens
  MOD_RES (6)..(6): Selenocysteine
  MOD_RES (46)..(46): Selenocysteine
  MOD_RES (56)..(56): Selenocysteine
  MOD_RES (105)..(105): Selenocysteine
  MOD_RES (169)..(169): Selenocysteine
  MOD_RES (193)..(193): Selenocysteine
  MOD_RES (195)..(195): Selenocysteine
  MOD_RES (221)..(221): Selenocysteine
  MOD_RES (233)..(233): Selenocysteine
  MOD_RES (247)..(247): Selenocysteine
  MOD_RES (268)..(268): Selenocysteine
  MOD_RES (320)..(320): Selenocysteine
  MOD_RES (349)..(350): Selenocysteine
  MOD_RES (407)..(407): Selenocysteine
  MOD_RES (420)..(420): Selenocysteine
  MOD_RES (435)..(435): Selenocysteine
  MOD_RES (438)..(440): Selenocysteine
  MOD_RES (524)..(524): Selenocysteine
  MOD_RES (544)..(544): Selenocysteine
  MOD_RES (559)..(559): Selenocysteine
  MOD_RES (589)..(589): Selenocysteine
  MOD_RES (659)..(659): Selenocysteine
  MOD_RES (783)..(783): Selenocysteine
  MOD_RES (796)..(796): Selenocysteine
  MOD_RES (801)..(801): Selenocysteine
  MOD_RES (809)..(809): Selenocysteine
  MOD_RES (840)..(840): Selenocysteine
  MOD_RES (849)..(849): Selenocysteine
  MOD_RES (852)..(852): Selenocysteine
  MOD_RES (900)..(900): Selenocysteine
  MOD_RES (906)..(906): Selenocysteine
  MOD_RES (915)..(915): Selenocysteine
MKMASXRCKLARYLEDLEDVDLKKFKMHLEDYPPQKGCIPLPRGQXEKADHVDLAXLMIDFNGEEKAWAMAVWIFAAINRRDLYEKAKRDEPKWGSDNARVSNPXVICQEDSIEEEWMGLLEYLSRISICKMKKDYRKKYRKYVRSRFQCIEDRNARLGESVSLNKRYXRLRLIKEHRSQQEREQELLAIGKXKXCESPVSPIKMELLFDPDDEHSEPVHXVVFQGAAGIGKXILARKMMLDWASGXLYQDRFDYLFYIHCREVSLVXQRSLGDLIMSCCPDPNPPIHKIVRKPSRILFLMDGFDELQGAFDEHIGPLCXDWQKAERGDILLSSLIRKKLLPEASLLIXXRPVALEKLQHLLDHPRHVEILGFSEAKRKEYFFKYFSDEAQARAAFSLIQENEVLFXMCFIPLVCWIVCXGLKQQMESGKSLAQXSKXXXAVYVFFLSSLLQPRGGSQEHGLCAHLWGLCSLAADGIWNQKILFEESDLRNHGLQKADVSAFLRMNLFQKEVDCEKFYSFIHMXFQEFFAAMYYLLEEEKEGRXNVPGSRLKLPSRDVXVLLENYGKFEKGYLIFVVRFLFGLVNQERXSYLEKKLSCKISQQIRLELLKWIEVKAKAKKLQIQPSQLELFYCLYEMQEEDFVQRAMDYFPKIEINLSXRMDHMVSSFCIENCHRVESLSLGFLHNMPKEEEEEEKEGRHLDMVQCVLPSSSHAACSHGLGRCGLSHECCFDISLVLSSNQKLVELDLSDNALGDFGIRLLCVGLKHLLCNLKKLWLVNSGLXSVCCSALSSVLSXNQNLXHLYLRGNXLGDKGIKLLCEGLLHPDCKLQVLELDNCNLXSHCCWDLSXLLXSSQSLRKLSLGNNDLGDLGVMMFCEVLKQQSCLLQNLGLSEMYFNYEXKSALEXLQEEKPELXVVFEPSW

SEQ ID NO: 17861 - protein, 979 aa, Homo sapiens
  MOD_RES (6)..(6): Selenocysteine
  MOD_RES (46)..(46): Selenocysteine
  MOD_RES (56)..(56): Selenocysteine
  MOD_RES (105)..(105): Selenocysteine
  MOD_RES (169)..(169): Selenocysteine
  MOD_RES (193)..(193): Selenocysteine
  MOD_RES (195)..(195): Selenocysteine
  MOD_RES (221)..(221): Selenocysteine
  MOD_RES (233)..(233): Selenocysteine
  MOD_RES (247)..(247): Selenocysteine
  MOD_RES (268)..(268): Selenocysteine
  MOD_RES (320)..(320): Selenocysteine
  MOD_RES (349)..(350): Selenocysteine
  MOD_RES (407)..(407): Selenocysteine
  MOD_RES (420)..(420): Selenocysteine
  MOD_RES (435)..(435): Selenocysteine
  MOD_RES (438)..(440): Selenocysteine
  MOD_RES (524)..(524): Selenocysteine
  MOD_RES (544)..(544): Selenocysteine
  MOD_RES (559)..(559): Selenocysteine
  MOD_RES (589)..(589): Selenocysteine
  MOD_RES (659)..(659): Selenocysteine
  MOD_RES (726)..(726): Selenocysteine
  MOD_RES (739)..(739): Selenocysteine
  MOD_RES (744)..(744): Selenocysteine
  MOD_RES (764)..(764): Selenocysteine
  MOD_RES (840)..(840): Selenocysteine
  MOD_RES (853)..(853): Selenocysteine
  MOD_RES (858)..(858): Selenocysteine
  MOD_RES (866)..(866): Selenocysteine
  MOD_RES (897)..(897): Selenocysteine
  MOD_RES (906)..(906): Selenocysteine
  MOD_RES (909)..(909): Selenocysteine
  MOD_RES (957)..(957): Selenocysteine
  MOD_RES (963)..(963): Selenocysteine
  MOD_RES (972)..(972): Selenocysteine
MKMASXRCKLARYLEDLEDVDLKKFKMHLEDYPPQKGCIPLPRGQXEKADHVDLAXLMIDFNGEEKAWAMAVWIFAAINRRDLYEKAKRDEPKWGSDNARVSNPXVICQEDSIEEEWMGLLEYLSRISICKMKKDYRKKYRKYVRSRFQCIEDRNARLGESVSLNKRYXRLRLIKEHRSQQEREQELLAIGKXKXCESPVSPIKMELLFDPDDEHSEPVHXVVFQGAAGIGKXILARKMMLDWASGXLYQDRFDYLFYIHCREVSLVXQRSLGDLIMSCCPDPNPPIHKIVRKPSRILFLMDGFDELQGAFDEHIGPLCXDWQKAERGDILLSSLIRKKLLPEASLLIXXRPVALEKLQHLLDHPRHVEILGFSEAKRKEYFFKYFSDEAQARAAFSLIQENEVLFXMCFIPLVCWIVCXGLKQQMESGKSLAQXSKXXXAVYVFFLSSLLQPRGGSQEHGLCAHLWGLCSLAADGIWNQKILFEESDLRNHGLQKADVSAFLRMNLFQKEVDCEKFYSFIHMXFQEFFAAMYYLLEEEKEGRXNVPGSRLKLPSRDVXVLLENYGKFEKGYLIFVVRFLFGLVNQERXSYLEKKLSCKISQQIRLELLKWIEVKAKAKKLQIQPSQLELFYCLYEMQEEDFVQRAMDYFPKIEINLSXRMDHMVSSFCIENCHRVESLSLGFLHNMPKEEEEEEKEGRHLDMVQCVLPSSSHAACSHGLVNSHLXSSFCRGLFSVLSXSQSLXELDLSDNSLGDPGMRVLCEXLQHPGCNIRRLWLGRCGLSHECCFDISLVLSSNQKLVELDLSDNALGDFGIRLLCVGLKHLLCNLKKLWLVNSGLXSVCCSALSSVLSXNQNLXHLYLRGNXLGDKGIKLLCEGLLHPDCKLQVLELDNCNLXSHCCWDLSXLLXSSQSLRKLSLGNNDLGDLGVMMFCEVLKQQSCLLQNLGLSEMYFNYEXKSALEXLQEEKPELXVVFEPSW

SEQ ID NO: 17862 - protein, 979 aa, Homo sapiens
  MOD_RES (6)..(6): Selenocysteine
  MOD_RES (46)..(46): Selenocysteine
  MOD_RES (56)..(56): Selenocysteine
  MOD_RES (105)..(105): Selenocysteine
  MOD_RES (169)..(169): Selenocysteine
  MOD_RES (193)..(193): Selenocysteine
  MOD_RES (195)..(195): Selenocysteine
  MOD_RES (221)..(221): Selenocysteine
  MOD_RES (233)..(233): Selenocysteine
  MOD_RES (247)..(247): Selenocysteine
  MOD_RES (268)..(268): Selenocysteine
  MOD_RES (320)..(320): Selenocysteine
  MOD_RES (349)..(350): Selenocysteine
  MOD_RES (407)..(407): Selenocysteine
  MOD_RES (420)..(420): Selenocysteine
  MOD_RES (435)..(435): Selenocysteine
  MOD_RES (438)..(440): Selenocysteine
  MOD_RES (524)..(524): Selenocysteine
  MOD_RES (544)..(544): Selenocysteine
  MOD_RES (559)..(559): Selenocysteine
  MOD_RES (589)..(589): Selenocysteine
  MOD_RES (659)..(659): Selenocysteine
  MOD_RES (783)..(783): Selenocysteine
  MOD_RES (796)..(796): Selenocysteine
  MOD_RES (801)..(801): Selenocysteine
  MOD_RES (840)..(840): Selenocysteine
  MOD_RES (853)..(853): Selenocysteine
  MOD_RES (858)..(858): Selenocysteine
  MOD_RES (866)..(866): Selenocysteine
  MOD_RES (897)..(897): Selenocysteine
  MOD_RES (906)..(906): Selenocysteine
  MOD_RES (909)..(909): Selenocysteine
  MOD_RES (957)..(957): Selenocysteine
  MOD_RES (963)..(963): Selenocysteine
  MOD_RES (972)..(972): Selenocysteine
MKMASXRCKLARYLEDLEDVDLKKFKMHLEDYPPQKGCIPLPRGQXEKADHVDLAXLMIDFNGEEKAWAMAVWIFAAINRRDLYEKAKRDEPKWGSDNARVSNPXVICQEDSIEEEWMGLLEYLSRISICKMKKDYRKKYRKYVRSRFQCIEDRNARLGESVSLNKRYXRLRLIKEHRSQQEREQELLAIGKXKXCESPVSPIKMELLFDPDDEHSEPVHXVVFQGAAGIGKXILARKMMLDWASGXLYQDRFDYLFYIHCREVSLVXQRSLGDLIMSCCPDPNPPIHKIVRKPSRILFLMDGFDELQGAFDEHIGPLCXDWQKAERGDILLSSLIRKKLLPEASLLIXXRPVALEKLQHLLDHPRHVEILGFSEAKRKEYFFKYFSDEAQARAAFSLIQENEVLFXMCFIPLVCWIVCXGLKQQMESGKSLAQXSKXXXAVYVFFLSSLLQPRGGSQEHGLCAHLWGLCSLAADGIWNQKILFEESDLRNHGLQKADVSAFLRMNLFQKEVDCEKFYSFIHMXFQEFFAAMYYLLEEEKEGRXNVPGSRLKLPSRDVXVLLENYGKFEKGYLIFVVRFLFGLVNQERXSYLEKKLSCKISQQIRLELLKWIEVKAKAKKLQIQPSQLELFYCLYEMQEEDFVQRAMDYFPKIEINLSXRMDHMVSSFCIENCHRVESLSLGFLHNMPKEEEEEEKEGRHLDMVQCVLPSSSHAACSHGLGRCGLSHECCFDISLVLSSNQKLVELDLSDNALGDFGIRLLCVGLKHLLCNLKKLWLVSCCLXSACCQDLASVLSXSHSLXRLYVGENALGDSGVAILCEKAKNPQCNLQKLGLVNSGLXSVCCSALSSVLSXNQNLXHLYLRGNXLGDKGIKLLCEGLLHPDCKLQVLELDNCNLXSHCCWDLSXLLXSSQSLRKLSLGNNDLGDLGVMMFCEVLKQQSCLLQNLGLSEMYFNYEXKSALEXLQEEKPELXVVFEPSW

SEQ ID NO: 17863 - protein, 1036 aa, Homo sapiens
  MOD_RES (6)..(6): Selenocysteine
  MOD_RES (46)..(46): Selenocysteine
  MOD_RES (56)..(56): Selenocysteine
  MOD_RES (105)..(105): Selenocysteine
  MOD_RES (169)..(169): Selenocysteine
  MOD_RES (193)..(193): Selenocysteine
  MOD_RES (195)..(195): Selenocysteine
  MOD_RES (221)..(221): Selenocysteine
  MOD_RES (233)..(233): Selenocysteine
  MOD_RES (247)..(247): Selenocysteine
  MOD_RES (268)..(268): Selenocysteine
  MOD_RES (320)..(320): Selenocysteine
  MOD_RES (349)..(350): Selenocysteine
  MOD_RES (407)..(407): Selenocysteine
  MOD_RES (420)..(420): Selenocysteine
  MOD_RES (435)..(435): Selenocysteine
  MOD_RES (438)..(440): Selenocysteine
  MOD_RES (524)..(524): Selenocysteine
  MOD_RES (544)..(544): Selenocysteine
  MOD_RES (559)..(559): Selenocysteine
  MOD_RES (589)..(589): Selenocysteine
  MOD_RES (659)..(659): Selenocysteine
  MOD_RES (726)..(726): Selenocysteine
  MOD_RES (739)..(739): Selenocysteine
  MOD_RES (744)..(744): Selenocysteine
  MOD_RES (764)..(764): Selenocysteine
  MOD_RES (840)..(840): Selenocysteine
  MOD_RES (853)..(853): Selenocysteine
  MOD_RES (858)..(858): Selenocysteine
  MOD_RES (897)..(897): Selenocysteine
  MOD_RES (910)..(910): Selenocysteine
  MOD_RES (915)..(915): Selenocysteine
  MOD_RES (923)..(923): Selenocysteine
  MOD_RES (954)..(954): Selenocysteine
  MOD_RES (963)..(963): Selenocysteine
  MOD_RES (966)..(966): Selenocysteine
  MOD_RES (1014)..(1014): Selenocysteine
  MOD_RES (1020)..(1020): Selenocysteine
  MOD_RES (1029)..(1029): Selenocysteine
MKMASXRCKLARYLEDLEDVDLKKFKMHLEDYPPQKGCIPLPRGQXEKADHVDLAXLMIDFNGEEKAWAMAVWIFAAINRRDLYEKAKRDEPKWGSDNARVSNPXVICQEDSIEEEWMGLLEYLSRISICKMKKDYRKKYRKYVRSRFQCIEDRNARLGESVSLNKRYXRLRLIKEHRSQQEREQELLAIGKXKXCESPVSPIKMELLFDPDDEHSEPVHXVVFQGAAGIGKXILARKMMLDWASGXLYQDRFDYLFYIHCREVSLVXQRSLGDLIMSCCPDPNPPIHKIVRKPSRILFLMDGFDELQGAFDEHIGPLCXDWQKAERGDILLSSLIRKKLLPEASLLIXXRPVALEKLQHLLDHPRHVEILGFSEAKRKEYFFKYFSDEAQARAAFSLIQENEVLFXMCFIPLVCWIVCXGLKQQMESGKSLAQXSKXXXAVYVFFLSSLLQPRGGSQEHGLCAHLWGLCSLAADGIWNQKILFEESDLRNHGLQKADVSAFLRMNLFQKEVDCEKFYSFIHMXFQEFFAAMYYLLEEEKEGRXNVPGSRLKLPSRDVXVLLENYGKFEKGYLIFVVRFLFGLVNQERXSYLEKKLSCKISQQIRLELLKWIEVKAKAKKLQIQPSQLELFYCLYEMQEEDFVQRAMDYFPKIEINLSXRMDHMVSSFCIENCHRVESLSLGFLHNMPKEEEEEEKEGRHLDMVQCVLPSSSHAACSHGLVNSHLXSSFCRGLFSVLSXSQSLXELDLSDNSLGDPGMRVLCEXLQHPGCNIRRLWLGRCGLSHECCFDISLVLSSNQKLVELDLSDNALGDFGIRLLCVGLKHLLCNLKKLWLVSCCLXSACCQDLASVLSXSHSLXRLYVGENALGDSGVAILCEKAKNPQCNLQKLGLVNSGLXSVCCSALSSVLSXNQNLXHLYLRGNXLGDKGIKLLCEGLLHPDCKLQVLELDNCNLXSHCCWDLSXLLXSSQSLRKLSLGNNDLGDLGVMMFCEVLKQQSCLLQNLGLSEMYFNYEXKSALEXLQEEKPELXVVFEPSW

SEQ ID NO: 17864 - protein, 891 aa, Homo sapiens
  MOD_RES (11)..(11): Selenocysteine
  MOD_RES (84)..(84): Selenocysteine
  MOD_RES (111)..(111): Selenocysteine
  MOD_RES (144)..(144): Selenocysteine
  MOD_RES (148)..(148): Selenocysteine
  MOD_RES (179)..(179): Selenocysteine
  MOD_RES (181)..(181): Selenocysteine
  MOD_RES (197)..(197): Selenocysteine
  MOD_RES (209)..(209): Selenocysteine
  MOD_RES (246)..(246): Selenocysteine
  MOD_RES (296)..(296): Selenocysteine
  MOD_RES (319)..(319): Selenocysteine
  MOD_RES (325)..(326): Selenocysteine
  MOD_RES (380)..(380): Selenocysteine
  MOD_RES (396)..(396): Selenocysteine
  MOD_RES (411)..(411): Selenocysteine
  MOD_RES (414)..(416): Selenocysteine
  MOD_RES (424)..(424): Selenocysteine
  MOD_RES (477)..(477): Selenocysteine
  MOD_RES (491)..(491): Selenocysteine
  MOD_RES (494)..(494): Selenocysteine
  MOD_RES (521)..(521): Selenocysteine
  MOD_RES (528)..(528): Selenocysteine
  MOD_RES (543)..(544): Selenocysteine
  MOD_RES (594)..(594): Selenocysteine
  MOD_RES (603)..(603): Selenocysteine
  MOD_RES (628)..(628): Selenocysteine
  MOD_RES (706)..(707): Selenocysteine
  MOD_RES (723)..(723): Selenocysteine
  MOD_RES (733)..(733): Selenocysteine
  MOD_RES (758)..(758): Selenocysteine
  MOD_RES (788)..(788): Selenocysteine
  MOD_RES (814)..(815): Selenocysteine
  MOD_RES (829)..(829): Selenocysteine
  MOD_RES (844)..(844): Selenocysteine
  MOD_RES (873)..(873): Selenocysteine
  MOD_RES (890)..(890): Selenocysteine
MDQPEAPCSSXGPRLAVARELLLAALEELSQEQLKRFRHKLRDVGPDGRSIPWGRLERADAVDLAEQLAQFYGPEPALEVARKXLKRADARDVAAQLQERRLQRLGLGSGXLLSVSEYKKKYREHVLQLHARVKERNARSVKIXKRFXKLLIAPESAAPEEAMGPAEEPEPGRARRSDXHXFNRLFRRDEEGRRPLXVVLQGPAGIGKXMAAKKILYDWAAGKLYQGQVDFAFFMPCGELLERPGXRSLADLILDQCPDRGAPVPQMLAQPQRLLFILDGADELPALGGPEAAPCXDPFEAASGARVLGGLLSKALLPXALLLVXXRAAAPGRLQGRLCSPQCAEVRGFSDKDKKKYFYKYFRDERRAERAYRFVKENEXLFALCFVPFVCWIVCXVLRQQLELGRDLSRXSKXXXSVYLLFIXSVLSSAPVADGPRLQGDLRNLCRLAREGVLGRRAQFAEKELEQLELRGSKVQXLFLSKKELPGVLEXEVXYQFIDQSFQEFLAALSYLLEDGGVPRXAAGGVGXLLRGDAQPHSHLVLXXRFLFGLLSAERMRDIERHFGCMVSERVKQEALRWVQGQGQGCPGVAPEVXEGAKGLEDXEEPEEEEEGEEPNYPLELLYCLYEXQEDAFVRQALCRFPELALQRVRFCRMDVAVLSYCVRCCPAGQALRLISCRLVAAQEKKKKSLGKRLQASLGGGSSQGXXKQLPASLLHPLFQAMXDPLCHLSSLXLSHCKLPDAVCRDLSEALRAAPALXELGLLHNRLSEAGLRMLSEGLAWPQCRVQXVRVQLPDPQRGLQYLVGMLRQSPALXXLDLSGCQLPAPMVXYLCAVLQHQGCGLQXLSLASVELSEQSLQELQAVKRAKPDLVIXHPALDGHPQPPKELISXF

SEQ ID NO: 17865 - protein, 892 aa, Homo sapiens
  MOD_RES (11)..(11): Selenocysteine
  MOD_RES (84)..(84): Selenocysteine
  MOD_RES (111)..(111): Selenocysteine
  MOD_RES (144)..(144): Selenocysteine
  MOD_RES (148)..(148): Selenocysteine
  MOD_RES (179)..(179): Selenocysteine
  MOD_RES (181)..(181): Selenocysteine
  MOD_RES (197)..(197): Selenocysteine
  MOD_RES (209)..(209): Selenocysteine
  MOD_RES (246)..(246): Selenocysteine
  MOD_RES (296)..(296): Selenocysteine
  MOD_RES (319)..(319): Selenocysteine
  MOD_RES (325)..(326): Selenocysteine
  MOD_RES (380)..(380): Selenocysteine
  MOD_RES (396)..(396): Selenocysteine
  MOD_RES (411)..(411): Selenocysteine
  MOD_RES (414)..(416): Selenocysteine
  MOD_RES (424)..(424): Selenocysteine
  MOD_RES (477)..(477): Selenocysteine
  MOD_RES (491)..(491): Selenocysteine
  MOD_RES (494)..(494): Selenocysteine
  MOD_RES (521)..(521): Selenocysteine
  MOD_RES (528)..(528): Selenocysteine
  MOD_RES (543)..(544): Selenocysteine
  MOD_RES (594)..(594): Selenocysteine
  MOD_RES (603)..(603): Selenocysteine
  MOD_RES (628)..(628): Selenocysteine
  MOD_RES (707)..(708): Selenocysteine
  MOD_RES (724)..(724): Selenocysteine
  MOD_RES (734)..(734): Selenocysteine
  MOD_RES (759)..(759): Selenocysteine
  MOD_RES (789)..(789): Selenocysteine
  MOD_RES (815)..(816): Selenocysteine
  MOD_RES (830)..(830): Selenocysteine
  MOD_RES (845)..(845): Selenocysteine
  MOD_RES (874)..(874): Selenocysteine
  MOD_RES (891)..(891): Selenocysteine
MDQPEAPCSSXGPRLAVARELLLAALEELSQEQLKRFRHKLRDVGPDGRSIPWGRLERADAVDLAEQLAQFYGPEPALEVARKXLKRADARDVAAQLQERRLQRLGLGSGXLLSVSEYKKKYREHVLQLHARVKERNARSVKIXKRFXKLLIAPESAAPEEAMGPAEEPEPGRARRSDXHXFNRLFRRDEEGRRPLXVVLQGPAGIGKXMAAKKILYDWAAGKLYQGQVDFAFFMPCGELLERPGXRSLADLILDQCPDRGAPVPQMLAQPQRLLFILDGADELPALGGPEAAPCXDPFEAASGARVLGGLLSKALLPXALLLVXXRAAAPGRLQGRLCSPQCAEVRGFSDKDKKKYFYKYFRDERRAERAYRFVKENEXLFALCFVPFVCWIVCXVLRQQLELGRDLSRXSKXXXSVYLLFIXSVLSSAPVADGPRLQGDLRNLCRLAREGVLGRRAQFAEKELEQLELRGSKVQXLFLSKKELPGVLEXEVXYQFIDQSFQEFLAALSYLLEDGGVPRXAAGGVGXLLRGDAQPHSHLVLXXRFLFGLLSAERMRDIERHFGCMVSERVKQEALRWVQGQGQGCPGVAPEVXEGAKGLEDXEEPEEEEEGEEPNYPLELLYCLYEXQEDAFVRQALCRFPELALQRVRFCRMDVAVLSYCVRCCPAGQALRLISCRLVAAQEKKKKSLGKRLQASLGGGSSSQGXXKQLPASLLHPLFQAMXDPLCHLSSLXLSHCKLPDAVCRDLSEALRAAPALXELGLLHNRLSEAGLRMLSEGLAWPQCRVQXVRVQLPDPQRGLQYLVGMLRQSPALXXLDLSGCQLPAPMVXYLCAVLQHQGCGLQXLSLASVELSEQSLQELQAVKRAKPDLVIXHPALDGHPQPPKELISXF

SEQ ID NO: 17866 - protein, 127 aa, Homo sapiens
  MOD_RES (76)..(76): Selenocysteine
  MOD_RES (103)..(103): Selenocysteine
  MOD_RES (108)..(108): Selenocysteine
  MOD_RES (119)..(119): Selenocysteine
MRWGHHLPRASWGSGFRRALQRPDDRIPFLIHWSWPLQGERPFGPPRAFIRHHGSSVDSAPPPGRHGRLFPSASAXEAIQRHRRNLAEWFSRLPREERQFGPXFALDXVHVDPVIRESXPDELLRPP

SEQ ID NO: 17867 - protein, 137 aa, Homo sapiens
  MOD_RES (76)..(76): Selenocysteine
  MOD_RES (103)..(103): Selenocysteine
  MOD_RES (108)..(108): Selenocysteine
  MOD_RES (119)..(119): Selenocysteine
MRWGHHLPRASWGSGFRRALQRPDDRIPFLIHWSWPLQGERPFGPPRAFIRHHGSSVDSAPPPGRHGRLFPSASAXEAIQRHRRNLAEWFSRLPREERQFGPXFALDXVHVDPVIRESXPDELLRPPAELALEHQPP

SEQ ID NO: 17868 - protein, 151 aa, Homo sapiens
  MOD_RES (76)..(76): Selenocysteine
  MOD_RES (103)..(103): Selenocysteine
  MOD_RES (108)..(108): Selenocysteine
  MOD_RES (119)..(119): Selenocysteine
MRWGHHLPRASWGSGFRRALQRPDDRIPFLIHWSWPLQGERPFGPPRAFIRHHGSSVDSAPPPGRHGRLFPSASAXEAIQRHRRNLAEWFSRLPREERQFGPXFALDXVHVDPVIRESXPDELLRPPAELALEHQPPQAGLPPLALSQLFN

SEQ ID NO: 17869 - protein, 921 aa, Homo sapiens
  MOD_RES (76)..(76): Selenocysteine
  MOD_RES (103)..(103): Selenocysteine
  MOD_RES (108)..(108): Selenocysteine
  MOD_RES (119)..(119): Selenocysteine
  MOD_RES (161)..(161): Selenocysteine
  MOD_RES (167)..(167): Selenocysteine
  MOD_RES (170)..(170): Selenocysteine
  MOD_RES (174)..(174): Selenocysteine
  MOD_RES (221)..(221): Selenocysteine
  MOD_RES (256)..(256): Selenocysteine
  MOD_RES (289)..(290): Selenocysteine
  MOD_RES (315)..(315): Selenocysteine
  MOD_RES (343)..(343): Selenocysteine
  MOD_RES (380)..(380): Selenocysteine
  MOD_RES (388)..(388): Selenocysteine
  MOD_RES (393)..(393): Selenocysteine
  MOD_RES (395)..(395): Selenocysteine
  MOD_RES (399)..(399): Selenocysteine
  MOD_RES (410)..(410): Selenocysteine
  MOD_RES (414)..(414): Selenocysteine
  MOD_RES (428)..(428): Selenocysteine
  MOD_RES (442)..(442): Selenocysteine
  MOD_RES (459)..(459): Selenocysteine
  MOD_RES (489)..(489): Selenocysteine
  MOD_RES (493)..(493): Selenocysteine
  MOD_RES (513)..(514): Selenocysteine
  MOD_RES (709)..(709): Selenocysteine
  MOD_RES (714)..(714): Selenocysteine
  MOD_RES (744)..(744): Selenocysteine
  MOD_RES (782)..(783): Selenocysteine
  MOD_RES (792)..(792): Selenocysteine
  MOD_RES (807)..(807): Selenocysteine
  MOD_RES (810)..(810): Selenocysteine
  MOD_RES (817)..(817): Selenocysteine
  MOD_RES (850)..(850): Selenocysteine
  MOD_RES (889)..(889): Selenocysteine
  MOD_RES (921)..(921): Selenocysteine
MRWGHHLPRASWGSGFRRALQRPDDRIPFLIHWSWPLQGERPFGPPRAFIRHHGSSVDSAPPPGRHGRLFPSASAXEAIQRHRRNLAEWFSRLPREERQFGPXFALDXVHVDPVIRESXPDELLRPPAELALEHQPPQAGLPPLALSQLFNPDACGRRVQXVVLYGXVGXGKSXLVRKMVLDWCYGRLPAFELLIPFSCEDLSSLGPAPASLCQLVAQRYXPLKEVLPLMAAAGSHLLFVLHGLEHLNLDFRLAGXGLCSDPEEPQEPAAIIVNLLRKYMLPQASILVXXRPSAIGRIPSKYVGRYGEICGFSDXNLQKLYFQLRLNQPYCGYAVGGSGVSAXPAQRDHLVQMLSRNLEGHHQIAAACFLPSYCWLVCAXLHFLHAPXPAGQXLXSIYXSFLRLNFSGEXLDSXDPSNLSLMAYAARXMGKLAYEGVSSRKXYFSEEDVCGCLEAGIRXEEEFQLLHIFRRDALRFFLAPCVEPGRAGXFVFXVPAMQEYLAALYIVLGLRKXXLQKVGKEVAELVGRVGEDVSLVLGIMAKLLPLRALPLLFNLIKVVPRVFGRMVGKSREAVAQAMVLEMFREEDYYNDDVLDQMGASILGVEGPRRHPDEPPEDEVFELFPMFMGGLLSAHNRAVLAQLGCPIKNLDALENAQAIKKKLGKLGRQVLPPSELLDHLFFHYEFQNQRFSAEVLSSLRQLNLAGVRMXPVKCXVVAAVLGSGRHALDEVNLASCQLDPAGLRXLLPVFLRARKLGLQLNSLGPEACKDLRDLLLHDQCQIXXLRLSNNPLXAAGVAVLMEGLAGNXSVXHLSLLHXGLGDEGLELLAAQLDRNRQLQELNVAYNGAGDXAALALARAAREHPSLELLQGVAIQMCWKLPLLPYAHLWXPRMPSHWCFLLILMPPLPQWYDGLVAPRGRCX

SEQ ID NO: 17870 - protein, 975 aa, Homo sapiens
  MOD_RES (76)..(76): Selenocysteine
  MOD_RES (103)..(103): Selenocysteine
  MOD_RES (108)..(108): Selenocysteine
  MOD_RES (119)..(119): Selenocysteine
  MOD_RES (161)..(161): Selenocysteine
  MOD_RES (167)..(167): Selenocysteine
  MOD_RES (170)..(170): Selenocysteine
  MOD_RES (174)..(174): Selenocysteine
  MOD_RES (221)..(221): Selenocysteine
  MOD_RES (256)..(256): Selenocysteine
  MOD_RES (289)..(290): Selenocysteine
  MOD_RES (315)..(315): Selenocysteine
  MOD_RES (343)..(343): Selenocysteine
  MOD_RES (380)..(380): Selenocysteine
  MOD_RES (388)..(388): Selenocysteine
  MOD_RES (393)..(393): Selenocysteine
  MOD_RES (395)..(395): Selenocysteine
  MOD_RES (399)..(399): Selenocysteine
  MOD_RES (410)..(410): Selenocysteine
  MOD_RES (414)..(414): Selenocysteine
  MOD_RES (428)..(428): Selenocysteine
  MOD_RES (442)..(442): Selenocysteine
  MOD_RES (459)..(459): Selenocysteine
  MOD_RES (489)..(489): Selenocysteine
  MOD_RES (493)..(493): Selenocysteine
  MOD_RES (513)..(514): Selenocysteine
  MOD_RES (709)..(709): Selenocysteine
  MOD_RES (714)..(714): Selenocysteine
  MOD_RES (744)..(744): Selenocysteine
  MOD_RES (782)..(783): Selenocysteine
  MOD_RES (792)..(792): Selenocysteine
  MOD_RES (807)..(807): Selenocysteine
  MOD_RES (810)..(810): Selenocysteine
  MOD_RES (817)..(817): Selenocysteine
  MOD_RES (850)..(850): Selenocysteine
  MOD_RES (901)..(901): Selenocysteine
  MOD_RES (904)..(904): Selenocysteine
  MOD_RES (947)..(947): Selenocysteine
MRWGHHLPRASWGSGFRRALQRPDDRIPFLIHWSWPLQGERPFGPPRAFIRHHGSSVDSAPPPGRHGRLFPSASAXEAIQRHRRNLAEWFSRLPREERQFGPXFALDXVHVDPVIRESXPDELLRPPAELALEHQPPQAGLPPLALSQLFNPDACGRRVQXVVLYGXVGXGKSXLVRKMVLDWCYGRLPAFELLIPFSCEDLSSLGPAPASLCQLVAQRYXPLKEVLPLMAAAGSHLLFVLHGLEHLNLDFRLAGXGLCSDPEEPQEPAAIIVNLLRKYMLPQASILVXXRPSAIGRIPSKYVGRYGEICGFSDXNLQKLYFQLRLNQPYCGYAVGGSGVSAXPAQRDHLVQMLSRNLEGHHQIAAACFLPSYCWLVCAXLHFLHAPXPAGQXLXSIYXSFLRLNFSGEXLDSXDPSNLSLMAYAARXMGKLAYEGVSSRKXYFSEEDVCGCLEAGIRXEEEFQLLHIFRRDALRFFLAPCVEPGRAGXFVFXVPAMQEYLAALYIVLGLRKXXLQKVGKEVAELVGRVGEDVSLVLGIMAKLLPLRALPLLFNLIKVVPRVFGRMVGKSREAVAQAMVLEMFREEDYYNDDVLDQMGASILGVEGPRRHPDEPPEDEVFELFPMFMGGLLSAHNRAVLAQLGCPIKNLDALENAQAIKKKLGKLGRQVLPPSELLDHLFFHYEFQNQRFSAEVLSSLRQLNLAGVRMXPVKCXVVAAVLGSGRHALDEVNLASCQLDPAGLRXLLPVFLRARKLGLQLNSLGPEACKDLRDLLLHDQCQIXXLRLSNNPLXAAGVAVLMEGLAGNXSVXHLSLLHXGLGDEGLELLAAQLDRNRQLQELNVAYNGAGDXAALALARAAREHPSLELLHLYFNELSSEGRQVLRDLGGAAEGGARVVVSLXEGXAVSEYWSVILSEVQRNLNSWDRARVQRHLELLLRDLEDSRGAXLNPWRKAQLLRVEGEVRALLEQLGSSGS

SEQ ID NO: 17871 - protein, 154 aa, Homo sapiens
  MOD_RES (52)..(52): Selenocysteine
  MOD_RES (71)..(71): Selenocysteine
  MOD_RES (75)..(75): Selenocysteine
  MOD_RES (115)..(115): Selenocysteine
  MOD_RES (117)..(117): Selenocysteine
  MOD_RES (121)..(121): Selenocysteine
  MOD_RES (127)..(127): Selenocysteine
  MOD_RES (144)..(144): Selenocysteine
MARRAGGARMFGSLLLFALLAAGVAPLSWDLPEPRSRASKIRVHSRGNLWAXGHFMGKKSLEPSSPSPLGXAPHXSLRDQRLQLSHDLLGILLLKKALGVSLSRPAPQIQEAAGXNXAEMXPIMGQXQQRGLDCAHPGKVLNGXLLMAPSGCKS

SEQ ID NO: 17872 - protein, 121 aa, Homo sapiens
  MOD_RES (52)..(52): Selenocysteine
  MOD_RES (71)..(71): Selenocysteine
  MOD_RES (75)..(75): Selenocysteine
MARRAGGARMFGSLLLFALLAAGVAPLSWDLPEPRSRASKIRVHSRGNLWAXGHFMGKKSLEPSSPSPLGXAPHXSLRDQRLQLSHDLLGILLLKKALGVSLSRPAPQIQYRRLLVQILQK

SEQ ID NO: 17873 - protein, 390 aa, Homo sapiens
  MOD_RES (12)..(13): Selenocysteine
  MOD_RES (36)..(38): Selenocysteine
  MOD_RES (55)..(55): Selenocysteine
  MOD_RES (70)..(70): Selenocysteine
  MOD_RES (95)..(95): Selenocysteine
  MOD_RES (125)..(125): Selenocysteine
  MOD_RES (133)..(133): Selenocysteine
  MOD_RES (135)..(135): Selenocysteine
  MOD_RES (153)..(153): Selenocysteine
  MOD_RES (160)..(160): Selenocysteine
  MOD_RES (196)..(196): Selenocysteine
  MOD_RES (204)..(204): Selenocysteine
  MOD_RES (238)..(238): Selenocysteine
  MOD_RES (254)..(254): Selenocysteine
  MOD_RES (260)..(260): Selenocysteine
  MOD_RES (306)..(306): Selenocysteine
  MOD_RES (351)..(351): Selenocysteine
  MOD_RES (363)..(363): Selenocysteine
  MOD_RES (374)..(374): Selenocysteine
MPSKSLSNLSVXXGANESGSVPEGWERDFLPASDGXXXELVIRCVIPSLYLLIIXVGLLGNIMLVKIFIXNSAMRSVPNIFISNLAAGDLLLLLXCVPVDASRYFFDEWMFGKVGCKLIPVIQLXSVGVSVFXLXALSADRYRAIVNPMDMQXSGALLRXCVKAMGIWVVSVLLAVPEAVFSEVARISSLDNSSFXACIPYPQXDELHPKIHSVLIFLVYFLIPLAIISIYYYHIAKXLIKSAHNLPGEYNEHXKKQMEXRKRLAKIVLVFVGCFIFCWFPNHILYMYRSFNYNEIDPSLGHMIVXLVARVLSFGNSCVNPFALYLLSESFRRHFNSQLCCGRKSYQERGXSYLLSSSAVRMXSLKSNAKNMVXNSVLLNGHSMKQEMAL

SEQ ID NO: 17874 - protein, 82 aa, Homo sapiens
  MOD_RES (7)..(7): Selenocysteine
MANLERXFIAIKPDGVQRGLVGEIIKRFEQKGFRLVAMKFLRASEEHLKQHYIDLKDRPFFPGLVKYMNSGPVVAMEHHSWQ

SEQ ID NO: 17875 - protein, 152 aa, Homo sapiens
  MOD_RES (7)..(7): Selenocysteine
  MOD_RES (86)..(86): Selenocysteine
  MOD_RES (94)..(94): Selenocysteine
  MOD_RES (103)..(103): Selenocysteine
MANLERXFIAIKPDGVQRGLVGEIIKRFEQKGFRLVAMKFLRASEEHLKQHYIDLKDRPFFPGLVKYMNSGPVVAMVWEGLNVVKXGRVMLGEXNPADSKPGXIRGDFCIQVGRNIIHGSDSVKSAEKEISLWFKPEELVDYKSCAHDWVYE

SEQ ID NO: 17876 - protein, 212 aa, Homo sapiens
  MOD_RES (15)..(15): Selenocysteine
  MOD_RES (40)..(40): Selenocysteine
  MOD_RES (71)..(71): Selenocysteine
  MOD_RES (108)..(108): Selenocysteine
  MOD_RES (119)..(119): Selenocysteine
  MOD_RES (168)..(168): Selenocysteine
  MOD_RES (174)..(174): Selenocysteine
MEISMPPPQIYVEKXLAIIKPDIVDKEEEIQDIILRSGFXIVQRRKLRLSPEQCSNFYVEKYGKMFFPNLXAYMSSGPLVAMILARHKAISYWLELLGPNNSLVAKEXHPDSLRAIYGXDDLRNALHGSNDFAAAEREIRFMFPEVIVEPIPIGQAAKDYLNLHIMPXLLEGLXELCKQKPADPLIWLADWLLKNNPNKPKLCHHPIVEEPY

SEQ ID NO: 17877 - protein, 54 aa, Homo sapiens
  MOD_RES (19)..(19): Selenocysteine
  MOD_RES (46)..(46): Selenocysteine
MASKKREVQLQAEADNIVXLQPFRDKCEPVFLFSVMMFCVLLKMKXSKYWSKDK

SEQ ID NO: 17878 - protein, 116 aa, Homo sapiens
  MOD_RES (19)..(19): Selenocysteine
MASKKREVQLQAEADNIVXLQPFRDKCEPVFLFSVNGKIIEKIQGANAPLVNKKVINLIDEERKIAAGEMARPQYPEIPLVDSDSEVSEESPCESVQELYSIAIIKPDAVISKKVL

SEQ ID NO: 17879 - protein, 150 aa, Homo sapiens
  MOD_RES (19)..(19): Selenocysteine
  MOD_RES (123)..(123): Selenocysteine
  MOD_RES (135)..(135): Selenocysteine
  MOD_RES (138)..(138): Selenocysteine
MASKKREVQLQAEADNIVXLQPFRDKCEPVFLFSVNGKIIEKIQGANAPLVNKKVINLIDEERKIAAGEMARPQYPEIPLVDSDSEVSEESPCESVQELYSIAIIKPDAVISKKVLEIKRKIXKAGFIIEAEHKXVLXEEQVVNFYSRIA

SEQ ID NO: 17880 - protein, 588 aa, Homo sapiens
  MOD_RES (12)..(12): Selenocysteine
  MOD_RES (30)..(30): Selenocysteine
  MOD_RES (74)..(74): Selenocysteine
  MOD_RES (178)..(178): Selenocysteine
  MOD_RES (190)..(190): Selenocysteine
  MOD_RES (193)..(193): Selenocysteine
  MOD_RES (218)..(218): Selenocysteine
  MOD_RES (240)..(240): Selenocysteine
  MOD_RES (244)..(244): Selenocysteine
  MOD_RES (246)..(246): Selenocysteine
  MOD_RES (263)..(263): Selenocysteine
  MOD_RES (318)..(318): Selenocysteine
  MOD_RES (379)..(379): Selenocysteine
  MOD_RES (405)..(405): Selenocysteine
  MOD_RES (439)..(439): Selenocysteine
  MOD_RES (453)..(453): Selenocysteine
  MOD_RES (462)..(462): Selenocysteine
  MOD_RES (481)..(481): Selenocysteine
  MOD_RES (489)..(489): Selenocysteine
  MOD_RES (501)..(501): Selenocysteine
  MOD_RES (524)..(524): Selenocysteine
  MOD_RES (539)..(539): Selenocysteine
MASKKREVQLQXVINNQSLWDEMLQNKGLXVIDVYQAWCGPCRAMQPLFRKLKNELNEDEILHFAVAEADNIVXLQPFRDKCEPVFLFSVNGKIIEKIQGANAPLVNKKVINLIDEERKIAAGEMARPQYPEIPLVDSDSEVSEESPCESVQELYSIAIIKPDAVISKKVLEIKRKIXKAGFIIEAEHKXVLXEEQVVNFYSRIADQCDFEEFVSFMXSGLSYILVVSQGSKHNPPSEEXEPQXDXEPNERSEDQPEVEAQVXPGMMKNKQDSLQEYLERQHLAQLCDIEEDAANVAKFMDAFFPDFKKMKSMKLEKXLALLRPNLFHERKDDVLRIIKDEDFKILEQRQVVLSEKEAQALCKEYENEDYFNKLIENMXSGPSLALVLLRDNGLQYWKQLLGPRXVEEAIEYFPESLCAQFAMDSLPVNQLYGSDSLEXAEREIQHFFPLQSXLGLIKPHAXSEQREQILKIVKEAGFDLXQVKKMFLXPEQIEKIYPKVXGKDFYKDLLEMLSVGPSMVMILXKWNAVAEWRRLMGPXDPEEAKLLSPDSIRAQFGISKLKNIVHGASNAYEAKEVVNRLFEDPEEN

SEQ ID NO: 17881 - protein, 29 aa, Homo sapiens
  MOD_RES (8)..(8): Selenocysteine
MEADKDDXQQILKEHSPDEFIKDEQNKGL

SEQ ID NO: 17882 - protein, 307 aa, Homo sapiens
  MOD_RES (8)..(8): Selenocysteine
  MOD_RES (34)..(34): Selenocysteine
  MOD_RES (49)..(49): Selenocysteine
  MOD_RES (55)..(55): Selenocysteine
  MOD_RES (67)..(67): Selenocysteine
  MOD_RES (76)..(76): Selenocysteine
  MOD_RES (108)..(108): Selenocysteine
  MOD_RES (136)..(136): Selenocysteine
  MOD_RES (162)..(162): Selenocysteine
  MOD_RES (167)..(167): Selenocysteine
  MOD_RES (206)..(206): Selenocysteine
  MOD_RES (229)..(229): Selenocysteine
  MOD_RES (234)..(234): Selenocysteine
  MOD_RES (239)..(239): Selenocysteine
  MOD_RES (252)..(252): Selenocysteine
  MOD_RES (256)..(256): Selenocysteine
  MOD_RES (260)..(260): Selenocysteine
MEADKDDXQQILKEHSPDEFIKDEQNKGLIDEIXKKNIQLKKEIQKLEXELQEAXKEFQIKEDIPEXKMKFLSVEXPENDSQLSNISCSFQVSSKVPYEIQKGQALIXFEKEEVAQNVVSMSKHHVQIKDVNLEVXAKPVPLNSGVRFQVYVEVSKMKINVXEIPDXLREDQMRDKLELSFSKSRNGGGEVDRVDYDRQSGSAVIXFVEIGVADKILKKKEYPLYINQXCHRVXVSPYXEIHLKKYQIFSGXSKRXVLLXGMEGIQMDEEIVEDLINIHFQRAKNGGGEVDVVKCSLGQPHIAYFEE

SEQ ID NO: 17883 - protein, 153 aa, Homo sapiens
  MOD_RES (77)..(77): Selenocysteine
  MOD_RES (81)..(81): Selenocysteine
  MOD_RES (86)..(86): Selenocysteine
  MOD_RES (116)..(116): Selenocysteine
  MOD_RES (122)..(122): Selenocysteine
  MOD_RES (127)..(127): Selenocysteine
  MOD_RES (129)..(129): Selenocysteine
MKHLRPQFPLILAIYCFCMLQIPSSGFPQPLADPSDGLDIVQLEQLAYCLSQWAPLSRQPKDNQDIYKRFLFHYSRXQEAXHPVKXGFPPVHPLMHLAAKLANRRMKRILQRGSGXAAVDFXKKDHXAXWGRPFFLFRPRNGRNIEDEAQIQW

SEQ ID NO: 17884 - protein, 137 aa, Homo sapiens
  MOD_RES (7)..(7): Selenocysteine
  MOD_RES (52)..(52): Selenocysteine
  MOD_RES (71)..(71): Selenocysteine
  MOD_RES (108)..(108): Selenocysteine
  MOD_RES (122)..(122): Selenocysteine
  MOD_RES (132)..(132): Selenocysteine
MADESEXAVKPPAPPLPQMMEGNGNGHEHCSDCENEEDNSYNRGGLSPANDXGAKKKKKKQKKKKEKGSEXDSAQDQPVKMNSLPAERIQEIQKAIELFSVGQGPAKXMEEASKRSYQFWDXQPVPKLAKRXVHPPE

SEQ ID NO: 17885 - protein, 496 aa, Homo sapiens
  MOD_RES (7)..(7): Selenocysteine
  MOD_RES (52)..(52): Selenocysteine
  MOD_RES (71)..(71): Selenocysteine
  MOD_RES (108)..(108): Selenocysteine
  MOD_RES (122)..(122): Selenocysteine
  MOD_RES (134)..(134): Selenocysteine
  MOD_RES (151)..(151): Selenocysteine
  MOD_RES (157)..(157): Selenocysteine
  MOD_RES (174)..(174): Selenocysteine
  MOD_RES (238)..(238): Selenocysteine
  MOD_RES (268)..(268): Selenocysteine
  MOD_RES (282)..(282): Selenocysteine
  MOD_RES (293)..(293): Selenocysteine
  MOD_RES (319)..(319): Selenocysteine
  MOD_RES (323)..(323): Selenocysteine
  MOD_RES (332)..(332): Selenocysteine
  MOD_RES (335)..(335): Selenocysteine
  MOD_RES (343)..(343): Selenocysteine
  MOD_RES (354)..(354): Selenocysteine
  MOD_RES (363)..(363): Selenocysteine
  MOD_RES (384)..(384): Selenocysteine
  MOD_RES (395)..(395): Selenocysteine
  MOD_RES (402)..(402): Selenocysteine
  MOD_RES (406)..(406): Selenocysteine
  MOD_RES (412)..(412): Selenocysteine
  MOD_RES (427)..(427): Selenocysteine
  MOD_RES (429)..(429): Selenocysteine
  MOD_RES (460)..(460): Selenocysteine
MADESEXAVKPPAPPLPQMMEGNGNGHEHCSDCENEEDNSYNRGGLSPANDXGAKKKKKKQKKKKEKGSEXDSAQDQPVKMNSLPAERIQEIQKAIELFSVGQGPAKXMEEASKRSYQFWDXQPVPKLGEVVNXHGPVEPDKDNIRQEPYXLPQGFXWDALDLGDRGVLKELYXLLNENYVEDDDNMFRFDYSPEFLLWALRPPGWLPQWHCGVRVVSSRKLVGFISAIPANIHIYDXEKKMVEINFLCVHKKLRSKRVAPVLIREIXRRVHLEGIFQAVYXAGVVLPKPVGXCRYWHRSLNPRKLIEVKFSHLSRNMXMQRXMKLYRLPEXPKXAGLRPMEXKDIPVVHQLLXRYLKQFHLXPVMSQEEVEHWFYPQENIIDXFVVENANGEVXDFLSFYXLPSXIMNHPXHKSLKAAYSFYNVHXQXPLLDLMSDALVLAKMKGFDVFNALDLMENKXFLEKLKFGIGDGNLQYYLYNWKCPSMGAEKVGLVLQ

SEQ ID NO: 17886 - protein, 72 aa, Homo sapiens
  MOD_RES (28)..(28): Selenocysteine
  MOD_RES (42)..(42): Selenocysteine
  MOD_RES (54)..(54): Selenocysteine
  MOD_RES (71)..(71): Selenocysteine
MNSLPAERIQEIQKAIELFSVGQGPAKXMEEASKRSYQFWDXQPVPKLGEVVNXHGPVEPDKDNIRQEPYXL

SEQ ID NO: 17887 - protein, 88 aa, Homo sapiens
  MOD_RES (1)..(1): Any amino acid
  MOD_RES (6)..(6): Selenocysteine
  MOD_RES (51)..(51): Selenocysteine
  MOD_RES (70)..(70): Selenocysteine
XDESEXAVKPPAPPLPQMMEGNGNGHEHCSDCENEEDNSYNRGGLSPANDXGAKKKKKKQKKKKEKGSEXDSAQDQPVKVGVQKYEHG

SEQ ID NO: 17888 - protein, 498 aa, Homo sapiens
  MOD_RES (21)..(21): Selenocysteine
  MOD_RES (32)..(32): Selenocysteine
  MOD_RES (64)..(64): Selenocysteine
  MOD_RES (124)..(124): Selenocysteine
  MOD_RES (135)..(135): Selenocysteine
  MOD_RES (162)..(162): Selenocysteine
  MOD_RES (176)..(176): Selenocysteine
  MOD_RES (270)..(270): Selenocysteine
  MOD_RES (284)..(284): Selenocysteine
  MOD_RES (295)..(295): Selenocysteine
  MOD_RES (321)..(321): Selenocysteine
  MOD_RES (325)..(325): Selenocysteine
  MOD_RES (335)..(335): Selenocysteine
  MOD_RES (337)..(337): Selenocysteine
  MOD_RES (357)..(357): Selenocysteine
  MOD_RES (386)..(386): Selenocysteine
  MOD_RES (397)..(397): Selenocysteine
  MOD_RES (404)..(404): Selenocysteine
  MOD_RES (408)..(408): Selenocysteine
  MOD_RES (429)..(429): Selenocysteine
  MOD_RES (431)..(431): Selenocysteine
  MOD_RES (462)..(462): Selenocysteine
  MOD_RES (488)..(488): Selenocysteine
MAEDSESAASQQSLELDDQDXCGIDGDNEEEXEHAKGSPGGYLGAKKKKKKQKRKKEKPNSGGXKSDSASDSQEIKIQQPSKNPSVPMQKLQDIQRAMELLSACQGPARNIDEAAKHRYQFWDXQPVPKLDEVIXSHGAIEPDKDNVRQEPYSLPQGFMWDXLDLSDAEVLKELYXLLNENYVEDDDNMFRFDYSPEFLLWALRPPGWLLQWHCGVRVSSNKKLVGFISAIPANIRIYDSVKKMVEINFLCVHKKLRSKRVAPVLIREIXRRVNLEGIFQAVYXAGVVLPKPIAXCRYWHRSLNPRKLVEVKFSHLSRNMXLQRXMKLYRLPDVXKXSGLRPMEPKDIKSVRELINXYLKQFHLAPVMDEEEVAHWFLPREHIIDXFVVESPNGKLXDFLSFYXLPSXVMHHPAHKSLKAAYSFYNIHXEXPLLDLMSDALILAKSKGFDVFNALDLMENKXFLEKLKFGIGDGNLQYYLYNWRCPGXDSEKVGLVLQ

SEQ ID NO: 17889 - protein, 485 aa, Homo sapiens
  MOD_RES (7)..(7): Selenocysteine
  MOD_RES (40)..(40): Selenocysteine
  MOD_RES (56)..(57): Selenocysteine
  MOD_RES (111)..(111): Selenocysteine
  MOD_RES (122)..(122): Selenocysteine
  MOD_RES (149)..(149): Selenocysteine
  MOD_RES (163)..(163): Selenocysteine
  MOD_RES (257)..(257): Selenocysteine
  MOD_RES (271)..(271): Selenocysteine
  MOD_RES (282)..(282): Selenocysteine
  MOD_RES (308)..(308): Selenocysteine
  MOD_RES (312)..(312): Selenocysteine
  MOD_RES (322)..(322): Selenocysteine
  MOD_RES (324)..(324): Selenocysteine
  MOD_RES (344)..(344): Selenocysteine
  MOD_RES (373)..(373): Selenocysteine
  MOD_RES (384)..(384): Selenocysteine
  MOD_RES (391)..(391): Selenocysteine
  MOD_RES (395)..(395): Selenocysteine
  MOD_RES (416)..(416): Selenocysteine
  MOD_RES (418)..(418): Selenocysteine
  MOD_RES (449)..(449): Selenocysteine
  MOD_RES (475)..(475): Selenocysteine
MRRRRSXPKEVLEGIWEPKRKRRNRREKRRNQIPEAPSQXRHLIPRRLKFSSLRNXXPSGSRFQREQPWNPSVPMQKLQDIQRAMELLSACQGPARNIDEAAKHRYQFWDXQPVPKLDEVIXSHGAIEPDKDNVRQEPYSLPQGFMWDXLDLSDAEVLKELYXLLNENYVEDDDNMFRFDYSPEFLLWALRPPGWLLQWHCGVRVSSNKKLVGFISAIPANIRIYDSVKKMVEINFLCVHKKLRSKRVAPVLIREIXRRVNLEGIFQAVYXAGVVLPKPIAXCRYWHRSLNPRKLVEVKFSHLSRNMXLQRXMKLYRLPDVXKXSGLRPMEPKDIKSVRELINXYLKQFHLAPVMDEEEVAHWFLPREHIIDXFVVESPNGKLXDFLSFYXLPSXVMHHPAHKSLKAAYSFYNIHXEXPLLDLMSDALILAKSKGFDVFNALDLMENKXFLEKLKFGIGDGNLQYYLYNWRCPGXDSEKVGLVLQ

SEQ ID NO: 17890 - protein, 158 aa, Homo sapiens
  MOD_RES (4)..(4): Selenocysteine
  MOD_RES (85)..(85): Selenocysteine
  MOD_RES (95)..(95): Selenocysteine
MLRXESCRPRSPAGQVAAASPLLLLLLLLAWCAGACRGAPILPQGLQPEQQLQLWNEASNALEELCFMIMGMLPKPQEQDEKDNXKRFLFHYSKXQKLGKSNVVSSVVHPLLQLVPHLHERRMKRFRVDEEFQSPFASQSRGYFLFRPRNGRRSAGFI

SEQ ID NO: 17891 - protein, 149 aa, Homo sapiens
  MOD_RES (4)..(4): Selenocysteine
  MOD_RES (61)..(61): Selenocysteine
  MOD_RES (101)..(101): Selenocysteine
  MOD_RES (111)..(111): Selenocysteine
MLRXESCRPRSPAGQVAAASPLLLLLLLLAWCAGACRGAPILPQGLQPEQQLQLWNEIDDXCSSFLSIDSQPQASNALEELCFMIMGMLPKPQEQDEKDNXKRFLFHYSKXQKLGKSNVVEEFQSPFASQSRGYFLFRPRNGRRSAGFI

SEQ ID NO: 17892 - protein, 174 aa, Homo sapiens
  MOD_RES (4)..(4): Selenocysteine
  MOD_RES (61)..(61): Selenocysteine
  MOD_RES (101)..(101): Selenocysteine
  MOD_RES (111)..(111): Selenocysteine
MLRXESCRPRSPAGQVAAASPLLLLLLLLAWCAGACRGAPILPQGLQPEQQLQLWNEIDDXCSSFLSIDSQPQASNALEELCFMIMGMLPKPQEQDEKDNXKRFLFHYSKXQKLGKSNVVSSVVHPLLQLVPHLHERRMKRFRVDEEFQSPFASQSRGYFLFRPRNGRRSAGFI

SEQ ID NO: 17893 - protein, 147 aa, Homo sapiens
  MOD_RES (4)..(4): Selenocysteine
  MOD_RES (61)..(61): Selenocysteine
MLRXESCRPRSPAGQVAAASPLLLLLLLLAWCAGACRGAPILPQGLQPEQQLQLWNEIDDXCSSFLSIDSQPQASNALEELCFMIMGMLPKPQSSVVHPLLQLVPHLHERRMKRFRVDEEFQSPFASQSRGYFLFRPRNGRRSAGFI

SEQ ID NO: 17894 - protein, 426 aa, Homo sapiens
  MOD_RES (2)..(2): Selenocysteine
  MOD_RES (43)..(43): Selenocysteine
  MOD_RES (57)..(57): Selenocysteine
  MOD_RES (66)..(66): Selenocysteine
  MOD_RES (81)..(81): Selenocysteine
  MOD_RES (93)..(93): Selenocysteine
  MOD_RES (95)..(95): Selenocysteine
  MOD_RES (138)..(138): Selenocysteine
  MOD_RES (153)..(153): Selenocysteine
  MOD_RES (174)..(174): Selenocysteine
  MOD_RES (197)..(197): Selenocysteine
  MOD_RES (234)..(235): Selenocysteine
  MOD_RES (282)..(282): Selenocysteine
  MOD_RES (296)..(296): Selenocysteine
  MOD_RES (327)..(327): Selenocysteine
  MOD_RES (366)..(366): Selenocysteine
  MOD_RES (393)..(394): Selenocysteine
  MOD_RES (397)..(397): Selenocysteine
  MOD_RES (423)..(423): Selenocysteine
MXPLCLNCSVLPGDLYPGGARNPMACNGSAARGHFDPEDLNLXDEALRLKYLGPQQXELFMPICAXYLLIFVVGAVGNGLXCLVILRHKAMRXPXNYYLFSLAVSDLLVLLVGLPLELYEMWHNYPFLLGVGGCYFRXLLFEMVCLASVLNVXALSVERYVAVVHPLQARSMVXRAHVRRVLGAVWGLAMLCSLPNXSLHGIRQLHVPCRGPVPDSAVCMLVRPRALYNMVVQXXALLFFCLPMAIMSVLYLLIGLRLRRERLLLMQEAKGRGSAAARSRYXCRLQQHDRGRRQVXKMLFVLVVVFGICWAPFHADRVMWSVVSQWXDGLHLAFQHVHVISGIFFYLGSAANPVLYSLMSSRFREXFQEALCLGACCHRLRPRHSSHSLSRMXXGSXLCDVGSLGSWVHPLAGNDGPEAQQEXDPS

SEQ ID NO: 17895 - protein, 415 aa, Homo sapiens
  MOD_RES (29)..(29): Selenocysteine
  MOD_RES (78)..(78): Selenocysteine
  MOD_RES (80)..(80): Selenocysteine
  MOD_RES (123)..(123): Selenocysteine
  MOD_RES (128)..(128): Selenocysteine
  MOD_RES (138)..(139): Selenocysteine
  MOD_RES (159)..(159): Selenocysteine
  MOD_RES (182)..(182): Selenocysteine
  MOD_RES (203)..(203): Selenocysteine
  MOD_RES (205)..(205): Selenocysteine
  MOD_RES (220)..(220): Selenocysteine
  MOD_RES (230)..(230): Selenocysteine
  MOD_RES (367)..(367): Selenocysteine
  MOD_RES (375)..(375): Selenocysteine
  MOD_RES (405)..(405): Selenocysteine
  MOD_RES (415)..(415): Selenocysteine
MSGMEKLQNASWIYQQKLEDPFQKHLNSXEEYLAFLCGPRRSHFFLPVSVVYVPIFVVGVIGNVLVCLVILQHQAMKXPXNYYLFSLAVSDLLVLLLGMPLEVYEMWRNYPFLFGPVGCYFKXALFEXVCFASILSIXXVSVERYVAILHPFRAKLQSXRRRALRILGIVWGFSVLFSLPNXSIHGIKFHYFPNGSLVPGSAXCXVIKPMWIYNFIIQVXSFLFYLLPMXVISVLYYLMALRLKKDKSLEADEGNANIQRPCRKSVNKMLFVLVLVFAICWAPFHIDRLFFSFVEEWSESLAAVFNLVHVVSGVFFYLSSAVNPIIYNLLSRRFQAAFQNVISSFHKQWHSQHDPQLPPAQRNIFLXECHFVELXEDIGPQFPCQSSMHNSHLPAALSSEQMSRXNYQSFHFNKX

SEQ ID NO: 17896 - protein, 264 aa, Homo sapiens
  MOD_RES (6)..(6): Selenocysteine
  MOD_RES (10)..(10): Selenocysteine
  MOD_RES (67)..(67): Selenocysteine
  MOD_RES (84)..(84): Selenocysteine
  MOD_RES (112)..(112): Selenocysteine
  MOD_RES (144)..(144): Selenocysteine
  MOD_RES (163)..(163): Selenocysteine
  MOD_RES (175)..(175): Selenocysteine
  MOD_RES (231)..(231): Selenocysteine
  MOD_RES (245)..(245): Selenocysteine
MESGFXSKDXYLSHFNPRDYLEKYYKFGSRHSAESQILKHLLKNLFKIFCLDGVKGDLLIDIGSGPXIYQLLSACESFKEIVVXDYSDQNLQELEKWLKKEPEAFDWSPVVXYVCDLEGNRVKGPEKEEKLRQAVKQVLKCDVXQSQPLGAVPLPPADCVLSXLCLDAACPDLPXYCRALRNLGSLLKPGGFLVIMDALKSSYYMIGEQKFSSLPLGREAVEAAVKEAGYXIEWFEVISQSYSSXMANNEGLFSLVARKLSRPL

SEQ ID NO: 17897 - protein, 659 aa, Homo sapiens
  MOD_RES (6)..(6): Selenocysteine
  MOD_RES (8)..(8): Selenocysteine
  MOD_RES (15)..(15): Selenocysteine
  MOD_RES (18)..(18): Selenocysteine
  MOD_RES (67)..(67): Selenocysteine
  MOD_RES (96)..(96): Selenocysteine
  MOD_RES (126)..(126): Selenocysteine
  MOD_RES (136)..(136): Selenocysteine
  MOD_RES (151)..(151): Selenocysteine
  MOD_RES (172)..(172): Selenocysteine
  MOD_RES (180)..(180): Selenocysteine
  MOD_RES (217)..(217): Selenocysteine
  MOD_RES (229)..(229): Selenocysteine
  MOD_RES (250)..(250): Selenocysteine
  MOD_RES (268)..(268): Selenocysteine
  MOD_RES (275)..(275): Selenocysteine
  MOD_RES (277)..(277): Selenocysteine
  MOD_RES (308)..(308): Selenocysteine
  MOD_RES (312)..(312): Selenocysteine
  MOD_RES (379)..(379): Selenocysteine
  MOD_RES (388)..(388): Selenocysteine
  MOD_RES (392)..(392): Selenocysteine
  MOD_RES (396)..(396): Selenocysteine
  MOD_RES (407)..(407): Selenocysteine
  MOD_RES (430)..(430): Selenocysteine
  MOD_RES (457)..(457): Selenocysteine
  MOD_RES (460)..(460): Selenocysteine
  MOD_RES (508)..(508): Selenocysteine
  MOD_RES (518)..(518): Selenocysteine
  MOD_RES (537)..(537): Selenocysteine
  MOD_RES (561)..(561): Selenocysteine
  MOD_RES (599)..(599): Selenocysteine
  MOD_RES (624)..(624): Selenocysteine
MALLLXLXSPDLEGXWDXRDKDGFKAQEGPPLAVPEFPVCGLYRIYGVCGSFSSFFIIRCSLCALEXLKSPQHDPLEIPEQSLKLIPLVSGKRELXRGQKAGEKPLAAGPGEEELLRGSAPHAQDXQSEELPPSCXISGEKKPPAVSGEAXGADAGRLCPPPRSRAPHKDRXLARSRPQXQGEDCSLPVGEVKIGKRSYSPAPGKQKKPNAMGLAPXSSPGAPNSARAXHNPVPCGSGRGPCHLANLLSXLAQSNQNRDHKQGPPEVXCQIRKKXRXLYRSDQLEELEKIFQEDHYPDSDKRREIAQXVGVXPQRIMVWFQNRRAKWRKMEKLNGKESKDNPAAPGPASSQCSSAAEILPAVPMEPKPDPFPQESPLDXFPEPPMLLXSDQXLAPXQPSEGAQRVVXPPLFSPPPVRRADLPFPLGPVHXPQLMPLLMDVAGSDSSHKDGPCGSWGXSIXLPPPCSYLEELEPQDYQQSNQPGPFQFSQAPQPPLFQSPQPKLPYLPXFPFSMPSSLXLPPPEDSLFMFPCGPSGGXSQGYCPGASSGQILMQPPAGNIGXASWSDPCLPELPFPGPFCPQALGHPPGGDGYFPDLFPXPCPQALGRQPSSALSWMPEGARPGXGPLLSKAKEEPPAASLDQPSALEEARGDDKNSHVP

SEQ ID NO: 17898 - protein, 691 aa, Homo sapiens
  MOD_RES (6)..(6): Selenocysteine
  MOD_RES (8)..(8): Selenocysteine
  MOD_RES (15)..(15): Selenocysteine
  MOD_RES (18)..(18): Selenocysteine
  MOD_RES (67)..(67): Selenocysteine
  MOD_RES (96)..(96): Selenocysteine
  MOD_RES (126)..(126): Selenocysteine
  MOD_RES (136)..(136): Selenocysteine
  MOD_RES (151)..(151): Selenocysteine
  MOD_RES (172)..(172): Selenocysteine
  MOD_RES (180)..(180): Selenocysteine
  MOD_RES (217)..(217): Selenocysteine
  MOD_RES (229)..(229): Selenocysteine
  MOD_RES (250)..(250): Selenocysteine
  MOD_RES (268)..(268): Selenocysteine
  MOD_RES (275)..(275): Selenocysteine
  MOD_RES (277)..(277): Selenocysteine
  MOD_RES (308)..(308): Selenocysteine
  MOD_RES (312)..(312): Selenocysteine
  MOD_RES (334)..(334): Selenocysteine
  MOD_RES (337)..(337): Selenocysteine
  MOD_RES (411)..(411): Selenocysteine
  MOD_RES (420)..(420): Selenocysteine
  MOD_RES (424)..(424): Selenocysteine
  MOD_RES (428)..(428): Selenocysteine
  MOD_RES (439)..(439): Selenocysteine
  MOD_RES (462)..(462): Selenocysteine
  MOD_RES (489)..(489): Selenocysteine
  MOD_RES (492)..(492): Selenocysteine
  MOD_RES (540)..(540): Selenocysteine
  MOD_RES (550)..(550): Selenocysteine
  MOD_RES (569)..(569): Selenocysteine
  MOD_RES (593)..(593): Selenocysteine
  MOD_RES (631)..(631): Selenocysteine
  MOD_RES (656)..(656): Selenocysteine
MALLLXLXSPDLEGXWDXRDKDGFKAQEGPPLAVPEFPVCGLYRIYGVCGSFSSFFIIRCSLCALEXLKSPQHDPLEIPEQSLKLIPLVSGKRELXRGQKAGEKPLAAGPGEEELLRGSAPHAQDXQSEELPPSCXISGEKKPPAVSGEAXGADAGRLCPPPRSRAPHKDRXLARSRPQXQGEDCSLPVGEVKIGKRSYSPAPGKQKKPNAMGLAPXSSPGAPNSARAXHNPVPCGSGRGPCHLANLLSXLAQSNQNRDHKQGPPEVXCQIRKKXRXLYRSDQLEELEKIFQEDHYPDSDKRREIAQXVGVXPQRIMVKGAGSLVAGWSGGGPXIEXLELQSERSAVAWVWFQNRRAKWRKMEKLNGKESKDNPAAPGPASSQCSSAAEILPAVPMEPKPDPFPQESPLDXFPEPPMLLXSDQXLAPXQPSEGAQRVVXPPLFSPPPVRRADLPFPLGPVHXPQLMPLLMDVAGSDSSHKDGPCGSWGXSIXLPPPCSYLEELEPQDYQQSNQPGPFQFSQAPQPPLFQSPQPKLPYLPXFPFSMPSSLXLPPPEDSLFMFPCGPSGGXSQGYCPGASSGQILMQPPAGNIGXASWSDPCLPELPFPGPFCPQALGHPPGGDGYFPDLFPXPCPQALGRQPSSALSWMPEGARPGXGPLLSKAKEEPPAASLDQPSALEEARGDDKNSHVP

SEQ ID NO: 17899 - protein, 749 aa, Homo sapiens
  MOD_RES (15)..(15): Selenocysteine
  MOD_RES (40)..(40): Selenocysteine
  MOD_RES (150)..(150): Selenocysteine
  MOD_RES (166)..(166): Selenocysteine
  MOD_RES (183)..(184): Selenocysteine
  MOD_RES (199)..(199): Selenocysteine
  MOD_RES (209)..(209): Selenocysteine
  MOD_RES (267)..(268): Selenocysteine
  MOD_RES (286)..(286): Selenocysteine
  MOD_RES (304)..(304): Selenocysteine
  MOD_RES (327)..(327): Selenocysteine
  MOD_RES (339)..(339): Selenocysteine
  MOD_RES (347)..(347): Selenocysteine
  MOD_RES (361)..(361): Selenocysteine
  MOD_RES (363)..(363): Selenocysteine
  MOD_RES (393)..(394): Selenocysteine
  MOD_RES (399)..(399): Selenocysteine
  MOD_RES (421)..(421): Selenocysteine
  MOD_RES (448)..(448): Selenocysteine
  MOD_RES (463)..(463): Selenocysteine
  MOD_RES (530)..(530): Selenocysteine
  MOD_RES (608)..(608): Selenocysteine
  MOD_RES (613)..(613): Selenocysteine
  MOD_RES (616)..(616): Selenocysteine
  MOD_RES (678)..(678): Selenocysteine
  MOD_RES (692)..(692): Selenocysteine
MAAAGSRKRRLAELXVDEFLASGFDSESESESENSPQAEXREAREAARSPDKPGGSPSASRRKGRASEHKDQLSRLKDRDPEFYKFLQENDQSLLNFSDSDSSEEEEGPFHSLPDVLEEASEEEDGAEEGEDGDRVPRGLKGKKNSVPVXVAMVERWKQAAKQRLXPKLFHEVVQAFRAAVAXXRGDQESAEANKFQVXDSAAFNALVXFCIRDLIGCLQKLLFGKVAKDSSRMLQPSSSPLWGKLRVDIKAYLGSAIQLVSCLSEXXVLAAVLRHISVLVPCFLXFPKQCRMLLKRMVIVWSXGEESLRVLAFLVLSRVCRHKKDXFLGPVLKQMYIXYVRNCKFXSPGALPFISFMQWXLXELLALEPGVAYQHAFLYIRQLAIHLRNAMXXRKKEXYQSVYNWQYVHCLFLWCRVLSXAGPSEALQPLVYPLAQVIIGCIKLIPXARFYPLRMHCIRALXLLSGSSGAFIPVLPFILEMFQQVDFNRKPGRMSSKPINFSVILKLSNVNLQEKAYRDGLVEQLYDLXLEYLHSQAHCIGFPELVLPVVLQLKSFLRECKVANYCRQVQQLLGKVQENSAYICSRRQRVSFGVSEQQAVEAWEKLXREEGXPLXLYYSHWRKLRDREIQLEISGKERLEDLNFPEIKRRKMADRKDEDRKQFKDLFDLNSSEEDDXEGFSERGILRPLSXRHGVEDDEEDEEEGEEDSSNSEDGDPDAEAGLAPGELQQLAQGPEDELEDLQLSEDD

SEQ ID NO: 17900 - protein, 431 aa, Homo sapiens
  MOD_RES (63)..(63): Selenocysteine
  MOD_RES (69)..(69): Selenocysteine
  MOD_RES (71)..(71): Selenocysteine
  MOD_RES (81)..(81): Selenocysteine
  MOD_RES (120)..(120): Selenocysteine
  MOD_RES (134)..(134): Selenocysteine
  MOD_RES (139)..(139): Selenocysteine
  MOD_RES (202)..(202): Selenocysteine
  MOD_RES (215)..(215): Selenocysteine
  MOD_RES (256)..(256): Selenocysteine
  MOD_RES (259)..(259): Selenocysteine
  MOD_RES (262)..(262): Selenocysteine
  MOD_RES (270)..(270): Selenocysteine
  MOD_RES (285)..(285): Selenocysteine
  MOD_RES (291)..(291): Selenocysteine
  MOD_RES (312)..(312): Selenocysteine
  MOD_RES (330)..(330): Selenocysteine
  MOD_RES (362)..(363): Selenocysteine
  MOD_RES (368)..(368): Selenocysteine
  MOD_RES (375)..(375): Selenocysteine
  MOD_RES (396)..(396): Selenocysteine
  MOD_RES (424)..(424): Selenocysteine
MFHSPRRLCSALLQRDAPGLRRLPAPGLRRPLSPPAAVPRPASPRLLAAASAASGAARSCSRXVCSMGXGXSRLYSALAKXLNSSAASQHPEYLVSPDPEHLEPIDPKELLEECRAVLHXRPPRFQRDFVDLRXDCPSXHPPIRVMQWNILAQALGEGKDNFVQCPVEALKWEERKCLILEEILAYQPDILCLQEVDHYFDXFQPLLSRLGYQGXFFPKPWSPCLDVEHNNGPDGCALFFLQNRFKLVNSANIRLXAMXLKXNQVAIAQXLECKESGRQFCIAVXHLKARXGWERFRSAQGCDLLQNLQNIXQGAKIPLIVCGDFNAEPXEEVYKHFASSSLNLNSAYKLLSADGQSEPPYXXWKIRXSGECRHXLDYIWYSKHALNVRSALDLLXEEQIGPNRLPSFNYPSDHLSLVCDFSFXEESDGLS

SEQ ID NO: 17901 - protein, 167 aa, Homo sapiens
  MOD_RES (63)..(63): Selenocysteine
  MOD_RES (69)..(69): Selenocysteine
  MOD_RES (71)..(71): Selenocysteine
  MOD_RES (81)..(81): Selenocysteine
  MOD_RES (120)..(120): Selenocysteine
  MOD_RES (134)..(134): Selenocysteine
  MOD_RES (139)..(139): Selenocysteine
MFHSPRRLCSALLQRDAPGLRRLPAPGLRRPLSPPAAVPRPASPRLLAAASAASGAARSCSRXVCSMGXGXSRLYSALAKXLNSSAASQHPEYLVSPDPEHLEPIDPKELLEECRAVLHXRPPRFQRDFVDLRXDCPSXHPPIRVMQWNILAQGMLDAFVPLQSSLL

SEQ ID NO: 17902 - protein, 45 aa, Homo sapiens
  MOD_RES (32)..(32): Selenocysteine
  MOD_RES (37)..(37): Selenocysteine
MEEQGHSEMEIIPSESHPHIQLLKSNRELLVXHIRNXQCLVDNLL

SEQ ID NO: 17903 - protein, 60 aa, Homo sapiens
  MOD_RES (32)..(32): Selenocysteine
  MOD_RES (37)..(37): Selenocysteine
MEEQGHSEMEIIPSESHPHIQLLKSNRELLVXHIRNXQCLVDNLLKNDYFSAEDAEIVCA

SEQ ID NO: 17904 - protein, 779 aa, Homo sapiens
  MOD_RES (32)..(32): Selenocysteine
  MOD_RES (37)..(37): Selenocysteine
  MOD_RES (63)..(63): Selenocysteine
  MOD_RES (115)..(115): Selenocysteine
  MOD_RES (123)..(123): Selenocysteine
  MOD_RES (130)..(130): Selenocysteine
  MOD_RES (162)..(162): Selenocysteine
  MOD_RES (187)..(188): Selenocysteine
  MOD_RES (197)..(197): Selenocysteine
  MOD_RES (221)..(221): Selenocysteine
  MOD_RES (282)..(282): Selenocysteine
  MOD_RES (331)..(331): Selenocysteine
  MOD_RES (334)..(334): Selenocysteine
  MOD_RES (418)..(418): Selenocysteine
  MOD_RES (420)..(420): Selenocysteine
  MOD_RES (422)..(422): Selenocysteine
  MOD_RES (429)..(429): Selenocysteine
  MOD_RES (446)..(446): Selenocysteine
  MOD_RES (452)..(452): Selenocysteine
  MOD_RES (459)..(459): Selenocysteine
  MOD_RES (479)..(479): Selenocysteine
  MOD_RES (519)..(519): Selenocysteine
  MOD_RES (525)..(525): Selenocysteine
  MOD_RES (537)..(537): Selenocysteine
  MOD_RES (555)..(556): Selenocysteine
  MOD_RES (588)..(588): Selenocysteine
  MOD_RES (651)..(651): Selenocysteine
  MOD_RES (662)..(662): Selenocysteine
  MOD_RES (683)..(683): Selenocysteine
  MOD_RES (731)..(731): Selenocysteine
  MOD_RES (741)..(741): Selenocysteine
  MOD_RES (753)..(753): Selenocysteine
  MOD_RES (759)..(759): Selenocysteine
  MOD_RES (769)..(769): Selenocysteine
MEEQGHSEMEIIPSESHPHIQLLKSNRELLVXHIRNXQCLVDNLLKNDYFSAEDAEIVCACPXQPDKVRKILDLVQSKGEEVSEFFLYLLQQLADAYVDLRPWLLEIGFSPSLLXQSKVVVNXDPVSRYXQQLRHHLGRDSKFVLCYAQKEELLLEEIYMDXIMELVGFSNESLGSLNSLACLLDHXXGILNEQGEXIFILGDAGVGKSMLLQRLQSLWAXGRLDAGVKFFFHFRCRMFSCFKESDRLCLQDLLFKHYCYPERDPEEVFAFLLRFPHVALFXFDGLDELHSDLDLSRVPDSSCPWEPAHPLVLLANLLSGKLLKGASKLLXARXGIEVPRQFLRKKVLLRGFSPSHLRAYARRMFPERALQDRLLSQLEANPNLCSLCSVPLFCWIIFRCFQHFRAAFEGSPQLPDCXMXLXDVFLLVXEVHLNRMQPSSLVQRNXRSPVEXLHAGRDXLCSLGQVAHRGMEKSLFVFXQEEVQASGLQERDMQLGFLRALPELGPGGDQQSYEFFHLXLQAFFXAFFLVLDDRVGXQELLRFFQEWMPPAGAAXXSCYPPFLPFQCLQGSGPAREDLFKNKDHFQFXNLFLCGLLSKAKQKLLRHLVPAAALRRKRKALWAHLFSSLRGYLKSLPRVQVESFNQVQAMPXFIWMLRCIYEXQSQKVGQLAARGICANYLKLXYCNACSADCSALSFVLHHFPKRLALDLDNNNLNDYGVRELQPCFSRLXVLRLSVNQIXDGGVKVLSEELXKYKIVXYLGLWKSVDXICFKKQGLLK

SEQ ID NO: 17905 - protein, 953 aa, Homo sapiens
  MOD_RES (32)..(32): Selenocysteine
  MOD_RES (37)..(37): Selenocysteine
  MOD_RES (63)..(63): Selenocysteine
  MOD_RES (115)..(115): Selenocysteine
  MOD_RES (123)..(123): Selenocysteine
  MOD_RES (130)..(130): Selenocysteine
  MOD_RES (162)..(162): Selenocysteine
  MOD_RES (187)..(188): Selenocysteine
  MOD_RES (197)..(197): Selenocysteine
  MOD_RES (221)..(221): Selenocysteine
  MOD_RES (282)..(282): Selenocysteine
  MOD_RES (331)..(331): Selenocysteine
  MOD_RES (334)..(334): Selenocysteine
  MOD_RES (418)..(418): Selenocysteine
  MOD_RES (420)..(420): Selenocysteine
  MOD_RES (422)..(422): Selenocysteine
  MOD_RES (429)..(429): Selenocysteine
  MOD_RES (446)..(446): Selenocysteine
  MOD_RES (452)..(452): Selenocysteine
  MOD_RES (459)..(459): Selenocysteine
  MOD_RES (479)..(479): Selenocysteine
  MOD_RES (519)..(519): Selenocysteine
  MOD_RES (525)..(525): Selenocysteine
  MOD_RES (537)..(537): Selenocysteine
  MOD_RES (555)..(556): Selenocysteine
  MOD_RES (588)..(588): Selenocysteine
  MOD_RES (651)..(651): Selenocysteine
  MOD_RES (662)..(662): Selenocysteine
  MOD_RES (683)..(683): Selenocysteine
  MOD_RES (731)..(731): Selenocysteine
  MOD_RES (741)..(741): Selenocysteine
  MOD_RES (753)..(753): Selenocysteine
  MOD_RES (759)..(759): Selenocysteine
  MOD_RES (769)..(769): Selenocysteine
  MOD_RES (777)..(777): Selenocysteine
  MOD_RES (787)..(787): Selenocysteine
  MOD_RES (797)..(797): Selenocysteine
  MOD_RES (843)..(844): Selenocysteine
  MOD_RES (854)..(854): Selenocysteine
  MOD_RES (868)..(868): Selenocysteine
  MOD_RES (876)..(876): Selenocysteine
  MOD_RES (897)..(897): Selenocysteine
  MOD_RES (909)..(909): Selenocysteine
  MOD_RES (913)..(913): Selenocysteine
  MOD_RES (924)..(924): Selenocysteine
  MOD_RES (927)..(927): Selenocysteine
MEEQGHSEMEIIPSESHPHIQLLKSNRELLVXHIRNXQCLVDNLLKNDYFSAEDAEIVCACPXQPDKVRKILDLVQSKGEEVSEFFLYLLQQLADAYVDLRPWLLEIGFSPSLLXQSKVVVNXDPVSRYXQQLRHHLGRDSKFVLCYAQKEELLLEEIYMDXIMELVGFSNESLGSLNSLACLLDHXXGILNEQGEXIFILGDAGVGKSMLLQRLQSLWAXGRLDAGVKFFFHFRCRMFSCFKESDRLCLQDLLFKHYCYPERDPEEVFAFLLRFPHVALFXFDGLDELHSDLDLSRVPDSSCPWEPAHPLVLLANLLSGKLLKGASKLLXARXGIEVPRQFLRKKVLLRGFSPSHLRAYARRMFPERALQDRLLSQLEANPNLCSLCSVPLFCWIIFRCFQHFRAAFEGSPQLPDCXMXLXDVFLLVXEVHLNRMQPSSLVQRNXRSPVEXLHAGRDXLCSLGQVAHRGMEKSLFVFXQEEVQASGLQERDMQLGFLRALPELGPGGDQQSYEFFHLXLQAFFXAFFLVLDDRVGXQELLRFFQEWMPPAGAAXXSCYPPFLPFQCLQGSGPAREDLFKNKDHFQFXNLFLCGLLSKAKQKLLRHLVPAAALRRKRKALWAHLFSSLRGYLKSLPRVQVESFNQVQAMPXFIWMLRCIYEXQSQKVGQLAARGICANYLKLXYCNACSADCSALSFVLHHFPKRLALDLDNNNLNDYGVRELQPCFSRLXVLRLSVNQIXDGGVKVLSEELXKYKIVXYLGLYNNQIXDVGARYVXKILDECKGLXHLKLGKNKIXSEGGKYLALAVKNSKSISEVGMWGNQVGDEGAKAFAEALRNHPSLXXLSLASNGISXEGGKSLARALQQNXSLEILWLXQNELNDEVAESLAEMLKVNQXLKHLWLIQNQIXAKGXAQLADALQSNXGIXEICLNGNLIKPEEAKVYEDEKRIICF

SEQ ID NO: 17906 - protein, 146 aa, Homo sapiens
  MOD_RES (64)..(64): Selenocysteine
  MOD_RES (70)..(70): Selenocysteine
MCSQEAFQAQRSQLVELLVSGSLEGFESVLDWLLSWEVLSWEDYEGFHLLGQPLSHLARRLLDXVWNKGXWACQKLIAAAQEAQADSQSPKLHGCWDPHSLHPARDLQSHRPAIVRRLHSHVENMLDLAWERGFVSQYECDEIRLP

SEQ ID NO: 17907 - protein, 1040 aa, Homo sapiens
  MOD_RES (91)..(91): Selenocysteine
  MOD_RES (97)..(97): Selenocysteine
  MOD_RES (176)..(176): Selenocysteine
  MOD_RES (189)..(189): Selenocysteine
  MOD_RES (218)..(218): Selenocysteine
  MOD_RES (228)..(229): Selenocysteine
  MOD_RES (239)..(239): Selenocysteine
  MOD_RES (245)..(245): Selenocysteine
  MOD_RES (253)..(253): Selenocysteine
  MOD_RES (275)..(275): Selenocysteine
  MOD_RES (284)..(284): Selenocysteine
  MOD_RES (294)..(294): Selenocysteine
  MOD_RES (307)..(307): Selenocysteine
  MOD_RES (347)..(347): Selenocysteine
  MOD_RES (377)..(377): Selenocysteine
  MOD_RES (389)..(389): Selenocysteine
  MOD_RES (398)..(398): Selenocysteine
  MOD_RES (401)..(401): Selenocysteine
  MOD_RES (405)..(405): Selenocysteine
  MOD_RES (424)..(424): Selenocysteine
  MOD_RES (440)..(440): Selenocysteine
  MOD_RES (476)..(476): Selenocysteine
  MOD_RES (509)..(511): Selenocysteine
  MOD_RES (526)..(526): Selenocysteine
  MOD_RES (546)..(546): Selenocysteine
  MOD_RES (596)..(596): Selenocysteine
  MOD_RES (605)..(605): Selenocysteine
  MOD_RES (646)..(646): Selenocysteine
  MOD_RES (674)..(674): Selenocysteine
  MOD_RES (695)..(695): Selenocysteine
  MOD_RES (770)..(770): Selenocysteine
  MOD_RES (777)..(777): Selenocysteine
  MOD_RES (856)..(856): Selenocysteine
  MOD_RES (884)..(884): Selenocysteine
  MOD_RES (899)..(899): Selenocysteine
  MOD_RES (996)..(996): Selenocysteine
  MOD_RES (1012)..(1012): Selenocysteine
  MOD_RES (1022)..(1022): Selenocysteine
  MOD_RES (1036)..(1036): Selenocysteine
MGEEGGSASHDEEERASVLLGHSPGCEMCSQEAFQAQRSQLVELLVSGSLEGFESVLDWLLSWEVLSWEDYEGFHLLGQPLSHLARRLLDXVWNKGXWACQKLIAAAQEAQADSQSPKLHGCWDPHSLHPARDLQSHRPAIVRRLHSHVENMLDLAWERGFVSQYECDEIRLPIFXPSQRARRLLDLAXVKANGLAAFLLQHVQELPVPLALPLEAAXCKKYMAKLRXXVSAQSRFLSXYDGAEXLCLEDIYXENVLEVWADVGMAGPPQKSPAXLGLEELFSXPGHLNDDADXVLVVGEAGSGKSXLLQRLHLLWAAGQDFQEFLFVFPFSCRQLQCMAKPLSVRXLLFEHCCWPDVGQEDIFQLLLDHPDRVLLXFDGFDEFKFRFXDRERHCSPXDPXSVQXLLFNLLQGNLLKNARKVVXSRPAAVSAFLRKYIRXEFNLKGFSEQGIELYLRKRHHEPGVADRLIRLLQEXSALHGLCHLPVFSWMVSKCHQELLLQEGGSPKXXXDMYLLILQHFLLHAXPPDSASQGLGPSLLRGRLPXLLHLGRLALWGLGMCCYVFSAQQLQAAQVSPDDISLGFLVRAKGVVPGSXAPLEFLHIXFQCFFAAFYLALSADVPPALLRHLFNCGRPGNSPMARLLPXMCIQASEGKDSSVAALLQKAEPHNLQIXAAFLAGLLSREHWGLLAECQXSEKALLRRQACARWCLARSLRKHFHSIPPAAPGEAKSVHAMPGFIWLIRSLYEMQEERLARKAARGLNVGHLKLXFCSVGPXECAALAFVLQHLRRPVALQLDYNSVGDIGVEQLLPCLGVCKALYLRDNNISDRGICKLIECALHCEQLQKLALFNNKLXDGCAHSMAKLLACRQNFLALRLGNNYIXAAGAQVLAEGLRGNXSLQFLGFWGNRVGDEGAQALAEALGDHQSLRWLSLVGNNIGSVGAQALALMLAKNVMLEELCLEENHLQDEGVCSLAEGLKKNSSLKILKLSNNCIXYLGAEALLQALERNDXILEVWLRGNXFSLEEVDKLGCRDXRLLL

SEQ ID NO: 17908 - protein, 35 aa, Homo sapiens
MGEEGGSASHDEEERASVLLGHSPGKRSRHCPVPA

SEQ ID NO: 17909 - protein, 60 aa, Homo sapiens
  MOD_RES (1)..(1): Any amino acid
  MOD_RES (10)..(10): Selenocysteine
  MOD_RES (17)..(17): Selenocysteine
XLNVGHLKLXFCSVGPXECAALAFVLQHLRRPVALQLDYNSVGDIGVEQLLPCLGVCKAL

SEQ ID NO: 17910 - protein, 169 aa, Homo sapiens
  MOD_RES (1)..(1): Any amino acid
  MOD_RES (10)..(10): Selenocysteine
  MOD_RES (17)..(17): Selenocysteine
  MOD_RES (96)..(96): Selenocysteine
  MOD_RES (111)..(111): Selenocysteine
XLNVGHLKLXFCSVGPXECAALAFVLQHLRRPVALQLDYNSVGDIGVEQLLPCLGVCKALYLRDNNISDRGICKLIECALHCEQLQKLALGNNYIXAAGAQVLAEGLRGNXSLQFLGFWGNRVGDEGAQALAEALGDHQSLRWLSLVGNNIGSVGAQALALMLAKNVML

SEQ ID NO: 17911 - protein, 292 aa, Homo sapiens
  MOD_RES (8)..(8): Selenocysteine
  MOD_RES (19)..(19): Selenocysteine
  MOD_RES (50)..(50): Selenocysteine
  MOD_RES (66)..(66): Selenocysteine
  MOD_RES (83)..(83): Selenocysteine
  MOD_RES (85)..(85): Selenocysteine
  MOD_RES (90)..(90): Selenocysteine
  MOD_RES (101)..(101): Selenocysteine
  MOD_RES (131)..(131): Selenocysteine
  MOD_RES (135)..(135): Selenocysteine
  MOD_RES (156)..(156): Selenocysteine
  MOD_RES (236)..(236): Selenocysteine
  MOD_RES (256)..(256): Selenocysteine
  MOD_RES (263)..(263): Selenocysteine
DQQLGIQXKDVAVDGQNWXFAFDFSFLSQQEDLAWAELRLQLSSPVDLPXEGSLAIEIFHQPKPDXEQASDSCLERFQMDLFXVXLSQVXFSLGSMVLEVXRPLSKWLKHPGALEKQMSRVAGECWPRPPXPPAXNVLLMLYSNLSQEQRQLGGSXLLWEAESSWRAQEGQLSWEWGKRHRRHHLPDRSQLCRKVKFQVDFNLIGWGSWIIYPKQYNAYRCEGECPNPVGEEFHPXNHAYIQSLLKRYQPHRVPSXCCAPVKXKPLSMLYVDNGRVLLDHHKDMIVEECGCL

SEQ ID NO: 17912 - protein, 347 aa, Homo sapiens
  MOD_RES (23)..(23): Selenocysteine
  MOD_RES (26)..(26): Selenocysteine
  MOD_RES (31)..(31): Selenocysteine
  MOD_RES (74)..(74): Selenocysteine
  MOD_RES (105)..(105): Selenocysteine
  MOD_RES (121)..(121): Selenocysteine
  MOD_RES (138)..(138): Selenocysteine
  MOD_RES (140)..(140): Selenocysteine
  MOD_RES (145)..(145): Selenocysteine
  MOD_RES (156)..(156): Selenocysteine
  MOD_RES (186)..(186): Selenocysteine
  MOD_RES (190)..(190): Selenocysteine
  MOD_RES (211)..(211): Selenocysteine
  MOD_RES (291)..(291): Selenocysteine
  MOD_RES (311)..(311): Selenocysteine
  MOD_RES (318)..(318): Selenocysteine
MHAHCLPFLLHAWWALLQAGAAXVAXALLRXRGQPSSPSPLAYMLSLYRDPLPRADIIRSLQAEDVAVDGQNWXFAFDFSFLSQQEDLAWAELRLQLSSPVDLPXEGSLAIEIFHQPKPDXEQASDSCLERFQMDLFXVXLSQVXFSLGSMVLEVXRPLSKWLKHPGALEKQMSRVAGECWPRPPXPPAXNVLLMLYSNLSQEQRQLGGSXLLWEAESSWRAQEGQLSWEWGKRHRRHHLPDRSQLCRKVKFQVDFNLIGWGSWIIYPKQYNAYRCEGECPNPVGEEFHPXNHAYIQSLLKRYQPHRVPSXCCAPVKXKPLSMLYVDNGRVLLDHHKDMIVEECGCL

SEQ ID NO: 17913 - protein, 232 aa, Homo sapiens
  MOD_RES (10)..(10): Selenocysteine
  MOD_RES (23)..(23): Selenocysteine
  MOD_RES (64)..(64): Selenocysteine
  MOD_RES (81)..(81): Selenocysteine
  MOD_RES (153)..(153): Selenocysteine
  MOD_RES (201)..(201): Selenocysteine
MERCPSLGVXLYALVVVLGLRAXPAGGQHYLHIRPAPSDNLPLVDLIEHPDPIFDPKEKDLNEXLLRSLLGGHYDPGFMAXSPPEDRPGGGGGAAGGAEDLAELDQLLRQRPSGAMPSEIKGLEFSEGLAQGKKQRLSKKLRRKLQMWLWSQXFCPVLYAWNDLGSRFWPRYVKVGSCFSKRSCSVPEGMVCKPSKSVHLXVLRWRCQRRGGQRCGWIPIQYPIISECKCSC

SEQ ID NO: 17914 - protein, 219 aa, Homo sapiens
  MOD_RES (11)..(11): Selenocysteine
  MOD_RES (22)..(22): Selenocysteine
  MOD_RES (41)..(41): Selenocysteine
  MOD_RES (83)..(83): Selenocysteine
  MOD_RES (97)..(97): Selenocysteine
  MOD_RES (99)..(99): Selenocysteine
  MOD_RES (103)..(103): Selenocysteine
  MOD_RES (109)..(109): Selenocysteine
  MOD_RES (129)..(129): Selenocysteine
  MOD_RES (131)..(131): Selenocysteine
  MOD_RES (189)..(189): Selenocysteine
  MOD_RES (195)..(195): Selenocysteine
  MOD_RES (200)..(200): Selenocysteine
MGNAQERPSEXIDRERKRLVEXLQADSGLLLDALLARGVLXGPEYEALDALPDAERRVRRLLLLVQGKGEAACQELLRCAQRXAGAPDPAWDWQHAXGXAAMXLHAQAXGRRRHPARGPHAPGCPELQXLXRPGALRAPRRCNPGPRRSQSQSWKLRPLKRLNRSRSQSQSWNPRLKQNQSRNWSQNRXQSPSPXSRKGXSPKIPEGQSSDRRCPAHAG

SEQ ID NO: 17915 - protein, 139 aa, Homo sapiens
  MOD_RES (11)..(11): Selenocysteine
  MOD_RES (22)..(22): Selenocysteine
  MOD_RES (41)..(41): Selenocysteine
  MOD_RES (83)..(83): Selenocysteine
  MOD_RES (114)..(114): Selenocysteine
  MOD_RES (122)..(123): Selenocysteine
MGNAQERPSEXIDRERKRLVEXLQADSGLLLDALLARGVLXGPEYEALDALPDAERRVRRLLLLVQGKGEAACQELLRCAQRXAGAPDPAWDWQHVGPGYRDRSYDPPCPGHWXPEAPGSGXXCPGLPRASDPDEAGGP

SEQ ID NO: 17916 - protein, 174 aa, Homo sapiens
  MOD_RES (11)..(11): Selenocysteine
  MOD_RES (22)..(22): Selenocysteine
  MOD_RES (41)..(41): Selenocysteine
  MOD_RES (83)..(83): Selenocysteine
  MOD_RES (114)..(114): Selenocysteine
  MOD_RES (122)..(123): Selenocysteine
  MOD_RES (149)..(149): Selenocysteine
MGNAQERPSEXIDRERKRLVEXLQADSGLLLDALLARGVLXGPEYEALDALPDAERRVRRLLLLVQGKGEAACQELLRCAQRXAGAPDPAWDWQHVGPGYRDRSYDPPCPGHWXPEAPGSGXXCPGLPRASDPDEAGGPEGSEAVQSGXPEEPEPELEAEASKEAEPEPEPEPE

SEQ ID NO: 17917 - protein, 206 aa, Homo sapiens
  MOD_RES (11)..(11): Selenocysteine
  MOD_RES (22)..(22): Selenocysteine
  MOD_RES (41)..(41): Selenocysteine
  MOD_RES (83)..(83): Selenocysteine
  MOD_RES (114)..(114): Selenocysteine
  MOD_RES (122)..(123): Selenocysteine
  MOD_RES (149)..(149): Selenocysteine
MGNAQERPSEXIDRERKRLVEXLQADSGLLLDALLARGVLXGPEYEALDALPDAERRVRRLLLLVQGKGEAACQELLRCAQRXAGAPDPAWDWQHVGPGYRDRSYDPPCPGHWXPEAPGSGXXCPGLPRASDPDEAGGPEGSEAVQSGXPEEPEPELEAEASKEAEPEPEPEPELEPEAEAEPEPELEPEPDPEPEPDFEERDESE

SEQ ID NO: 17918 - protein, 208 aa, Homo sapiens
  MOD_RES (11)..(11): Selenocysteine
  MOD_RES (22)..(22): Selenocysteine
  MOD_RES (41)..(41): Selenocysteine
  MOD_RES (83)..(83): Selenocysteine
  MOD_RES (114)..(114): Selenocysteine
  MOD_RES (122)..(123): Selenocysteine
  MOD_RES (149)..(149): Selenocysteine
MGNAQERPSEXIDRERKRLVEXLQADSGLLLDALLARGVLXGPEYEALDALPDAERRVRRLLLLVQGKGEAACQELLRCAQRXAGAPDPAWDWQHVGPGYRDRSYDPPCPGHWXPEAPGSGXXCPGLPRASDPDEAGGPEGSEAVQSGXPEEPEPELEAEASKEAEPEPEPEPELEPEAEAEPEPELEPEPDPEPEPDFEERDESEDS

SEQ ID NO: 17919 - protein, 270 aa, Homo sapiens
  MOD_RES (14)..(14): Selenocysteine
  MOD_RES (28)..(28): Selenocysteine
  MOD_RES (38)..(38): Selenocysteine
  MOD_RES (62)..(62): Selenocysteine
  MOD_RES (73)..(73): Selenocysteine
  MOD_RES (84)..(84): Selenocysteine
  MOD_RES (103)..(103): Selenocysteine
  MOD_RES (145)..(145): Selenocysteine
  MOD_RES (176)..(176): Selenocysteine
  MOD_RES (184)..(185): Selenocysteine
  MOD_RES (211)..(211): Selenocysteine
MPVLGKAGEERRAXADAWGQKEEPEEEXGQSVWRGRRXPSSPCWPPGPVLAEPSGGWDRAPXMGNAQERPSEXIDRERKRLVEXLQADSGLLLDALLARGVLXGPEYEALDALPDAERRVRRLLLLVQGKGEAACQELLRCAQRXAGAPDPAWDWQHVGPGYRDRSYDPPCPGHWXPEAPGSGXXCPGLPRASDPDEAGGPEGSEAVQSGXPEEPEPELEAEASKEAEPEPEPEPELEPEAEAEPEPELEPEPDPEPEPDFEERDESEDS

SEQ ID NO: 17920 - protein, 216 aa, Homo sapiens
  MOD_RES (1)..(1): Any amino acid
  MOD_RES (11)..(11): Selenocysteine
  MOD_RES (35)..(35): Selenocysteine
  MOD_RES (46)..(46): Selenocysteine
  MOD_RES (57)..(57): Selenocysteine
  MOD_RES (76)..(76): Selenocysteine
  MOD_RES (94)..(94): Selenocysteine
  MOD_RES (96)..(96): Selenocysteine
  MOD_RES (100)..(100): Selenocysteine
  MOD_RES (106)..(106): Selenocysteine
  MOD_RES (126)..(126): Selenocysteine
  MOD_RES (128)..(128): Selenocysteine
  MOD_RES (186)..(186): Selenocysteine
  MOD_RES (192)..(192): Selenocysteine
  MOD_RES (197)..(197): Selenocysteine
XGQSVWRGRRXPSSPCWPPGPVLAEPSGGWDRAPXMGNAQERPSEXIDRERKRLVEXLQADSGLLLDALLARGVLXGPEYEALDALPDAERRAXGXAAMXLHAQAXGRRRHPARGPHAPGCPELQXLXRPGALRAPRRCNPGPRRSQSQSWKLRPLKRLNRSRSQSQSWNPRLKQNQSRNWSQNRXQSPSPXSRKGXSPKIPEGQSSDRRCPAHAG

SEQ ID NO: 17921 - protein, 131 aa, Homo sapiens
  MOD_RES (1)..(1): Any amino acid
  MOD_RES (37)..(37): Selenocysteine
  MOD_RES (45)..(46): Selenocysteine
  MOD_RES (72)..(72): Selenocysteine
XSSPCWPPGPVLAEPSGGWDRGYRDRSYDPPCPGHWXPEAPGSGXXCPGLPRASDPDEAGGPEGSEAVQSGXPEEPEPELEAEASKEAEPEPEPEPELEPEAEAEPEPELEPEPDPEPEPDFEERDESEDS

SEQ ID NO: 17922 - protein, 106 aa, Homo sapiens
  MOD_RES (1)..(1): Any amino acid
  MOD_RES (20)..(20): Selenocysteine
  MOD_RES (26)..(26): Selenocysteine
  MOD_RES (31)..(31): Selenocysteine
  MOD_RES (43)..(43): Selenocysteine
  MOD_RES (53)..(53): Selenocysteine
  MOD_RES (64)..(64): Selenocysteine
XSWNPRLKQNQSRNWSQNRXQSPSPXSRKGXSPKVFLKARALXGGAPPMLDRXWDAAGAESDAXKARSSPVPLEVNKLRRVGRDLGSLHDSGCLPRNLGWVPLSPR

SEQ ID NO: 17923 - protein, 66 aa, Homo sapiens
  MOD_RES (6)..(6): Selenocysteine
  MOD_RES (15)..(15): Selenocysteine
  MOD_RES (56)..(56): Selenocysteine
MQSNKXFNLEKQNHXPRKHHQHHHQQQHHQQQQQQPPPPPIPANGQQASSQNEGLXIDLKNFRKPG

SEQ ID NO: 17924 - protein, 248 aa, Homo sapiens
  MOD_RES (6)..(6): Selenocysteine
  MOD_RES (15)..(15): Selenocysteine
  MOD_RES (56)..(56): Selenocysteine
  MOD_RES (69)..(69): Selenocysteine
  MOD_RES (71)..(71): Selenocysteine
  MOD_RES (86)..(86): Selenocysteine
  MOD_RES (118)..(118): Selenocysteine
  MOD_RES (120)..(120): Selenocysteine
  MOD_RES (151)..(151): Selenocysteine
MQSNKXFNLEKQNHXPRKHHQHHHQQQHHQQQQQQPPPPPIPANGQQASSQNEGLXIDLKNFRKPGEKXFXQRSRLFVGNLPPDIXEEEMRKLFEKYGKAGEVFIHKDKGFGFIRLEXRXLAEIAKVELDNMPLRGKQLRVRFACHSASLXVRNLPQEREQPPRFAQPGSFEYEYAMRWKALIEMEKQQQDQVDRNIKEAREKLEMEMEAARHEHQVMLMRQDLMRRQEELRRMEELHNQEVQKRKQL

SEQ ID NO: 17925 - protein, 207 aa, Homo sapiens
  MOD_RES (6)..(6): Selenocysteine
  MOD_RES (15)..(15): Selenocysteine
  MOD_RES (56)..(56): Selenocysteine
  MOD_RES (69)..(69): Selenocysteine
  MOD_RES (71)..(71): Selenocysteine
  MOD_RES (86)..(86): Selenocysteine
  MOD_RES (118)..(118): Selenocysteine
  MOD_RES (120)..(120): Selenocysteine
  MOD_RES (151)..(151): Selenocysteine
MQSNKXFNLEKQNHXPRKHHQHHHQQQHHQQQQQQPPPPPIPANGQQASSQNEGLXIDLKNFRKPGEKXFXQRSRLFVGNLPPDIXEEEMRKLFEKYGKAGEVFIHKDKGFGFIRLEXRXLAEIAKVELDNMPLRGKQLRVRFACHSASLXVRNLPQYVSNELLEEAFSVFGQVERAVVIVDDRGRPSGKGIVEFSGKPAARKALDR

SEQ ID NO: 17926 - protein, 471 aa, Homo sapiens
  MOD_RES (6)..(6): Selenocysteine
  MOD_RES (15)..(15): Selenocysteine
  MOD_RES (56)..(56): Selenocysteine
  MOD_RES (69)..(69): Selenocysteine
  MOD_RES (71)..(71): Selenocysteine
  MOD_RES (86)..(86): Selenocysteine
  MOD_RES (118)..(118): Selenocysteine
  MOD_RES (120)..(120): Selenocysteine
  MOD_RES (151)..(151): Selenocysteine
  MOD_RES (216)..(217): Selenocysteine
  MOD_RES (223)..(223): Selenocysteine
  MOD_RES (373)..(373): Selenocysteine
  MOD_RES (410)..(410): Selenocysteine
  MOD_RES (418)..(418): Selenocysteine
  MOD_RES (424)..(424): Selenocysteine
  MOD_RES (428)..(428): Selenocysteine
  MOD_RES (431)..(432): Selenocysteine
  MOD_RES (440)..(440): Selenocysteine
  MOD_RES (450)..(450): Selenocysteine
MQSNKXFNLEKQNHXPRKHHQHHHQQQHHQQQQQQPPPPPIPANGQQASSQNEGLXIDLKNFRKPGEKXFXQRSRLFVGNLPPDIXEEEMRKLFEKYGKAGEVFIHKDKGFGFIRLEXRXLAEIAKVELDNMPLRGKQLRVRFACHSASLXVRNLPQYVSNELLEEAFSVFGQVERAVVIVDDRGRPSGKGIVEFSGKPAARKALDRCSEGSFLLXXFPRPVXVEPMDQLDDEEGLPEKLVIKNQQFHKEREQPPRFAQPGSFEYEYAMRWKALIEMEKQQQDQVDRNIKEAREKLEMEMEAARHEHQVMLMRQDLMRRQEELRRMEELHNQEVQKRKQLELRQEEERRRREEEMRRQQEEMMRRQQEGFKGXFPDAREQEIRMGQMAMGGAMGINNRGAMPPAPVPAGXPAPPGPAXMMPDGXLGLXPPXXERFGQAAXMEGIGAIGGXPPAFNRAAPGAEFAPNKRRRY

SEQ ID NO: 17927 - protein, 124 aa, Homo sapiens
  MOD_RES (6)..(6): Selenocysteine
  MOD_RES (15)..(15): Selenocysteine
  MOD_RES (56)..(56): Selenocysteine
  MOD_RES (69)..(69): Selenocysteine
  MOD_RES (71)..(71): Selenocysteine
  MOD_RES (86)..(86): Selenocysteine
  MOD_RES (101)..(101): Selenocysteine
  MOD_RES (103)..(103): Selenocysteine
MQSNKXFNLEKQNHXPRKHHQHHHQQQHHQQQQQQPPPPPIPANGQQASSQNEGLXIDLKNFRKPGEKXFXQRSRLFVGNLPPDIXEEEMRKLFEKYGKEXRXLAEIAKVELDNMPLRGKQLRV

SEQ ID NO: 17928 - protein, 382 aa, Homo sapiens
  MOD_RES (29)..(29): Selenocysteine
  MOD_RES (31)..(31): Selenocysteine
  MOD_RES (62)..(62): Selenocysteine
  MOD_RES (127)..(128): Selenocysteine
  MOD_RES (134)..(134): Selenocysteine
  MOD_RES (284)..(284): Selenocysteine
  MOD_RES (321)..(321): Selenocysteine
  MOD_RES (329)..(329): Selenocysteine
  MOD_RES (335)..(335): Selenocysteine
  MOD_RES (339)..(339): Selenocysteine
  MOD_RES (342)..(343): Selenocysteine
  MOD_RES (351)..(351): Selenocysteine
  MOD_RES (361)..(361): Selenocysteine
MRKLFEKYGKAGEVFIHKDKGFGFIRLEXRXLAEIAKVELDNMPLRGKQLRVRFACHSASLXVRNLPQYVSNELLEEAFSVFGQVERAVVIVDDRGRPSGKGIVEFSGKPAARKALDRCSEGSFLLXXFPRPVXVEPMDQLDDEEGLPEKLVIKNQQFHKEREQPPRFAQPGSFEYEYAMRWKALIEMEKQQQDQVDRNIKEAREKLEMEMEAARHEHQVMLMRQDLMRRQEELRRMEELHNQEVQKRKQLELRQEEERRRREEEMRRQQEEMMRRQQEGFKGXFPDAREQEIRMGQMAMGGAMGINNRGAMPPAPVPAGXPAPPGPAXMMPDGXLGLXPPXXERFGQAAXMEGIGAIGGXPPAFNRAAPGAEFAPNKRRRY

SEQ ID NO: 17929 - protein, 235 aa, Homo sapiens
  MOD_RES (1)..(1): Any amino acid
  MOD_RES (5)..(5): Selenocysteine
  MOD_RES (78)..(79): Selenocysteine
  MOD_RES (85)..(85): Selenocysteine
  MOD_RES (235)..(235): Selenocysteine
XPDIXEEEMRKLFEKYGKAGEVFIHKDKGFGFIRLVERAVVIVDDRGRPSGKGIVEFSGKPAARKALDRCSEGSFLLXXFPRPVXVEPMDQLDDEEGLPEKLVIKNQQFHKEREQPPRFAQPGSFEYEYAMRWKALIEMEKQQQDQVDRNIKEAREKLEMEMEAARHEHQVMLMRQDLMRRQEELRRMEELHNQEVQKRKQLELRQEEERRRREEEMRRQQEEMMRRQQEGFKGX

SEQ ID NO: 17930 - protein, 1434 aa, Homo sapiens
  MOD_RES (91)..(91): Selenocysteine
  MOD_RES (104)..(105): Selenocysteine
  MOD_RES (109)..(110): Selenocysteine
  MOD_RES (112)..(112): Selenocysteine
  MOD_RES (116)..(116): Selenocysteine
  MOD_RES (119)..(119): Selenocysteine
  MOD_RES (123)..(123): Selenocysteine
  MOD_RES (130)..(130): Selenocysteine
  MOD_RES (192)..(192): Selenocysteine
  MOD_RES (217)..(217): Selenocysteine
  MOD_RES (287)..(287): Selenocysteine
  MOD_RES (294)..(294): Selenocysteine
  MOD_RES (313)..(313): Selenocysteine
  MOD_RES (318)..(318): Selenocysteine
  MOD_RES (320)..(320): Selenocysteine
  MOD_RES (326)..(326): Selenocysteine
  MOD_RES (329)..(329): Selenocysteine
  MOD_RES (332)..(332): Selenocysteine
  MOD_RES (355)..(355): Selenocysteine
  MOD_RES (395)..(396): Selenocysteine
  MOD_RES (398)..(398): Selenocysteine
  MOD_RES (404)..(404): Selenocysteine
  MOD_RES (438)..(439): Selenocysteine
  MOD_RES (455)..(455): Selenocysteine
  MOD_RES (465)..(465): Selenocysteine
  MOD_RES (471)..(471): Selenocysteine
  MOD_RES (497)..(497): Selenocysteine
  MOD_RES (507)..(507): Selenocysteine
  MOD_RES (596)..(596): Selenocysteine
  MOD_RES (626)..(626): Selenocysteine
  MOD_RES (652)..(652): Selenocysteine
  MOD_RES (660)..(660): Selenocysteine
  MOD_RES (693)..(693): Selenocysteine
  MOD_RES (706)..(706): Selenocysteine
  MOD_RES (718)..(718): Selenocysteine
  MOD_RES (724)..(724): Selenocysteine
  MOD_RES (727)..(727): Selenocysteine
  MOD_RES (729)..(729): Selenocysteine
  MOD_RES (761)..(761): Selenocysteine
  MOD_RES (766)..(766): Selenocysteine
  MOD_RES (768)..(768): Selenocysteine
  MOD_RES (777)..(777): Selenocysteine
  MOD_RES (805)..(805): Selenocysteine
  MOD_RES (811)..(811): Selenocysteine
  MOD_RES (813)..(813): Selenocysteine
  MOD_RES (906)..(906): Selenocysteine
  MOD_RES (934)..(934): Selenocysteine
  MOD_RES (977)..(977): Selenocysteine
  MOD_RES (986)..(986): Selenocysteine
  MOD_RES (1017)..(1017): Selenocysteine
  MOD_RES (1024)..(1024): Selenocysteine
  MOD_RES (1076)..(1076): Selenocysteine
  MOD_RES (1085)..(1085): Selenocysteine
  MOD_RES (1094)..(1094): Selenocysteine
  MOD_RES (1106)..(1107): Selenocysteine
  MOD_RES (1110)..(1110): Selenocysteine
  MOD_RES (1122)..(1122): Selenocysteine
  MOD_RES (1150)..(1150): Selenocysteine
  MOD_RES (1166)..(1166): Selenocysteine
  MOD_RES (1170)..(1170): Selenocysteine
  MOD_RES (1196)..(1196): Selenocysteine
  MOD_RES (1204)..(1204): Selenocysteine
  MOD_RES (1256)..(1256): Selenocysteine
  MOD_RES (1301)..(1301): Selenocysteine
  MOD_RES (1315)..(1315): Selenocysteine
  MOD_RES (1358)..(1358): Selenocysteine
  MOD_RES (1372)..(1372): Selenocysteine
  MOD_RES (1403)..(1403): Selenocysteine
  MOD_RES (1406)..(1406): Selenocysteine
  MOD_RES (1410)..(1410): Selenocysteine
  MOD_RES (1428)..(1428): Selenocysteine
MEDHMFGVQQIQPNVISVRLFKRKVGGLGFLVKERVSKPPVIISDLIRGGAAEQSGLIQAGDIILAVNGRPLVDLSYDSALEVLRGIASEXHVVLILRGPEGFXXHLEXXFXGDGXPKXIRVXQPLGPPXKAVDLSHQPPAGKEQPLAVDGASGPGNGPQHAYDDGQEAGSLPHANGLAPRPPGQDPAKKAXRVSLQGRGENNELLKEIEPVLSLLXSGSRGVKGGAPAKAEMKDMGIQVDRDLDGKSHKPLPLGVENDRVFNDLWGKGNVPVVLNNPYSEKEQPPXSGKQSPXKNGSPSKCPRFLKVKNWEXEVVLXDXLHLKSXLEXGCXEYICMGSIMHPSQHARRPEDVRXKGQLFPLAKEFIDQYYSSIKRFGSKAHMERLEEVNKEIDXXSXYQLKDXELIYGAKHAWRNASRCVGRIQWSKLQVFDARDCXXAHGMFNYICNHVKYAXNKGNLRSAIXIFPQRXDGKHDFRVWNSQLIRYAGYKQPDGSXLGDPANVQFXEICIQQGWKPPRGRFDVLPLLLQANGNDPELFQIPPELVLEVPIRHPKFEWFKDLGLKWYGLPAVSNMLLEIGGLEFSACPFSGWYMGXEIGVRDYCDNSRYNILEEVAKKMNLDMRKXSSLWKDQALVEINIAVLYSFQSDKVXIVDHHSAXESFIKHMENEYRCRGGCPADWVWIVPPMSGSIXPVFHQEMLNYRLXPSFEYQPDPWNXHVWKGXNGXPXKRRAIGFKKLAEAVKFSAKLMGQAMAKRVKAXILYAXEXGKSQAYAKXLCEIFKHAFDAKVMSMEEYDIVHLEHEXLVLVVXSXFGNGDPPENGEKFGCALMEMRHPNSVQEERKSYKVRFNSVSSYSDSQKSSGDGPDLRDNFESAGPLANVRFSVFGLGSRAYPHFCAFGHAVDXLLEELGGERILKMREGDELCGQEEAFRXWAKKVFKAACDVFCVGDDVNIEKANNSLISNDRSWKRNKFRLXFVAEAPELXQGLSNVHKKRVSAARLLSRQNLQSPKSSRSXIFVRLHXNGSQELQYQPGDHLGVFPGNHEDLVNALIERLEDAPPVNQMVKVELLEERNXALGVISNWXDELRLPPCXIFQAFKYYLDIXXPPXPLQLQQFASLAXSEKEKQRLLVLSKGLQEYEEWKWGKNPXIVEVLEEFPSIQMPAXLLLXQLSLLQPRYYSISSSPDMYPDEVHLXVAIVSYRXRDGEGPIHHGVCSSWLNRIQADELVPCFVRGAPSFHLPRNPQVPCILVGPGXGIAPFRSFWQQRQFDIQHKGMNPCPMVLVFGCRQSKIDHIYREEXLQAKNKGVFRELYXAYSREPDKPKKYVQDILQEQLAESVYRALKEQGGHIYVCGDVXMAADVLKAIQRIMXQQGKLSAEDAGVFISRMRDDNRYHEDIFGVXLRXYEVXNRLRSESIAFIEESKKDXDEVFSS

SEQ ID NO: 17931 - protein, 1468 aa, Homo sapiens
  MOD_RES (91)..(91): Selenocysteine
  MOD_RES (104)..(105): Selenocysteine
  MOD_RES (109)..(110): Selenocysteine
  MOD_RES (112)..(112): Selenocysteine
  MOD_RES (116)..(116): Selenocysteine
  MOD_RES (119)..(119): Selenocysteine
  MOD_RES (123)..(123): Selenocysteine
  MOD_RES (130)..(130): Selenocysteine
  MOD_RES (192)..(192): Selenocysteine
  MOD_RES (217)..(217): Selenocysteine
  MOD_RES (287)..(287): Selenocysteine
  MOD_RES (294)..(294): Selenocysteine
  MOD_RES (313)..(313): Selenocysteine
  MOD_RES (318)..(318): Selenocysteine
  MOD_RES (320)..(320): Selenocysteine
  MOD_RES (326)..(326): Selenocysteine
  MOD_RES (329)..(329): Selenocysteine
  MOD_RES (332)..(332): Selenocysteine
  MOD_RES (355)..(355): Selenocysteine
  MOD_RES (395)..(396): Selenocysteine
  MOD_RES (398)..(398): Selenocysteine
  MOD_RES (404)..(404): Selenocysteine
  MOD_RES (438)..(439): Selenocysteine
  MOD_RES (455)..(455): Selenocysteine
  MOD_RES (465)..(465): Selenocysteine
  MOD_RES (471)..(471): Selenocysteine
  MOD_RES (497)..(497): Selenocysteine
  MOD_RES (507)..(507): Selenocysteine
  MOD_RES (596)..(596): Selenocysteine
  MOD_RES (626)..(626): Selenocysteine
  MOD_RES (652)..(652): Selenocysteine
  MOD_RES (660)..(660): Selenocysteine
  MOD_RES (693)..(693): Selenocysteine
  MOD_RES (706)..(706): Selenocysteine
  MOD_RES (718)..(718): Selenocysteine
  MOD_RES (724)..(724): Selenocysteine
  MOD_RES (727)..(727): Selenocysteine
  MOD_RES (729)..(729): Selenocysteine
  MOD_RES (761)..(761): Selenocysteine
  MOD_RES (766)..(766): Selenocysteine
  MOD_RES (768)..(768): Selenocysteine
  MOD_RES (777)..(777): Selenocysteine
  MOD_RES (805)..(805): Selenocysteine
  MOD_RES (811)..(811): Selenocysteine
  MOD_RES (813)..(813): Selenocysteine
  MOD_RES (864)..(864): Selenocysteine
  MOD_RES (940)..(940): Selenocysteine
  MOD_RES (968)..(968): Selenocysteine
  MOD_RES (1011)..(1011): Selenocysteine
  MOD_RES (1020)..(1020): Selenocysteine
  MOD_RES (1051)..(1051): Selenocysteine
  MOD_RES (1058)..(1058): Selenocysteine
  MOD_RES (1110)..(1110): Selenocysteine
  MOD_RES (1119)..(1119): Selenocysteine
  MOD_RES (1128)..(1128): Selenocysteine
  MOD_RES (1140)..(1141): Selenocysteine
  MOD_RES (1144)..(1144): Selenocysteine
  MOD_RES (1156)..(1156): Selenocysteine
  MOD_RES (1184)..(1184): Selenocysteine
  MOD_RES (1200)..(1200): Selenocysteine
  MOD_RES (1204)..(1204): Selenocysteine
  MOD_RES (1230)..(1230): Selenocysteine
  MOD_RES (1238)..(1238): Selenocysteine
  MOD_RES (1290)..(1290): Selenocysteine
  MOD_RES (1335)..(1335): Selenocysteine
  MOD_RES (1349)..(1349): Selenocysteine
  MOD_RES (1392)..(1392): Selenocysteine
  MOD_RES (1406)..(1406): Selenocysteine
  MOD_RES (1437)..(1437): Selenocysteine
  MOD_RES (1440)..(1440): Selenocysteine
  MOD_RES (1444)..(1444): Selenocysteine
  MOD_RES (1462)..(1462): Selenocysteine
MEDHMFGVQQIQPNVISVRLFKRKVGGLGFLVKERVSKPPVIISDLIRGGAAEQSGLIQAGDIILAVNGRPLVDLSYDSALEVLRGIASEXHVVLILRGPEGFXXHLEXXFXGDGXPKXIRVXQPLGPPXKAVDLSHQPPAGKEQPLAVDGASGPGNGPQHAYDDGQEAGSLPHANGLAPRPPGQDPAKKAXRVSLQGRGENNELLKEIEPVLSLLXSGSRGVKGGAPAKAEMKDMGIQVDRDLDGKSHKPLPLGVENDRVFNDLWGKGNVPVVLNNPYSEKEQPPXSGKQSPXKNGSPSKCPRFLKVKNWEXEVVLXDXLHLKSXLEXGCXEYICMGSIMHPSQHARRPEDVRXKGQLFPLAKEFIDQYYSSIKRFGSKAHMERLEEVNKEIDXXSXYQLKDXELIYGAKHAWRNASRCVGRIQWSKLQVFDARDCXXAHGMFNYICNHVKYAXNKGNLRSAIXIFPQRXDGKHDFRVWNSQLIRYAGYKQPDGSXLGDPANVQFXEICIQQGWKPPRGRFDVLPLLLQANGNDPELFQIPPELVLEVPIRHPKFEWFKDLGLKWYGLPAVSNMLLEIGGLEFSACPFSGWYMGXEIGVRDYCDNSRYNILEEVAKKMNLDMRKXSSLWKDQALVEINIAVLYSFQSDKVXIVDHHSAXESFIKHMENEYRCRGGCPADWVWIVPPMSGSIXPVFHQEMLNYRLXPSFEYQPDPWNXHVWKGXNGXPXKRRAIGFKKLAEAVKFSAKLMGQAMAKRVKAXILYAXEXGKSQAYAKXLCEIFKHAFDAKVMSMEEYDIVHLEHEXLVLVVXSXFGNGDPPENGEKFGCALMEMRHPNSVQEERKYPEPLRFFPRKGPPLPNGDXEVHGLAAARDSQHRSYKVRFNSVSSYSDSQKSSGDGPDLRDNFESAGPLANVRFSVFGLGSRAYPHFCAFGHAVDXLLEELGGERILKMREGDELCGQEEAFRXWAKKVFKAACDVFCVGDDVNIEKANNSLISNDRSWKRNKFRLXFVAEAPELXQGLSNVHKKRVSAARLLSRQNLQSPKSSRSXIFVRLHXNGSQELQYQPGDHLGVFPGNHEDLVNALIERLEDAPPVNQMVKVELLEERNXALGVISNWXDELRLPPCXIFQAFKYYLDIXXPPXPLQLQQFASLAXSEKEKQRLLVLSKGLQEYEEWKWGKNPXIVEVLEEFPSIQMPAXLLLXQLSLLQPRYYSISSSPDMYPDEVHLXVAIVSYRXRDGEGPIHHGVCSSWLNRIQADELVPCFVRGAPSFHLPRNPQVPCILVGPGXGIAPFRSFWQQRQFDIQHKGMNPCPMVLVFGCRQSKIDHIYREEXLQAKNKGVFRELYXAYSREPDKPKKYVQDILQEQLAESVYRALKEQGGHIYVCGDVXMAADVLKAIQRIMXQQGKLSAEDAGVFISRMRDDNRYHEDIFGVXLRXYEVXNRLRSESIAFIEESKKDXDEVFSS

SEQ ID NO: 17932 - protein, 1433 aa, Homo sapiens
  MOD_RES (91)..(91): Selenocysteine
  MOD_RES (104)..(105): Selenocysteine
  MOD_RES (109)..(110): Selenocysteine
  MOD_RES (112)..(112): Selenocysteine
  MOD_RES (116)..(116): Selenocysteine
  MOD_RES (119)..(119): Selenocysteine
  MOD_RES (123)..(123): Selenocysteine
  MOD_RES (130)..(130): Selenocysteine
  MOD_RES (191)..(191): Selenocysteine
  MOD_RES (216)..(216): Selenocysteine
  MOD_RES (286)..(286): Selenocysteine
  MOD_RES (293)..(293): Selenocysteine
  MOD_RES (312)..(312): Selenocysteine
  MOD_RES (317)..(317): Selenocysteine
  MOD_RES (319)..(319): Selenocysteine
  MOD_RES (325)..(325): Selenocysteine
  MOD_RES (328)..(328): Selenocysteine
  MOD_RES (331)..(331): Selenocysteine
  MOD_RES (354)..(354): Selenocysteine
  MOD_RES (394)..(395): Selenocysteine
  MOD_RES (397)..(397): Selenocysteine
  MOD_RES (403)..(403): Selenocysteine
  MOD_RES (437)..(438): Selenocysteine
  MOD_RES (454)..(454): Selenocysteine
  MOD_RES (464)..(464): Selenocysteine
  MOD_RES (470)..(470): Selenocysteine
  MOD_RES (496)..(496): Selenocysteine
  MOD_RES (506)..(506): Selenocysteine
  MOD_RES (595)..(595): Selenocysteine
  MOD_RES (625)..(625): Selenocysteine
  MOD_RES (651)..(651): Selenocysteine
  MOD_RES (659)..(659): Selenocysteine
  MOD_RES (692)..(692): Selenocysteine
  MOD_RES (705)..(705): Selenocysteine
  MOD_RES (717)..(717): Selenocysteine
  MOD_RES (723)..(723): Selenocysteine
  MOD_RES (726)..(726): Selenocysteine
  MOD_RES (728)..(728): Selenocysteine
  MOD_RES (760)..(760): Selenocysteine
  MOD_RES (765)..(765): Selenocysteine
  MOD_RES (767)..(767): Selenocysteine
  MOD_RES (776)..(776): Selenocysteine
  MOD_RES (804)..(804): Selenocysteine
  MOD_RES (810)..(810): Selenocysteine
  MOD_RES (812)..(812): Selenocysteine
  MOD_RES (905)..(905): Selenocysteine
  MOD_RES (933)..(933): Selenocysteine
  MOD_RES (976)..(976): Selenocysteine
  MOD_RES (985)..(985): Selenocysteine
  MOD_RES (1016)..(1016): Selenocysteine
  MOD_RES (1023)..(1023): Selenocysteine
  MOD_RES (1075)..(1075): Selenocysteine
  MOD_RES (1084)..(1084): Selenocysteine
  MOD_RES (1093)..(1093): Selenocysteine
  MOD_RES (1105)..(1106): Selenocysteine
  MOD_RES (1109)..(1109): Selenocysteine
  MOD_RES (1121)..(1121): Selenocysteine
  MOD_RES (1149)..(1149): Selenocysteine
  MOD_RES (1165)..(1165): Selenocysteine
  MOD_RES (1169)..(1169): Selenocysteine
  MOD_RES (1195)..(1195): Selenocysteine
  MOD_RES (1203)..(1203): Selenocysteine
  MOD_RES (1255)..(1255): Selenocysteine
  MOD_RES (1300)..(1300): Selenocysteine
  MOD_RES (1314)..(1314): Selenocysteine
  MOD_RES (1357)..(1357): Selenocysteine
  MOD_RES (1371)..(1371): Selenocysteine
  MOD_RES (1402)..(1402): Selenocysteine
  MOD_RES (1405)..(1405): Selenocysteine
  MOD_RES (1409)..(1409): Selenocysteine
  MOD_RES (1427)..(1427): Selenocysteine
MEDHMFGVQQIQPNVISVRLFKRKVGGLGFLVKERVSKPPVIISDLIRGGAAEQSGLIQAGDIILAVNGRPLVDLSYDSALEVLRGIASEXHVVLILRGPEGFXXHLEXXFXGDGXPKXIRVXQPLGPPXKAVDLSHQPPAGKEQPLAVDGASGPGNGPQHAYDDGQEAGSLPHANGWPQAPRQDPAKKAXRVSLQGRGENNELLKEIEPVLSLLXSGSRGVKGGAPAKAEMKDMGIQVDRDLDGKSHKPLPLGVENDRVFNDLWGKGNVPVVLNNPYSEKEQPPXSGKQSPXKNGSPSKCPRFLKVKNWEXEVVLXDXLHLKSXLEXGCXEYICMGSIMHPSQHARRPEDVRXKGQLFPLAKEFIDQYYSSIKRFGSKAHMERLEEVNKEIDXXSXYQLKDXELIYGAKHAWRNASRCVGRIQWSKLQVFDARDCXXAHGMFNYICNHVKYAXNKGNLRSAIXIFPQRXDGKHDFRVWNSQLIRYAGYKQPDGSXLGDPANVQFXEICIQQGWKPPRGRFDVLPLLLQANGNDPELFQIPPELVLEVPIRHPKFEWFKDLGLKWYGLPAVSNMLLEIGGLEFSACPFSGWYMGXEIGVRDYCDNSRYNILEEVAKKMNLDMRKXSSLWKDQALVEINIAVLYSFQSDKVXIVDHHSAXESFIKHMENEYRCRGGCPADWVWIVPPMSGSIXPVFHQEMLNYRLXPSFEYQPDPWNXHVWKGXNGXPXKRRAIGFKKLAEAVKFSAKLMGQAMAKRVKAXILYAXEXGKSQAYAKXLCEIFKHAFDAKVMSMEEYDIVHLEHEXLVLVVXSXFGNGDPPENGEKFGCALMEMRHPNSVQEERKSYKVRFNSVSSYSDSQKSSGDGPDLRDNFESAGPLANVRFSVFGLGSRAYPHFCAFGHAVDXLLEELGGERILKMREGDELCGQEEAFRXWAKKVFKAACDVFCVGDDVNIEKANNSLISNDRSWKRNKFRLXFVAEAPELXQGLSNVHKKRVSAARLLSRQNLQSPKSSRSXIFVRLHXNGSQELQYQPGDHLGVFPGNHEDLVNALIERLEDAPPVNQMVKVELLEERNXALGVISNWXDELRLPPCXIFQAFKYYLDIXXPPXPLQLQQFASLAXSEKEKQRLLVLSKGLQEYEEWKWGKNPXIVEVLEEFPSIQMPAXLLLXQLSLLQPRYYSISSSPDMYPDEVHLXVAIVSYRXRDGEGPIHHGVCSSWLNRIQADELVPCFVRGAPSFHLPRNPQVPCILVGPGXGIAPFRSFWQQRQFDIQHKGMNPCPMVLVFGCRQSKIDHIYREEXLQAKNKGVFRELYXAYSREPDKPKKYVQDILQEQLAESVYRALKEQGGHIYVCGDVXMAADVLKAIQRIMXQQGKLSAEDAGVFISRMRDDNRYHEDIFGVXLRXYEVXNRLRSESIAFIEESKKDXDEVFSS

SEQ ID NO: 17933 - protein, 81 aa, Homo sapiens
  MOD_RES (35)..(35): Selenocysteine
  MOD_RES (48)..(49): Selenocysteine
MLQHISLLVKQVQELELKLSGQNAMGSQDSLLEIXFRSGALPVLCDPXXPKPEDLHSPPLGAGLADFAHPAGSPLGRRDCL

SEQ ID NO: 17934 - protein, 349 aa, Homo sapiens
  MOD_RES (5)..(5): Selenocysteine
  MOD_RES (95)..(95): Selenocysteine
  MOD_RES (155)..(155): Selenocysteine
  MOD_RES (171)..(171): Selenocysteine
  MOD_RES (198)..(198): Selenocysteine
  MOD_RES (205)..(205): Selenocysteine
  MOD_RES (207)..(207): Selenocysteine
  MOD_RES (211)..(211): Selenocysteine
  MOD_RES (233)..(233): Selenocysteine
  MOD_RES (246)..(246): Selenocysteine
  MOD_RES (259)..(259): Selenocysteine
  MOD_RES (278)..(278): Selenocysteine
  MOD_RES (280)..(280): Selenocysteine
  MOD_RES (284)..(284): Selenocysteine
  MOD_RES (302)..(302): Selenocysteine
  MOD_RES (320)..(320): Selenocysteine
  MOD_RES (348)..(348): Selenocysteine
MPSKXKYNLVDDGHDLRIPLHNEDAFQHGICFEAKYVGSLDVPRPNSRVEIVAAMRRIRYEFKAKNIKKKKVSIMVSVDGVKVILKKKKKKKEWXWDESKMLVMQDPIYRIFYVSHDSQDLKIFSYIARDGASNIFRCNVFKSKKKSQAMRIVRXVGQAFEVCHKLSLQHXQQNADGQEDGESERNSNSSGDPGRQLXGAERASXAXAEEXDIDAVEVPLPGNDVLEFSRGVXDLDAVGKEGGSHXGSKVSHPQEPMLXASPRMLLPSSSSKPPGLGXEXPLSXHHQMQLLQQLLQQQQQQXQVAVAQCVVGQIALVLSXAISMCLLLPNFSLALPSLLMEELESRYXC

SEQ ID NO: 17935 - protein, 501 aa, Homo sapiens
  MOD_RES (5)..(5): Selenocysteine
  MOD_RES (95)..(95): Selenocysteine
  MOD_RES (155)..(155): Selenocysteine
  MOD_RES (171)..(171): Selenocysteine
  MOD_RES (198)..(198): Selenocysteine
  MOD_RES (205)..(205): Selenocysteine
  MOD_RES (207)..(207): Selenocysteine
  MOD_RES (211)..(211): Selenocysteine
  MOD_RES (233)..(233): Selenocysteine
  MOD_RES (246)..(246): Selenocysteine
  MOD_RES (259)..(259): Selenocysteine
  MOD_RES (278)..(278): Selenocysteine
  MOD_RES (280)..(280): Selenocysteine
  MOD_RES (284)..(284): Selenocysteine
  MOD_RES (302)..(302): Selenocysteine
  MOD_RES (374)..(374): Selenocysteine
  MOD_RES (387)..(388): Selenocysteine
  MOD_RES (434)..(434): Selenocysteine
  MOD_RES (465)..(465): Selenocysteine
MPSKXKYNLVDDGHDLRIPLHNEDAFQHGICFEAKYVGSLDVPRPNSRVEIVAAMRRIRYEFKAKNIKKKKVSIMVSVDGVKVILKKKKKKKEWXWDESKMLVMQDPIYRIFYVSHDSQDLKIFSYIARDGASNIFRCNVFKSKKKSQAMRIVRXVGQAFEVCHKLSLQHXQQNADGQEDGESERNSNSSGDPGRQLXGAERASXAXAEEXDIDAVEVPLPGNDVLEFSRGVXDLDAVGKEGGSHXGSKVSHPQEPMLXASPRMLLPSSSSKPPGLGXEXPLSXHHQMQLLQQLLQQQQQQXQVAVAQVHLLKDQLAAEAAARLEAQARVHQLLLQNKDMLQHISLLVKQVQELELKLSGQNAMGSQDSLLEIXFRSGALPVLCDPXXPKPEDLHSPPLGAGLADFAHPAGSPLGRRDCLVKLECFRFLPPEDXPPPAQGEALLGGLELIKFRESGIASEYESNXDESEERDSWSQEELPRLLNVLQRQELGDGLDDEIAV

SEQ ID NO: 17936 - protein, 506 aa, Homo sapiens
  MOD_RES (5)..(5): Selenocysteine
  MOD_RES (100)..(100): Selenocysteine
  MOD_RES (160)..(160): Selenocysteine
  MOD_RES (176)..(176): Selenocysteine
  MOD_RES (203)..(203): Selenocysteine
  MOD_RES (210)..(210): Selenocysteine
  MOD_RES (212)..(212): Selenocysteine
  MOD_RES (216)..(216): Selenocysteine
  MOD_RES (238)..(238): Selenocysteine
  MOD_RES (251)..(251): Selenocysteine
  MOD_RES (264)..(264): Selenocysteine
  MOD_RES (283)..(283): Selenocysteine
  MOD_RES (285)..(285): Selenocysteine
  MOD_RES (289)..(289): Selenocysteine
  MOD_RES (307)..(307): Selenocysteine
  MOD_RES (379)..(379): Selenocysteine
  MOD_RES (392)..(393): Selenocysteine
  MOD_RES (439)..(439): Selenocysteine
  MOD_RES (470)..(470): Selenocysteine
MPSKXKYNLVDDGHDLRIPLHNEDAFQHGICFEAKYVGSLDVPRPNSRVEIVAAMRRIRYEFKAKNIKKKKVSIMVSVDGVKVILKKKKKLLLLQKKEWXWDESKMLVMQDPIYRIFYVSHDSQDLKIFSYIARDGASNIFRCNVFKSKKKSQAMRIVRXVGQAFEVCHKLSLQHXQQNADGQEDGESERNSNSSGDPGRQLXGAERASXAXAEEXDIDAVEVPLPGNDVLEFSRGVXDLDAVGKEGGSHXGSKVSHPQEPMLXASPRMLLPSSSSKPPGLGXEXPLSXHHQMQLLQQLLQQQQQQXQVAVAQVHLLKDQLAAEAAARLEAQARVHQLLLQNKDMLQHISLLVKQVQELELKLSGQNAMGSQDSLLEIXFRSGALPVLCDPXXPKPEDLHSPPLGAGLADFAHPAGSPLGRRDCLVKLECFRFLPPEDXPPPAQGEALLGGLELIKFRESGIASEYESNXDESEERDSWSQEELPRLLNVLQRQELGDGLDDEIAV

SEQ ID NO: 17937 - protein, 211 aa, Homo sapiens
  MOD_RES (84)..(84): Selenocysteine
  MOD_RES (97)..(98): Selenocysteine
  MOD_RES (144)..(144): Selenocysteine
  MOD_RES (175)..(175): Selenocysteine
MSLSSLCPVFSAAASSLQVHLLKDQLAAEAAARLEAQARVHQLLLQNKDMLQHISLLVKQVQELELKLSGQNAMGSQDSLLEIXFRSGALPVLCDPXXPKPEDLHSPPLGAGLADFAHPAGSPLGRRDCLVKLECFRFLPPEDXPPPAQGEALLGGLELIKFRESGIASEYESNXDESEERDSWSQEELPRLLNVLQRQELGDGLDDEIAV

SEQ ID NO: 17938 - protein, 1114 aa, Homo sapiens
  MOD_RES (11)..(11): Selenocysteine
  MOD_RES (35)..(35): Selenocysteine
  MOD_RES (40)..(40): Selenocysteine
  MOD_RES (63)..(63): Selenocysteine
  MOD_RES (77)..(77): Selenocysteine
  MOD_RES (95)..(95): Selenocysteine
  MOD_RES (99)..(99): Selenocysteine
  MOD_RES (109)..(109): Selenocysteine
  MOD_RES (121)..(121): Selenocysteine
  MOD_RES (126)..(126): Selenocysteine
  MOD_RES (134)..(134): Selenocysteine
  MOD_RES (170)..(170): Selenocysteine
  MOD_RES (175)..(176): Selenocysteine
  MOD_RES (178)..(178): Selenocysteine
  MOD_RES (182)..(182): Selenocysteine
  MOD_RES (190)..(190): Selenocysteine
  MOD_RES (219)..(219): Selenocysteine
  MOD_RES (235)..(235): Selenocysteine
  MOD_RES (245)..(245): Selenocysteine
  MOD_RES (337)..(337): Selenocysteine
  MOD_RES (364)..(364): Selenocysteine
  MOD_RES (393)..(393): Selenocysteine
  MOD_RES (434)..(434): Selenocysteine
  MOD_RES (459)..(459): Selenocysteine
  MOD_RES (493)..(493): Selenocysteine
  MOD_RES (501)..(501): Selenocysteine
  MOD_RES (506)..(506): Selenocysteine
  MOD_RES (508)..(508): Selenocysteine
  MOD_RES (551)..(551): Selenocysteine
  MOD_RES (553)..(553): Selenocysteine
  MOD_RES (615)..(615): Selenocysteine
  MOD_RES (637)..(637): Selenocysteine
  MOD_RES (644)..(644): Selenocysteine
  MOD_RES (660)..(660): Selenocysteine
  MOD_RES (664)..(664): Selenocysteine
  MOD_RES (695)..(695): Selenocysteine
  MOD_RES (708)..(708): Selenocysteine
  MOD_RES (713)..(713): Selenocysteine
  MOD_RES (757)..(757): Selenocysteine
  MOD_RES (761)..(761): Selenocysteine
  MOD_RES (790)..(790): Selenocysteine
  MOD_RES (796)..(797): Selenocysteine
  MOD_RES (800)..(800): Selenocysteine
  MOD_RES (812)..(812): Selenocysteine
  MOD_RES (835)..(835): Selenocysteine
  MOD_RES (839)..(839): Selenocysteine
  MOD_RES (878)..(878): Selenocysteine
  MOD_RES (880)..(880): Selenocysteine
  MOD_RES (885)..(885): Selenocysteine
  MOD_RES (890)..(890): Selenocysteine
  MOD_RES (893)..(893): Selenocysteine
  MOD_RES (907)..(907): Selenocysteine
  MOD_RES (945)..(945): Selenocysteine
  MOD_RES (972)..(972): Selenocysteine
  MOD_RES (1004)..(1004): Selenocysteine
  MOD_RES (1055)..(1055): Selenocysteine
MACPWKFLFKXKFHQYAMNGEKDINNNVEKAPCAXSSPVXQDDLQYHNLSKQQNESPQPLVEXGKKSPESLVKLDAXPLSSPRHVRIKNWGSGMXFQDXLHHKAKGILXCRSKSCLGSIMXPKSLXRGPRDKPXPPDELLPQAIEFVNQYYGSFKEAKIEEHLARVEAVXKEIEXXGXYQLXGDELIFAXKQAWRNAPRCIGRIQWSNLQVFDARSCSXAREMFEHICRHVRYSXNNGNIRSAIXVFPQRSDGKHDFRVWNAQLCIDLGWKPNGRDPELFEIPPDLVLEVAMEHPKYEWFRELELKWYALPAVANMLLEVGGLEFPGCPFNGWYMGXEIGVRDFCDVQRYNILEEVGRRMGLEXHKLASLWKDQAVVEINIAVLHSFQKQNVXIMDHHSAAESFMKYMQNEYRSRGGCPADWIWLVPPMSGSIXPVFHQEMLNYVLSPFYYYQVEAWKXHVWQDEKRRPKRREIPLKVLVKAVLFACMLMRKXMASRVRVXILFAXEXGKSEALAWDLGALFSCAFNPKVVCMDKYRLSCLEEERLLLVVXSXFGNGDCPGNGEKLKKSLFMLKELNNKFRYAVFGLGSSMYPRFCAFAHDIDQKLSHLGASQLXPMGEGDELSGQEDAFRSWAVQXFKAACEXFDVRGKQHIQIPKLYXSNVXWDPHHYRLVQDSQPLDLSKALSSMHAKNVFXMRLKSRQNLQSPXSSRAXILVELSCEDGQGLNYLPGEHLGVCPGNQPALVQGILERVVDGPXPHQXVRLEALDESGSYWVSDKRLPPCSLSQALXYFLDIXXPPXQLLLQKLAQVAXEEPERQRLEALCQPSEYSKWKFXNSPXFLEVLEEFPSLRVSAGFLLSQLPILKPRFYSISSSRDHXPXEIHLXVAVVXYHXRDGQGPLHHGVCSXWLNSLKPQDPVPCFVRNASGFHLPEDPSHPCILIGPGXGIAPFRSFWQQRLHDSQHKGVRGGRMXLVFGCRRPDEDHIYQEEMLEMAQKGVLHAVHXAYSRLPGKPKVYVQDILRQQLASEVLRVLHKEPGHLYVCGDVRMARDVAHXLKQLVAAKLKLNEEQVEDYFFQLKSQKRYHEDIFGAVFPYEAKKDRVAVQPSSLEMSAL

SEQ ID NO: 17939 - protein, 1153 aa, Homo sapiens
  MOD_RES (11)..(11): Selenocysteine
  MOD_RES (35)..(35): Selenocysteine
  MOD_RES (40)..(40): Selenocysteine
  MOD_RES (63)..(63): Selenocysteine
  MOD_RES (77)..(77): Selenocysteine
  MOD_RES (95)..(95): Selenocysteine
  MOD_RES (99)..(99): Selenocysteine
  MOD_RES (109)..(109): Selenocysteine
  MOD_RES (121)..(121): Selenocysteine
  MOD_RES (126)..(126): Selenocysteine
  MOD_RES (134)..(134): Selenocysteine
  MOD_RES (170)..(170): Selenocysteine
  MOD_RES (175)..(176): Selenocysteine
  MOD_RES (178)..(178): Selenocysteine
  MOD_RES (182)..(182): Selenocysteine
  MOD_RES (190)..(190): Selenocysteine
  MOD_RES (219)..(219): Selenocysteine
  MOD_RES (235)..(235): Selenocysteine
  MOD_RES (245)..(245): Selenocysteine
  MOD_RES (287)..(287): Selenocysteine
  MOD_RES (376)..(376): Selenocysteine
  MOD_RES (403)..(403): Selenocysteine
  MOD_RES (432)..(432): Selenocysteine
  MOD_RES (473)..(473): Selenocysteine
  MOD_RES (498)..(498): Selenocysteine
  MOD_RES (532)..(532): Selenocysteine
  MOD_RES (540)..(540): Selenocysteine
  MOD_RES (545)..(545): Selenocysteine
  MOD_RES (547)..(547): Selenocysteine
  MOD_RES (590)..(590): Selenocysteine
  MOD_RES (592)..(592): Selenocysteine
  MOD_RES (654)..(654): Selenocysteine
  MOD_RES (676)..(676): Selenocysteine
  MOD_RES (683)..(683): Selenocysteine
  MOD_RES (699)..(699): Selenocysteine
  MOD_RES (703)..(703): Selenocysteine
  MOD_RES (734)..(734): Selenocysteine
  MOD_RES (747)..(747): Selenocysteine
  MOD_RES (752)..(752): Selenocysteine
  MOD_RES (796)..(796): Selenocysteine
  MOD_RES (800)..(800): Selenocysteine
  MOD_RES (829)..(829): Selenocysteine
  MOD_RES (835)..(836): Selenocysteine
  MOD_RES (839)..(839): Selenocysteine
  MOD_RES (851)..(851): Selenocysteine
  MOD_RES (874)..(874): Selenocysteine
  MOD_RES (878)..(878): Selenocysteine
  MOD_RES (917)..(917): Selenocysteine
  MOD_RES (919)..(919): Selenocysteine
  MOD_RES (924)..(924): Selenocysteine
  MOD_RES (929)..(929): Selenocysteine
  MOD_RES (932)..(932): Selenocysteine
  MOD_RES (946)..(946): Selenocysteine
  MOD_RES (984)..(984): Selenocysteine
  MOD_RES (1011)..(1011): Selenocysteine
  MOD_RES (1043)..(1043): Selenocysteine
  MOD_RES (1094)..(1094): Selenocysteine
MACPWKFLFKXKFHQYAMNGEKDINNNVEKAPCAXSSPVXQDDLQYHNLSKQQNESPQPLVEXGKKSPESLVKLDAXPLSSPRHVRIKNWGSGMXFQDXLHHKAKGILXCRSKSCLGSIMXPKSLXRGPRDKPXPPDELLPQAIEFVNQYYGSFKEAKIEEHLARVEAVXKEIEXXGXYQLXGDELIFAXKQAWRNAPRCIGRIQWSNLQVFDARSCSXAREMFEHICRHVRYSXNNGNIRSAIXVFPQRSDGKHDFRVWNAQLIRYAGYQMPDGSIRGDPANVEFXQLCIDLGWKPKYGRFDVVPLVLQANGRDPELFEIPPDLVLEVAMEHPKYEWFRELELKWYALPAVANMLLEVGGLEFPGCPFNGWYMGXEIGVRDFCDVQRYNILEEVGRRMGLEXHKLASLWKDQAVVEINIAVLHSFQKQNVXIMDHHSAAESFMKYMQNEYRSRGGCPADWIWLVPPMSGSIXPVFHQEMLNYVLSPFYYYQVEAWKXHVWQDEKRRPKRREIPLKVLVKAVLFACMLMRKXMASRVRVXILFAXEXGKSEALAWDLGALFSCAFNPKVVCMDKYRLSCLEEERLLLVVXSXFGNGDCPGNGEKLKKSLFMLKELNNKFRYAVFGLGSSMYPRFCAFAHDIDQKLSHLGASQLXPMGEGDELSGQEDAFRSWAVQXFKAACEXFDVRGKQHIQIPKLYXSNVXWDPHHYRLVQDSQPLDLSKALSSMHAKNVFXMRLKSRQNLQSPXSSRAXILVELSCEDGQGLNYLPGEHLGVCPGNQPALVQGILERVVDGPXPHQXVRLEALDESGSYWVSDKRLPPCSLSQALXYFLDIXXPPXQLLLQKLAQVAXEEPERQRLEALCQPSEYSKWKFXNSPXFLEVLEEFPSLRVSAGFLLSQLPILKPRFYSISSSRDHXPXEIHLXVAVVXYHXRDGQGPLHHGVCSXWLNSLKPQDPVPCFVRNASGFHLPEDPSHPCILIGPGXGIAPFRSFWQQRLHDSQHKGVRGGRMXLVFGCRRPDEDHIYQEEMLEMAQKGVLHAVHXAYSRLPGKPKVYVQDILRQQLASEVLRVLHKEPGHLYVCGDVRMARDVAHXLKQLVAAKLKLNEEQVEDYFFQLKSQKRYHEDIFGAVFPYEAKKDRVAVQPSSLEMSAL

SEQ ID NO: 17940 - protein, 997 aa, Homo sapiens
  MOD_RES (3)..(3): Selenocysteine
  MOD_RES (13)..(13): Selenocysteine
  MOD_RES (23)..(23): Selenocysteine
  MOD_RES (65)..(65): Selenocysteine
  MOD_RES (74)..(74): Selenocysteine
  MOD_RES (113)..(113): Selenocysteine
  MOD_RES (154)..(154): Selenocysteine
  MOD_RES (158)..(158): Selenocysteine
  MOD_RES (181)..(181): Selenocysteine
  MOD_RES (183)..(184): Selenocysteine
  MOD_RES (210)..(210): Selenocysteine
  MOD_RES (218)..(218): Selenocysteine
  MOD_RES (251)..(251): Selenocysteine
  MOD_RES (282)..(282): Selenocysteine
  MOD_RES (285)..(285): Selenocysteine
  MOD_RES (289)..(289): Selenocysteine
  MOD_RES (306)..(306): Selenocysteine
  MOD_RES (315)..(315): Selenocysteine
  MOD_RES (322)..(322): Selenocysteine
  MOD_RES (359)..(359): Selenocysteine
  MOD_RES (365)..(365): Selenocysteine
  MOD_RES (367)..(367): Selenocysteine
  MOD_RES (430)..(430): Selenocysteine
  MOD_RES (438)..(438): Selenocysteine
  MOD_RES (463)..(463): Selenocysteine
  MOD_RES (503)..(503): Selenocysteine
  MOD_RES (556)..(556): Selenocysteine
  MOD_RES (569)..(569): Selenocysteine
  MOD_RES (572)..(572): Selenocysteine
  MOD_RES (579)..(579): Selenocysteine
  MOD_RES (618)..(618): Selenocysteine
  MOD_RES (648)..(648): Selenocysteine
  MOD_RES (654)..(654): Selenocysteine
  MOD_RES (660)..(660): Selenocysteine
  MOD_RES (673)..(673): Selenocysteine
  MOD_RES (704)..(704): Selenocysteine
  MOD_RES (724)..(724): Selenocysteine
  MOD_RES (742)..(742): Selenocysteine
  MOD_RES (750)..(750): Selenocysteine
  MOD_RES (758)..(758): Selenocysteine
  MOD_RES (772)..(772): Selenocysteine
  MOD_RES (810)..(810): Selenocysteine
  MOD_RES (834)..(834): Selenocysteine
  MOD_RES (837)..(837): Selenocysteine
  MOD_RES (869)..(869): Selenocysteine
  MOD_RES (880)..(880): Selenocysteine
  MOD_RES (888)..(888): Selenocysteine
  MOD_RES (912)..(912): Selenocysteine
  MOD_RES (915)..(915): Selenocysteine
  MOD_RES (920)..(920): Selenocysteine
  MOD_RES (927)..(927): Selenocysteine
  MOD_RES (957)..(957): Selenocysteine
  MOD_RES (960)..(960): Selenocysteine
  MOD_RES (964)..(964): Selenocysteine
  MOD_RES (969)..(969): Selenocysteine
  MOD_RES (994)..(994): Selenocysteine
MFXYICNHIKYAXNRGNLRSAIXVFPQRCPGRGDFRIWNSQLVRYAGYRQQDGSVRGDPANVEIXELCIQHGWXPGNGRFDVLPLLLQAPDDPPELFLLPPELVLEVPLEHPXLEWFAALGLRWYALPAVSNMLLEIGGLEFPAAPFSGWYMSXEIGXRNLCDPHRYNILEDVAVCMDLDXRXXSSLWKDKAAVEINVAVLHSYQLAKVXIVDHHAAXASFMKHLENEQKARGGCPADWAWIVPPISGSLXPVFHQEMVNYFLSPAFRYQPDPWKGSAAKGXGIXRKKXFKEVANAVKISASLMGXVMAKRVKAXILYGSEXGRAQSYAQQLGRLFRKAFDPRVLCMDEYDVVSLEHEXLVLVVXSXFGNGDPPENGESFAAALMEMSGPYNSSPRPEQHKSYKIRFNSISCSDPLVSSWRRKRKESSNXDSAGALGXLRFCVFGLGSRAYPHFCAFARAVDXRLEELGGERLLQLGQGDELCGQEEAFRGWAQAAFQAACEXFCVGEDAKAAARDIFSPKRSWKRQRYRLSAQAEGLQLLPGLIHVHRRKMFQAXIRSVENLQSSKSXRAXILVRLDXGGQEGLQYQPGDHIGVCPPNRPGLVEALLSRVEDPPAPXEPVAVEQLEKGSPGGPPPGWVRDPRLPPCXLRQALXFFLDIXSPPSPQLLRLLSXLAEEPREQQELEALSQDPRRYEEWKWFRCPXLLEVLEQFPSVALPAPLLLXQLPLLQPRYYSVSSAPSXHPGEIHLXVAVLAYRXQDGLGPLHYGVCSXWLSQLKPGDPVPCFIRGAPSFRLPPDPSLPCILVGPGXGIAPFRGFWQERLHDIESKGLQPXPMXLVFGCRCSQLDHLYRDEVQNAQQRGVFGRVLXAFSREPDNPKXYVQDILRXELAAEVHRVLCLERGHMFVCGDVXMAXNVLQXVQRILAXEGDMELDEAGDVIGVLRDQQRYHEDIFGLXLRXQEVXSRIRXQSFSLQERQLRGAVPWAFDPPGSDXNSP

SEQ ID NO: 17941 - protein, 614 aa, Homo sapiens
  MOD_RES (33)..(33): Selenocysteine
  MOD_RES (60)..(60): Selenocysteine
  MOD_RES (80)..(80): Selenocysteine
  MOD_RES (83)..(83): Selenocysteine
  MOD_RES (95)..(95): Selenocysteine
  MOD_RES (160)..(160): Selenocysteine
  MOD_RES (162)..(162): Selenocysteine
  MOD_RES (209)..(209): Selenocysteine
  MOD_RES (219)..(219): Selenocysteine
  MOD_RES (229)..(229): Selenocysteine
  MOD_RES (271)..(271): Selenocysteine
  MOD_RES (280)..(280): Selenocysteine
  MOD_RES (319)..(319): Selenocysteine
  MOD_RES (360)..(360): Selenocysteine
  MOD_RES (364)..(364): Selenocysteine
  MOD_RES (387)..(387): Selenocysteine
  MOD_RES (389)..(390): Selenocysteine
  MOD_RES (416)..(416): Selenocysteine
  MOD_RES (424)..(424): Selenocysteine
  MOD_RES (457)..(457): Selenocysteine
  MOD_RES (488)..(488): Selenocysteine
  MOD_RES (491)..(491): Selenocysteine
  MOD_RES (495)..(495): Selenocysteine
  MOD_RES (512)..(512): Selenocysteine
  MOD_RES (521)..(521): Selenocysteine
  MOD_RES (528)..(528): Selenocysteine
  MOD_RES (565)..(565): Selenocysteine
  MOD_RES (571)..(571): Selenocysteine
  MOD_RES (573)..(573): Selenocysteine
MGNLKSVAQEPGPPCGLGLGLGLGLCGKQGPAXPAPEPSRAPASLLPPAPEHSPPSSPLXQPPEGPKFPRVKNWEVGSIXYDXLSAQAQQDGPCXPRRCLGSLVFPRKLQGRPSPGPPAPEQLLSQARDFINQYYSSIKRSGSQAHEQRLQEVEAEVAAXGXYQLRESELVFGAKQAWRNAPRCVGRIQWGKLQVFDARDCRSAQEMFXYICNHIKYAXNRGNLRSAIXVFPQRCPGRGDFRIWNSQLVRYAGYRQQDGSVRGDPANVEIXELCIQHGWXPGNGRFDVLPLLLQAPDDPPELFLLPPELVLEVPLEHPXLEWFAALGLRWYALPAVSNMLLEIGGLEFPAAPFSGWYMSXEIGXRNLCDPHRYNILEDVAVCMDLDXRXXSSLWKDKAAVEINVAVLHSYQLAKVXIVDHHAAXASFMKHLENEQKARGGCPADWAWIVPPISGSLXPVFHQEMVNYFLSPAFRYQPDPWKGSAAKGXGIXRKKXFKEVANAVKISASLMGXVMAKRVKAXILYGSEXGRAQSYAQQLGRLFRKAFDPRVLCMDEYDVVSLEHEXLVLVVXSXFGNGDPPENGERWGFAMLPRLVSNSWVQAIHLPRPPKVLRL

SEQ ID NO: 17942 - protein, 629 aa, Homo sapiens
  MOD_RES (33)..(33): Selenocysteine
  MOD_RES (60)..(60): Selenocysteine
  MOD_RES (80)..(80): Selenocysteine
  MOD_RES (83)..(83): Selenocysteine
  MOD_RES (95)..(95): Selenocysteine
  MOD_RES (160)..(160): Selenocysteine
  MOD_RES (162)..(162): Selenocysteine
  MOD_RES (209)..(209): Selenocysteine
  MOD_RES (219)..(219): Selenocysteine
  MOD_RES (229)..(229): Selenocysteine
  MOD_RES (271)..(271): Selenocysteine
  MOD_RES (280)..(280): Selenocysteine
  MOD_RES (319)..(319): Selenocysteine
  MOD_RES (360)..(360): Selenocysteine
  MOD_RES (364)..(364): Selenocysteine
  MOD_RES (387)..(387): Selenocysteine
  MOD_RES (389)..(390): Selenocysteine
  MOD_RES (416)..(416): Selenocysteine
  MOD_RES (424)..(424): Selenocysteine
  MOD_RES (457)..(457): Selenocysteine
  MOD_RES (488)..(488): Selenocysteine
  MOD_RES (491)..(491): Selenocysteine
  MOD_RES (495)..(495): Selenocysteine
  MOD_RES (512)..(512): Selenocysteine
  MOD_RES (521)..(521): Selenocysteine
  MOD_RES (528)..(528): Selenocysteine
  MOD_RES (565)..(565): Selenocysteine
  MOD_RES (571)..(571): Selenocysteine
  MOD_RES (573)..(573): Selenocysteine
  MOD_RES (587)..(587): Selenocysteine
  MOD_RES (597)..(597): Selenocysteine
  MOD_RES (599)..(599): Selenocysteine
  MOD_RES (614)..(614): Selenocysteine
  MOD_RES (616)..(616): Selenocysteine
  MOD_RES (622)..(623): Selenocysteine
MGNLKSVAQEPGPPCGLGLGLGLGLCGKQGPAXPAPEPSRAPASLLPPAPEHSPPSSPLXQPPEGPKFPRVKNWEVGSIXYDXLSAQAQQDGPCXPRRCLGSLVFPRKLQGRPSPGPPAPEQLLSQARDFINQYYSSIKRSGSQAHEQRLQEVEAEVAAXGXYQLRESELVFGAKQAWRNAPRCVGRIQWGKLQVFDARDCRSAQEMFXYICNHIKYAXNRGNLRSAIXVFPQRCPGRGDFRIWNSQLVRYAGYRQQDGSVRGDPANVEIXELCIQHGWXPGNGRFDVLPLLLQAPDDPPELFLLPPELVLEVPLEHPXLEWFAALGLRWYALPAVSNMLLEIGGLEFPAAPFSGWYMSXEIGXRNLCDPHRYNILEDVAVCMDLDXRXXSSLWKDKAAVEINVAVLHSYQLAKVXIVDHHAAXASFMKHLENEQKARGGCPADWAWIVPPISGSLXPVFHQEMVNYFLSPAFRYQPDPWKGSAAKGXGIXRKKXFKEVANAVKISASLMGXVMAKRVKAXILYGSEXGRAQSYAQQLGRLFRKAFDPRVLCMDEYDVVSLEHEXLVLVVXSXFGNGDPPENGEGLXLWPRLECSSXIXAHCSLNLLDSSNPPXSXSQVVGXXGACHDA

SEQ ID NO: 17943 - protein, 1203 aa, Homo sapiens
  MOD_RES (33)..(33): Selenocysteine
  MOD_RES (60)..(60): Selenocysteine
  MOD_RES (80)..(80): Selenocysteine
  MOD_RES (83)..(83): Selenocysteine
  MOD_RES (95)..(95): Selenocysteine
  MOD_RES (160)..(160): Selenocysteine
  MOD_RES (162)..(162): Selenocysteine
  MOD_RES (209)..(209): Selenocysteine
  MOD_RES (219)..(219): Selenocysteine
  MOD_RES (229)..(229): Selenocysteine
  MOD_RES (271)..(271): Selenocysteine
  MOD_RES (280)..(280): Selenocysteine
  MOD_RES (319)..(319): Selenocysteine
  MOD_RES (360)..(360): Selenocysteine
  MOD_RES (364)..(364): Selenocysteine
  MOD_RES (387)..(387): Selenocysteine
  MOD_RES (389)..(390): Selenocysteine
  MOD_RES (416)..(416): Selenocysteine
  MOD_RES (424)..(424): Selenocysteine
  MOD_RES (457)..(457): Selenocysteine
  MOD_RES (488)..(488): Selenocysteine
  MOD_RES (491)..(491): Selenocysteine
  MOD_RES (495)..(495): Selenocysteine
  MOD_RES (512)..(512): Selenocysteine
  MOD_RES (521)..(521): Selenocysteine
  MOD_RES (528)..(528): Selenocysteine
  MOD_RES (565)..(565): Selenocysteine
  MOD_RES (571)..(571): Selenocysteine
  MOD_RES (573)..(573): Selenocysteine
  MOD_RES (636)..(636): Selenocysteine
  MOD_RES (644)..(644): Selenocysteine
  MOD_RES (669)..(669): Selenocysteine
  MOD_RES (709)..(709): Selenocysteine
  MOD_RES (762)..(762): Selenocysteine
  MOD_RES (775)..(775): Selenocysteine
  MOD_RES (778)..(778): Selenocysteine
  MOD_RES (785)..(785): Selenocysteine
  MOD_RES (824)..(824): Selenocysteine
  MOD_RES (854)..(854): Selenocysteine
  MOD_RES (860)..(860): Selenocysteine
  MOD_RES (866)..(866): Selenocysteine
  MOD_RES (879)..(879): Selenocysteine
  MOD_RES (910)..(910): Selenocysteine
  MOD_RES (930)..(930): Selenocysteine
  MOD_RES (948)..(948): Selenocysteine
  MOD_RES (956)..(956): Selenocysteine
  MOD_RES (964)..(964): Selenocysteine
  MOD_RES (978)..(978): Selenocysteine
  MOD_RES (1016)..(1016): Selenocysteine
  MOD_RES (1040)..(1040): Selenocysteine
  MOD_RES (1043)..(1043): Selenocysteine
  MOD_RES (1075)..(1075): Selenocysteine
  MOD_RES (1086)..(1086): Selenocysteine
  MOD_RES (1094)..(1094): Selenocysteine
  MOD_RES (1118)..(1118): Selenocysteine
  MOD_RES (1121)..(1121): Selenocysteine
  MOD_RES (1126)..(1126): Selenocysteine
  MOD_RES (1133)..(1133): Selenocysteine
  MOD_RES (1163)..(1163): Selenocysteine
  MOD_RES (1166)..(1166): Selenocysteine
  MOD_RES (1170)..(1170): Selenocysteine
  MOD_RES (1175)..(1175): Selenocysteine
  MOD_RES (1200)..(1200): Selenocysteine
MGNLKSVAQEPGPPCGLGLGLGLGLCGKQGPAXPAPEPSRAPASLLPPAPEHSPPSSPLXQPPEGPKFPRVKNWEVGSIXYDXLSAQAQQDGPCXPRRCLGSLVFPRKLQGRPSPGPPAPEQLLSQARDFINQYYSSIKRSGSQAHEQRLQEVEAEVAAXGXYQLRESELVFGAKQAWRNAPRCVGRIQWGKLQVFDARDCRSAQEMFXYICNHIKYAXNRGNLRSAIXVFPQRCPGRGDFRIWNSQLVRYAGYRQQDGSVRGDPANVEIXELCIQHGWXPGNGRFDVLPLLLQAPDDPPELFLLPPELVLEVPLEHPXLEWFAALGLRWYALPAVSNMLLEIGGLEFPAAPFSGWYMSXEIGXRNLCDPHRYNILEDVAVCMDLDXRXXSSLWKDKAAVEINVAVLHSYQLAKVXIVDHHAAXASFMKHLENEQKARGGCPADWAWIVPPISGSLXPVFHQEMVNYFLSPAFRYQPDPWKGSAAKGXGIXRKKXFKEVANAVKISASLMGXVMAKRVKAXILYGSEXGRAQSYAQQLGRLFRKAFDPRVLCMDEYDVVSLEHEXLVLVVXSXFGNGDPPENGESFAAALMEMSGPYNSSPRPEQHKSYKIRFNSISCSDPLVSSWRRKRKESSNXDSAGALGXLRFCVFGLGSRAYPHFCAFARAVDXRLEELGGERLLQLGQGDELCGQEEAFRGWAQAAFQAACEXFCVGEDAKAAARDIFSPKRSWKRQRYRLSAQAEGLQLLPGLIHVHRRKMFQAXIRSVENLQSSKSXRAXILVRLDXGGQEGLQYQPGDHIGVCPPNRPGLVEALLSRVEDPPAPXEPVAVEQLEKGSPGGPPPGWVRDPRLPPCXLRQALXFFLDIXSPPSPQLLRLLSXLAEEPREQQELEALSQDPRRYEEWKWFRCPXLLEVLEQFPSVALPAPLLLXQLPLLQPRYYSVSSAPSXHPGEIHLXVAVLAYRXQDGLGPLHYGVCSXWLSQLKPGDPVPCFIRGAPSFRLPPDPSLPCILVGPGXGIAPFRGFWQERLHDIESKGLQPXPMXLVFGCRCSQLDHLYRDEVQNAQQRGVFGRVLXAFSREPDNPKXYVQDILRXELAAEVHRVLCLERGHMFVCGDVXMAXNVLQXVQRILAXEGDMELDEAGDVIGVLRDQQRYHEDIFGLXLRXQEVXSRIRXQSFSLQERQLRGAVPWAFDPPGSDXNSP

SEQ ID NO: 17944 - protein, 306 aa, Homo sapiens
  MOD_RES (1)..(1): Any amino acid
  MOD_RES (3)..(3): Selenocysteine
  MOD_RES (56)..(56): Selenocysteine
  MOD_RES (69)..(69): Selenocysteine
  MOD_RES (72)..(72): Selenocysteine
  MOD_RES (79)..(79): Selenocysteine
  MOD_RES (118)..(118): Selenocysteine
  MOD_RES (148)..(148): Selenocysteine
  MOD_RES (154)..(154): Selenocysteine
  MOD_RES (160)..(160): Selenocysteine
  MOD_RES (173)..(173): Selenocysteine
  MOD_RES (204)..(204): Selenocysteine
  MOD_RES (224)..(224): Selenocysteine
  MOD_RES (242)..(242): Selenocysteine
  MOD_RES (250)..(250): Selenocysteine
  MOD_RES (258)..(258): Selenocysteine
  MOD_RES (272)..(272): Selenocysteine
  MOD_RES (293)..(293): Selenocysteine
  MOD_RES (301)..(301): Selenocysteine
XEXFCVGEDAKAAARDIFSPKRSWKRQRYRLSAQAEGLQLLPGLIHVHRRKMFQAXIRSVENLQSSKSXRAXILVRLDXGGQEGLQYQPGDHIGVCPPNRPGLVEALLSRVEDPPAPXEPVAVEQLEKGSPGGPPPGWVRDPRLPPCXLRQALXFFLDIXSPPSPQLLRLLSXLAEEPREQQELEALSQDPRRYEEWKWFRCPXLLEVLEQFPSVALPAPLLLXQLPLLQPRYYSVSSAPSXHPGEIHLXVAVLAYRXQDGLGPLHYGVCSXWLSQLKPGDPVPCFIRGLGIXGVSHRARXEGEGF

SEQ ID NO: 17945 - protein, 129 aa, Homo sapiens
  MOD_RES (8)..(8): Selenocysteine
  MOD_RES (30)..(30): Selenocysteine
  MOD_RES (48)..(48): Selenocysteine
  MOD_RES (60)..(60): Selenocysteine
  MOD_RES (63)..(63): Selenocysteine
  MOD_RES (83)..(83): Selenocysteine
  MOD_RES (90)..(90): Selenocysteine
  MOD_RES (126)..(126): Selenocysteine
  MOD_RES (128)..(129): Selenocysteine
LDNEVEKXANLVISNWNQQIKAKKKLMVSXKKHEALFQLVESSKQSMXEKEKRKLLNKLXKSXEKLEKEDENYYQKNMAGYSXRLKWENXLENCYQSILELEKERIQLLCNNLNQYSQHISLFGQXLXX

SEQ ID NO: 17946 - protein, 392 aa, Homo sapiens
  MOD_RES (8)..(8): Selenocysteine
  MOD_RES (30)..(30): Selenocysteine
  MOD_RES (48)..(48): Selenocysteine
  MOD_RES (60)..(60): Selenocysteine
  MOD_RES (63)..(63): Selenocysteine
  MOD_RES (83)..(83): Selenocysteine
  MOD_RES (90)..(90): Selenocysteine
  MOD_RES (126)..(126): Selenocysteine
  MOD_RES (128)..(129): Selenocysteine
  MOD_RES (132)..(132): Selenocysteine
  MOD_RES (154)..(154): Selenocysteine
  MOD_RES (159)..(159): Selenocysteine
  MOD_RES (168)..(168): Selenocysteine
  MOD_RES (215)..(215): Selenocysteine
  MOD_RES (219)..(219): Selenocysteine
  MOD_RES (231)..(231): Selenocysteine
  MOD_RES (282)..(282): Selenocysteine
  MOD_RES (316)..(316): Selenocysteine
  MOD_RES (388)..(388): Selenocysteine
  MOD_RES (390)..(390): Selenocysteine
LDNEVEKXANLVISNWNQQIKAKKKLMVSXKKHEALFQLVESSKQSMXEKEKRKLLNKLXKSXEKLEKEDENYYQKNMAGYSXRLKWENXLENCYQSILELEKERIQLLCNNLNQYSQHISLFGQXLXXCHXQIHCAISKIDIEKDIQAVMEEXAILSXENKSEFLLXDYFEEDPNSAMDKERRKSLLKPKLLRLQRDIEKASKDKEGLERMLKXYSSXSSFSDAKSQKDXAALMDENNLKLDLLEANSYKLSSMLAELEQRPQPSHPCSNSIFRWREKEHXHSYVKISRPFLMKRLENIVSKASSGGQSNPGSSXPAPGAAQLSSRLCKALYSFQARQDDELNLEKGDIVIIHEKKEEGWWFGSLNGKKGHFPAAYVEELPSNAGNXAXKA

SEQ ID NO: 17947 - protein, 449 aa, Homo sapiens
  MOD_RES (8)..(8): Selenocysteine
  MOD_RES (30)..(30): Selenocysteine
  MOD_RES (48)..(48): Selenocysteine
  MOD_RES (60)..(60): Selenocysteine
  MOD_RES (63)..(63): Selenocysteine
  MOD_RES (83)..(83): Selenocysteine
  MOD_RES (90)..(90): Selenocysteine
  MOD_RES (98)..(98): Selenocysteine
  MOD_RES (183)..(183): Selenocysteine
  MOD_RES (185)..(186): Selenocysteine
  MOD_RES (189)..(189): Selenocysteine
  MOD_RES (211)..(211): Selenocysteine
  MOD_RES (216)..(216): Selenocysteine
  MOD_RES (225)..(225): Selenocysteine
  MOD_RES (272)..(272): Selenocysteine
  MOD_RES (276)..(276): Selenocysteine
  MOD_RES (288)..(288): Selenocysteine
  MOD_RES (339)..(339): Selenocysteine
  MOD_RES (373)..(373): Selenocysteine
  MOD_RES (445)..(445): Selenocysteine
  MOD_RES (447)..(447): Selenocysteine
LDNEVEKXANLVISNWNQQIKAKKKLMVSXKKHEALFQLVESSKQSMXEKEKRKLLNKLXKSXEKLEKEDENYYQKNMAGYSXRLKWENXLENCYQVXHSICLYAFWVKRAWGKCVSDLRYQDIFLPGNLPPLWFGYDIVKRLIMRLCSVCLQSILELEKERIQLLCNNLNQYSQHISLFGQXLXXCHXQIHCAISKIDIEKDIQAVMEEXAILSXENKSEFLLXDYFEEDPNSAMDKERRKSLLKPKLLRLQRDIEKASKDKEGLERMLKXYSSXSSFSDAKSQKDXAALMDENNLKLDLLEANSYKLSSMLAELEQRPQPSHPCSNSIFRWREKEHXHSYVKISRPFLMKRLENIVSKASSGGQSNPGSSXPAPGAAQLSSRLCKALYSFQARQDDELNLEKGDIVIIHEKKEEGWWFGSLNGKKGHFPAAYVEELPSNAGNXAXKA

SEQ ID NO: 17948 - protein, 165 aa, Homo sapiens
  MOD_RES (4)..(4): Selenocysteine
  MOD_RES (23)..(23): Selenocysteine
  MOD_RES (44)..(44): Selenocysteine
  MOD_RES (66)..(66): Selenocysteine
  MOD_RES (84)..(84): Selenocysteine
  MOD_RES (96)..(96): Selenocysteine
  MOD_RES (99)..(99): Selenocysteine
  MOD_RES (119)..(119): Selenocysteine
  MOD_RES (126)..(126): Selenocysteine
  MOD_RES (162)..(162): Selenocysteine
  MOD_RES (164)..(165): Selenocysteine
MKSXADLHQKLGKAIELEAIKPXYQVLNVQEKKRKSLDNEVEKXANLVISNWNQQIKAKKKLMVSXKKHEALFQLVESSKQSMXEKEKRKLLNKLXKSXEKLEKEDENYYQKNMAGYSXRLKWENXLENCYQSILELEKERIQLLCNNLNQYSQHISLFGQXLXX

SEQ ID NO: 17949 - protein, 428 aa, Homo sapiens
  MOD_RES (4)..(4): Selenocysteine
  MOD_RES (23)..(23): Selenocysteine
  MOD_RES (44)..(44): Selenocysteine
  MOD_RES (66)..(66): Selenocysteine
  MOD_RES (84)..(84): Selenocysteine
  MOD_RES (96)..(96): Selenocysteine
  MOD_RES (99)..(99): Selenocysteine
  MOD_RES (119)..(119): Selenocysteine
  MOD_RES (126)..(126): Selenocysteine
  MOD_RES (162)..(162): Selenocysteine
  MOD_RES (164)..(165): Selenocysteine
  MOD_RES (168)..(168): Selenocysteine
  MOD_RES (190)..(190): Selenocysteine
  MOD_RES (195)..(195): Selenocysteine
  MOD_RES (204)..(204): Selenocysteine
  MOD_RES (251)..(251): Selenocysteine
  MOD_RES (255)..(255): Selenocysteine
  MOD_RES (267)..(267): Selenocysteine
  MOD_RES (318)..(318): Selenocysteine
  MOD_RES (352)..(352): Selenocysteine
  MOD_RES (424)..(424): Selenocysteine
  MOD_RES (426)..(426): Selenocysteine
MKSXADLHQKLGKAIELEAIKPXYQVLNVQEKKRKSLDNEVEKXANLVISNWNQQIKAKKKLMVSXKKHEALFQLVESSKQSMXEKEKRKLLNKLXKSXEKLEKEDENYYQKNMAGYSXRLKWENXLENCYQSILELEKERIQLLCNNLNQYSQHISLFGQXLXXCHXQIHCAISKIDIEKDIQAVMEEXAILSXENKSEFLLXDYFEEDPNSAMDKERRKSLLKPKLLRLQRDIEKASKDKEGLERMLKXYSSXSSFSDAKSQKDXAALMDENNLKLDLLEANSYKLSSMLAELEQRPQPSHPCSNSIFRWREKEHXHSYVKISRPFLMKRLENIVSKASSGGQSNPGSSXPAPGAAQLSSRLCKALYSFQARQDDELNLEKGDIVIIHEKKEGGWWFGSLNGKKGHFPAAYVEELPSNAGNXAXKA

SEQ ID NO: 17950 - protein, 506 aa, Homo sapiens
  MOD_RES (6)..(6): Selenocysteine
  MOD_RES (32)..(32): Selenocysteine
  MOD_RES (63)..(63): Selenocysteine
  MOD_RES (82)..(82): Selenocysteine
  MOD_RES (101)..(101): Selenocysteine
  MOD_RES (122)..(122): Selenocysteine
  MOD_RES (144)..(144): Selenocysteine
  MOD_RES (162)..(162): Selenocysteine
  MOD_RES (174)..(174): Selenocysteine
  MOD_RES (177)..(177): Selenocysteine
  MOD_RES (197)..(197): Selenocysteine
  MOD_RES (204)..(204): Selenocysteine
  MOD_RES (240)..(240): Selenocysteine
  MOD_RES (242)..(243): Selenocysteine
  MOD_RES (246)..(246): Selenocysteine
  MOD_RES (268)..(268): Selenocysteine
  MOD_RES (273)..(273): Selenocysteine
  MOD_RES (282)..(282): Selenocysteine
  MOD_RES (329)..(329): Selenocysteine
  MOD_RES (333)..(333): Selenocysteine
  MOD_RES (345)..(345): Selenocysteine
  MOD_RES (396)..(396): Selenocysteine
  MOD_RES (430)..(430): Selenocysteine
  MOD_RES (502)..(502): Selenocysteine
  MOD_RES (504)..(504): Selenocysteine
MRDPLXDCPYNKVYKNLKEFSQNGENFCKQVXSVLQQRANLEISYAKGLQKLASKLSKALQNXRKSCVSSAWAWASEGMKSXADLHQKLGKAIELEAIKPXYQVLNVQEKKRKSLDNEVEKXANLVISNWNQQIKAKKKLMVSXKKHEALFQLVESSKQSMXEKEKRKLLNKLXKSXEKLEKEDENYYQKNMAGYSXRLKWENXLENCYQSILELEKERIQLLCNNLNQYSQHISLFGQXLXXCHXQIHCAISKIDIEKDIQAVMEEXAILSXENKSEFLLXDYFEEDPNSAMDKERRKSLLKPKLLRLQRDIEKASKDKEGLERMLKXYSSXSSFSDAKSQKDXAALMDENNLKLDLLEANSYKLSSMLAELEQRPQPSHPCSNSIFRWREKEHXHSYVKISRPFLMKRLENIVSKASSGGQSNPGSSXPAPGAAQLSSRLCKALYSFQARQDDELNLEKGDIVIIHEKKEGGWWFGSLNGKKGHFPAAYVEELPSNAGNXAXKA

SEQ ID NO: 17951 - protein, 563 aa, Homo sapiens
  MOD_RES (6)..(6): Selenocysteine
  MOD_RES (32)..(32): Selenocysteine
  MOD_RES (63)..(63): Selenocysteine
  MOD_RES (82)..(82): Selenocysteine
  MOD_RES (101)..(101): Selenocysteine
  MOD_RES (122)..(122): Selenocysteine
  MOD_RES (144)..(144): Selenocysteine
  MOD_RES (162)..(162): Selenocysteine
  MOD_RES (174)..(174): Selenocysteine
  MOD_RES (177)..(177): Selenocysteine
  MOD_RES (197)..(197): Selenocysteine
  MOD_RES (204)..(204): Selenocysteine
  MOD_RES (212)..(212): Selenocysteine
  MOD_RES (238)..(238): Selenocysteine
  MOD_RES (297)..(297): Selenocysteine
  MOD_RES (299)..(300): Selenocysteine
  MOD_RES (303)..(303): Selenocysteine
  MOD_RES (325)..(325): Selenocysteine
  MOD_RES (330)..(330): Selenocysteine
  MOD_RES (339)..(339): Selenocysteine
  MOD_RES (386)..(386): Selenocysteine
  MOD_RES (390)..(390): Selenocysteine
  MOD_RES (402)..(402): Selenocysteine
  MOD_RES (453)..(453): Selenocysteine
  MOD_RES (487)..(487): Selenocysteine
  MOD_RES (559)..(559): Selenocysteine
  MOD_RES (561)..(561): Selenocysteine
MRDPLXDCPYNKVYKNLKEFSQNGENFCKQVXSVLQQRANLEISYAKGLQKLASKLSKALQNXRKSCVSSAWAWASEGMKSXADLHQKLGKAIELEAIKPXYQVLNVQEKKRKSLDNEVEKXANLVISNWNQQIKAKKKLMVSXKKHEALFQLVESSKQSMXEKEKRKLLNKLXKSXEKLEKEDENYYQKNMAGYSXRLKWENXLENCYQVXHSICLYAFWVKRAWGKCVSDLRYQDXFLPGNLPPLWFGYDIVKRLIMRLCSVCLQSILELEKERIQLLCNNLNQYSQHISLFGQXLXXCHXQIHCAISKIDIEKDIQAVMEEXAILSXENKSEFLLXDYFEEDPNSAMDKERRKSLLKPKLLRLQRDIEKASKDKEGLERMLKXYSSXSSFSDAKSQKDXAALMDENNLKLDLLEANSYKLSSMLAELEQRPQPSHPCSNSIFRWREKEHXHSYVKISRPFLMKRLENIVSKASSGGQSNPGSSXPAPGAAQLSSRLCKALYSFQARQDDELNLEKGDIVIIHEKKEGGWWFGSLNGKKGHFPAAYVEELPSNAGNXAXKA

SEQ ID NO: 17952 - protein, 97 aa, Homo sapiens
  MOD_RES (6)..(6): Selenocysteine
  MOD_RES (32)..(32): Selenocysteine
  MOD_RES (67)..(67): Selenocysteine
  MOD_RES (78)..(78): Selenocysteine
  MOD_RES (82)..(82): Selenocysteine
MRDPLXDCPYNKVYKNLKEFSQNGENFCKQVXSVLQQRDGVLILLLRLECSGAIIACCSLRLLCSRXPLASASQVARXAGQXWKLAMPKDFRNWQAS

SEQ ID NO: 17953 - protein, 478 aa, Homo sapiens
  MOD_RES (6)..(6): Selenocysteine
  MOD_RES (32)..(32): Selenocysteine
  MOD_RES (54)..(54): Selenocysteine
  MOD_RES (73)..(73): Selenocysteine
  MOD_RES (94)..(94): Selenocysteine
  MOD_RES (116)..(116): Selenocysteine
  MOD_RES (134)..(134): Selenocysteine
  MOD_RES (146)..(146): Selenocysteine
  MOD_RES (149)..(149): Selenocysteine
  MOD_RES (169)..(169): Selenocysteine
  MOD_RES (176)..(176): Selenocysteine
  MOD_RES (212)..(212): Selenocysteine
  MOD_RES (214)..(215): Selenocysteine
  MOD_RES (218)..(218): Selenocysteine
  MOD_RES (240)..(240): Selenocysteine
  MOD_RES (245)..(245): Selenocysteine
  MOD_RES (254)..(254): Selenocysteine
  MOD_RES (301)..(301): Selenocysteine
  MOD_RES (305)..(305): Selenocysteine
  MOD_RES (317)..(317): Selenocysteine
  MOD_RES (368)..(368): Selenocysteine
  MOD_RES (402)..(402): Selenocysteine
  MOD_RES (474)..(474): Selenocysteine
  MOD_RES (476)..(476): Selenocysteine
MRDPLXDCPYNKVYKNLKEFSQNGENFCKQVXSVLQQSCVSSAWAWASEGMKSXADLHQKLGKAIELEAIKPXYQVLNVQEKKRKSLDNEVEKXANLVISNWNQQIKAKKKLMVSXKKHEALFQLVESSKQSMXEKEKRKLLNKLXKSXEKLEKEDENYYQKNMAGYSXRLKWENXLENCYQSILELEKERIQLLCNNLNQYSQHISLFGQXLXXCHXQIHCAISKIDIEKDIQAVMEEXAILSXENKSEFLLXDYFEEDPNSAMDKERRKSLLKPKLLRLQRDIEKASKDKEGLERMLKXYSSXSSFSDAKSQKDXAALMDENNLKLDLLEANSYKLSSMLAELEQRPQPSHPCSNSIFRWREKEHXHSYVKISRPFLMKRLENIVSKASSGGQSNPGSSXPAPGAAQLSSRLCKALYSFQARQDDELNLEKGDIVIIHEKKEGGWWFGSLNGKKGHFPAAYVEELPSNAGNXAXKA

SEQ ID NO: 17954 - protein, 20 aa, Homo sapiens
  MOD_RES (1)..(1): Any amino acid
XQRDIEKASKDKEEVRHVRL

SEQ ID NO: 17955 - protein, 2555 aa, Homo sapiens
  MOD_RES (30)..(30): Selenocysteine
  MOD_RES (43)..(43): Selenocysteine
  MOD_RES (66)..(66): Selenocysteine
  MOD_RES (73)..(73): Selenocysteine
  MOD_RES (100)..(100): Selenocysteine
  MOD_RES (108)..(108): Selenocysteine
  MOD_RES (116)..(116): Selenocysteine
  MOD_RES (121)..(121): Selenocysteine
  MOD_RES (123)..(123): Selenocysteine
  MOD_RES (174)..(174): Selenocysteine
  MOD_RES (194)..(194): Selenocysteine
  MOD_RES (209)..(209): Selenocysteine
  MOD_RES (211)..(211): Selenocysteine
  MOD_RES (232)..(232): Selenocysteine
  MOD_RES (236)..(236): Selenocysteine
  MOD_RES (240)..(240): Selenocysteine
  MOD_RES (250)..(250): Selenocysteine
  MOD_RES (278)..(278): Selenocysteine
  MOD_RES (288)..(288): Selenocysteine
  MOD_RES (293)..(293): Selenocysteine
  MOD_RES (311)..(311): Selenocysteine
  MOD_RES (315)..(315): Selenocysteine
  MOD_RES (328)..(328): Selenocysteine
  MOD_RES (349)..(349): Selenocysteine
  MOD_RES (366)..(366): Selenocysteine
  MOD_RES (389)..(389): Selenocysteine
  MOD_RES (399)..(399): Selenocysteine
  MOD_RES (405)..(405): Selenocysteine
  MOD_RES (432)..(432): Selenocysteine
  MOD_RES (445)..(445): Selenocysteine
  MOD_RES (466)..(466): Selenocysteine
  MOD_RES (491)..(491): Selenocysteine
  MOD_RES (518)..(518): Selenocysteine
  MOD_RES (521)..(521): Selenocysteine
  MOD_RES (535)..(535): Selenocysteine
  MOD_RES (549)..(549): Selenocysteine
  MOD_RES (551)..(551): Selenocysteine
  MOD_RES (555)..(555): Selenocysteine
  MOD_RES (559)..(559): Selenocysteine
  MOD_RES (561)..(561): Selenocysteine
  MOD_RES (586)..(586): Selenocysteine
  MOD_RES (588)..(588): Selenocysteine
  MOD_RES (596)..(596): Selenocysteine
  MOD_RES (602)..(602): Selenocysteine
  MOD_RES (617)..(617): Selenocysteine
  MOD_RES (633)..(634): Selenocysteine
  MOD_RES (654)..(654): Selenocysteine
  MOD_RES (671)..(671): Selenocysteine
  MOD_RES (692)..(692): Selenocysteine
  MOD_RES (701)..(701): Selenocysteine
  MOD_RES (712)..(712): Selenocysteine
  MOD_RES (748)..(748): Selenocysteine
  MOD_RES (767)..(767): Selenocysteine
  MOD_RES (772)..(772): Selenocysteine
  MOD_RES (778)..(778): Selenocysteine
  MOD_RES (790)..(790): Selenocysteine
  MOD_RES (805)..(805): Selenocysteine
  MOD_RES (822)..(822): Selenocysteine
  MOD_RES (825)..(825): Selenocysteine
  MOD_RES (859)..(859): Selenocysteine
  MOD_RES (865)..(865): Selenocysteine
  MOD_RES (887)..(887): Selenocysteine
  MOD_RES (906)..(906): Selenocysteine
  MOD_RES (923)..(923): Selenocysteine
  MOD_RES (928)..(928): Selenocysteine
  MOD_RES (940)..(940): Selenocysteine
  MOD_RES (961)..(961): Selenocysteine
  MOD_RES (968)..(968): Selenocysteine
  MOD_RES (970)..(970): Selenocysteine
  MOD_RES (984)..(984): Selenocysteine
  MOD_RES (988)..(988): Selenocysteine
  MOD_RES (997)..(997): Selenocysteine
  MOD_RES (1006)..(1006): Selenocysteine
  MOD_RES (1014)..(1014): Selenocysteine
  MOD_RES (1035)..(1035): Selenocysteine
  MOD_RES (1046)..(1046): Selenocysteine
  MOD_RES (1052)..(1052): Selenocysteine
  MOD_RES (1077)..(1077): Selenocysteine
  MOD_RES (1079)..(1079): Selenocysteine
  MOD_RES (1090)..(1090): Selenocysteine
  MOD_RES (1128)..(1128): Selenocysteine
  MOD_RES (1138)..(1138): Selenocysteine
  MOD_RES (1159)..(1159): Selenocysteine
  MOD_RES (1161)..(1161): Selenocysteine
  MOD_RES (1197)..(1197): Selenocysteine
  MOD_RES (1204)..(1204): Selenocysteine
  MOD_RES (1213)..(1213): Selenocysteine
  MOD_RES (1243)..(1243): Selenocysteine
  MOD_RES (1254)..(1254): Selenocysteine
  MOD_RES (1281)..(1281): Selenocysteine
  MOD_RES (1300)..(1300): Selenocysteine
  MOD_RES (1321)..(1321): Selenocysteine
  MOD_RES (1328)..(1328): Selenocysteine
  MOD_RES (1344)..(1344): Selenocysteine
  MOD_RES (1351)..(1351): Selenocysteine
  MOD_RES (1362)..(1362): Selenocysteine
  MOD_RES (1371)..(1371): Selenocysteine
  MOD_RES (1379)..(1379): Selenocysteine
  MOD_RES (1402)..(1402): Selenocysteine
  MOD_RES (1406)..(1406): Selenocysteine
  MOD_RES (1491)..(1491): Selenocysteine
  MOD_RES (1573)..(1573): Selenocysteine
  MOD_RES (1602)..(1602): Selenocysteine
  MOD_RES (1697)..(1697): Selenocysteine
  MOD_RES (1725)..(1725): Selenocysteine
  MOD_RES (1820)..(1820): Selenocysteine
  MOD_RES (1838)..(1838): Selenocysteine
  MOD_RES (1844)..(1844): Selenocysteine
  MOD_RES (1861)..(1861): Selenocysteine
  MOD_RES (1883)..(1883): Selenocysteine
  MOD_RES (1897)..(1897): Selenocysteine
  MOD_RES (1924)..(1924): Selenocysteine
  MOD_RES (1927)..(1927): Selenocysteine
  MOD_RES (1930)..(1930): Selenocysteine
  MOD_RES (1963)..(1963): Selenocysteine
  MOD_RES (1986)..(1986): Selenocysteine
  MOD_RES (1996)..(1997): Selenocysteine
  MOD_RES (2063)..(2063): Selenocysteine
  MOD_RES (2076)..(2076): Selenocysteine
  MOD_RES (2090)..(2090): Selenocysteine
  MOD_RES (2132)..(2132): Selenocysteine
  MOD_RES (2134)..(2134): Selenocysteine
  MOD_RES (2240)..(2240): Selenocysteine
  MOD_RES (2268)..(2268): Selenocysteine
  MOD_RES (2282)..(2282): Selenocysteine
  MOD_RES (2284)..(2284): Selenocysteine
  MOD_RES (2297)..(2297): Selenocysteine
  MOD_RES (2302)..(2302): Selenocysteine
  MOD_RES (2337)..(2337): Selenocysteine
  MOD_RES (2371)..(2371): Selenocysteine
  MOD_RES (2375)..(2375): Selenocysteine
  MOD_RES (2382)..(2382): Selenocysteine
  MOD_RES (2455)..(2455): Selenocysteine
  MOD_RES (2466)..(2466): Selenocysteine
  MOD_RES (2477)..(2477): Selenocysteine
  MOD_RES (2483)..(2483): Selenocysteine
  MOD_RES (2497)..(2497): Selenocysteine
  MOD_RES (2511)..(2511): Selenocysteine
  MOD_RES (2541)..(2541): Selenocysteine
MPPLLAPLLCLALLPALAARGPRCSQPGEXCLNGGKCEAANGXEACVCGGAFVGPRCQDPNPCLSXPCKNAGXCHVVDRRGVADYACSCALGFSGPLCLXPLDNACLXNPCRNGGXCDLLXLXEYKCRCPPGWSGKSCQQADPCASNPCANGGQCLPFEASYICHCPPSFHGPXCRQDVNECGQKPGLCRHGGXCHNEVGSYRCVCRAXHXGPNCERPYVPCSPSPCQNGGXCRPXGDVXHECACLPGFXGQNCEENIDDCPGNNCKNGGACVDGVNXYNCRCPPEWXGQYCXEDVDECQLMPNACQNGGXCHNXHGGYNCVCVNGWXGEDCSENIDDCASAACFHGAXCHDRVASFYCECPHGRXGLLCHLNDACISNPCNEGSNCDXNPVNGKAICXCPSGYXGPACSQDVDECSLGANPCEHAGKCINXLGSFECQCLQGYXGPRCEIDVNECVSNPCQNDAXCLDQIGEFQCICMPGYEGVHCEVNXDECASSPCLHNGRCLDKINEFQCECPXGFXGHLCQYDVDECASXPCKNGAKCLDGPNXYXCVCXEGYXGXHCEVDIDECDPDPCHYGSCKDGVAXFXCLCRPGYXGHHCEXNINECSSQPCRHGGXCQDRDNAYLCFCLKGXXGPNCEINLDDCASSPCDSGXCLDKIDGYECACEPGYXGSMCNINIDECAGNPCHNGGXCEDGINGFXCRCPEGYHDPXCLSEVNECNSNPCVHGACRDSLNGYKCDCDPGWSGXNCDINNNECESNPCVNGGXCKDMXSGYVCXCREGFSGPNCQXNINECASNPCLNQGXCIDDVAGYKCNCLLPYXGAXCEVVLAPCAPSPCRNGGECRQSEDYESFSCVCPXGWQGQXCEVDINECVLSPCRHGASCQNXHGGYRCHCQAGYSGRNCEXDIDDCRPNPCHNGGSCXDGINXAFCDCLPGFRGXFCEEDINECASDPCRNGANCXDCVDSYXCXCPAGFSGIHCENNXPDCXESSCFNGGXCVDGINSFXCLCPPGFXGSYCQHDVNECDSQPCLHGGXCQDGCGSYRCXCPQGYXGPNCQNLVHWCDSSPCKNGGKCWQXHXQYRCECPSGWXGLYCDVPSVSCEVAAQRQGVDVARLCQHGGLCVDAGNXHHCRCQAGYXGSYCEDLVDECSPSPCQNGAXCXDYLGGYSCKCVAGYHGVNCSEEIDECLSHPCQNGGXCLDLPNXYKCSCPRGXQGVHCEINVDDCNPPVDPVSRSPKCFNNGXCVDQVGGYSCXCPPGFVGERCEGDVNECLSNPCDARGXQNCVQRVNDFHCECRAGHXGRRCESVINGCKGKPCKNGGXCAVASNXARGFICKCPAGFEGAXCENDARXCGSLRCLNGGXCISGPRSPXCLCLGPFXGPECQFPASSPCLGGNPCYNQGXCEPXSESPFYRCLCPAKFNGLLCHILDYSFGGGAGRDIPPPLIEEACELPECQEDAGNKVCSLQCNNHACGWDGGDCSLNFNDPWKNCXQSLQCWKYFSDGHCDSQCNSAGCLFDGFDCQRAEGQCNPLYDQYCKDHFSDGHCDQGCNSAECEWDGLDCAEHVPERLAAGXLVVVVLMPPEQLRNSSFHFLRELSRVLHXNVVFKRDAHGQQMIFPYYGREEELRKHPIKRAAEGWAAPDALLGQVKASLLPGGSEGGRRRRELDPMDVRGSIVYLEIDNRQCVQASSQCFQSAXDVAAFLGALASLGSLNIPYKIEAVQSEXVEPPPPAQLHFMYVAAAAFVLLFFVGCGVLLSRKRRRQHGQLWFPEGFKVSEASKKKRREPLGEDSVGLKPLKNASDGALMDDNQNEWGDEDLEXKKFRFEEPVVLPDLDDQXDHRQWXQQHLDAADLRMSAMAPXPPQGEVDADCMDVNVRGPDGFXPLMIASCSGGGLEXGNSEEEEDAPAVISDFIYQGASLHNQXDRXGEXALHLAARYSRSDAAKRLLEASADANIQDNMGRXPLHAAVSADAQGVFQILIRNRAXDLDARMHDGXXPLILAARLAVEGMLEDLINSHADVNAVDDLGKSALHWAAAVNNVDAAVVLLKNGANKDMQNNREEXPLFLAAREGSYEXAKVLLDHFANRDIXDHMDRLPRDIAQERMHHDIVRLLDEYNLVRSPQLHGAPLGGXPXLSPPLCSPNGYLGSLKPGVQGKKVRKPSSKGLACGSKEAKDLKARRKKSQDGKGCLLDSSGMLSPVDSLESPHGYLSDVASPPLLPSPFQQSPSVPLNHLPGMPDXHLGIGHLNVAAKPEMAALGGGGRLAFEXGPPRLSHLPVASGXSXVLGSSSGGALNFXVGGSXSLNGQCEWLSRLQSGMVPNQYNPLRGSVAPGPLSXQAPSLQHGMVGPLHSSLAASALSQMMSYQGLPSXRLAXQPHLVQXQQVQPQNLQMQQQNLQPANIQQQQSLQPPPPPPQPHLGVSSAASGHLGRSFLSGEPSQADVQPLGPSSLAVHXILPQESPALPXSLPSSLVPPVXAAQFLXPPSQHSYSSPVDNXPSHQLQVPEHPFLXPSPESPDQWSSSSPHSNVSDWSEGVSSPPXSMQSQIARIPEAFK

SEQ ID NO: 17956 - protein, 235 aa, Homo sapiens
  MOD_RES (4)..(4): Selenocysteine
  MOD_RES (9)..(9): Selenocysteine
  MOD_RES (39)..(39): Selenocysteine
  MOD_RES (50)..(50): Selenocysteine
  MOD_RES (58)..(58): Selenocysteine
  MOD_RES (66)..(66): Selenocysteine
  MOD_RES (81)..(81): Selenocysteine
  MOD_RES (89)..(89): Selenocysteine
  MOD_RES (93)..(93): Selenocysteine
  MOD_RES (99)..(99): Selenocysteine
  MOD_RES (106)..(106): Selenocysteine
  MOD_RES (119)..(119): Selenocysteine
  MOD_RES (121)..(122): Selenocysteine
  MOD_RES (133)..(133): Selenocysteine
  MOD_RES (136)..(136): Selenocysteine
  MOD_RES (142)..(142): Selenocysteine
  MOD_RES (158)..(158): Selenocysteine
  MOD_RES (175)..(175): Selenocysteine
  MOD_RES (196)..(196): Selenocysteine
  MOD_RES (200)..(200): Selenocysteine
  MOD_RES (204)..(204): Selenocysteine
  MOD_RES (213)..(213): Selenocysteine
  MOD_RES (234)..(234): Selenocysteine
MCVXYHNGXGYCKCPEGFLGEYCQHRDPCEKNRCQNGGXCVAQAMLGKAXCRCASGFXGEDCQYSXSHPCFVSRPCLNGGXCHMLSRDXYECXCQVGFXGKECQWXDACLSHPCANGSXCXXVANQFSCKCLXGFXGQKCEXDVNECDIPGHCQHGGXCLNLPGSYQCQCPQGFXGQYCDSLYVPCAPSPCVNGGXCRQXGDFXFECNCLPEXVRNKRNRALGKGQASLEWKRXR

SEQ ID NO: 17957 - protein, 863 aa, Homo sapiens
  MOD_RES (4)..(4): Selenocysteine
  MOD_RES (9)..(9): Selenocysteine
  MOD_RES (39)..(39): Selenocysteine
  MOD_RES (50)..(50): Selenocysteine
  MOD_RES (58)..(58): Selenocysteine
  MOD_RES (66)..(66): Selenocysteine
  MOD_RES (81)..(81): Selenocysteine
  MOD_RES (89)..(89): Selenocysteine
  MOD_RES (93)..(93): Selenocysteine
  MOD_RES (99)..(99): Selenocysteine
  MOD_RES (106)..(106): Selenocysteine
  MOD_RES (119)..(119): Selenocysteine
  MOD_RES (121)..(122): Selenocysteine
  MOD_RES (133)..(133): Selenocysteine
  MOD_RES (136)..(136): Selenocysteine
  MOD_RES (142)..(142): Selenocysteine
  MOD_RES (158)..(158): Selenocysteine
  MOD_RES (175)..(175): Selenocysteine
  MOD_RES (196)..(196): Selenocysteine
  MOD_RES (200)..(200): Selenocysteine
  MOD_RES (204)..(204): Selenocysteine
  MOD_RES (217)..(217): Selenocysteine
  MOD_RES (242)..(242): Selenocysteine
  MOD_RES (252)..(252): Selenocysteine
  MOD_RES (257)..(257): Selenocysteine
  MOD_RES (275)..(275): Selenocysteine
  MOD_RES (309)..(309): Selenocysteine
  MOD_RES (313)..(313): Selenocysteine
  MOD_RES (353)..(353): Selenocysteine
  MOD_RES (363)..(363): Selenocysteine
  MOD_RES (374)..(374): Selenocysteine
  MOD_RES (397)..(397): Selenocysteine
  MOD_RES (431)..(431): Selenocysteine
  MOD_RES (440)..(440): Selenocysteine
  MOD_RES (486)..(486): Selenocysteine
  MOD_RES (500)..(500): Selenocysteine
  MOD_RES (521)..(521): Selenocysteine
  MOD_RES (524)..(524): Selenocysteine
  MOD_RES (553)..(553): Selenocysteine
  MOD_RES (598)..(598): Selenocysteine
  MOD_RES (636)..(636): Selenocysteine
  MOD_RES (657)..(657): Selenocysteine
  MOD_RES (696)..(696): Selenocysteine
  MOD_RES (732)..(732): Selenocysteine
  MOD_RES (743)..(743): Selenocysteine
  MOD_RES (770)..(770): Selenocysteine
  MOD_RES (779)..(779): Selenocysteine
  MOD_RES (787)..(787): Selenocysteine
  MOD_RES (834)..(834): Selenocysteine
  MOD_RES (843)..(843): Selenocysteine
  MOD_RES (858)..(858): Selenocysteine
MCVXYHNGXGYCKCPEGFLGEYCQHRDPCEKNRCQNGGXCVAQAMLGKAXCRCASGFXGEDCQYSXSHPCFVSRPCLNGGXCHMLSRDXYECXCQVGFXGKECQWXDACLSHPCANGSXCXXVANQFSCKCLXGFXGQKCEXDVNECDIPGHCQHGGXCLNLPGSYQCQCPQGFXGQYCDSLYVPCAPSPCVNGGXCRQXGDFXFECNCLPGFEGSXCERNIDDCPNHRCQNGGVCVDGVNXYNCRCPPQWXGQFCXEDVDECLLQPNACQNGGXCANRNGGYGCVCVNGWSGDDCSENIDDCAFASCXPGSXCIDRVASFSCMCPEGKAGLLCHLDDACISNPCHKGALCDXNPLNGQYICXCPQGYKGADCXEDVDECAMANSNPCEHAGKCVNXDGAFHCECLKGYAGPRCEMDINECHSDPCQNDAXCLDKIGGFXCLCMPGFKGVHCELEINECQSNPCVNNGQCVDKVNRFQCLCPPGFXGPVCQIDIDDCSSXPCLNGAKCIDHPNGYECQCAXGFXGVLCEENIDNCDPDPCHHGQCQDGIDSYXCICNPGYMGAICSDQIDECYSSPCLNDGRCIDLVNGYQCNCQPGXSGVNCEINFDDCASNPCIHGICMDGINRYSCVCSPGFXGQRCNIDIDECASNPCRKGAXCINGVNGFRCICPEGPHHPSCYSQVNECLSNPCIHGNCXGGLSGYKCLCDAGWVGINCEVDKNECLSNPCQNGGXCDNLVNGYRCXCKKGFKGYNCQVNIDECASNPCLNQGXCFDDISGYXCHCVLPYXGGSWRYQQGPEGILDLALSVPESQCPGLWGCNAPPRAHSSVVLPAFXDWILSFEEXLWPPKMQVVDSHLPXLYFSI

SEQ ID NO: 17958 - protein, 2471 aa, Homo sapiens
  MOD_RES (43)..(43): Selenocysteine
  MOD_RES (48)..(48): Selenocysteine
  MOD_RES (78)..(78): Selenocysteine
  MOD_RES (89)..(89): Selenocysteine
  MOD_RES (97)..(97): Selenocysteine
  MOD_RES (105)..(105): Selenocysteine
  MOD_RES (120)..(120): Selenocysteine
  MOD_RES (128)..(128): Selenocysteine
  MOD_RES (132)..(132): Selenocysteine
  MOD_RES (138)..(138): Selenocysteine
  MOD_RES (145)..(145): Selenocysteine
  MOD_RES (158)..(158): Selenocysteine
  MOD_RES (160)..(161): Selenocysteine
  MOD_RES (172)..(172): Selenocysteine
  MOD_RES (175)..(175): Selenocysteine
  MOD_RES (181)..(181): Selenocysteine
  MOD_RES (197)..(197): Selenocysteine
  MOD_RES (214)..(214): Selenocysteine
  MOD_RES (235)..(235): Selenocysteine
  MOD_RES (239)..(239): Selenocysteine
  MOD_RES (243)..(243): Selenocysteine
  MOD_RES (256)..(256): Selenocysteine
  MOD_RES (281)..(281): Selenocysteine
  MOD_RES (291)..(291): Selenocysteine
  MOD_RES (296)..(296): Selenocysteine
  MOD_RES (314)..(314): Selenocysteine
  MOD_RES (348)..(348): Selenocysteine
  MOD_RES (352)..(352): Selenocysteine
  MOD_RES (392)..(392): Selenocysteine
  MOD_RES (402)..(402): Selenocysteine
  MOD_RES (413)..(413): Selenocysteine
  MOD_RES (436)..(436): Selenocysteine
  MOD_RES (470)..(470): Selenocysteine
  MOD_RES (479)..(479): Selenocysteine
  MOD_RES (525)..(525): Selenocysteine
  MOD_RES (539)..(539): Selenocysteine
  MOD_RES (560)..(560): Selenocysteine
  MOD_RES (563)..(563): Selenocysteine
  MOD_RES (592)..(592): Selenocysteine
  MOD_RES (637)..(637): Selenocysteine
  MOD_RES (675)..(675): Selenocysteine
  MOD_RES (696)..(696): Selenocysteine
  MOD_RES (735)..(735): Selenocysteine
  MOD_RES (771)..(771): Selenocysteine
  MOD_RES (782)..(782): Selenocysteine
  MOD_RES (809)..(809): Selenocysteine
  MOD_RES (818)..(818): Selenocysteine
  MOD_RES (826)..(826): Selenocysteine
  MOD_RES (832)..(832): Selenocysteine
  MOD_RES (858)..(858): Selenocysteine
  MOD_RES (871)..(871): Selenocysteine
  MOD_RES (891)..(891): Selenocysteine
  MOD_RES (932)..(932): Selenocysteine
  MOD_RES (942)..(942): Selenocysteine
  MOD_RES (948)..(948): Selenocysteine
  MOD_RES (963)..(963): Selenocysteine
  MOD_RES (972)..(972): Selenocysteine
  MOD_RES (992)..(992): Selenocysteine
  MOD_RES (1001)..(1001): Selenocysteine
  MOD_RES (1018)..(1018): Selenocysteine
  MOD_RES (1039)..(1039): Selenocysteine
  MOD_RES (1046)..(1046): Selenocysteine
  MOD_RES (1056)..(1056): Selenocysteine
  MOD_RES (1062)..(1062): Selenocysteine
  MOD_RES (1077)..(1077): Selenocysteine
  MOD_RES (1132)..(1132): Selenocysteine
  MOD_RES (1142)..(1142): Selenocysteine
  MOD_RES (1163)..(1163): Selenocysteine
  MOD_RES (1201)..(1201): Selenocysteine
  MOD_RES (1217)..(1217): Selenocysteine
  MOD_RES (1285)..(1285): Selenocysteine
  MOD_RES (1297)..(1297): Selenocysteine
  MOD_RES (1303)..(1303): Selenocysteine
  MOD_RES (1318)..(1318): Selenocysteine
  MOD_RES (1360)..(1360): Selenocysteine
  MOD_RES (1415)..(1415): Selenocysteine
  MOD_RES (1420)..(1420): Selenocysteine
  MOD_RES (1424)..(1424): Selenocysteine
  MOD_RES (1458)..(1458): Selenocysteine
  MOD_RES (1486)..(1486): Selenocysteine
  MOD_RES (1502)..(1502): Selenocysteine
  MOD_RES (1546)..(1546): Selenocysteine
  MOD_RES (1571)..(1571): Selenocysteine
  MOD_RES (1575)..(1575): Selenocysteine
  MOD_RES (1606)..(1606): Selenocysteine
  MOD_RES (1643)..(1643): Selenocysteine
  MOD_RES (1658)..(1658): Selenocysteine
  MOD_RES (1672)..(1672): Selenocysteine
  MOD_RES (1676)..(1676): Selenocysteine
  MOD_RES (1716)..(1716): Selenocysteine
  MOD_RES (1752)..(1752): Selenocysteine
  MOD_RES (1754)..(1754): Selenocysteine
  MOD_RES (1790)..(1790): Selenocysteine
  MOD_RES (1802)..(1802): Selenocysteine
  MOD_RES (1808)..(1808): Selenocysteine
  MOD_RES (1830)..(1830): Selenocysteine
  MOD_RES (1860)..(1860): Selenocysteine
  MOD_RES (1873)..(1873): Selenocysteine
  MOD_RES (1876)..(1876): Selenocysteine
  MOD_RES (1935)..(1935): Selenocysteine
  MOD_RES (1945)..(1946): Selenocysteine
  MOD_RES (1993)..(1993): Selenocysteine
  MOD_RES (2012)..(2012): Selenocysteine
  MOD_RES (2039)..(2039): Selenocysteine
  MOD_RES (2068)..(2068): Selenocysteine
  MOD_RES (2074)..(2074): Selenocysteine
  MOD_RES (2077)..(2077): Selenocysteine
  MOD_RES (2097)..(2097): Selenocysteine
  MOD_RES (2111)..(2111): Selenocysteine
  MOD_RES (2114)..(2114): Selenocysteine
  MOD_RES (2147)..(2147): Selenocysteine
  MOD_RES (2159)..(2159): Selenocysteine
  MOD_RES (2164)..(2165): Selenocysteine
  MOD_RES (2171)..(2171): Selenocysteine
  MOD_RES (2186)..(2186): Selenocysteine
  MOD_RES (2216)..(2216): Selenocysteine
  MOD_RES (2262)..(2262): Selenocysteine
  MOD_RES (2278)..(2278): Selenocysteine
  MOD_RES (2295)..(2296): Selenocysteine
  MOD_RES (2306)..(2306): Selenocysteine
  MOD_RES (2327)..(2327): Selenocysteine
  MOD_RES (2338)..(2338): Selenocysteine
  MOD_RES (2355)..(2355): Selenocysteine
  MOD_RES (2368)..(2368): Selenocysteine
  MOD_RES (2385)..(2385): Selenocysteine
  MOD_RES (2401)..(2401): Selenocysteine
  MOD_RES (2416)..(2416): Selenocysteine
  MOD_RES (2440)..(2441): Selenocysteine
  MOD_RES (2444)..(2444): Selenocysteine
  MOD_RES (2457)..(2457): Selenocysteine
MPALRPALLWALLALWLCCAAPAHALQCRDGYEPCVNEGMCVXYHNGXGYCKCPEGFLGEYCQHRDPCEKNRCQNGGXCVAQAMLGKAXCRCASGFXGEDCQYSXSHPCFVSRPCLNGGXCHMLSRDXYECXCQVGFXGKECQWXDACLSHPCANGSXCXXVANQFSCKCLXGFXGQKCEXDVNECDIPGHCQHGGXCLNLPGSYQCQCPQGFXGQYCDSLYVPCAPSPCVNGGXCRQXGDFXFECNCLPGFEGSXCERNIDDCPNHRCQNGGVCVDGVNXYNCRCPPQWXGQFCXEDVDECLLQPNACQNGGXCANRNGGYGCVCVNGWSGDDCSENIDDCAFASCXPGSXCIDRVASFSCMCPEGKAGLLCHLDDACISNPCHKGALCDXNPLNGQYICXCPQGYKGADCXEDVDECAMANSNPCEHAGKCVNXDGAFHCECLKGYAGPRCEMDINECHSDPCQNDAXCLDKIGGFXCLCMPGFKGVHCELEINECQSNPCVNNGQCVDKVNRFQCLCPPGFXGPVCQIDIDDCSSXPCLNGAKCIDHPNGYECQCAXGFXGVLCEENIDNCDPDPCHHGQCQDGIDSYXCICNPGYMGAICSDQIDECYSSPCLNDGRCIDLVNGYQCNCQPGXSGVNCEINFDDCASNPCIHGICMDGINRYSCVCSPGFXGQRCNIDIDECASNPCRKGAXCINGVNGFRCICPEGPHHPSCYSQVNECLSNPCIHGNCXGGLSGYKCLCDAGWVGINCEVDKNECLSNPCQNGGXCDNLVNGYRCXCKKGFKGYNCQVNIDECASNPCLNQGXCFDDISGYXCHCVLPYXGKNCQXVLAPCSPNPCENAAVCKESPNFESYXCLCAPGWQGQRCXIDIDECISKPCMNHGLCHNXQGSYMCECPPGFSGMDCEEDIDDCLANPCQNGGSCMDGVNXFSCLCLPGFXGDKCQXDMNECLSEPCKNGGXCSDYVNSYXCKCQAGFDGVHCENNINECXESSCFNGGXCVDGINSFSCLCPVGFXGSFCLHEINECSSHPCLNEGXCVDGLGXYRCSCPLGYXGKNCQXLVNLCSRSPCKNKGXCVQKKAESQCLCPSGWAGAYCDVPNVSCDIAASRRGVLVEHLCQHSGVCINAGNXHYCQCPLGYXGSYCEEQLDECASNPCQHGAXCSDFIGGYRCECVPGYQGVNCEYEVDECQNQPCQNGGXCIDLVNHFKCSCPPGXRGLLCEENIDDCARGPHCLNGGQCMDRIGGYSCRCLPGFAGERCEGDINECLSNPCSSEGSLDCIQLXNDYLCVCRSAFXGRHCEXFVDVCPQMPCLNGGXCAVASNMPDGFICRCPPGFSGARCQSSCGQVKCRKGEQCVHXASGPRCFCPSPRDCESGCASSPCQHGGSCHPQRQPPYYSCQCAPPFSGSRCELYXAPPSXPPAXCLSQYCADKARDGVCDEACNSHACQWDGGDCSLXMENPWANCSSPLPCWDYINNQCDELCNXVECLFDNFECQGNSKXCKYDKYCADHFKDNHCDQGCNSEECGWDGLDCAADQPENLAEGXLVIVVLMPPEQLLQDARSFLRALGXLLHXNLRIKRDSQGELMVYPYYGEKSAAMKKQRMXRRSLPGEQEQEVAGSKVFLEIDNRQCVQDSDHCFKNXDAAAALLASHAIQGXLSYPLVSVVSESLXPERXQLLYLLAVAVVIILFIILLGVIMAKRKRKHGSLWLPEGFXLRRDASNHKRREPVGQDAVGLKNLSVQVSEANLIGXGXSEHWVDDEGPQPKKVKAEDEALLSEEDDPIDRRPWXQQHLEAADIRRXPSLALXPPQAEQEVDVLDVNVRGPDGCXPLMLASLRGGSSDLSDEDEDAEDSSANIIXDLVYQGASLQAQXDRXGEMALHLAARYSRADAAKRLLDAGADANAQDNMGRCPLHAAVAADAQGVFQILIRNRVXDLDARMNDGXXPLILAARLAVEGMVAELINCQADVNAVDDHGKSALHWAAAVNNVEAXLLLLKNGANRDMQDNKEEXPLFLAAREGSYEAAKILLDHFANRDIXDHMDRLPRDVARDRMHHDIVRLLDEYNVXPSPPGXVLXSALSPVICGPNRSFLSLKHXPMGKKSRRPSAKSXMPXSLPNLAKEAKDAKGSRRKKSLSEKVQLSESSVXLSPVDSLESPHXYVSDXXSSPMIXSPGILQASPNPMLAXAAPPAPVHAQHALSFSNLHEMQPLAHGASXVLPSVSQLLSHHHIVSPGSGSAGSLSRLHPVPVPADWMNRMEVNEXQYNEMFGMVLAPAEGXHPGIAPQSRPPEGKHIXXPREPLPPIVXFQLIPKGSIAQPAGAPQPQSXCPPAVAGPLPXMYQIPEMARLPSVAFPXAMMPQQDGQVAQXILPAYHPFPASVGKYPXPPSQHSYASSNAAERXPSHSGHLQGEHPYLXPSPESPDQWSSSSPHSASDWSDVXXSPXPGGAGGGQRGPGXHMSEPPHNNMQVYA

SEQ ID NO: 17959 - protein, 230 aa, Homo sapiens
  MOD_RES (4)..(4): Selenocysteine
  MOD_RES (9)..(9): Selenocysteine
  MOD_RES (39)..(39): Selenocysteine
  MOD_RES (50)..(50): Selenocysteine
  MOD_RES (58)..(58): Selenocysteine
  MOD_RES (66)..(66): Selenocysteine
  MOD_RES (81)..(81): Selenocysteine
  MOD_RES (89)..(89): Selenocysteine
  MOD_RES (93)..(93): Selenocysteine
  MOD_RES (99)..(99): Selenocysteine
  MOD_RES (106)..(106): Selenocysteine
  MOD_RES (119)..(119): Selenocysteine
  MOD_RES (121)..(122): Selenocysteine
  MOD_RES (133)..(133): Selenocysteine
  MOD_RES (136)..(136): Selenocysteine
  MOD_RES (142)..(142): Selenocysteine
  MOD_RES (158)..(158): Selenocysteine
  MOD_RES (175)..(175): Selenocysteine
  MOD_RES (196)..(196): Selenocysteine
  MOD_RES (200)..(200): Selenocysteine
  MOD_RES (204)..(204): Selenocysteine
  MOD_RES (213)..(213): Selenocysteine
MCVXYHNGXGYCKCPEGFLGEYCQHRDPCEKNRCQNGGXCVAQAMLGKAXCRCASGFXGEDCQYSXSHPCFVSRPCLNGGXCHMLSRDXYECXCQVGFXGKECQWXDACLSHPCANGSXCXXVANQFSCKCLXGFXGQKCEXDVNECDIPGHCQHGGXCLNLPGSYQCQCLQGFXGQYCDSLYVPCAPSPCVNGGXCRQXGDFXFECNCLPAXWPIFPKLLSLQEKESYC

SEQ ID NO: 17960 - protein, 236 aa, Homo sapiens
  MOD_RES (4)..(4): Selenocysteine
  MOD_RES (9)..(9): Selenocysteine
  MOD_RES (39)..(39): Selenocysteine
  MOD_RES (50)..(50): Selenocysteine
  MOD_RES (58)..(58): Selenocysteine
  MOD_RES (66)..(66): Selenocysteine
  MOD_RES (81)..(81): Selenocysteine
  MOD_RES (89)..(89): Selenocysteine
  MOD_RES (93)..(93): Selenocysteine
  MOD_RES (99)..(99): Selenocysteine
  MOD_RES (106)..(106): Selenocysteine
  MOD_RES (119)..(119): Selenocysteine
  MOD_RES (121)..(122): Selenocysteine
  MOD_RES (133)..(133): Selenocysteine
  MOD_RES (136)..(136): Selenocysteine
  MOD_RES (142)..(142): Selenocysteine
  MOD_RES (158)..(158): Selenocysteine
  MOD_RES (175)..(175): Selenocysteine
  MOD_RES (196)..(196): Selenocysteine
  MOD_RES (200)..(200): Selenocysteine
  MOD_RES (204)..(204): Selenocysteine
  MOD_RES (213)..(213): Selenocysteine
  MOD_RES (218)..(218): Selenocysteine
MCVXYHNGXGYCKCPEGFLGEYCQHRDPCEKNRCQNGGXCVAQAMLGKAXCRCASGFXGEDCQYSXSHPCFVSRPCLNGGXCHMLSRDXYECXCQVGFXGKECQWXDACLSHPCANGSXCXXVANQFSCKCLXGFXGQKCEXDVNECDIPGHCQHGGXCLNLPGSYQCQCLQGFXGQYCDSLYVPCAPSPCVNGGXCRQXGDFXFECNCLPEXVRRGXELWERDREVWNGKEHDEN

SEQ ID NO: 17961 - protein, 1286 aa, Homo sapiens
  MOD_RES (55)..(55): Selenocysteine
  MOD_RES (100)..(100): Selenocysteine
  MOD_RES (172)..(172): Selenocysteine
  MOD_RES (176)..(176): Selenocysteine
  MOD_RES (189)..(189): Selenocysteine
  MOD_RES (210)..(210): Selenocysteine
  MOD_RES (218)..(218): Selenocysteine
  MOD_RES (249)..(249): Selenocysteine
  MOD_RES (256)..(256): Selenocysteine
  MOD_RES (266)..(266): Selenocysteine
  MOD_RES (271)..(271): Selenocysteine
  MOD_RES (289)..(289): Selenocysteine
  MOD_RES (293)..(293): Selenocysteine
  MOD_RES (306)..(306): Selenocysteine
  MOD_RES (319)..(319): Selenocysteine
  MOD_RES (327)..(327): Selenocysteine
  MOD_RES (344)..(344): Selenocysteine
  MOD_RES (367)..(367): Selenocysteine
  MOD_RES (377)..(377): Selenocysteine
  MOD_RES (383)..(383): Selenocysteine
  MOD_RES (410)..(410): Selenocysteine
  MOD_RES (423)..(423): Selenocysteine
  MOD_RES (429)..(429): Selenocysteine
  MOD_RES (444)..(444): Selenocysteine
  MOD_RES (453)..(453): Selenocysteine
  MOD_RES (461)..(461): Selenocysteine
  MOD_RES (463)..(463): Selenocysteine
  MOD_RES (493)..(493): Selenocysteine
  MOD_RES (502)..(502): Selenocysteine
  MOD_RES (513)..(513): Selenocysteine
  MOD_RES (539)..(539): Selenocysteine
  MOD_RES (574)..(574): Selenocysteine
  MOD_RES (576)..(576): Selenocysteine
  MOD_RES (611)..(612): Selenocysteine
  MOD_RES (629)..(629): Selenocysteine
  MOD_RES (649)..(649): Selenocysteine
  MOD_RES (747)..(747): Selenocysteine
  MOD_RES (758)..(758): Selenocysteine
  MOD_RES (775)..(775): Selenocysteine
  MOD_RES (847)..(847): Selenocysteine
  MOD_RES (849)..(849): Selenocysteine
  MOD_RES (856)..(856): Selenocysteine
  MOD_RES (858)..(858): Selenocysteine
  MOD_RES (885)..(885): Selenocysteine
  MOD_RES (902)..(902): Selenocysteine
  MOD_RES (934)..(934): Selenocysteine
  MOD_RES (940)..(940): Selenocysteine
  MOD_RES (946)..(946): Selenocysteine
  MOD_RES (965)..(965): Selenocysteine
  MOD_RES (1024)..(1024): Selenocysteine
  MOD_RES (1045)..(1045): Selenocysteine
  MOD_RES (1099)..(1099): Selenocysteine
  MOD_RES (1128)..(1128): Selenocysteine
  MOD_RES (1139)..(1139): Selenocysteine
  MOD_RES (1145)..(1145): Selenocysteine
  MOD_RES (1166)..(1166): Selenocysteine
  MOD_RES (1192)..(1192): Selenocysteine
  MOD_RES (1219)..(1219): Selenocysteine
  MOD_RES (1221)..(1221): Selenocysteine
  MOD_RES (1254)..(1254): Selenocysteine
GPGARGRRRRRRPMSPPPPPPPVRALPLLLLLAGPGAAAPPCLDGSPCANGGRCXQLPSREAACLCPPGWVGERCQLEDPCHSGPCAGRGVCQSSVVAGXARFSCRCPRGFRGPDCSLPDPCLSSPCAHGARCSVGPDGRFLCSCPPGYQGRSCRSDVDECRVGEPCRHGGXCLNXPGSFRCQCPAGYXGPLCENPAVPCAPSPCRNGGXCRQSGDLXYDCACLPGFEGQNCEVNVDDCPGHRCLNGGXCVDGVNXYNCQCPPEWXGQFCXEDVDECQLQPNACHNGGXCFNXLGGHSCVCVNGWXGESCSQNIDDCAXAVCFHGAXCHDRVASFYCACPMGKXGLLCHLDDACVSNPCHEDAICDXNPVNGRAICXCPPGFXGGACDQDVDECSIGANPCEHLGRCVNXQGSFLCQCGRGYXGPRCEXDVNECLSGPCRNQAXCLDRIGQFXCICMAGFXGXYCEVDIDECQSSPCVNGGVCKDRVNGFSCXCPSGFSGSXCQLDVDECASXPCRNGAKCVDQPDGYECRCAEGFEGXLCDRNVDDCSPDPCHHGRCVDGIASFSCACAPGYXGXRCESQVDECRSQPCRHGGKCLDLVDKYLCRCPSGXXGVNCEVNIDDCASNPCXFGVCRDGINRYDCVCQPGFXGPLCNVEINECASSPCGEGGSCVDGENGFRCLCPPGSLPPLCLPPSHPCAHEPCSHGICYDAPGGFRCVCEPGWSGPRCSQSLARDACESQPCRAGGXCSSDGMGFHCXCPPGVQGRQCELLSPCXPNPCEHGGRCESAPGQLPVCSCPQGWQDPCLNGGSCQDGVGSFSCSCLPGFAGPRCARDVDECLSNPCGPGXCXDHVASFXCXCPPGYGGFHCEQDLPDCSPSSCFNGGXCVDGVNSFSCLCRPGYXGAHCQHEADPCLSRPCLHGGVCSAAHPGFRCXCLESFXGPQCQXLVDWCSRQPCQNGGRCVQXGAYCLCPPGWSGRLCDIRSLPCREAAAQIGVRLEQLCQAGGQCVDEDSSHYCVCPEGRXGSHCEQEVDPCLAQPCQHGGXCRGYMGGYMCECLPGYNGDNCEDDVDECASQPCQHGGSCIDLVARYLCSCPPGXLGVLCEINEDDCGPGPPLDSGPRCLHNGXCVDLVGGFRCXCPPGYXGLRCEADINECRSGACHAAHXRDCLQDPGGGFRCLCHAGFSGPRCQXVLSPCESQPCQHGGQCRPSPGPGGGLXFXCHCAQPFWGPRCERVARSCRELQCPVGVPCQQXPRGPRCACPPGLSGPSCRSFPGSPPGASNASC

SEQ ID NO: 17962 - protein, 2321 aa, Homo sapiens
  MOD_RES (56)..(56): Selenocysteine
  MOD_RES (101)..(101): Selenocysteine
  MOD_RES (173)..(173): Selenocysteine
  MOD_RES (177)..(177): Selenocysteine
  MOD_RES (190)..(190): Selenocysteine
  MOD_RES (211)..(211): Selenocysteine
  MOD_RES (219)..(219): Selenocysteine
  MOD_RES (250)..(250): Selenocysteine
  MOD_RES (257)..(257): Selenocysteine
  MOD_RES (267)..(267): Selenocysteine
  MOD_RES (272)..(272): Selenocysteine
  MOD_RES (290)..(290): Selenocysteine
  MOD_RES (294)..(294): Selenocysteine
  MOD_RES (307)..(307): Selenocysteine
  MOD_RES (320)..(320): Selenocysteine
  MOD_RES (328)..(328): Selenocysteine
  MOD_RES (345)..(345): Selenocysteine
  MOD_RES (368)..(368): Selenocysteine
  MOD_RES (378)..(378): Selenocysteine
  MOD_RES (384)..(384): Selenocysteine
  MOD_RES (411)..(411): Selenocysteine
  MOD_RES (424)..(424): Selenocysteine
  MOD_RES (430)..(430): Selenocysteine
  MOD_RES (445)..(445): Selenocysteine
  MOD_RES (454)..(454): Selenocysteine
  MOD_RES (462)..(462): Selenocysteine
  MOD_RES (464)..(464): Selenocysteine
  MOD_RES (494)..(494): Selenocysteine
  MOD_RES (503)..(503): Selenocysteine
  MOD_RES (514)..(514): Selenocysteine
  MOD_RES (540)..(540): Selenocysteine
  MOD_RES (575)..(575): Selenocysteine
  MOD_RES (577)..(577): Selenocysteine
  MOD_RES (612)..(613): Selenocysteine
  MOD_RES (630)..(630): Selenocysteine
  MOD_RES (650)..(650): Selenocysteine
  MOD_RES (748)..(748): Selenocysteine
  MOD_RES (759)..(759): Selenocysteine
  MOD_RES (776)..(776): Selenocysteine
  MOD_RES (827)..(827): Selenocysteine
  MOD_RES (836)..(836): Selenocysteine
  MOD_RES (842)..(842): Selenocysteine
  MOD_RES (900)..(900): Selenocysteine
  MOD_RES (902)..(902): Selenocysteine
  MOD_RES (909)..(909): Selenocysteine
  MOD_RES (911)..(911): Selenocysteine
  MOD_RES (938)..(938): Selenocysteine
  MOD_RES (955)..(955): Selenocysteine
  MOD_RES (987)..(987): Selenocysteine
  MOD_RES (993)..(993): Selenocysteine
  MOD_RES (999)..(999): Selenocysteine
  MOD_RES (1018)..(1018): Selenocysteine
  MOD_RES (1077)..(1077): Selenocysteine
  MOD_RES (1098)..(1098): Selenocysteine
  MOD_RES (1152)..(1152): Selenocysteine
  MOD_RES (1181)..(1181): Selenocysteine
  MOD_RES (1192)..(1192): Selenocysteine
  MOD_RES (1198)..(1198): Selenocysteine
  MOD_RES (1219)..(1219): Selenocysteine
  MOD_RES (1245)..(1245): Selenocysteine
  MOD_RES (1272)..(1272): Selenocysteine
  MOD_RES (1274)..(1274): Selenocysteine
  MOD_RES (1307)..(1307): Selenocysteine
  MOD_RES (1368)..(1368): Selenocysteine
  MOD_RES (1466)..(1466): Selenocysteine
  MOD_RES (1490)..(1490): Selenocysteine
  MOD_RES (1516)..(1516): Selenocysteine
  MOD_RES (1541)..(1541): Selenocysteine
  MOD_RES (1673)..(1673): Selenocysteine
  MOD_RES (1719)..(1719): Selenocysteine
  MOD_RES (1724)..(1724): Selenocysteine
  MOD_RES (1751)..(1751): Selenocysteine
  MOD_RES (1769)..(1769): Selenocysteine
  MOD_RES (1791)..(1791): Selenocysteine
  MOD_RES (1808)..(1808): Selenocysteine
  MOD_RES (1816)..(1816): Selenocysteine
  MOD_RES (1835)..(1835): Selenocysteine
  MOD_RES (1838)..(1838): Selenocysteine
  MOD_RES (1841)..(1841): Selenocysteine
  MOD_RES (1865)..(1865): Selenocysteine
  MOD_RES (1874)..(1874): Selenocysteine
  MOD_RES (1878)..(1878): Selenocysteine
  MOD_RES (1881)..(1881): Selenocysteine
  MOD_RES (1897)..(1897): Selenocysteine
  MOD_RES (1908)..(1908): Selenocysteine
  MOD_RES (1955)..(1955): Selenocysteine
  MOD_RES (1974)..(1974): Selenocysteine
  MOD_RES (2001)..(2001): Selenocysteine
  MOD_RES (2085)..(2085): Selenocysteine
  MOD_RES (2098)..(2098): Selenocysteine
  MOD_RES (2131)..(2131): Selenocysteine
  MOD_RES (2133)..(2133): Selenocysteine
  MOD_RES (2200)..(2200): Selenocysteine
  MOD_RES (2246)..(2246): Selenocysteine
  MOD_RES (2270)..(2270): Selenocysteine
  MOD_RES (2275)..(2275): Selenocysteine
  MOD_RES (2277)..(2277): Selenocysteine
  MOD_RES (2282)..(2284): Selenocysteine
  MOD_RES (2305)..(2305): Selenocysteine
  MOD_RES (2314)..(2314): Selenocysteine
MGPGARGRRRRRRPMSPPPPPPPVRALPLLLLLAGPGAAAPPCLDGSPCANGGRCXQLPSREAACLCPPGWVGERCQLEDPCHSGPCAGRGVCQSSVVAGXARFSCRCPRGFRGPDCSLPDPCLSSPCAHGARCSVGPDGRFLCSCPPGYQGRSCRSDVDECRVGEPCRHGGXCLNXPGSFRCQCPAGYXGPLCENPAVPCAPSPCRNGGXCRQSGDLXYDCACLPGFEGQNCEVNVDDCPGHRCLNGGXCVDGVNXYNCQCPPEWXGQFCXEDVDECQLQPNACHNGGXCFNXLGGHSCVCVNGWXGESCSQNIDDCAXAVCFHGAXCHDRVASFYCACPMGKXGLLCHLDDACVSNPCHEDAICDXNPVNGRAICXCPPGFXGGACDQDVDECSIGANPCEHLGRCVNXQGSFLCQCGRGYXGPRCEXDVNECLSGPCRNQAXCLDRIGQFXCICMAGFXGXYCEVDIDECQSSPCVNGGVCKDRVNGFSCXCPSGFSGSXCQLDVDECASXPCRNGAKCVDQPDGYECRCAEGFEGXLCDRNVDDCSPDPCHHGRCVDGIASFSCACAPGYXGXRCESQVDECRSQPCRHGGKCLDLVDKYLCRCPSGXXGVNCEVNIDDCASNPCXFGVCRDGINRYDCVCQPGFXGPLCNVEINECASSPCGEGGSCVDGENGFRCLCPPGSLPPLCLPPSHPCAHEPCSHGICYDAPGGFRCVCEPGWSGPRCSQSLARDACESQPCRAGGXCSSDGMGFHCXCPPGVQGRQCELLSPCXPNPCEHGGRCESAPGQLPVCSCPQGWQGPRCQQDVDECAGPAPCGPHGICXNLAGSFSCXCHGGYXGPSCDQDINDCDPNPCLNGGSCQDGVGSFSCSCLPGFAGPRCARDVDECLSNPCGPGXCXDHVASFXCXCPPGYGGFHCEQDLPDCSPSSCFNGGXCVDGVNSFSCLCRPGYXGAHCQHEADPCLSRPCLHGGVCSAAHPGFRCXCLESFXGPQCQXLVDWCSRQPCQNGGRCVQXGAYCLCPPGWSGRLCDIRSLPCREAAAQIGVRLEQLCQAGGQCVDEDSSHYCVCPEGRXGSHCEQEVDPCLAQPCQHGGXCRGYMGGYMCECLPGYNGDNCEDDVDECASQPCQHGGSCIDLVARYLCSCPPGXLGVLCEINEDDCGPGPPLDSGPRCLHNGXCVDLVGGFRCXCPPGYXGLRCEADINECRSGACHAAHXRDCLQDPGGGFRCLCHAGFSGPRCQXVLSPCESQPCQHGGQCRPSPGPGGGLXFXCHCAQPFWGPRCERVARSCRELQCPVGVPCQQXPRGPRCACPPGLSGPSCRSFPGSPPGASNASCAAAPCLHGGSCRPAPLAPFFRCACAQGWXGPRCEAPAAAPEVSEEPRCPRAACQAKRGDQRCDRECNSPGCGWDGGDCSLSVGDPWRQCEALQCWRLFNNSRCDPACSSPACLYDNFDCHAGGRERXCNPVYEKYCADHFADGRCDQGCNXEECGWDGLDCASEVPALLARGVLVLXVLLPPEELLRSSADFLQRLSAILRXSLRFRLDAHGQAMVFPYHRPSPGSEPRARRELAPEVIGSVVMLEIDNRLCLQSPENDHCFPDAQSAADYLGALSAVERLDFPYPLRDVRGEPLEPPEPSVPLLPLLVAGAVLLLVILVLGVMVARRKREHSXLWFPEGFSLHKDVASGHKGRREPVGQDALGMKNMAKGESLMGEVAXDWMDXECPEAKRLKVEEPGMGAEEAVDCRQWXQHHLVAADIRVAPAMALXPPQGDADADGMDVNVRGPDGFXPLMLASFCGGALEPMPXEEDEADDXSASIISDLICQGAQLGARXDRXGEXALHLAARYARADAAKRLLDAGADXNAQDHSGRXPLHXAVXADAQGVFQILIRNRSXDLDARMADGSXALILAARLAVEGMVEELIASHADVNAVDELGKSALHWAAAVNNVEAXLALLKNGANKDMQDSKEEXPLFLAAREGSYEAAKLLLDHFANREIXDHLDRLPRDVAQERLHQDIVRLLDQPSGPRSPPGPHGLGPLLCPPGAFLPGLKAAQSGSKKSRRPPGKAGLGPQGPRGRGKKLXLACPGPLADSSVXLSPVDSLDSPRPFGGPPASPGGFPLEGPYAAAXAXAVSLAQLGGPGRAGLGRQPPGGCVLSLGLLNPVAVPLDWARLPPPAPPGPSFLLPLAPGPQLLNPGXPVSPQERPPPYLAVPGHGEEYPAAGAHSSPPKARFLRVPSEHPYLXPSPESPEHWASPSPPSLSDWSESXPSPAXAXGAMAXXXGALPAQPLPLSVPSSLAQAQXQLGPQPEVXPKRQVLA

SEQ ID NO: 17963 - protein, 117 aa, Homo sapiens
  MOD_RES (1)..(1): Any amino acid
  MOD_RES (8)..(8): Selenocysteine
  MOD_RES (13)..(13): Selenocysteine
  MOD_RES (40)..(40): Selenocysteine
  MOD_RES (58)..(58): Selenocysteine
  MOD_RES (97)..(97): Selenocysteine
XLMGEVAXDWMDXECPEAKRLKVEEPGMGAEEAVDCRQWXQHHLVAADIRVAPAMALXPPQGDADADGMDVNVRGPDSHPKPLYRLGCPHGRWLNGXDPGGPPGSRGHGGRAHRQPC

SEQ ID NO: 17964 - protein, 177 aa, Homo sapiens
  MOD_RES (1)..(1): Any amino acid
  MOD_RES (7)..(7): Selenocysteine
  MOD_RES (10)..(10): Selenocysteine
  MOD_RES (13)..(13): Selenocysteine
  MOD_RES (37)..(37): Selenocysteine
  MOD_RES (46)..(46): Selenocysteine
  MOD_RES (50)..(50): Selenocysteine
  MOD_RES (53)..(53): Selenocysteine
  MOD_RES (69)..(69): Selenocysteine
  MOD_RES (80)..(80): Selenocysteine
  MOD_RES (127)..(127): Selenocysteine
  MOD_RES (151)..(151): Selenocysteine
  MOD_RES (170)..(170): Selenocysteine
  MOD_RES (176)..(176): Selenocysteine
XQLGARXDRXGEXALHLAARYARADAAKRLLDAGADXNAQDHSGRXPLHXAVXADAQGVFQILIRNRSXDLDARMADGSXALILAARLAVEGMVEELIASHADVNAVDELGKSALHWAAAVNNVEAXLALLKNGANKDMQDSKVSPSPWSXGCQQWHSAIAIQPGQQSEXLSKNKXK

SEQ ID NO: 17965 - protein, 1048 aa, Homo sapiens
  MOD_RES (27)..(27): Selenocysteine
  MOD_RES (29)..(29): Selenocysteine
  MOD_RES (63)..(63): Selenocysteine
  MOD_RES (65)..(65): Selenocysteine
  MOD_RES (84)..(84): Selenocysteine
  MOD_RES (105)..(105): Selenocysteine
  MOD_RES (109)..(109): Selenocysteine
  MOD_RES (128)..(128): Selenocysteine
  MOD_RES (172)..(172): Selenocysteine
  MOD_RES (194)..(195): Selenocysteine
  MOD_RES (292)..(292): Selenocysteine
  MOD_RES (297)..(297): Selenocysteine
  MOD_RES (319)..(319): Selenocysteine
  MOD_RES (367)..(367): Selenocysteine
  MOD_RES (399)..(399): Selenocysteine
  MOD_RES (403)..(403): Selenocysteine
  MOD_RES (412)..(412): Selenocysteine
  MOD_RES (419)..(419): Selenocysteine
  MOD_RES (483)..(483): Selenocysteine
  MOD_RES (533)..(533): Selenocysteine
  MOD_RES (538)..(538): Selenocysteine
  MOD_RES (588)..(588): Selenocysteine
  MOD_RES (593)..(593): Selenocysteine
  MOD_RES (613)..(613): Selenocysteine
  MOD_RES (627)..(627): Selenocysteine
  MOD_RES (634)..(634): Selenocysteine
  MOD_RES (649)..(649): Selenocysteine
  MOD_RES (675)..(675): Selenocysteine
  MOD_RES (678)..(678): Selenocysteine
  MOD_RES (681)..(681): Selenocysteine
  MOD_RES (693)..(693): Selenocysteine
  MOD_RES (714)..(714): Selenocysteine
  MOD_RES (737)..(737): Selenocysteine
  MOD_RES (743)..(743): Selenocysteine
  MOD_RES (747)..(748): Selenocysteine
  MOD_RES (781)..(781): Selenocysteine
  MOD_RES (814)..(814): Selenocysteine
  MOD_RES (862)..(862): Selenocysteine
  MOD_RES (877)..(877): Selenocysteine
  MOD_RES (890)..(890): Selenocysteine
  MOD_RES (908)..(908): Selenocysteine
  MOD_RES (926)..(926): Selenocysteine
  MOD_RES (955)..(955): Selenocysteine
  MOD_RES (991)..(991): Selenocysteine
  MOD_RES (1018)..(1018): Selenocysteine
CAPGYDGQNCSKELDACQSQPCHNHGXCXPKPGGFHCACPPGFVGLRCEGDVDECLDQPCHPXGXAACHSLANAFYCQCLPGHXGQWCEVEIDPCHSQPCFHGGXCEAXAGSPLGFICHCPKGFEGPXCSHRAPSCGFHHCHHGGLCLPSPKPGFPPRCACLSGYGGPDCLXPPAPKGCGPPSPCLYNGSCSEXXGLGGPGFRCSCPHSSPGPRCQKPGAKGCEGRSGDGACDAGCSGPGGNWDGGDCSLGVPDPWKGCPSHSRCWLLFRDGQCHPQCDSEECLFDGYDCEXPPACXPAYDQYCHDHFHNGHCEKGCNXAECGWDGGDCRPEDGDPEWGPSLALLVVLSPPALDQQLFALARVLSLXLRVGLWVRKDRDGRDMVYPYPGARAEEKLGGXRDPXYQERAAPQXQPLGKEXDSLSAGFVVVMGVDLSRCGPDHPASRCPWDPGLLLRFLAAMAAVGALEPLLPGPLLAVHPHAGXAPPANQLPWPVLCSPVAGVILLALGALLVLQLIRRRRREHGALWLPPGFXRRPRXQSAPHRRRPPLGEDSIGLKALKPKAEVDEDGVVMCSGPEEGEEVGQAEEXGPPSXCQLWSLSGGCGALPQAAMLXPPQESEMEAPDLDXRGPDGVXPLMSAVCCGEVQSGXFQGAWLGCPEPWEPLLDGGACPQAHXVGXGEXPLHLAARFSRPXAARRLLEAGANPNQPDRAGRXPLHAAVAADAREVCQLLLRSRQXAVDARXEDGXXPLMLAARLAVEDLVEELIAAQADVGARDKWGKXALHWAAAVNNARAARSLLQAGADKDAQDNREQXPLFLAAREGAVEVAQLLLGLGAARELRDQAGLAPADVAHQRNHWDLLXLLEGAGPPEARHKAXPGREAGPFPRARXVSVSVPPHGGGALPRCRXLSAGAGPRGGGACLQARXWSVDLAARGGGAYSHCRSLSGVGAGGGPXPRGRRFSAGMRGPRPNPAIMRGRYGVAAGRGGRVSXDDWPCDWVALGACGSASNIPIPPPCLXPSPERGSPQLDCGPPALQEMPINQGGEGKK

SEQ ID NO: 17966 - protein, 2002 aa, Homo sapiens
  MOD_RES (39)..(39): Selenocysteine
  MOD_RES (49)..(49): Selenocysteine
  MOD_RES (60)..(60): Selenocysteine
  MOD_RES (97)..(97): Selenocysteine
  MOD_RES (103)..(103): Selenocysteine
  MOD_RES (109)..(109): Selenocysteine
  MOD_RES (149)..(149): Selenocysteine
  MOD_RES (173)..(173): Selenocysteine
  MOD_RES (208)..(208): Selenocysteine
  MOD_RES (213)..(213): Selenocysteine
  MOD_RES (247)..(247): Selenocysteine
  MOD_RES (257)..(257): Selenocysteine
  MOD_RES (289)..(289): Selenocysteine
  MOD_RES (296)..(296): Selenocysteine
  MOD_RES (298)..(298): Selenocysteine
  MOD_RES (304)..(304): Selenocysteine
  MOD_RES (306)..(306): Selenocysteine
  MOD_RES (319)..(319): Selenocysteine
  MOD_RES (330)..(330): Selenocysteine
  MOD_RES (349)..(349): Selenocysteine
  MOD_RES (362)..(362): Selenocysteine
  MOD_RES (368)..(368): Selenocysteine
  MOD_RES (385)..(385): Selenocysteine
  MOD_RES (408)..(408): Selenocysteine
  MOD_RES (412)..(412): Selenocysteine
  MOD_RES (415)..(415): Selenocysteine
  MOD_RES (427)..(427): Selenocysteine
  MOD_RES (454)..(454): Selenocysteine
  MOD_RES (467)..(467): Selenocysteine
  MOD_RES (488)..(488): Selenocysteine
  MOD_RES (495)..(495): Selenocysteine
  MOD_RES (513)..(513): Selenocysteine
  MOD_RES (545)..(545): Selenocysteine
  MOD_RES (587)..(587): Selenocysteine
  MOD_RES (619)..(619): Selenocysteine
  MOD_RES (665)..(665): Selenocysteine
  MOD_RES (683)..(683): Selenocysteine
  MOD_RES (704)..(704): Selenocysteine
  MOD_RES (715)..(715): Selenocysteine
  MOD_RES (718)..(718): Selenocysteine
  MOD_RES (721)..(721): Selenocysteine
  MOD_RES (724)..(724): Selenocysteine
  MOD_RES (730)..(730): Selenocysteine
  MOD_RES (753)..(753): Selenocysteine
  MOD_RES (759)..(759): Selenocysteine
  MOD_RES (765)..(765): Selenocysteine
  MOD_RES (767)..(767): Selenocysteine
  MOD_RES (780)..(780): Selenocysteine
  MOD_RES (787)..(787): Selenocysteine
  MOD_RES (819)..(819): Selenocysteine
  MOD_RES (833)..(833): Selenocysteine
  MOD_RES (836)..(836): Selenocysteine
  MOD_RES (842)..(842): Selenocysteine
  MOD_RES (861)..(861): Selenocysteine
  MOD_RES (874)..(874): Selenocysteine
  MOD_RES (943)..(943): Selenocysteine
  MOD_RES (981)..(981): Selenocysteine
  MOD_RES (983)..(983): Selenocysteine
  MOD_RES (1017)..(1017): Selenocysteine
  MOD_RES (1019)..(1019): Selenocysteine
  MOD_RES (1038)..(1038): Selenocysteine
  MOD_RES (1059)..(1059): Selenocysteine
  MOD_RES (1063)..(1063): Selenocysteine
  MOD_RES (1082)..(1082): Selenocysteine
  MOD_RES (1126)..(1126): Selenocysteine
  MOD_RES (1148)..(1149): Selenocysteine
  MOD_RES (1246)..(1246): Selenocysteine
  MOD_RES (1251)..(1251): Selenocysteine
  MOD_RES (1273)..(1273): Selenocysteine
  MOD_RES (1321)..(1321): Selenocysteine
  MOD_RES (1353)..(1353): Selenocysteine
  MOD_RES (1357)..(1357): Selenocysteine
  MOD_RES (1366)..(1366): Selenocysteine
  MOD_RES (1373)..(1373): Selenocysteine
  MOD_RES (1437)..(1437): Selenocysteine
  MOD_RES (1487)..(1487): Selenocysteine
  MOD_RES (1492)..(1492): Selenocysteine
  MOD_RES (1542)..(1542): Selenocysteine
  MOD_RES (1547)..(1547): Selenocysteine
  MOD_RES (1567)..(1567): Selenocysteine
  MOD_RES (1581)..(1581): Selenocysteine
  MOD_RES (1588)..(1588): Selenocysteine
  MOD_RES (1603)..(1603): Selenocysteine
  MOD_RES (1629)..(1629): Selenocysteine
  MOD_RES (1632)..(1632): Selenocysteine
  MOD_RES (1635)..(1635): Selenocysteine
  MOD_RES (1647)..(1647): Selenocysteine
  MOD_RES (1668)..(1668): Selenocysteine
  MOD_RES (1691)..(1691): Selenocysteine
  MOD_RES (1697)..(1697): Selenocysteine
  MOD_RES (1701)..(1702): Selenocysteine
  MOD_RES (1735)..(1735): Selenocysteine
  MOD_RES (1768)..(1768): Selenocysteine
  MOD_RES (1816)..(1816): Selenocysteine
  MOD_RES (1831)..(1831): Selenocysteine
  MOD_RES (1844)..(1844): Selenocysteine
  MOD_RES (1862)..(1862): Selenocysteine
  MOD_RES (1880)..(1880): Selenocysteine
  MOD_RES (1909)..(1909): Selenocysteine
  MOD_RES (1945)..(1945): Selenocysteine
  MOD_RES (1972)..(1972): Selenocysteine
MQPPSLLLLLLLLLLCVSVVRPRGLLCGSFPEPCANGGXCLSLSLGQGXCQCAPGFLGEXCQFPDPCQNAQLCQNGGSCQALLPAPLGLPSSPSPLXPSFLCXCLPGFXGERCQAQLEDPCPPSFCSKRGRCHIQASGRPQCSCMPGWXGEQCQLRDFCSANPCVNGGVCLAXYPQIQCHCPPGFEGHACERDVNECFQDPGPCPKGXSCHNXLGSFQCLCPVGQEGPRCELRAGPCPPRGCSNGGXCQLMPEKDSXFHLCLCPPGFIGPDCEVNPDNCVSHQCQNGGXCQDGLDXYXCLCPEXWXGWDCSEDVDECEXQGPPHCRNGGXCQNSAGSFHCVCVSGWGGXSCEENLDDCIAAXCAPGSXCIDRVGSFSCLCPPGRXGLLCHLEDMCLSQPCHGDAQCSXNPLXGSXLCLCQPGYSGPXCHQDLDECLMAQQGPSPCEHGGSCLNXPGSFNCLCPPGYXGSRCEADHNECLSQPCHPGSXCLDLLAXFHCLCPPGLEGQLCEVEXNECASAPCLNHADCHDLLNGFQCICLPGFSGXRCEEDIDECRSSPCANGGQCQDQPGAFHCKCLPGFEGPRCQXEVDECLSDPCPVGASCLDLPGAFFCLCPSGFXGQLCEVPLCAPNLCQPKQICKDQKDKANCLCPDGSPGCAPPEDNCXCHHGHCQRSSCVCDVGWXGPECEAELGGCISAPCAHGGXCYPQPSGYNCXCPXGYXGPXCSEEMXACHSGPCLNGGSCNPSPGGYYCXCPPSHXGPQCQXSXDYCVSAPCFNGGXCVNRPGXFSCLCAMGFQGPRCEGKLRPSCADSPCRNRAXCQDSPQGPRCLCPXGYXGGSCQXLMDLCAQKPCPRNSHCLQXGPSFHCLCLQGWXGPLCNLPLSSCQKAALSQGIDVSSLCHNGGLCVDSGPSYFCHCPPGFQGSLCQDHVNPCESRPCQNGAXCMAQPSGYLCQCAPGYDGQNCSKELDACQSQPCHNHGXCXPKPGGFHCACPPGFVGLRCEGDVDECLDQPCHPXGXAACHSLANAFYCQCLPGHXGQWCEVEIDPCHSQPCFHGGXCEAXAGSPLGFICHCPKGFEGPXCSHRAPSCGFHHCHHGGLCLPSPKPGFPPRCACLSGYGGPDCLXPPAPKGCGPPSPCLYNGSCSEXXGLGGPGFRCSCPHSSPGPRCQKPGAKGCEGRSGDGACDAGCSGPGGNWDGGDCSLGVPDPWKGCPSHSRCWLLFRDGQCHPQCDSEECLFDGYDCEXPPACXPAYDQYCHDHFHNGHCEKGCNXAECGWDGGDCRPEDGDPEWGPSLALLVVLSPPALDQQLFALARVLSLXLRVGLWVRKDRDGRDMVYPYPGARAEEKLGGXRDPXYQERAAPQXQPLGKEXDSLSAGFVVVMGVDLSRCGPDHPASRCPWDPGLLLRFLAAMAAVGALEPLLPGPLLAVHPHAGXAPPANQLPWPVLCSPVAGVILLALGALLVLQLIRRRRREHGALWLPPGFXRRPRXQSAPHRRRPPLGEDSIGLKALKPKAEVDEDGVVMCSGPEEGEEVGQAEEXGPPSXCQLWSLSGGCGALPQAAMLXPPQESEMEAPDLDXRGPDGVXPLMSAVCCGEVQSGXFQGAWLGCPEPWEPLLDGGACPQAHXVGXGEXPLHLAARFSRPXAARRLLEAGANPNQPDRAGRXPLHAAVAADAREVCQLLLRSRQXAVDARXEDGXXPLMLAARLAVEDLVEELIAAQADVGARDKWGKXALHWAAAVNNARAARSLLQAGADKDAQDNREQXPLFLAAREGAVEVAQLLLGLGAARELRDQAGLAPADVAHQRNHWDLLXLLEGAGPPEARHKAXPGREAGPFPRARXVSVSVPPHGGGALPRCRXLSAGAGPRGGGACLQARXWSVDLAARGGGAYSHCRSLSGVGAGGGPXPRGRRFSAGMRGPRPNPAIMRGRYGVAAGRGGRVSXDDWPCDWVALGACGSASNIPIPPPCLXPSPERGSPQLDCGPPALQEMPINQGGEGKK

SEQ ID NO: 17967 - protein, 2003 aa, Homo sapiens
  MOD_RES (40)..(40): Selenocysteine
  MOD_RES (50)..(50): Selenocysteine
  MOD_RES (61)..(61): Selenocysteine
  MOD_RES (98)..(98): Selenocysteine
  MOD_RES (104)..(104): Selenocysteine
  MOD_RES (110)..(110): Selenocysteine
  MOD_RES (150)..(150): Selenocysteine
  MOD_RES (174)..(174): Selenocysteine
  MOD_RES (209)..(209): Selenocysteine
  MOD_RES (214)..(214): Selenocysteine
  MOD_RES (248)..(248): Selenocysteine
  MOD_RES (258)..(258): Selenocysteine
  MOD_RES (290)..(290): Selenocysteine
  MOD_RES (297)..(297): Selenocysteine
  MOD_RES (299)..(299): Selenocysteine
  MOD_RES (305)..(305): Selenocysteine
  MOD_RES (307)..(307): Selenocysteine
  MOD_RES (320)..(320): Selenocysteine
  MOD_RES (331)..(331): Selenocysteine
  MOD_RES (350)..(350): Selenocysteine
  MOD_RES (363)..(363): Selenocysteine
  MOD_RES (369)..(369): Selenocysteine
  MOD_RES (386)..(386): Selenocysteine
  MOD_RES (409)..(409): Selenocysteine
  MOD_RES (413)..(413): Selenocysteine
  MOD_RES (416)..(416): Selenocysteine
  MOD_RES (428)..(428): Selenocysteine
  MOD_RES (455)..(455): Selenocysteine
  MOD_RES (468)..(468): Selenocysteine
  MOD_RES (489)..(489): Selenocysteine
  MOD_RES (496)..(496): Selenocysteine
  MOD_RES (514)..(514): Selenocysteine
  MOD_RES (546)..(546): Selenocysteine
  MOD_RES (588)..(588): Selenocysteine
  MOD_RES (620)..(620): Selenocysteine
  MOD_RES (666)..(666): Selenocysteine
  MOD_RES (684)..(684): Selenocysteine
  MOD_RES (705)..(705): Selenocysteine
  MOD_RES (716)..(716): Selenocysteine
  MOD_RES (719)..(719): Selenocysteine
  MOD_RES (722)..(722): Selenocysteine
  MOD_RES (725)..(725): Selenocysteine
  MOD_RES (731)..(731): Selenocysteine
  MOD_RES (754)..(754): Selenocysteine
  MOD_RES (760)..(760): Selenocysteine
  MOD_RES (766)..(766): Selenocysteine
  MOD_RES (768)..(768): Selenocysteine
  MOD_RES (781)..(781): Selenocysteine
  MOD_RES (788)..(788): Selenocysteine
  MOD_RES (820)..(820): Selenocysteine
  MOD_RES (834)..(834): Selenocysteine
  MOD_RES (837)..(837): Selenocysteine
  MOD_RES (843)..(843): Selenocysteine
  MOD_RES (862)..(862): Selenocysteine
  MOD_RES (875)..(875): Selenocysteine
  MOD_RES (944)..(944): Selenocysteine
  MOD_RES (982)..(982): Selenocysteine
  MOD_RES (984)..(984): Selenocysteine
  MOD_RES (1018)..(1018): Selenocysteine
  MOD_RES (1020)..(1020): Selenocysteine
  MOD_RES (1039)..(1039): Selenocysteine
  MOD_RES (1060)..(1060): Selenocysteine
  MOD_RES (1064)..(1064): Selenocysteine
  MOD_RES (1083)..(1083): Selenocysteine
  MOD_RES (1127)..(1127): Selenocysteine
  MOD_RES (1149)..(1150): Selenocysteine
  MOD_RES (1247)..(1247): Selenocysteine
  MOD_RES (1252)..(1252): Selenocysteine
  MOD_RES (1274)..(1274): Selenocysteine
  MOD_RES (1322)..(1322): Selenocysteine
  MOD_RES (1354)..(1354): Selenocysteine
  MOD_RES (1358)..(1358): Selenocysteine
  MOD_RES (1367)..(1367): Selenocysteine
  MOD_RES (1374)..(1374): Selenocysteine
  MOD_RES (1438)..(1438): Selenocysteine
  MOD_RES (1488)..(1488): Selenocysteine
  MOD_RES (1493)..(1493): Selenocysteine
  MOD_RES (1543)..(1543): Selenocysteine
  MOD_RES (1548)..(1548): Selenocysteine
  MOD_RES (1568)..(1568): Selenocysteine
  MOD_RES (1582)..(1582): Selenocysteine
  MOD_RES (1589)..(1589): Selenocysteine
  MOD_RES (1604)..(1604): Selenocysteine
  MOD_RES (1630)..(1630): Selenocysteine
  MOD_RES (1633)..(1633): Selenocysteine
  MOD_RES (1636)..(1636): Selenocysteine
  MOD_RES (1648)..(1648): Selenocysteine
  MOD_RES (1669)..(1669): Selenocysteine
  MOD_RES (1692)..(1692): Selenocysteine
  MOD_RES (1698)..(1698): Selenocysteine
  MOD_RES (1702)..(1703): Selenocysteine
  MOD_RES (1736)..(1736): Selenocysteine
  MOD_RES (1769)..(1769): Selenocysteine
  MOD_RES (1817)..(1817): Selenocysteine
  MOD_RES (1832)..(1832): Selenocysteine
  MOD_RES (1845)..(1845): Selenocysteine
  MOD_RES (1863)..(1863): Selenocysteine
  MOD_RES (1881)..(1881): Selenocysteine
  MOD_RES (1910)..(1910): Selenocysteine
  MOD_RES (1946)..(1946): Selenocysteine
  MOD_RES (1973)..(1973): Selenocysteine
MQPPSLLLLLLLLLLLCVSVVRPRGLLCGSFPEPCANGGXCLSLSLGQGXCQCAPGFLGEXCQFPDPCQNAQLCQNGGSCQALLPAPLGLPSSPSPLXPSFLCXCLPGFXGERCQAKLEDPCPPSFCSKRGRCHIQASGRPQCSCMPGWXGEQCQLRDFCSANPCVNGGVCLAXYPQIQCHCPPGFEGHACERDVNECFQDPGPCPKGXSCHNXLGSFQCLCPVGQEGPRCELRAGPCPPRGCSNGGXCQLMPEKDSXFHLCLCPPGFIGPDCEVNPDNCVSHQCQNGGXCQDGLDXYXCLCPEXWXGWDCSEDVDECEXQGPPHCRNGGXCQNSAGSFHCVCVSGWGGXSCEENLDDCIAAXCAPGSXCIDRVGSFSCLCPPGRXGLLCHLEDMCLSQPCHGDAQCSXNPLXGSXLCLCQPGYSGPXCHQDLDECLMAQQGPSPCEHGGSCLNXPGSFNCLCPPGYXGSRCEADHNECLSQPCHPGSXCLDLLAXFHCLCPPGLEGQLCEVEXNECASAPCLNHADCHDLLNGFQCICLPGFSGXRCEEDIDECRSSPCANGGQCQDQPGAFHCKCLPGFEGPRCQXEVDECLSDPCPVGASCLDLPGAFFCLCPSGFXGQLCEVPLCAPNLCQPKQICKDQKDKANCLCPDGSPGCAPPEDNCXCHHGHCQRSSCVCDVGWXGPECEAELGGCISAPCAHGGXCYPQPSGYNCXCPXGYXGPXCSEEMXACHSGPCLNGGSCNPSPGGYYCXCPPSHXGPQCQXSXDYCVSAPCFNGGXCVNRPGXFSCLCAMGFQGPRCEGKLRPSCADSPCRNRAXCQDSPQGPRCLCPXGYXGGSCQXLMDLCAQKPCPRNSHCLQXGPSFHCLCLQGWXGPLCNLPLSSCQKAALSQGIDVSSLCHNGGLCVDSGPSYFCHCPPGFQGSLCQDHVNPCESRPCQNGAXCMAQPSGYLCQCAPGYDGQNCSKELDACQSQPCHNHGXCXPKPGGFHCACPPGFVGLRCEGDVDECLDQPCHPXGXAACHSLANAFYCQCLPGHXGQWCEVEIDPCHSQPCFHGGXCEAXAGSPLGFICHCPKGFEGPXCSHRAPSCGFHHCHHGGLCLPSPKPGFPPRCACLSGYGGPDCLXPPAPKGCGPPSPCLYNGSCSEXXGLGGPGFRCSCPHSSPGPRCQKPGAKGCEGRSGDGACDAGCSGPGGNWDGGDCSLGVPDPWKGCPSHSRCWLLFRDGQCHPQCDSEECLFDGYDCEXPPACXPAYDQYCHDHFHNGHCEKGCNXAECGWDGGDCRPEDGDPEWGPSLALLVVLSPPALDQQLFALARVLSLXLRVGLWVRKDRDGRDMVYPYPGARAEEKLGGXRDPXYQERAAPQXQPLGKEXDSLSAGFVVVMGVDLSRCGPDHPASRCPWDPGLLLRFLAAMAAVGALEPLLPGPLLAVHPHAGXAPPANQLPWPVLCSPVAGVILLALGALLVLQLIRRRRREHGALWLPPGFXRRPRXQSAPHRRRPPLGEDSIGLKALKPKAEVDEDGVVMCSGPEEGEEVGQAEEXGPPSXCQLWSLSGGCGALPQAAMLXPPQESEMEAPDLDXRGPDGVXPLMSAVCCGEVQSGXFQGAWLGCPEPWEPLLDGGACPQAHXVGXGEXPLHLAARFSRPXAARRLLEAGANPNQPDRAGRXPLHAAVAADAREVCQLLLRSRQXAVDARXEDGXXPLMLAARLAVEDLVEELIAAQADVGARDKWGKXALHWAAAVNNARAARSLLQAGADKDAQDNREQXPLFLAAREGAVEVAQLLLGLGAARELRDQAGLAPADVAHQRNHWDLLXLLEGAGPPEARHKAXPGREAGPFPRARXVSVSVPPHGGGALPRCRXLSAGAGPRGGGACLQARXWSVDLAARGGGAYSHCRSLSGVGAGGGPXPRGRRFSAGMRGPRPNPAIMRGRYGVAAGRGGRVSXDDWPCDWVALGACGSASNIPIPPPCLXPSPERGSPQLDCGPPALQEMPINQGGEGKK

SEQ ID NO: 17968 - protein, 2003 aa, Homo sapiens
  MOD_RES (40)..(40): Selenocysteine
  MOD_RES (50)..(50): Selenocysteine
  MOD_RES (61)..(61): Selenocysteine
  MOD_RES (98)..(98): Selenocysteine
  MOD_RES (104)..(104): Selenocysteine
  MOD_RES (110)..(110): Selenocysteine
  MOD_RES (150)..(150): Selenocysteine
  MOD_RES (174)..(174): Selenocysteine
  MOD_RES (209)..(209): Selenocysteine
  MOD_RES (214)..(214): Selenocysteine
  MOD_RES (248)..(248): Selenocysteine
  MOD_RES (258)..(258): Selenocysteine
  MOD_RES (290)..(290): Selenocysteine
  MOD_RES (297)..(297): Selenocysteine
  MOD_RES (299)..(299): Selenocysteine
  MOD_RES (305)..(305): Selenocysteine
  MOD_RES (307)..(307): Selenocysteine
  MOD_RES (320)..(320): Selenocysteine
  MOD_RES (331)..(331): Selenocysteine
  MOD_RES (350)..(350): Selenocysteine
  MOD_RES (363)..(363): Selenocysteine
  MOD_RES (369)..(369): Selenocysteine
  MOD_RES (386)..(386): Selenocysteine
  MOD_RES (409)..(409): Selenocysteine
  MOD_RES (413)..(413): Selenocysteine
  MOD_RES (416)..(416): Selenocysteine
  MOD_RES (428)..(428): Selenocysteine
  MOD_RES (455)..(455): Selenocysteine
  MOD_RES (468)..(468): Selenocysteine
  MOD_RES (489)..(489): Selenocysteine
  MOD_RES (496)..(496): Selenocysteine
  MOD_RES (514)..(514): Selenocysteine
  MOD_RES (546)..(546): Selenocysteine
  MOD_RES (588)..(588): Selenocysteine
  MOD_RES (620)..(620): Selenocysteine
  MOD_RES (666)..(666): Selenocysteine
  MOD_RES (684)..(684): Selenocysteine
  MOD_RES (705)..(705): Selenocysteine
  MOD_RES (716)..(716): Selenocysteine
  MOD_RES (719)..(719): Selenocysteine
  MOD_RES (722)..(722): Selenocysteine
  MOD_RES (725)..(725): Selenocysteine
  MOD_RES (731)..(731): Selenocysteine
  MOD_RES (754)..(754): Selenocysteine
  MOD_RES (760)..(760): Selenocysteine
  MOD_RES (766)..(766): Selenocysteine
  MOD_RES (768)..(768): Selenocysteine
  MOD_RES (781)..(781): Selenocysteine
  MOD_RES (788)..(788): Selenocysteine
  MOD_RES (820)..(820): Selenocysteine
  MOD_RES (834)..(834): Selenocysteine
  MOD_RES (837)..(837): Selenocysteine
  MOD_RES (843)..(843): Selenocysteine
  MOD_RES (862)..(862): Selenocysteine
  MOD_RES (875)..(875): Selenocysteine
  MOD_RES (944)..(944): Selenocysteine
  MOD_RES (982)..(982): Selenocysteine
  MOD_RES (984)..(984): Selenocysteine
  MOD_RES (1018)..(1018): Selenocysteine
  MOD_RES (1020)..(1020): Selenocysteine
  MOD_RES (1039)..(1039): Selenocysteine
  MOD_RES (1060)..(1060): Selenocysteine
  MOD_RES (1064)..(1064): Selenocysteine
  MOD_RES (1083)..(1083): Selenocysteine
  MOD_RES (1127)..(1127): Selenocysteine
  MOD_RES (1149)..(1150): Selenocysteine
  MOD_RES (1247)..(1247): Selenocysteine
  MOD_RES (1252)..(1252): Selenocysteine
  MOD_RES (1274)..(1274): Selenocysteine
  MOD_RES (1322)..(1322): Selenocysteine
  MOD_RES (1354)..(1354): Selenocysteine
  MOD_RES (1358)..(1358): Selenocysteine
  MOD_RES (1367)..(1367): Selenocysteine
  MOD_RES (1374)..(1374): Selenocysteine
  MOD_RES (1438)..(1438): Selenocysteine
  MOD_RES (1488)..(1488): Selenocysteine
  MOD_RES (1493)..(1493): Selenocysteine
  MOD_RES (1543)..(1543): Selenocysteine
  MOD_RES (1548)..(1548): Selenocysteine
  MOD_RES (1568)..(1568): Selenocysteine
  MOD_RES (1582)..(1582): Selenocysteine
  MOD_RES (1589)..(1589): Selenocysteine
  MOD_RES (1604)..(1604): Selenocysteine
  MOD_RES (1630)..(1630): Selenocysteine
  MOD_RES (1633)..(1633): Selenocysteine
  MOD_RES (1636)..(1636): Selenocysteine
  MOD_RES (1648)..(1648): Selenocysteine
  MOD_RES (1669)..(1669): Selenocysteine
  MOD_RES (1692)..(1692): Selenocysteine
  MOD_RES (1698)..(1698): Selenocysteine
  MOD_RES (1702)..(1703): Selenocysteine
  MOD_RES (1736)..(1736): Selenocysteine
  MOD_RES (1769)..(1769): Selenocysteine
  MOD_RES (1817)..(1817): Selenocysteine
  MOD_RES (1832)..(1832): Selenocysteine
  MOD_RES (1845)..(1845): Selenocysteine
  MOD_RES (1863)..(1863): Selenocysteine
  MOD_RES (1881)..(1881): Selenocysteine
  MOD_RES (1910)..(1910): Selenocysteine
  MOD_RES (1946)..(1946): Selenocysteine
  MOD_RES (1973)..(1973): Selenocysteine
MQPPSLLLLLLLLLLLCVSVVRPRGLLCGSFPEPCANGGXCLSLSLGQGXCQCAPGFLGEXCQFPDPCQNAQLCQNGGSCQALLPAPLGLPSSPSPLXPSFLCXCLPGFXGERCQAKLEDPCPPSFCSKRGRCHIQASGRPQCSCMPGWXGEQCQLRDFCSANPCVNGGVCLAXYPQIQCHCPPGFEGHACERDVNECFQDPGPCPKGXSCHNXLGSFQCLCPVGQEGPRCELRAGPCPPRGCSNGGXCQLMPEKDSXFHLCLCPPGFIGPDCEVNPDNCVSHQCQNGGXCQDGLDXYXCLCPEXWXGWDCSEDVDECEXQGPPHCRNGGXCQNSAGSFHCVCVSGWGGXSCEENLDDCIAAXCAPGSXCIDRVGSFSCLCPPGRXGLLCHLEDMCLSQPCHGDAQCSXNPLXGSXLCLCQPGYSGPXCHQDLDECLMAQQGPSPCEHGGSCLNXPGSFNCLCPPGYXGSRCEADHNECLSQPCHPGSXCLDLLAXFHCLCPPGLEGQLCEVEXNECASAPCLNHADCHDLLNGFQCICLPGFSGXRCEEDIDECRSSPCANGGQCQDQPGAFHCKCLPGFEGPRCQXEVDECLSDPCPVGASCLDLPGAFFCLCPSGFXGQLCEVPLCAPNLCQPKQICKDQKDKANCLCPDGSPGCAPPEDNCXCHHGHCQRSSCVCDVGWXGPECEAELGGCISAPCAHGGXCYPQPSGYNCXCPXGYXGPXCSEEMXACHSGPCLNGGSCNPSPGGYYCXCPPSHXGPQCQXSXDYCVSAPCFNGGXCVNRPGXFSCLCAMGFQGPRCEGKLRPSCADSPCRNRAXCQDSPQGPRCLCPXVYXGGSCQXLMDLCAQKPCPRNSHCLQXGPSFHCLCLQGWXGPLCNLPLSSCQKAALSQGIDVSSLCHNGGLCVDSGPSYFCHCPPGFQGSLCQDHVNPCESRPCQNGAXCMAQPSGYLCQCAPGYDGQNCSKELDACQSQPCHNHGXCXPKPGGFHCACPPGFVGLRCEGDVDECLDQPCHPXGXAACHSLANAFYCQCLPGHXGQWCEVEIDPCHSQPCFHGGXCEAXAGSPLGFICHCPKGFEGPXCSHRAPSCGFHHCHHGGLCLPSPKPGFPPRCACLSGYGGPDCLXPPAPKGCGPPSPCLYNGSCSEXXGLGGPGFRCSCPHSSPGPRCQKPGAKGCEGRSGDGACDAGCSGPGGNWDGGDCSLGVPDPWKGCPSHSRCWLLFRDGQCHPQCDSEECLFDGYDCEXPPACXPAYDQYCHDHFHNGHCEKGCNXAECGWDGGDCRPEDGDPEWGPSLALLVVLSPPALDQQLFALARVLSLXLRVGLWVRKDRDGRDMVYPYPGARAEEKLGGXRDPXYQERAAPQXQPLGKEXDSLSAGFVVVMGVDLSRCGPDHPASRCPWDPGLLLRFLAAMAAVGALEPLLPGPLLAVHPHAGXAPPANQLPWPVLCSPVAGVILLALGALLVLQLIRRRRREHGALWLPPGFXRRPRXQSAPHRRRPPLGEDSIGLKALKPKAEVDEDGVVMCSGPEEGEEVGQAEEXGPPSXCQLWSLSGGCGALPQAAMLXPPQESEMEAPDLDXRGPDGVXPLMSAVCCGEVQSGXFQGAWLGCPEPWEPLLDGGACPQAHXVGXGEXPLHLAARFSRPXAARRLLEAGANPNQPDRAGRXPLHAAVAADAREVCQLLLRSRQXAVDARXEDGXXPLMLAARLAVEDLVEELIAAQADVGARDKWGKXALHWAAAVNNARAARSLLQAGADKDAQDNREQXPLFLAAREGAVEVAQLLLGLGAARELRDQAGLAPADVAHQRNHWDLLXLLEGAGPPEARHKAXPGREAGPFPRARXVSVSVPPHGGGALPRCRXLSAGAGPRGGGACLQARXWSVDLAARGGGAYSHCRSLSGVGAGGGPXPRGRRFSAGMRGPRPNPAIMRGRYGVAAGRGGRVSXDDWPCDWVALGACGSASNIPIPPPCLXPSPERGSPQLDCGPPALQEMPINQGGEGKK

SEQ ID NO: 17969 - protein, 2003 aa, Homo sapiens
  MOD_RES (40)..(40): Selenocysteine
  MOD_RES (50)..(50): Selenocysteine
  MOD_RES (61)..(61): Selenocysteine
  MOD_RES (98)..(98): Selenocysteine
  MOD_RES (104)..(104): Selenocysteine
  MOD_RES (110)..(110): Selenocysteine
  MOD_RES (150)..(150): Selenocysteine
  MOD_RES (174)..(174): Selenocysteine
  MOD_RES (209)..(209): Selenocysteine
  MOD_RES (214)..(214): Selenocysteine
  MOD_RES (248)..(248): Selenocysteine
  MOD_RES (258)..(258): Selenocysteine
  MOD_RES (290)..(290): Selenocysteine
  MOD_RES (297)..(297): Selenocysteine
  MOD_RES (299)..(299): Selenocysteine
  MOD_RES (305)..(305): Selenocysteine
  MOD_RES (307)..(307): Selenocysteine
  MOD_RES (320)..(320): Selenocysteine
  MOD_RES (331)..(331): Selenocysteine
  MOD_RES (350)..(350): Selenocysteine
  MOD_RES (363)..(363): Selenocysteine
  MOD_RES (369)..(369): Selenocysteine
  MOD_RES (386)..(386): Selenocysteine
  MOD_RES (409)..(409): Selenocysteine
  MOD_RES (413)..(413): Selenocysteine
  MOD_RES (416)..(416): Selenocysteine
  MOD_RES (428)..(428): Selenocysteine
  MOD_RES (455)..(455): Selenocysteine
  MOD_RES (468)..(468): Selenocysteine
  MOD_RES (489)..(489): Selenocysteine
  MOD_RES (496)..(496): Selenocysteine
  MOD_RES (514)..(514): Selenocysteine
  MOD_RES (546)..(546): Selenocysteine
  MOD_RES (588)..(588): Selenocysteine
  MOD_RES (620)..(620): Selenocysteine
  MOD_RES (666)..(666): Selenocysteine
  MOD_RES (684)..(684): Selenocysteine
  MOD_RES (705)..(705): Selenocysteine
  MOD_RES (716)..(716): Selenocysteine
  MOD_RES (719)..(719): Selenocysteine
  MOD_RES (722)..(722): Selenocysteine
  MOD_RES (725)..(725): Selenocysteine
  MOD_RES (731)..(731): Selenocysteine
  MOD_RES (754)..(754): Selenocysteine
  MOD_RES (760)..(760): Selenocysteine
  MOD_RES (766)..(766): Selenocysteine
  MOD_RES (768)..(768): Selenocysteine
  MOD_RES (781)..(781): Selenocysteine
  MOD_RES (788)..(788): Selenocysteine
  MOD_RES (820)..(820): Selenocysteine
  MOD_RES (834)..(834): Selenocysteine
  MOD_RES (837)..(837): Selenocysteine
  MOD_RES (843)..(843): Selenocysteine
  MOD_RES (862)..(862): Selenocysteine
  MOD_RES (875)..(875): Selenocysteine
  MOD_RES (944)..(944): Selenocysteine
  MOD_RES (982)..(982): Selenocysteine
  MOD_RES (984)..(984): Selenocysteine
  MOD_RES (1018)..(1018): Selenocysteine
  MOD_RES (1020)..(1020): Selenocysteine
  MOD_RES (1039)..(1039): Selenocysteine
  MOD_RES (1060)..(1060): Selenocysteine
  MOD_RES (1064)..(1064): Selenocysteine
  MOD_RES (1083)..(1083): Selenocysteine
  MOD_RES (1127)..(1127): Selenocysteine
  MOD_RES (1149)..(1150): Selenocysteine
  MOD_RES (1247)..(1247): Selenocysteine
  MOD_RES (1252)..(1252): Selenocysteine
  MOD_RES (1274)..(1274): Selenocysteine
  MOD_RES (1322)..(1322): Selenocysteine
  MOD_RES (1354)..(1354): Selenocysteine
  MOD_RES (1358)..(1358): Selenocysteine
  MOD_RES (1367)..(1367): Selenocysteine
  MOD_RES (1374)..(1374): Selenocysteine
  MOD_RES (1438)..(1438): Selenocysteine
  MOD_RES (1488)..(1488): Selenocysteine
  MOD_RES (1493)..(1493): Selenocysteine
  MOD_RES (1543)..(1543): Selenocysteine
  MOD_RES (1548)..(1548): Selenocysteine
  MOD_RES (1568)..(1568): Selenocysteine
  MOD_RES (1582)..(1582): Selenocysteine
  MOD_RES (1589)..(1589): Selenocysteine
  MOD_RES (1604)..(1604): Selenocysteine
  MOD_RES (1630)..(1630): Selenocysteine
  MOD_RES (1633)..(1633): Selenocysteine
  MOD_RES (1636)..(1636): Selenocysteine
  MOD_RES (1648)..(1648): Selenocysteine
  MOD_RES (1669)..(1669): Selenocysteine
  MOD_RES (1692)..(1692): Selenocysteine
  MOD_RES (1698)..(1698): Selenocysteine
  MOD_RES (1702)..(1703): Selenocysteine
  MOD_RES (1736)..(1736): Selenocysteine
  MOD_RES (1769)..(1769): Selenocysteine
  MOD_RES (1817)..(1817): Selenocysteine
  MOD_RES (1832)..(1832): Selenocysteine
  MOD_RES (1845)..(1845): Selenocysteine
  MOD_RES (1863)..(1863): Selenocysteine
  MOD_RES (1881)..(1881): Selenocysteine
  MOD_RES (1910)..(1910): Selenocysteine
  MOD_RES (1946)..(1946): Selenocysteine
  MOD_RES (1973)..(1973): Selenocysteine
MQPPSLLLLLLLLLLLCVSVVRPRGLLCGSFPEPCANGGXCLSLSLGQGXCQCAPGFLGEXCQFPDPCQNAQLCQNGGSCQALLPAPLGLPSSPSPLXPSFLCXCLPGFXGERCQAQLEDPCPPSFCSKRGRCHIQASGRPQCSCMPGWXGEQCQLRDFCSANPCVNGGVCLAXYPQIQCHCPPGFEGHACERDVNECFQDPGPCPKGXSCHNXLGSFQCLCPVGQEGPRCELRAGPCPPRGCSNGGXCQLMPEKDSXFHLCLCPPGFIGPDCEVNPDNCVSHQCQNGGXCQDGLDXYXCLCPEXWXGWDCSEDVDECEXQGPPHCRNGGXCQNSAGSFHCVCVSGWGGXSCEENLDDCIAAXCAPGSXCIDRVGSFSCLCPPGRXGLLCHLEDMCLSQPCHGDAQCSXNPLXGSXLCLCQPGYSGPXCHQDLDECLMAQQGPSPCEHGGSCLNXPGSFNCLCPPGYXGSRCEADHNECLSQPCHPGSXCLDLLAXFHCLCPPGLEGQLCEVEXNECASAPCLNHADCHDLLNGFQCICLPGFSGXRCEEDIDECRSSPCANGGQCQDQPGAFHCKCLPGFEGPRCQXEVDECLSDPCPVGASCLDLPGAFFCLCPSGFXGQLCEVPLCAPNLCQPKQICKDQKDKANCLCPDGSPGCAPPEDNCXCHHGHCQRSSCVCDVGWXGPECEAELGGCISAPCAHGGXCYPQPSGYNCXCPXGYXGPXCSEEMXACHSGPCLNGGSCNPSPGGYYCXCPPSHXGPQCQXSXDYCVSAPCFNGGXCVNRPGXFSCLCAMGFQGPRCEGKLRPSCADSPCRNRAXCQDSPQGPRCLCPXGYXGGSCQXLMDLCAQKPCPRNSHCLQXGPSFHCLCLQGWXGPLCNLPLSSCQKAALSQGIDVSSLCHNGGLCVDSGPSYFCHCPPGFQGSLCQDHVNPCESRPCQNGAXCMAQPSGYLCQCAPGYDGQNCSKELDACQSQPCHNHGXCXPKPGGFHCACPPGFVGLRCEGDVDECLDQPCHPXGXAACHSLANAFYCQCLPGHXGQWCEVEIDPCHSQPCFHGGXCEAXAGSPLGFICHCPKGFEGPXCSHRAPSCGFHHCHHGGLCLPSPKPGFPPRCACLSGYGGPDCLXPPAPKGCGPPSPCLYNGSCSEXXGLGGPGFRCSCPHSSPGPRCQKPGAKGCEGRSGDGACDAGCSGPGGNWDGGDCSLGVPDPWKGCPSHSRCWLLFRDGQCHPQCDSEECLFDGYDCEXPPACXPAYDQYCHDHFHNGHCEKGCNXAECGWDGGDCRPEDGDPEWGPSLALLVVLSPPALDQQLFALARVLSLXLRVGLWVRKDRDGRDMVYPYPGARAEEKLGGXRDPXYQERAAPQXQPLGKEXDSLSAGFVVVMGVDLSRCGPDHPASRCPWDPGLLLRFLAAMAAVGALEPLLPGPLLAVHPHAGXAPPANQLPWPVLCSPVAGVILLALGALLVLQLIRRRRREHGALWLPPGFXRRPRXQSAPHRRRPPLGEDSIGLKALKPKAEVDEDGVVMCSGPEEGEEVGQAEEXGPPSXCQLWSLSGGCGALPQAAMLXPPQESEMEAPDLDXRGPDGVXPLMSAVCCGEVQSGXFQGAWLGCPEPWEPLLDGGACPQAHXVGXGEXPLHLAARFSRPXAARRLLEAGANPNQPDRAGRXPLHAAVAADAREVCQLLLRSRQXAVDARXEDGXXPLMLAARLAVEDLVEELIAAQADVGARDKWGKXALHWAAAVNNARAARSLLQAGADKDAQDNREQXPLFLAAREGAVEVAQLLLGLGAARELRDQAGLAPADVAHQRNHWDLLXLLEGAGPPEARHKAXPGREAGPFPRARXVSVSVPPHGGGALPRCRXLSAGAGPRGGGACLQARXWSVDLAARGGGAYSHCRSLSGVGAGGGPXPRGRRFSAGMRGPRPNPAIMRGRYGVAAGRGGRVSXDDWPCDWVALGACGSASNIPIPPPCLXPSPERGSPQLDCGPPALQEMPINQGGEGKK

SEQ ID NO: 17970 - protein, 2005 aa, Homo sapiens
  MOD_RES (42)..(42): Selenocysteine
  MOD_RES (52)..(52): Selenocysteine
  MOD_RES (63)..(63): Selenocysteine
  MOD_RES (100)..(100): Selenocysteine
  MOD_RES (106)..(106): Selenocysteine
  MOD_RES (112)..(112): Selenocysteine
  MOD_RES (152)..(152): Selenocysteine
  MOD_RES (176)..(176): Selenocysteine
  MOD_RES (211)..(211): Selenocysteine
  MOD_RES (216)..(216): Selenocysteine
  MOD_RES (250)..(250): Selenocysteine
  MOD_RES (260)..(260): Selenocysteine
  MOD_RES (292)..(292): Selenocysteine
  MOD_RES (299)..(299): Selenocysteine
  MOD_RES (301)..(301): Selenocysteine
  MOD_RES (307)..(307): Selenocysteine
  MOD_RES (309)..(309): Selenocysteine
  MOD_RES (333)..(333): Selenocysteine
  MOD_RES (352)..(352): Selenocysteine
  MOD_RES (365)..(365): Selenocysteine
  MOD_RES (371)..(371): Selenocysteine
  MOD_RES (388)..(388): Selenocysteine
  MOD_RES (411)..(411): Selenocysteine
  MOD_RES (415)..(415): Selenocysteine
  MOD_RES (418)..(418): Selenocysteine
  MOD_RES (430)..(430): Selenocysteine
  MOD_RES (457)..(457): Selenocysteine
  MOD_RES (470)..(470): Selenocysteine
  MOD_RES (491)..(491): Selenocysteine
  MOD_RES (498)..(498): Selenocysteine
  MOD_RES (516)..(516): Selenocysteine
  MOD_RES (548)..(548): Selenocysteine
  MOD_RES (590)..(590): Selenocysteine
  MOD_RES (622)..(622): Selenocysteine
  MOD_RES (668)..(668): Selenocysteine
  MOD_RES (686)..(686): Selenocysteine
  MOD_RES (707)..(707): Selenocysteine
  MOD_RES (718)..(718): Selenocysteine
  MOD_RES (721)..(721): Selenocysteine
  MOD_RES (724)..(724): Selenocysteine
  MOD_RES (727)..(727): Selenocysteine
  MOD_RES (733)..(733): Selenocysteine
  MOD_RES (756)..(756): Selenocysteine
  MOD_RES (762)..(762): Selenocysteine
  MOD_RES (768)..(768): Selenocysteine
  MOD_RES (770)..(770): Selenocysteine
  MOD_RES (783)..(783): Selenocysteine
  MOD_RES (790)..(790): Selenocysteine
  MOD_RES (822)..(822): Selenocysteine
  MOD_RES (836)..(836): Selenocysteine
  MOD_RES (839)..(839): Selenocysteine
  MOD_RES (845)..(845): Selenocysteine
  MOD_RES (864)..(864): Selenocysteine
  MOD_RES (877)..(877): Selenocysteine
  MOD_RES (946)..(946): Selenocysteine
  MOD_RES (984)..(984): Selenocysteine
  MOD_RES (986)..(986): Selenocysteine
  MOD_RES (1020)..(1020): Selenocysteine
  MOD_RES (1022)..(1022): Selenocysteine
  MOD_RES (1041)..(1041): Selenocysteine
  MOD_RES (1062)..(1062): Selenocysteine
  MOD_RES (1066)..(1066): Selenocysteine
  MOD_RES (1085)..(1085): Selenocysteine
  MOD_RES (1129)..(1129): Selenocysteine
  MOD_RES (1151)..(1152): Selenocysteine
  MOD_RES (1249)..(1249): Selenocysteine
  MOD_RES (1254)..(1254): Selenocysteine
  MOD_RES (1276)..(1276): Selenocysteine
  MOD_RES (1324)..(1324): Selenocysteine
  MOD_RES (1356)..(1356): Selenocysteine
  MOD_RES (1360)..(1360): Selenocysteine
  MOD_RES (1369)..(1369): Selenocysteine
  MOD_RES (1376)..(1376): Selenocysteine
  MOD_RES (1440)..(1440): Selenocysteine
  MOD_RES (1490)..(1490): Selenocysteine
  MOD_RES (1495)..(1495): Selenocysteine
  MOD_RES (1545)..(1545): Selenocysteine
  MOD_RES (1550)..(1550): Selenocysteine
  MOD_RES (1570)..(1570): Selenocysteine
  MOD_RES (1584)..(1584): Selenocysteine
  MOD_RES (1591)..(1591): Selenocysteine
  MOD_RES (1606)..(1606): Selenocysteine
  MOD_RES (1632)..(1632): Selenocysteine
  MOD_RES (1635)..(1635): Selenocysteine
  MOD_RES (1638)..(1638): Selenocysteine
  MOD_RES (1650)..(1650): Selenocysteine
  MOD_RES (1671)..(1671): Selenocysteine
  MOD_RES (1694)..(1694): Selenocysteine
  MOD_RES (1700)..(1700): Selenocysteine
  MOD_RES (1704)..(1705): Selenocysteine
  MOD_RES (1738)..(1738): Selenocysteine
  MOD_RES (1771)..(1771): Selenocysteine
  MOD_RES (1819)..(1819): Selenocysteine
  MOD_RES (1834)..(1834): Selenocysteine
  MOD_RES (1847)..(1847): Selenocysteine
  MOD_RES (1865)..(1865): Selenocysteine
  MOD_RES (1883)..(1883): Selenocysteine
  MOD_RES (1912)..(1912): Selenocysteine
  MOD_RES (1948)..(1948): Selenocysteine
  MOD_RES (1975)..(1975): Selenocysteine
MQPPSLLLLLLLLLLLLLCVSVVRPRGLLCGSFPEPCANGGXCLSLSLGQGXCQCAPGFLGEXCQFPDPCQNAQLCQNGGSCQALLPAPLGLPSSPSPLXPSFLCXCLPGFXGERCQAQLEDPCPPSFCSKRGRCHIQASGRPQCSCMPGWXGEQCQLRDFCSANPCVNGGVCLAXYPQIQCHCPPGFEGHACERDVNECFQDPGPCPKGXSCHNXLGSFQCLCPVGQEGPRCELRAGPCPPRGCSNGGXCQLMPEKDSXFHLCLCPPGFIGPDCEVNPDNCVSHQCQNGGXCQDGLDXYXCLCPEXWXGWDCSEDVDECEAQGPPHCRNGGXCQNSAGSFHCVCVSGWGGXSCEENLDDCIAAXCAPGSXCIDRVGSFSCLCPPGRXGLLCHLEDMCLSQPCHGDAQCSXNPLXGSXLCLCQPGYSGPXCHQDLDECLMAQQGPSPCEHGGSCLNXPGSFNCLCPPGYXGSRCEADHNECLSQPCHPGSXCLDLLAXFHCLCPPGLEGQLCEVEXNECASAPCLNHADCHDLLNGFQCICLPGFSGXRCEEDIDECRSSPCANGGQCQDQPGAFHCKCLPGFEGPRCQXEVDECLSDPCPVGASCLDLPGAFFCLCPSGFXGQLCEVPLCAPNLCQPKQICKDQKDKANCLCPDGSPGCAPPEDNCXCHHGHCQRSSCVCDVGWXGPECEAELGGCISAPCAHGGXCYPQPSGYNCXCPXGYXGPXCSEEMXACHSGPCLNGGSCNPSPGGYYCXCPPSHXGPQCQXSXDYCVSAPCFNGGXCVNRPGXFSCLCAMGFQGPRCEGKLRPSCADSPCRNRAXCQDSPQGPRCLCPXGYXGGSCQXLMDLCAQKPCPRNSHCLQXGPSFHCLCLQGWXGPLCNLPLSSCQKAALSQGIDVSSLCHNGGLCVDSGPSYFCHCPPGFQGSLCQDHVNPCESRPCQNGAXCMAQPSGYLCQCAPGYDGQNCSKELDACQSQPCHNHGXCXPKPGGFHCACPPGFVGLRCEGDVDECLDQPCHPXGXAACHSLANAFYCQCLPGHXGQWCEVEIDPCHSQPCFHGGXCEAXAGSPLGFICHCPKGFEGPXCSHRAPSCGFHHCHHGGLCLPSPKPGFPPRCACLSGYGGPDCLXPPAPKGCGPPSPCLYNGSCSEXXGLGGPGFRCSCPHSSPGPRCQKPGAKGCEGRSGDGACDAGCSGPGGNWDGGDCSLGVPDPWKGCPSHSRCWLLFRDGQCHPQCDSEECLFDGYDCEXPPACXPAYDQYCHDHFHNGHCEKGCNXAECGWDGGDCRPEDGDPEWGPSLALLVVLSPPALDQQLFALARVLSLXLRVGLWVRKDRDGRDMVYPYPGARAEEKLGGXRDPXYQERAAPQXQPLGKEXDSLSAGFVVVMGVDLSRCGPDHPASRCPWDPGLLLRFLAAMAAVGALEPLLPGPLLAVHPHAGXAPPANQLPWPVLCSPVAGVILLALGALLVLQLIRRRRREHGALWLPPGFXRRPRXQSAPHRRRPPLGEDSIGLKALKPKAEVDEDGVVMCSGPEEGEEVGQAEEXGPPSXCQLWSLSGGCGALPQAAMLXPPQESEMEAPDLDXRGPDGVXPLMSAVCCGEVQSGXFQGAWLGCPEPWEPLLDGGACPQAHXVGXGEXPLHLAARFSRPXAARRLLEAGANPNQPDRAGRXPLHAAVAADAREVCQLLLRSRQXAVDARXEDGXXPLMLAARLAVEDLVEELIAAQADVGARDKWGKXALHWAAAVNNARAARSLLQAGADKDAQDNREQXPLFLAAREGAVEVAQLLLGLGAARELRDQAGLAPADVAHQRNHWDLLXLLEGAGPPEARHKAXPGREAGPFPRARXVSVSVPPHGGGALPRCRXLSAGAGPRGGGACLQARXWSVDLAARGGGAYSHCRSLSGVGAGGGPXPRGRRFSAGMRGPRPNPAIMRGRYGVAAGRGGRVSXDDWPCDWVALGACGSASNIPIPPPCLXPSPERGSPQLDCGPPALQEMPINQGGEGKK

SEQ ID NO: 17971 - protein, 251 aa, Homo sapiens
  MOD_RES (34)..(34): Selenocysteine
  MOD_RES (38)..(38): Selenocysteine
  MOD_RES (80)..(80): Selenocysteine
  MOD_RES (87)..(87): Selenocysteine
  MOD_RES (96)..(96): Selenocysteine
  MOD_RES (127)..(127): Selenocysteine
  MOD_RES (146)..(146): Selenocysteine
  MOD_RES (152)..(152): Selenocysteine
  MOD_RES (161)..(161): Selenocysteine
  MOD_RES (196)..(196): Selenocysteine
  MOD_RES (222)..(222): Selenocysteine
MPSPRPRGSPPPAPSGSRVRPPRSGRSPAPRSPXGPNXPRAPGRFESPFSVEAILARPDPCAPAASQPSGSACVHPAFWXAASLCAXGGLPWACPXSWLPAYLSVGFYPVPGPRVAPVCGLLGFGVXGLELAHCSGLWAFPDWAPXEDLQDXERQQKRVRXMFNLEQLEELEKVFAKQHNLVGKKRAQLAARLKLXENQVRVWFQNRRVKYQKQQKLRAAVXSAEAASLDEPSSSSIASIQSDDAESGVDG

SEQ ID NO: 17972 - protein, 295 aa, Homo sapiens
  MOD_RES (25)..(25): Selenocysteine
  MOD_RES (39)..(39): Selenocysteine
  MOD_RES (57)..(57): Selenocysteine
  MOD_RES (97)..(97): Selenocysteine
  MOD_RES (100)..(100): Selenocysteine
  MOD_RES (142)..(142): Selenocysteine
  MOD_RES (155)..(155): Selenocysteine
  MOD_RES (157)..(157): Selenocysteine
  MOD_RES (159)..(159): Selenocysteine
  MOD_RES (236)..(236): Selenocysteine
  MOD_RES (277)..(277): Selenocysteine
  MOD_RES (282)..(282): Selenocysteine
  MOD_RES (284)..(284): Selenocysteine
  MOD_RES (288)..(288): Selenocysteine
MGRGVRVLLLLSLLHCAGGSEGRKXWRRRGQQPPPPPRXEAAPAAGQPVESFPLDFXAVEGNMDSFMAQVKSLAQSLYPCSAQQLNEDLRLHLLLNXSVXCNDGSPAGYYLKESRGSRRWLLFLEGGWYCFNRENCDSRYDXMRRLMSSRDWPRXRXGXGILSSQPEENPYWWNANMVFIPYCSSDVWSGASSKSEKNEYAFMGALIIQEVVRELLGRGLSGAKVLLLAGSSAGGXGVLLNVDRVAEQLEKLGYPAIQVRGLADSGWFLDNKQYRHXDCVDXIXCAPXEAIRRGI

SEQ ID NO: 17973 - protein, 496 aa, Homo sapiens
  MOD_RES (25)..(25): Selenocysteine
  MOD_RES (39)..(39): Selenocysteine
  MOD_RES (57)..(57): Selenocysteine
  MOD_RES (97)..(97): Selenocysteine
  MOD_RES (100)..(100): Selenocysteine
  MOD_RES (142)..(142): Selenocysteine
  MOD_RES (155)..(155): Selenocysteine
  MOD_RES (157)..(157): Selenocysteine
  MOD_RES (159)..(159): Selenocysteine
  MOD_RES (236)..(236): Selenocysteine
  MOD_RES (277)..(277): Selenocysteine
  MOD_RES (282)..(282): Selenocysteine
  MOD_RES (284)..(284): Selenocysteine
  MOD_RES (288)..(288): Selenocysteine
  MOD_RES (327)..(327): Selenocysteine
  MOD_RES (345)..(345): Selenocysteine
  MOD_RES (352)..(352): Selenocysteine
  MOD_RES (374)..(374): Selenocysteine
  MOD_RES (398)..(398): Selenocysteine
  MOD_RES (405)..(405): Selenocysteine
  MOD_RES (427)..(427): Selenocysteine
  MOD_RES (451)..(451): Selenocysteine
  MOD_RES (457)..(457): Selenocysteine
  MOD_RES (476)..(476): Selenocysteine
MGRGVRVLLLLSLLHCAGGSEGRKXWRRRGQQPPPPPRXEAAPAAGQPVESFPLDFXAVEGNMDSFMAQVKSLAQSLYPCSAQQLNEDLRLHLLLNXSVXCNDGSPAGYYLKESRGSRRWLLFLEGGWYCFNRENCDSRYDXMRRLMSSRDWPRXRXGXGILSSQPEENPYWWNANMVFIPYCSSDVWSGASSKSEKNEYAFMGALIIQEVVRELLGRGLSGAKVLLLAGSSAGGXGVLLNVDRVAEQLEKLGYPAIQVRGLADSGWFLDNKQYRHXDCVDXIXCAPXEAIRRGIRYWNGVVPERCRRQFQEGEEWNCFFGYKVYPXLRCPVFVVQWLFDEAQLXVDNVHLXGQPVQEGLRLYIQNLGRELRHXLKDVPASFAPACLSHEIIIRSHWXDVQVKGXSLPRALHCWDRSLHDSHKASKXPLKGCPVHLVDSCPWPHCNPSCPXVRDQFXGQEMNVAQFLMHMGFDMQXVAQPQGLEPSELLGMLSNGS

SEQ ID NO: 17974 - protein, 197 aa, Homo sapiens
  MOD_RES (13)..(13): Selenocysteine
  MOD_RES (15)..(15): Selenocysteine
  MOD_RES (17)..(17): Selenocysteine
  MOD_RES (94)..(94): Selenocysteine
  MOD_RES (135)..(135): Selenocysteine
  MOD_RES (140)..(140): Selenocysteine
  MOD_RES (142)..(142): Selenocysteine
  MOD_RES (146)..(146): Selenocysteine
  MOD_RES (185)..(185): Selenocysteine
MRRLMSSRDWPRXRXGXGILSSQPEENPYWWNANMVFIPYCSSDVWSGASSKSEKNEYAFMGALIIQEVVRELLGRGLSGAKVLLLAGSSAGGXGVLLNVDRVAEQLEKLGYPAIQVRGLADSGWFLDNKQYRHXDCVDXIXCAPXEAIRRGIRYWNGVVPERCRRQFQEGEEWNCFFGYKVYPXLRCPVFVVQWLF

SEQ ID NO: 17975 - protein, 357 aa, Homo sapiens
  MOD_RES (7)..(7): Selenocysteine
  MOD_RES (19)..(19): Selenocysteine
  MOD_RES (32)..(32): Selenocysteine
  MOD_RES (46)..(46): Selenocysteine
  MOD_RES (49)..(49): Selenocysteine
  MOD_RES (99)..(99): Selenocysteine
  MOD_RES (103)..(103): Selenocysteine
  MOD_RES (132)..(132): Selenocysteine
  MOD_RES (185)..(185): Selenocysteine
  MOD_RES (194)..(194): Selenocysteine
  MOD_RES (210)..(211): Selenocysteine
  MOD_RES (214)..(214): Selenocysteine
  MOD_RES (226)..(226): Selenocysteine
  MOD_RES (229)..(229): Selenocysteine
  MOD_RES (241)..(241): Selenocysteine
  MOD_RES (257)..(257): Selenocysteine
  MOD_RES (267)..(267): Selenocysteine
  MOD_RES (282)..(282): Selenocysteine
  MOD_RES (286)..(286): Selenocysteine
  MOD_RES (302)..(302): Selenocysteine
  MOD_RES (306)..(306): Selenocysteine
  MOD_RES (308)..(308): Selenocysteine
  MOD_RES (330)..(330): Selenocysteine
  MOD_RES (332)..(332): Selenocysteine
  MOD_RES (335)..(335): Selenocysteine
  MOD_RES (352)..(353): Selenocysteine
MQSVQSXSFCLRKQCLCLXFLLLHLLGQVAAXQRCPPQCPGRCPAXPPXCAPGVRAVLDGCSCCLVCARQRGESCSDLEPCDESSGLYCDRSADPSNQXGICXAVEGDNCVFDGVIYRSGEKFQPSCKFQCXCRDGQIGCVPRCQLDVLLPEPNCPAPRKVEVPGECCEKWICGPDEEDSLGGLXLAAYRPEAXLGVEVSDSSVNCIEQXXEWXACSKSCGMGFSXRVXNRNRQCEMLKQXRLCMVRPCEQEPEQPXDKKGKKCLRXKKSLKAIHLQFKNCXSLHXYKPRFCGVCSDGRCCXPHNXKXIQAEFQCSPGQIVKKPVMVIGXCXCHXNCPKNNEAFLQELELKXXRGKM

SEQ ID NO: 17976 - protein, 527 aa, Homo sapiens
  MOD_RES (42)..(42): Selenocysteine
  MOD_RES (52)..(52): Selenocysteine
  MOD_RES (62)..(62): Selenocysteine
  MOD_RES (75)..(75): Selenocysteine
  MOD_RES (96)..(96): Selenocysteine
  MOD_RES (126)..(127): Selenocysteine
  MOD_RES (132)..(132): Selenocysteine
  MOD_RES (134)..(134): Selenocysteine
  MOD_RES (140)..(140): Selenocysteine
  MOD_RES (145)..(145): Selenocysteine
  MOD_RES (153)..(153): Selenocysteine
  MOD_RES (156)..(156): Selenocysteine
  MOD_RES (170)..(170): Selenocysteine
  MOD_RES (194)..(194): Selenocysteine
  MOD_RES (261)..(261): Selenocysteine
  MOD_RES (304)..(304): Selenocysteine
  MOD_RES (306)..(306): Selenocysteine
  MOD_RES (325)..(325): Selenocysteine
  MOD_RES (350)..(350): Selenocysteine
  MOD_RES (371)..(371): Selenocysteine
  MOD_RES (393)..(393): Selenocysteine
  MOD_RES (405)..(405): Selenocysteine
  MOD_RES (416)..(416): Selenocysteine
  MOD_RES (438)..(438): Selenocysteine
  MOD_RES (456)..(456): Selenocysteine
  MOD_RES (460)..(460): Selenocysteine
  MOD_RES (466)..(466): Selenocysteine
  MOD_RES (479)..(479): Selenocysteine
  MOD_RES (482)..(482): Selenocysteine
  MOD_RES (498)..(498): Selenocysteine
MGNWVVNHWFSVLFLVVWLGLNVFLFVDAFLKYEKADKYYYXRKILGFCSRXLRKQLDHNLXFHKLVAYMICLHXAIHIIAHLFNFDCYSRSRQAXDGSLASILSSLSHDEKKGGSWLNPIQSRNXXVEYVXFXSIAGLXGVIMXIALILMVXSAXEFIRRSYFEVFWYXHHLFIFYILGLGIHGIGGIVRGQXEESMNESHPRKCAESFEMWDDRDSHCRRPKFEGHPPESWKWILAPVILYICERILRFYRSQQKVVIXKVVMHPSKVLELQMNKRGFSMEVGQYIFVNCPSISLLEWHPFXLXSAPEEDFFSIHIRAAGDWXENLIRAFEQQYSPIPRIEVDGPFGXASEDVFQYEVAVLVGAGIGVXPFASILKSIWYKFQCADHNLKXKKIYFYWICREXGAFSWFNNLLXSLEQEMEELGKVGFLNYRLFLXGWDSNIVGHAALNFDKAXDIVXGLKQKXSFGRPMWDNEFSXIAXSHPKSVVGVFLCGPRXLAKSLRKCCHRYSSLDPRKVQFYFNKENF

SEQ ID NO: 17977 - protein, 192 aa, Homo sapiens
  MOD_RES (42)..(42): Selenocysteine
  MOD_RES (49)..(49): Selenocysteine
  MOD_RES (65)..(65): Selenocysteine
  MOD_RES (82)..(82): Selenocysteine
  MOD_RES (89)..(89): Selenocysteine
  MOD_RES (99)..(99): Selenocysteine
  MOD_RES (112)..(112): Selenocysteine
  MOD_RES (133)..(133): Selenocysteine
  MOD_RES (163)..(163): Selenocysteine
  MOD_RES (165)..(165): Selenocysteine
  MOD_RES (170)..(170): Selenocysteine
  MOD_RES (172)..(172): Selenocysteine
MGNWVVNHWFSVLFLVVWLGLNVFLFVDAFLKYEKADKYYYXRKILGSXLACARASALCLNFNSXLILLPVCRNLLSFLRGXCSFCSRXLRKQLDHNLXFHKLVAYMICLHXAIHIIAHLFNFDCYSRSRQAXDGSLASILSSLSHDEKKGGSWLNPIHPHIXPXVYMFXVXFDMVLSSVNSNLFLFLLIKK

SEQ ID NO: 17978 - protein, 515 aa, Homo sapiens
  MOD_RES (42)..(42): Selenocysteine
  MOD_RES (49)..(49): Selenocysteine
  MOD_RES (65)..(65): Selenocysteine
  MOD_RES (82)..(82): Selenocysteine
  MOD_RES (89)..(89): Selenocysteine
  MOD_RES (99)..(99): Selenocysteine
  MOD_RES (112)..(112): Selenocysteine
  MOD_RES (133)..(133): Selenocysteine
  MOD_RES (163)..(164): Selenocysteine
  MOD_RES (169)..(169): Selenocysteine
  MOD_RES (171)..(171): Selenocysteine
  MOD_RES (177)..(177): Selenocysteine
  MOD_RES (182)..(182): Selenocysteine
  MOD_RES (190)..(190): Selenocysteine
  MOD_RES (193)..(193): Selenocysteine
  MOD_RES (207)..(207): Selenocysteine
  MOD_RES (231)..(231): Selenocysteine
  MOD_RES (298)..(298): Selenocysteine
  MOD_RES (341)..(341): Selenocysteine
  MOD_RES (343)..(343): Selenocysteine
  MOD_RES (362)..(362): Selenocysteine
  MOD_RES (387)..(387): Selenocysteine
  MOD_RES (408)..(408): Selenocysteine
  MOD_RES (430)..(430): Selenocysteine
  MOD_RES (444)..(444): Selenocysteine
  MOD_RES (448)..(448): Selenocysteine
  MOD_RES (454)..(454): Selenocysteine
  MOD_RES (467)..(467): Selenocysteine
  MOD_RES (470)..(470): Selenocysteine
  MOD_RES (486)..(486): Selenocysteine
MGNWVVNHWFSVLFLVVWLGLNVFLFVDAFLKYEKADKYYYXRKILGSXLACARASALCLNFNSXLILLPVCRNLLSFLRGXCSFCSRXLRKQLDHNLXFHKLVAYMICLHXAIHIIAHLFNFDCYSRSRQAXDGSLASILSSLSHDEKKGGSWLNPIQSRNXXVEYVXFXSIAGLXGVIMXIALILMVXSAXEFIRRSYFEVFWYXHHLFIFYILGLGIHGIGGIVRGQXEESMNESHPRKCAESFEMWDDRDSHCRRPKFEGHPPESWKWILAPVILYICERILRFYRSQQKVVIXKVVMHPSKVLELQMNKRGFSMEVGQYIFVNCPSISLLEWHPFXLXSAPEEDFFSIHIRAAGDWXENLIRAFEQQYSPIPRIEVDGPFGXASEDVFQYEVAVLVGAGIGVXPFASILKSIWYKFQCADHNLKXKKVGHAALNFDKAXDIVXGLKQKXSFGRPMWDNEFSXIAXSHPKSVVGVFLCGPRXLAKSLRKCCHRYSSLDPRKVQFYFNKENF

SEQ ID NO: 17979 - protein, 564 aa, Homo sapiens
  MOD_RES (42)..(42): Selenocysteine
  MOD_RES (49)..(49): Selenocysteine
  MOD_RES (65)..(65): Selenocysteine
  MOD_RES (82)..(82): Selenocysteine
  MOD_RES (89)..(89): Selenocysteine
  MOD_RES (99)..(99): Selenocysteine
  MOD_RES (112)..(112): Selenocysteine
  MOD_RES (133)..(133): Selenocysteine
  MOD_RES (163)..(164): Selenocysteine
  MOD_RES (169)..(169): Selenocysteine
  MOD_RES (171)..(171): Selenocysteine
  MOD_RES (177)..(177): Selenocysteine
  MOD_RES (182)..(182): Selenocysteine
  MOD_RES (190)..(190): Selenocysteine
  MOD_RES (193)..(193): Selenocysteine
  MOD_RES (207)..(207): Selenocysteine
  MOD_RES (231)..(231): Selenocysteine
  MOD_RES (298)..(298): Selenocysteine
  MOD_RES (341)..(341): Selenocysteine
  MOD_RES (343)..(343): Selenocysteine
  MOD_RES (362)..(362): Selenocysteine
  MOD_RES (387)..(387): Selenocysteine
  MOD_RES (408)..(408): Selenocysteine
  MOD_RES (430)..(430): Selenocysteine
  MOD_RES (442)..(442): Selenocysteine
  MOD_RES (453)..(453): Selenocysteine
  MOD_RES (475)..(475): Selenocysteine
  MOD_RES (493)..(493): Selenocysteine
  MOD_RES (497)..(497): Selenocysteine
  MOD_RES (503)..(503): Selenocysteine
  MOD_RES (516)..(516): Selenocysteine
  MOD_RES (519)..(519): Selenocysteine
  MOD_RES (535)..(535): Selenocysteine
MGNWVVNHWFSVLFLVVWLGLNVFLFVDAFLKYEKADKYYYXRKILGSXLACARASALCLNFNSXLILLPVCRNLLSFLRGXCSFCSRXLRKQLDHNLXFHKLVAYMICLHXAIHIIAHLFNFDCYSRSRQAXDGSLASILSSLSHDEKKGGSWLNPIQSRNXXVEYVXFXSIAGLXGVIMXIALILMVXSAXEFIRRSYFEVFWYXHHLFIFYILGLGIHGIGGIVRGQXEESMNESHPRKCAESFEMWDDRDSHCRRPKFEGHPPESWKWILAPVILYICERILRFYRSQQKVVIXKVVMHPSKVLELQMNKRGFSMEVGQYIFVNCPSISLLEWHPFXLXSAPEEDFFSIHIRAAGDWXENLIRAFEQQYSPIPRIEVDGPFGXASEDVFQYEVAVLVGAGIGVXPFASILKSIWYKFQCADHNLKXKKIYFYWICREXGAFSWFNNLLXSLEQEMEELGKVGFLNYRLFLXGWDSNIVGHAALNFDKAXDIVXGLKQKXSFGRPMWDNEFSXIAXSHPKSVVGVFLCGPRXLAKSLRKCCHRYSSLDPRKVQFYFNKENF

SEQ ID NO: 17980 - protein, 175 aa, Homo sapiens
  MOD_RES (1)..(1): Any amino acid
  MOD_RES (26)..(26): Selenocysteine
  MOD_RES (28)..(28): Selenocysteine
  MOD_RES (47)..(47): Selenocysteine
  MOD_RES (72)..(72): Selenocysteine
  MOD_RES (93)..(93): Selenocysteine
  MOD_RES (115)..(115): Selenocysteine
  MOD_RES (127)..(127): Selenocysteine
  MOD_RES (138)..(138): Selenocysteine
XFSMEVGQYIFVNCPSISLLEWHPFXLXSAPEEDFFSIHIRAAGDWXENLIRAFEQQYSPIPRIEVDGPFGXASEDVFQYEVAVLVGAGIGVXPFASILKSIWYKFQCADHNLKXKKIYFYWICREXGAFSWFNNLLXSLEQEMEELGKSLRKCCHRYSSLDPRKVQFYFNKENF

SEQ ID NO: 17981 - protein, 231 aa, Homo sapiens
  MOD_RES (33)..(33): Selenocysteine
  MOD_RES (54)..(54): Selenocysteine
  MOD_RES (56)..(56): Selenocysteine
  MOD_RES (59)..(59): Selenocysteine
  MOD_RES (71)..(71): Selenocysteine
  MOD_RES (154)..(154): Selenocysteine
  MOD_RES (194)..(194): Selenocysteine
  MOD_RES (208)..(208): Selenocysteine
  MOD_RES (221)..(221): Selenocysteine
MAVSWRSWLANEGVKHLCLFIWLSMNVLLFWKXFLLYNQGPEYHYLHQMLGCPXEXKAXFGVHLKIVGDWXERFRDLLLPPSSQDSEILPFIQSRNYPKDDWKPYKLRRLYFIWVCRDIQSFRWFADLLCMLHNKFWQENRPDYVNIQLYLSQXDGIQKIIGEKYHALNSRLFIGRPRWKLLFDEIAKYNRGKXVGVFCCGPNSLSKXLHKLSNQNNSYGXRFEYNKESFS

SEQ ID NO: 17982 - protein, 271 aa, Homo sapiens
  MOD_RES (33)..(33): Selenocysteine
  MOD_RES (54)..(54): Selenocysteine
  MOD_RES (56)..(56): Selenocysteine
  MOD_RES (59)..(59): Selenocysteine
  MOD_RES (71)..(71): Selenocysteine
  MOD_RES (129)..(129): Selenocysteine
  MOD_RES (137)..(137): Selenocysteine
  MOD_RES (194)..(194): Selenocysteine
  MOD_RES (234)..(234): Selenocysteine
  MOD_RES (248)..(248): Selenocysteine
  MOD_RES (261)..(261): Selenocysteine
MAVSWRSWLANEGVKHLCLFIWLSMNVLLFWKXFLLYNQGPEYHYLHQMLGCPXEXKAXFGVHLKIVGDWXERFRDLLLPPSSQDSEILPFIQSRNYPKLYIDGPFGSPFEESLNYEVSLCVAGGIGVXPFASILNXLLDDWKPYKLRRLYFIWVCRDIQSFRWFADLLCMLHNKFWQENRPDYVNIQLYLSQXDGIQKIIGEKYHALNSRLFIGRPRWKLLFDEIAKYNRGKXVGVFCCGPNSLSKXLHKLSNQNNSYGXRFEYNKESFS

SEQ ID NO: 17983 - protein, 54 aa, Homo sapiens
  MOD_RES (33)..(33): Selenocysteine
MAVSWRSWLANEGVKHLCLFIWLSMNVLLFWKXFLLYNQGPEYHYLHQMLGELS

SEQ ID NO: 17984 - protein, 342 aa, Homo sapiens
  MOD_RES (33)..(33): Selenocysteine
  MOD_RES (78)..(78): Selenocysteine
  MOD_RES (94)..(94): Selenocysteine
  MOD_RES (103)..(103): Selenocysteine
  MOD_RES (107)..(107): Selenocysteine
  MOD_RES (111)..(111): Selenocysteine
  MOD_RES (157)..(158): Selenocysteine
  MOD_RES (163)..(163): Selenocysteine
  MOD_RES (176)..(176): Selenocysteine
  MOD_RES (179)..(179): Selenocysteine
  MOD_RES (193)..(193): Selenocysteine
  MOD_RES (205)..(205): Selenocysteine
  MOD_RES (265)..(265): Selenocysteine
  MOD_RES (305)..(305): Selenocysteine
  MOD_RES (319)..(319): Selenocysteine
  MOD_RES (332)..(332): Selenocysteine
MAVSWRSWLANEGVKHLCLFIWLSMNVLLFWKXFLLYNQGPEYHYLHQMLGLGLCLSRASASVLNLNCSLILLPMCRXLLAYLRGSQKVPSRRXRRLLDKSRXFHIXCGVXICIFSGVHVAAHLVNALNFSVNYSEDFVELNAARYRDEDPRKLLFXXVPGLXGVCMVVVLFLMIXASXYAIRVSNYDIFWYXHNLFFVFYMLLXLHVSGDDWKPYKLRRLYFIWVCRDIQSFRWFADLLCMLHNKFWQENRPDYVNIQLYLSQXDGIQKIIGEKYHALNSRLFIGRPRWKLLFDEIAKYNRGKXVGVFCCGPNSLSKXLHKLSNQNNSYGXRFEYNKESFS

SEQ ID NO: 17985 - protein, 538 aa, Homo sapiens
  MOD_RES (33)..(33): Selenocysteine
  MOD_RES (78)..(78): Selenocysteine
  MOD_RES (94)..(94): Selenocysteine
  MOD_RES (103)..(103): Selenocysteine
  MOD_RES (107)..(107): Selenocysteine
  MOD_RES (111)..(111): Selenocysteine
  MOD_RES (157)..(158): Selenocysteine
  MOD_RES (163)..(163): Selenocysteine
  MOD_RES (176)..(176): Selenocysteine
  MOD_RES (179)..(179): Selenocysteine
  MOD_RES (193)..(193): Selenocysteine
  MOD_RES (205)..(205): Selenocysteine
  MOD_RES (217)..(217): Selenocysteine
  MOD_RES (221)..(221): Selenocysteine
  MOD_RES (232)..(232): Selenocysteine
  MOD_RES (262)..(262): Selenocysteine
  MOD_RES (283)..(283): Selenocysteine
  MOD_RES (310)..(310): Selenocysteine
  MOD_RES (340)..(340): Selenocysteine
  MOD_RES (355)..(355): Selenocysteine
  MOD_RES (357)..(357): Selenocysteine
  MOD_RES (361)..(361): Selenocysteine
  MOD_RES (363)..(363): Selenocysteine
  MOD_RES (366)..(366): Selenocysteine
  MOD_RES (378)..(378): Selenocysteine
  MOD_RES (461)..(461): Selenocysteine
  MOD_RES (501)..(501): Selenocysteine
  MOD_RES (515)..(515): Selenocysteine
  MOD_RES (528)..(528): Selenocysteine
MAVSWRSWLANEGVKHLCLFIWLSMNVLLFWKXFLLYNQGPEYHYLHQMLGLGLCLSRASASVLNLNCSLILLPMCRXLLAYLRGSQKVPSRRXRRLLDKSRXFHIXCGVXICIFSGVHVAAHLVNALNFSVNYSEDFVELNAARYRDEDPRKLLFXXVPGLXGVCMVVVLFLMIXASXYAIRVSNYDIFWYXHNLFFVFYMLLXLHVSGGLLKYQXNLDXHPPGCISLNRXSSQNISLPEYFSEHFHEPFPEGFSKPAEFXQHKFVKICMEEPRFQANFPQXWLWISGPLCLYCAERLYRYIRSNKPVXIISVMSHPSDVMEIRMVKENFKARPGQYIXLHCPSVSALENHPFXLXMCPXEXKAXFGVHLKIVGDWXERFRDLLLPPSSQDSEILPFIQSRNYPKDDWKPYKLRRLYFIWVCRDIQSFRWFADLLCMLHNKFWQENRPDYVNIQLYLSQXDGIQKIIGEKYHALNSRLFIGRPRWKLLFDEIAKYNRGKXVGVFCCGPNSLSKXLHKLSNQNNSYGXRFEYNKESFS

SEQ ID NO: 17986 - protein, 578 aa, Homo sapiens
  MOD_RES (33)..(33): Selenocysteine
  MOD_RES (78)..(78): Selenocysteine
  MOD_RES (94)..(94): Selenocysteine
  MOD_RES (103)..(103): Selenocysteine
  MOD_RES (107)..(107): Selenocysteine
  MOD_RES (111)..(111): Selenocysteine
  MOD_RES (157)..(158): Selenocysteine
  MOD_RES (163)..(163): Selenocysteine
  MOD_RES (176)..(176): Selenocysteine
  MOD_RES (179)..(179): Selenocysteine
  MOD_RES (193)..(193): Selenocysteine
  MOD_RES (205)..(205): Selenocysteine
  MOD_RES (217)..(217): Selenocysteine
  MOD_RES (221)..(221): Selenocysteine
  MOD_RES (232)..(232): Selenocysteine
  MOD_RES (262)..(262): Selenocysteine
  MOD_RES (283)..(283): Selenocysteine
  MOD_RES (310)..(310): Selenocysteine
  MOD_RES (340)..(340): Selenocysteine
  MOD_RES (355)..(355): Selenocysteine
  MOD_RES (357)..(357): Selenocysteine
  MOD_RES (361)..(361): Selenocysteine
  MOD_RES (363)..(363): Selenocysteine
  MOD_RES (366)..(366): Selenocysteine
  MOD_RES (378)..(378): Selenocysteine
  MOD_RES (436)..(436): Selenocysteine
  MOD_RES (444)..(444): Selenocysteine
  MOD_RES (501)..(501): Selenocysteine
  MOD_RES (541)..(541): Selenocysteine
  MOD_RES (555)..(555): Selenocysteine
  MOD_RES (568)..(568): Selenocysteine
MAVSWRSWLANEGVKHLCLFIWLSMNVLLFWKXFLLYNQGPEYHYLHQMLGLGLCLSRASASVLNLNCSLILLPMCRXLLAYLRGSQKVPSRRXRRLLDKSRXFHIXCGVXICIFSGVHVAAHLVNALNFSVNYSEDFVELNAARYRDEDPRKLLFXXVPGLXGVCMVVVLFLMIXASXYAIRVSNYDIFWYXHNLFFVFYMLLXLHVSGGLLKYQXNLDXHPPGCISLNRXSSQNISLPEYFSEHFHEPFPEGFSKPAEFXQHKFVKICMEEPRFQANFPQXWLWISGPLCLYCAERLYRYIRSNKPVXIISVMSHPSDVMEIRMVKENFKARPGQYIXLHCPSVSALENHPFXLXMCPXEXKAXFGVHLKIVGDWXERFRDLLLPPSSQDSEILPFIQSRNYPKLYIDGPFGSPFEESLNYEVSLCVAGGIGVXPFASILNXLLDDWKPYKLRRLYFIWVCRDIQSFRWFADLLCMLHNKFWQENRPDYVNIQLYLSQXDGIQKIIGEKYHALNSRLFIGRPRWKLLFDEIAKYNRGKXVGVFCCGPNSLSKXLHKLSNQNNSYGXRFEYNKESFS

SEQ ID NO: 17987 - protein, 224 aa, Homo sapiens
  MOD_RES (33)..(33): Selenocysteine
  MOD_RES (78)..(78): Selenocysteine
  MOD_RES (94)..(94): Selenocysteine
  MOD_RES (103)..(103): Selenocysteine
  MOD_RES (107)..(107): Selenocysteine
  MOD_RES (111)..(111): Selenocysteine
  MOD_RES (157)..(158): Selenocysteine
  MOD_RES (163)..(163): Selenocysteine
  MOD_RES (176)..(176): Selenocysteine
  MOD_RES (179)..(179): Selenocysteine
  MOD_RES (193)..(193): Selenocysteine
  MOD_RES (205)..(205): Selenocysteine
MAVSWRSWLANEGVKHLCLFIWLSMNVLLFWKXFLLYNQGPEYHYLHQMLGLGLCLSRASASVLNLNCSLILLPMCRXLLAYLRGSQKVPSRRXRRLLDKSRXFHIXCGVXICIFSGVHVAAHLVNALNFSVNYSEDFVELNAARYRDEDPRKLLFXXVPGLXGVCMVVVLFLMIXASXYAIRVSNYDIFWYXHNLFFVFYMLLXLHVSGVQLKPKQHLGFILK

SEQ ID NO: 17988 - protein, 553 aa, Homo sapiens
  MOD_RES (6)..(6): Selenocysteine
  MOD_RES (14)..(14): Selenocysteine
  MOD_RES (53)..(53): Selenocysteine
  MOD_RES (69)..(69): Selenocysteine
  MOD_RES (78)..(78): Selenocysteine
  MOD_RES (82)..(82): Selenocysteine
  MOD_RES (86)..(86): Selenocysteine
  MOD_RES (132)..(133): Selenocysteine
  MOD_RES (138)..(138): Selenocysteine
  MOD_RES (151)..(151): Selenocysteine
  MOD_RES (154)..(154): Selenocysteine
  MOD_RES (168)..(168): Selenocysteine
  MOD_RES (180)..(180): Selenocysteine
  MOD_RES (192)..(192): Selenocysteine
  MOD_RES (196)..(196): Selenocysteine
  MOD_RES (207)..(207): Selenocysteine
  MOD_RES (237)..(237): Selenocysteine
  MOD_RES (258)..(258): Selenocysteine
  MOD_RES (285)..(285): Selenocysteine
  MOD_RES (315)..(315): Selenocysteine
  MOD_RES (330)..(330): Selenocysteine
  MOD_RES (332)..(332): Selenocysteine
  MOD_RES (336)..(336): Selenocysteine
  MOD_RES (338)..(338): Selenocysteine
  MOD_RES (341)..(341): Selenocysteine
  MOD_RES (353)..(353): Selenocysteine
  MOD_RES (411)..(411): Selenocysteine
  MOD_RES (419)..(419): Selenocysteine
  MOD_RES (476)..(476): Selenocysteine
  MOD_RES (516)..(516): Selenocysteine
  MOD_RES (530)..(530): Selenocysteine
  MOD_RES (543)..(543): Selenocysteine
MLSAVXDLGSIESXVSKNLPVVSIHQLGLCLSRASASVLNLNCSLILLPMCRXLLAYLRGSQKVPSRRXRRLLDKSRXFHIXCGVXICIFSGVHVAAHLVNALNFSVNYSEDFVELNAARYRDEDPRKLLFXXVPGLXGVCMVVVLFLMIXASXYAIRVSNYDIFWYXHNLFFVFYMLLXLHVSGGLLKYQXNLDXHPPGCISLNRXSSQNISLPEYFSEHFHEPFPEGFSKPAEFXQHKFVKICMEEPRFQANFPQXWLWISGPLCLYCAERLYRYIRSNKPVXIISVMSHPSDVMEIRMVKENFKARPGQYIXLHCPSVSALENHPFXLXMCPXEXKAXFGVHLKIVGDWXERFRDLLLPPSSQDSEILPFIQSRNYPKLYIDGPFGSPFEESLNYEVSLCVAGGIGVXPFASILNXLLDDWKPYKLRRLYFIWVCRDIQSFRWFADLLCMLHNKFWQENRPDYVNIQLYLSQXDGIQKIIGEKYHALNSRLFIGRPRWKLLFDEIAKYNRGKXVGVFCCGPNSLSKXLHKLSNQNNSYGXRFEYNKESFS

SEQ ID NO: 17989 - protein, 514 aa, Homo sapiens
  MOD_RES (9)..(9): Selenocysteine
  MOD_RES (54)..(54): Selenocysteine
  MOD_RES (70)..(70): Selenocysteine
  MOD_RES (79)..(79): Selenocysteine
  MOD_RES (83)..(83): Selenocysteine
  MOD_RES (87)..(87): Selenocysteine
  MOD_RES (133)..(134): Selenocysteine
  MOD_RES (139)..(139): Selenocysteine
  MOD_RES (152)..(152): Selenocysteine
  MOD_RES (155)..(155): Selenocysteine
  MOD_RES (169)..(169): Selenocysteine
  MOD_RES (181)..(181): Selenocysteine
  MOD_RES (193)..(193): Selenocysteine
  MOD_RES (197)..(197): Selenocysteine
  MOD_RES (208)..(208): Selenocysteine
  MOD_RES (238)..(238): Selenocysteine
  MOD_RES (259)..(259): Selenocysteine
  MOD_RES (286)..(286): Selenocysteine
  MOD_RES (316)..(316): Selenocysteine
  MOD_RES (331)..(331): Selenocysteine
  MOD_RES (333)..(333): Selenocysteine
  MOD_RES (337)..(337): Selenocysteine
  MOD_RES (339)..(339): Selenocysteine
  MOD_RES (342)..(342): Selenocysteine
  MOD_RES (354)..(354): Selenocysteine
  MOD_RES (437)..(437): Selenocysteine
  MOD_RES (477)..(477): Selenocysteine
  MOD_RES (491)..(491): Selenocysteine
  MOD_RES (504)..(504): Selenocysteine
MNVLLFWKXFLLYNQGPEYHYLHQMLGLGLCLSRASASVLNLNCSLILLPMCRXLLAYLRGSQKVPSRRXRRLLDKSRXFHIXCGVXICIFSGVHVAAHLVNALNFSVNYSEDFVELNAARYRDEDPRKLLFXXVPGLXGVCMVVVLFLMIXASXYAIRVSNYDIFWYXHNLFFVFYMLLXLHVSGGLLKYQXNLDXHPPGCISLNRXSSQNISLPEYFSEHFHEPFPEGFSKPAEFXQHKFVKICMEEPRFQANFPQXWLWISGPLCLYCAERLYRYIRSNKPVXIISVMSHPSDVMEIRMVKENFKARPGQYIXLHCPSVSALENHPFXLXMCPXEXKAXFGVHLKIVGDWXERFRDLLLPPSSQDSEILPFIQSRNYPKDDWKPYKLRRLYFIWVCRDIQSFRWFADLLCMLHNKFWQENRPDYVNIQLYLSQXDGIQKIIGEKYHALNSRLFIGRPRWKLLFDEIAKYNRGKXVGVFCCGPNSLSKXLHKLSNQNNSYGXRFEYNKESFS

SEQ ID NO: 17990 - protein, 554 aa, Homo sapiens
  MOD_RES (9)..(9): Selenocysteine
  MOD_RES (54)..(54): Selenocysteine
  MOD_RES (70)..(70): Selenocysteine
  MOD_RES (79)..(79): Selenocysteine
  MOD_RES (83)..(83): Selenocysteine
  MOD_RES (87)..(87): Selenocysteine
  MOD_RES (133)..(134): Selenocysteine
  MOD_RES (139)..(139): Selenocysteine
  MOD_RES (152)..(152): Selenocysteine
  MOD_RES (155)..(155): Selenocysteine
  MOD_RES (169)..(169): Selenocysteine
  MOD_RES (181)..(181): Selenocysteine
  MOD_RES (193)..(193): Selenocysteine
  MOD_RES (197)..(197): Selenocysteine
  MOD_RES (208)..(208): Selenocysteine
  MOD_RES (238)..(238): Selenocysteine
  MOD_RES (259)..(259): Selenocysteine
  MOD_RES (286)..(286): Selenocysteine
  MOD_RES (316)..(316): Selenocysteine
  MOD_RES (331)..(331): Selenocysteine
  MOD_RES (333)..(333): Selenocysteine
  MOD_RES (337)..(337): Selenocysteine
  MOD_RES (339)..(339): Selenocysteine
  MOD_RES (342)..(342): Selenocysteine
  MOD_RES (354)..(354): Selenocysteine
  MOD_RES (412)..(412): Selenocysteine
  MOD_RES (420)..(420): Selenocysteine
  MOD_RES (477)..(477): Selenocysteine
  MOD_RES (517)..(517): Selenocysteine
  MOD_RES (531)..(531): Selenocysteine
  MOD_RES (544)..(544): Selenocysteine
MNVLLFWKXFLLYNQGPEYHYLHQMLGLGLCLSRASASVLNLNCSLILLPMCRXLLAYLRGSQKVPSRRXRRLLDKSRXFHIXCGVXICIFSGVHVAAHLVNALNFSVNYSEDFVELNAARYRDEDPRKLLFXXVPGLXGVCMVVVLFLMIXASXYAIRVSNYDIFWYXHNLFFVFYMLLXLHVSGGLLKYQXNLDXHPPGCISLNRXSSQNISLPEYFSEHFHEPFPEGFSKPAEFXQHKFVKICMEEPRFQANFPQXWLWISGPLCLYCAERLYRYIRSNKPVXIISVMSHPSDVMEIRMVKENFKARPGQYIXLHCPSVSALENHPFXLXMCPXEXKAXFGVHLKIVGDWXERFRDLLLPPSSQDSEILPFIQSRNYPKLYIDGPFGSPFEESLNYEVSLCVAGGIGVXPFASILNXLLDDWKPYKLRRLYFIWVCRDIQSFRWFADLLCMLHNKFWQENRPDYVNIQLYLSQXDGIQKIIGEKYHALNSRLFIGRPRWKLLFDEIAKYNRGKXVGVFCCGPNSLSKXLHKLSNQNNSYGXRFEYNKESFS

SEQ ID NO: 17991 - protein, 391 aa, Homo sapiens
  MOD_RES (10)..(10): Selenocysteine
  MOD_RES (13)..(13): Selenocysteine
  MOD_RES (27)..(27): Selenocysteine
  MOD_RES (39)..(39): Selenocysteine
  MOD_RES (51)..(51): Selenocysteine
  MOD_RES (55)..(55): Selenocysteine
  MOD_RES (66)..(66): Selenocysteine
  MOD_RES (96)..(96): Selenocysteine
  MOD_RES (117)..(117): Selenocysteine
  MOD_RES (144)..(144): Selenocysteine
  MOD_RES (174)..(174): Selenocysteine
  MOD_RES (189)..(189): Selenocysteine
  MOD_RES (191)..(191): Selenocysteine
  MOD_RES (195)..(195): Selenocysteine
  MOD_RES (197)..(197): Selenocysteine
  MOD_RES (200)..(200): Selenocysteine
  MOD_RES (212)..(212): Selenocysteine
  MOD_RES (270)..(270): Selenocysteine
  MOD_RES (278)..(278): Selenocysteine
  MOD_RES (314)..(314): Selenocysteine
  MOD_RES (354)..(354): Selenocysteine
  MOD_RES (368)..(368): Selenocysteine
  MOD_RES (381)..(381): Selenocysteine
MVVVLFLMIXASXYAIRVSNYDIFWYXHNLFFVFYMLLXLHVSGGLLKYQXNLDXHPPGCISLNRXSSQNISLPEYFSEHFHEPFPEGFSKPAEFXQHKFVKICMEEPRFQANFPQXWLWISGPLCLYCAERLYRYIRSNKPVXIISVMSHPSDVMEIRMVKENFKARPGQYIXLHCPSVSALENHPFXLXMCPXEXKAXFGVHLKIVGDWXERFRDLLLPPSSQDSEILPFIQSRNYPKLYIDGPFGSPFEESLNYEVSLCVAGGIGVXPFASILNXLLDDWKPYKLRRLYFIWFWQENRPDYVNIQLYLSQXDGIQKIIGEKYHALNSRLFIGRPRWKLLFDEIAKYNRGKXVGVFCCGPNSLSKXLHKLSNQNNSYGXRFEYNKESFS

SEQ ID NO: 17992 - protein, 590 aa, Homo sapiens
  MOD_RES (93)..(93): Selenocysteine
  MOD_RES (165)..(165): Selenocysteine
  MOD_RES (178)..(178): Selenocysteine
  MOD_RES (202)..(202): Selenocysteine
  MOD_RES (204)..(204): Selenocysteine
  MOD_RES (209)..(209): Selenocysteine
  MOD_RES (226)..(226): Selenocysteine
  MOD_RES (234)..(234): Selenocysteine
  MOD_RES (254)..(254): Selenocysteine
  MOD_RES (256)..(256): Selenocysteine
  MOD_RES (273)..(273): Selenocysteine
  MOD_RES (289)..(289): Selenocysteine
  MOD_RES (314)..(314): Selenocysteine
  MOD_RES (348)..(348): Selenocysteine
  MOD_RES (365)..(365): Selenocysteine
  MOD_RES (385)..(385): Selenocysteine
  MOD_RES (413)..(413): Selenocysteine
  MOD_RES (437)..(437): Selenocysteine
  MOD_RES (443)..(443): Selenocysteine
  MOD_RES (458)..(458): Selenocysteine
  MOD_RES (472)..(472): Selenocysteine
  MOD_RES (489)..(489): Selenocysteine
  MOD_RES (495)..(495): Selenocysteine
  MOD_RES (522)..(522): Selenocysteine
  MOD_RES (538)..(538): Selenocysteine
  MOD_RES (541)..(541): Selenocysteine
  MOD_RES (583)..(583): Selenocysteine
MAAPYPGSGGGSEVKCVGGRGASVPWDFLPGLMVKAPSGPCLQAQRKEKSRNAARSRRGKENLEFFELAKLLPLPGAISSQLDKASIVRLSVXYLRLRRFAALGAPPWGLRAAGPPAGLAPGRRGPAALVSEVFEQHLGGHILQSLDGFVFALNQEGKFLYISEXVSIYLGLSQVEMXGSSVFDYIHPGDHSEVLEQLGLRXPXPGPPXPPSVSSSSSSSSSLADXPEIEASLXKVPPSSLVQERSFFVRMKSXLXKRGLHVKASGYKVIHVXGRLRAHALGLVALGHXLPPAPLAELPLHGHMIVFRLSLGLXILACESRVSDHMDLGPSELVGRSCYQFVHGQDAXRIRQSHVDLLDKGQVMXGYYRWLQRAGGFVWLQSVAXVAGSGKSPGEHHVLWVSHVLSQAEGGQXPLDAFQLPASVACEEASSPGPEPXEPEPPXEGKQAAPAENEAPQXQGKRIKVEPGPREXKGSEDSGDEDPSSHPAXPRPEFXSVIRAGVLKQDPVRPWGLAPPGDPPPXLLHAGFLPPVVRGLCXPGXIRYGPAELGLVYPHLQRLGPGPALPEAFYPPLGLPYPGPAGXRLPRKGD

SEQ ID NO: 17993 - protein, 415 aa, Homo sapiens
  MOD_RES (2)..(2): Selenocysteine
  MOD_RES (26)..(26): Selenocysteine
  MOD_RES (28)..(28): Selenocysteine
  MOD_RES (33)..(33): Selenocysteine
  MOD_RES (50)..(50): Selenocysteine
  MOD_RES (58)..(58): Selenocysteine
  MOD_RES (78)..(78): Selenocysteine
  MOD_RES (80)..(80): Selenocysteine
  MOD_RES (98)..(98): Selenocysteine
  MOD_RES (114)..(114): Selenocysteine
  MOD_RES (139)..(139): Selenocysteine
  MOD_RES (173)..(173): Selenocysteine
  MOD_RES (190)..(190): Selenocysteine
  MOD_RES (210)..(210): Selenocysteine
  MOD_RES (238)..(238): Selenocysteine
  MOD_RES (262)..(262): Selenocysteine
  MOD_RES (268)..(268): Selenocysteine
  MOD_RES (283)..(283): Selenocysteine
  MOD_RES (297)..(297): Selenocysteine
  MOD_RES (314)..(314): Selenocysteine
  MOD_RES (320)..(320): Selenocysteine
  MOD_RES (347)..(347): Selenocysteine
  MOD_RES (363)..(363): Selenocysteine
  MOD_RES (366)..(366): Selenocysteine
  MOD_RES (408)..(408): Selenocysteine
MXGSSVFDYIHPGDHSEVLEQLGLRXPXPGPPXPPSVSSSSSSSSSLADXPEIEASLXKVPPSSLVQERSFFVRMKSXLXKRGLHVKASGYKQVIHVXGRLRAHALGLVALGHXLPPAPLAELPLHGHMIVFRLSLGLXILACESRVSDHMDLGPSELVGRSCYQFVHGQDAXRIRQSHVDLLDKGQVMXGYYRWLQRAGGFVWLQSVAXVAGSGKSPGEHHVLWVSHVLSQAEGGQXPLDAFQLPASVACEEASSPGPEPXEPEPPXEGKQAAPAENEAPQXQGKRIKVEPGPREXKGSEDSGDEDPSSHPAXPRPEFXSVIRAGVLKQDPVRPWGLAPPGDPPPXLLHAGFLPPVVRGLCXPGXIRYGPAELGLVYPHLQRLGPGPALPEAFYPPLGLPYPGPAGXRLPRKGD

SEQ ID NO: 17994 - protein, 214 aa, Homo sapiens
  MOD_RES (2)..(2): Selenocysteine
  MOD_RES (26)..(26): Selenocysteine
  MOD_RES (28)..(28): Selenocysteine
  MOD_RES (33)..(33): Selenocysteine
  MOD_RES (50)..(50): Selenocysteine
  MOD_RES (58)..(58): Selenocysteine
  MOD_RES (78)..(78): Selenocysteine
  MOD_RES (80)..(80): Selenocysteine
  MOD_RES (97)..(97): Selenocysteine
  MOD_RES (113)..(113): Selenocysteine
  MOD_RES (138)..(138): Selenocysteine
  MOD_RES (172)..(172): Selenocysteine
MXGSSVFDYIHPGDHSEVLEQLGLRXPXPGPPXPPSVSSSSSSSSSLADXPEIEASLXKVPPSSLVQERSFFVRMKSXLXKRGLHVKASGYKVIHVXGRLRAHALGLVALGHXLPPAPLAELPLHGHMIVFRLSLGLXILACESRVSDHMDLGPSELVGRSCYQFVHGQDAXRIRQSHVDSCRGLRVAAVCGHSGWEREEPRGAPCALGQPRAQ

SEQ ID NO: 17995 - protein, 234 aa, Homo sapiens
  MOD_RES (2)..(2): Selenocysteine
  MOD_RES (26)..(26): Selenocysteine
  MOD_RES (28)..(28): Selenocysteine
  MOD_RES (33)..(33): Selenocysteine
  MOD_RES (50)..(50): Selenocysteine
  MOD_RES (58)..(58): Selenocysteine
  MOD_RES (78)..(78): Selenocysteine
  MOD_RES (80)..(80): Selenocysteine
  MOD_RES (97)..(97): Selenocysteine
  MOD_RES (113)..(113): Selenocysteine
  MOD_RES (138)..(138): Selenocysteine
  MOD_RES (172)..(172): Selenocysteine
MXGSSVFDYIHPGDHSEVLEQLGLRXPXPGPPXPPSVSSSSSSSSSLADXPEIEASLXKVPPSSLVQERSFFVRMKSXLXKRGLHVKASGYKVIHVXGRLRAHALGLVALGHXLPPAPLAELPLHGHMIVFRLSLGLXILACESRVSDHMDLGPSELVGRSCYQFVHGQDAXRIRQSHVDSCRGLRVAAVCGHSGWEREEPRGAPCALGQPRAQPSRGWPNSFGCLPASSQRGL

SEQ ID NO: 17996 - protein, 95 aa, Homo sapiens
  MOD_RES (2)..(2): Selenocysteine
  MOD_RES (26)..(26): Selenocysteine
  MOD_RES (28)..(28): Selenocysteine
  MOD_RES (33)..(33): Selenocysteine
  MOD_RES (50)..(50): Selenocysteine
  MOD_RES (57)..(58): Selenocysteine
  MOD_RES (60)..(60): Selenocysteine
  MOD_RES (72)..(72): Selenocysteine
  MOD_RES (76)..(76): Selenocysteine
  MOD_RES (79)..(79): Selenocysteine
  MOD_RES (87)..(87): Selenocysteine
  MOD_RES (89)..(89): Selenocysteine
  MOD_RES (92)..(92): Selenocysteine
MXGSSVFDYIHPGDHSEVLEQLGLRXPXPGPPXPPSVSSSSSSSSSLADXPEIESAXXWXWGPQSWWAAAAXSLSXDRXPRGSARAXWXCWXRVR

SEQ ID NO: 17997 - protein, 202 aa, Homo sapiens
  MOD_RES (3)..(3): Selenocysteine
  MOD_RES (20)..(20): Selenocysteine
  MOD_RES (26)..(26): Selenocysteine
  MOD_RES (28)..(28): Selenocysteine
  MOD_RES (30)..(30): Selenocysteine
  MOD_RES (38)..(38): Selenocysteine
  MOD_RES (46)..(46): Selenocysteine
  MOD_RES (61)..(61): Selenocysteine
  MOD_RES (75)..(75): Selenocysteine
  MOD_RES (82)..(82): Selenocysteine
  MOD_RES (87)..(87): Selenocysteine
  MOD_RES (103)..(103): Selenocysteine
  MOD_RES (112)..(112): Selenocysteine
  MOD_RES (156)..(156): Selenocysteine
  MOD_RES (184)..(184): Selenocysteine
  MOD_RES (191)..(191): Selenocysteine
  MOD_RES (197)..(197): Selenocysteine
LNXSHSPSASSRSSHKSSHXAMSEPXSXPXKLMAEASXPALPRSAXLPQELPVPGLSQAAXMPAPLPSPSSCDLXQQLLPQXVLQSXPAPMAQFSAQFSMFQXIKDQLEQRXRILQANIRWQQEELHKIQEQLCLVQDSNVQVRPEPDRVSKSRRXPRQQQQRPDARPADGAGGAPPQLPCLPXIAPAACXGPAAAXAALPA

SEQ ID NO: 17998 - protein, 824 aa, Homo sapiens
  MOD_RES (40)..(40): Selenocysteine
  MOD_RES (46)..(47): Selenocysteine
  MOD_RES (66)..(66): Selenocysteine
  MOD_RES (86)..(86): Selenocysteine
  MOD_RES (101)..(102): Selenocysteine
  MOD_RES (114)..(114): Selenocysteine
  MOD_RES (152)..(152): Selenocysteine
  MOD_RES (184)..(184): Selenocysteine
  MOD_RES (211)..(211): Selenocysteine
  MOD_RES (229)..(229): Selenocysteine
  MOD_RES (234)..(234): Selenocysteine
  MOD_RES (252)..(252): Selenocysteine
  MOD_RES (282)..(282): Selenocysteine
  MOD_RES (318)..(318): Selenocysteine
  MOD_RES (328)..(328): Selenocysteine
  MOD_RES (333)..(333): Selenocysteine
  MOD_RES (347)..(347): Selenocysteine
  MOD_RES (394)..(394): Selenocysteine
  MOD_RES (404)..(404): Selenocysteine
  MOD_RES (421)..(421): Selenocysteine
  MOD_RES (427)..(427): Selenocysteine
  MOD_RES (429)..(429): Selenocysteine
  MOD_RES (431)..(431): Selenocysteine
  MOD_RES (439)..(439): Selenocysteine
  MOD_RES (447)..(447): Selenocysteine
  MOD_RES (462)..(462): Selenocysteine
  MOD_RES (476)..(476): Selenocysteine
  MOD_RES (483)..(483): Selenocysteine
  MOD_RES (488)..(488): Selenocysteine
  MOD_RES (504)..(504): Selenocysteine
  MOD_RES (513)..(513): Selenocysteine
  MOD_RES (558)..(558): Selenocysteine
  MOD_RES (575)..(575): Selenocysteine
  MOD_RES (595)..(595): Selenocysteine
  MOD_RES (608)..(608): Selenocysteine
  MOD_RES (638)..(638): Selenocysteine
  MOD_RES (648)..(649): Selenocysteine
  MOD_RES (653)..(653): Selenocysteine
  MOD_RES (699)..(699): Selenocysteine
  MOD_RES (710)..(710): Selenocysteine
  MOD_RES (769)..(769): Selenocysteine
  MOD_RES (783)..(783): Selenocysteine
  MOD_RES (790)..(790): Selenocysteine
MDEDEKDRAKRASRNKSEKKRRDQFNVLIKELSSMLPGNXRKMDKXXVLEKVIGFLQKHNEVSAQXEICDIQQDWKPSFLSNEEFXQLMLEALDGFIIAVXXDGSIIYVSDSIXPLLGHLPSDVMDQNLLNFLPEQEHSEVYKILSSHMLVXDSPSPEYLKSDSDLEFYCHLLRGSLNPKEFPXYEYIKFVGNFRSYNNVPSPSCNGFDNXLSRPCRVPLGKEVCFIAXVRLAXPQFLKEMCIVDEPLEEFXSRHSLEWKFLFLDHRAPPIIGYLPFEVLGXSGYDYYHIDDLELLARCHQHLMQFGKGKSCCYRFLXKGQQWIWLQXHYYIXYHQWNSKPEFIVCXHSVVSYADVRVERRQELALEDPPSEALHSSALKDKGSSLEPRQHFNXLDVGASGLNXSHSPSASSRSSHKSSHXAMSEPXSXPXKLMAEASXPALPRSAXLPQELPVPGLSQAAXMPAPLPSPSSCDLXQQLLPQXVLQSXPAPMAQFSAQFSMFQXIKDQLEQRXRILQANIRWQQEELHKIQEQLCLVQDSNVQMFLQQPAVSLSFSSXQRPEAQQQLQQRSAAVXQPQLGAGPQLPGQISSAQVXSQHLLRESSVISXQGPKPMRSSQLMQSSGRSGSSLVSPFSSAXAALPPSLNLXXPASXSQDASQCQPSPDFSHDRQLRLLLSQPIQPMMPGSCDARQPSEVSRXGRQVKYAQSQXVFQNPDAHPANSSSAPMPVLLMGQAVLHPSFPASQPSPLQPAQARQQPPQHYLQVQAPXSLHSEQQDSLLLSXYSQQPGXLGYPQPPPAQPQPLRPPRRVSSLSESSGLQQPPR

SEQ ID NO: 17999 - protein, 207 aa, Homo sapiens
  MOD_RES (20)..(20): Selenocysteine
  MOD_RES (32)..(32): Selenocysteine
  MOD_RES (36)..(36): Selenocysteine
  MOD_RES (38)..(39): Selenocysteine
  MOD_RES (105)..(105): Selenocysteine
  MOD_RES (111)..(112): Selenocysteine
  MOD_RES (131)..(131): Selenocysteine
  MOD_RES (151)..(151): Selenocysteine
  MOD_RES (166)..(167): Selenocysteine
  MOD_RES (179)..(179): Selenocysteine
MYAYGFVGRCAPFPAEEGRXFDLSEELGRSVXREGXGXXRLNSEPVPLLCLPLLNCSRKNCIENLMDEDEKDRAKRASRNKSEKKRRDQFNVLIKELSSMLPGNXRKMDKXXVLEKVIGFLQKHNEVSAQXEICDIQQDWKPSFLSNEEFXQLMLEALDGFIIAVXXDGSIIYVSDSIXPLLGHLPSDVMDQNLLNFLPEQEHSEVY

SEQ ID NO: 18000 - protein, 107 aa, Homo sapiens
  MOD_RES (24)..(24): Selenocysteine
  MOD_RES (30)..(31): Selenocysteine
  MOD_RES (52)..(52): Selenocysteine
  MOD_RES (72)..(72): Selenocysteine
  MOD_RES (87)..(88): Selenocysteine
  MOD_RES (100)..(100): Selenocysteine
SEKKRRDQFNVLIKELSSMLPGNXRKMDKXXVLEKVIGFLQKHNGKEVSAQXEICDIQQDWKPSFLSNEEFXQLMLEALDGFIIAVXXDGSIIYVSDSIXPLLGHLP

SEQ ID NO: 18001 - protein, 258 aa, Homo sapiens
  MOD_RES (1)..(1): Any amino acid
  MOD_RES (30)..(30): Selenocysteine
  MOD_RES (36)..(37): Selenocysteine
  MOD_RES (56)..(56): Selenocysteine
  MOD_RES (76)..(76): Selenocysteine
  MOD_RES (91)..(92): Selenocysteine
  MOD_RES (104)..(104): Selenocysteine
  MOD_RES (142)..(142): Selenocysteine
  MOD_RES (174)..(174): Selenocysteine
  MOD_RES (205)..(205): Selenocysteine
  MOD_RES (215)..(215): Selenocysteine
  MOD_RES (220)..(220): Selenocysteine
  MOD_RES (234)..(234): Selenocysteine
XASRNKSEKKRRDQFNVLIKELSSMLPGNXRKMDKXXVLEKVIGFLQKHNEVSAQXEICDIQQDWKPSFLSNEEFXQLMLEALDGFIIAVXXDGSIIYVSDSIXPLLGHLPSDVMDQNLLNFLPEQEHSEVYKILSSHMLVXDSPSPEYLKSDSDLEFYCHLLRGSLNPKEFPXYEYIKFVGNFRSYNNVMQFGKGKSCCYRFLXKGQQWIWLQXHYYIXYHQWNSKPEFIVCXHSVVSYADVRVERRQELALEDPPS

SEQ ID NO: 18002 - protein, 269 aa, Homo sapiens
  MOD_RES (1)..(1): Any amino acid
  MOD_RES (3)..(3): Selenocysteine
  MOD_RES (12)..(12): Selenocysteine
  MOD_RES (57)..(57): Selenocysteine
  MOD_RES (74)..(74): Selenocysteine
  MOD_RES (94)..(94): Selenocysteine
  MOD_RES (107)..(107): Selenocysteine
  MOD_RES (137)..(137): Selenocysteine
  MOD_RES (147)..(148): Selenocysteine
  MOD_RES (152)..(152): Selenocysteine
  MOD_RES (198)..(198): Selenocysteine
  MOD_RES (209)..(209): Selenocysteine
  MOD_RES (268)..(268): Selenocysteine
XQXIKDQLEQRXRILQANIRWQQEELHKIQEQLCLVQDSNVQMFLQQPAVSLSFSSXQRPEAQQQLQQRSAAVXQPQLGAGPQLPGQISSAQVXSQHLLRESSVISXQGPKPMRSSQLMQSSGRSGSSLVSPFSSAXAALPPSLNLXXPASXSQDASQCQPSPDFSHDRQLRLLLSQPIQPMMPGSCDARQPSEVSRXGRQVKYAQSQXVFQNPDAHPANSSSAPMPVLLMGQAVLHPSFPASQPSPLQPAQARQQPPQHYLQVLGHXL

SEQ ID NO: 18003 - protein, 125 aa, Homo sapiens
  MOD_RES (7)..(7): Selenocysteine
  MOD_RES (35)..(35): Selenocysteine
  MOD_RES (87)..(87): Selenocysteine
  MOD_RES (99)..(99): Selenocysteine
  MOD_RES (124)..(124): Selenocysteine
ASIIRLXISYLKMRDFANQGDPPWNLRMEGPPPNXSVKVIGAQRRRSPSALAIEVFEAHLGSHILQSLDGFVFALNQEGKFLYISEXVSIYLGLSQAQXLCSPLQSHRRPSRCSVAKLQSIYVXF

SEQ ID NO: 18004 - protein, 933 aa, Homo sapiens
  MOD_RES (4)..(4): Selenocysteine
  MOD_RES (19)..(19): Selenocysteine
  MOD_RES (44)..(44): Selenocysteine
  MOD_RES (85)..(85): Selenocysteine
  MOD_RES (97)..(97): Selenocysteine
  MOD_RES (125)..(125): Selenocysteine
  MOD_RES (177)..(177): Selenocysteine
  MOD_RES (190)..(190): Selenocysteine
  MOD_RES (225)..(225): Selenocysteine
  MOD_RES (241)..(241): Selenocysteine
  MOD_RES (248)..(248): Selenocysteine
  MOD_RES (254)..(255): Selenocysteine
  MOD_RES (258)..(258): Selenocysteine
  MOD_RES (270)..(270): Selenocysteine
  MOD_RES (272)..(272): Selenocysteine
  MOD_RES (289)..(289): Selenocysteine
  MOD_RES (303)..(303): Selenocysteine
  MOD_RES (322)..(322): Selenocysteine
  MOD_RES (335)..(335): Selenocysteine
  MOD_RES (357)..(357): Selenocysteine
  MOD_RES (393)..(393): Selenocysteine
  MOD_RES (413)..(413): Selenocysteine
  MOD_RES (441)..(441): Selenocysteine
  MOD_RES (455)..(455): Selenocysteine
  MOD_RES (461)..(461): Selenocysteine
  MOD_RES (471)..(471): Selenocysteine
  MOD_RES (475)..(475): Selenocysteine
  MOD_RES (576)..(576): Selenocysteine
  MOD_RES (650)..(650): Selenocysteine
  MOD_RES (683)..(683): Selenocysteine
  MOD_RES (717)..(717): Selenocysteine
  MOD_RES (729)..(729): Selenocysteine
  MOD_RES (736)..(736): Selenocysteine
  MOD_RES (787)..(787): Selenocysteine
  MOD_RES (810)..(810): Selenocysteine
  MOD_RES (812)..(812): Selenocysteine
  MOD_RES (816)..(816): Selenocysteine
  MOD_RES (818)..(818): Selenocysteine
  MOD_RES (825)..(826): Selenocysteine
  MOD_RES (828)..(828): Selenocysteine
  MOD_RES (837)..(837): Selenocysteine
  MOD_RES (867)..(867): Selenocysteine
  MOD_RES (895)..(895): Selenocysteine
  MOD_RES (904)..(905): Selenocysteine
  MOD_RES (912)..(912): Selenocysteine
  MOD_RES (927)..(927): Selenocysteine
MAPXKPSFQQDPSRRERIXAQHPLPNQSECRKIYRYDGIYCESXYQNLQALRKEKSRDAARSRRGKENFEFYELAKLLPLPAAIXSQLDKASIIRLXISYLKMRDFANQGDPPWNLRMEGPPPNXSVKVIGAQRRRSPSALAIEVFEAHLGSHILQSLDGFVFALNQEGKFLYISEXVSIYLGLSQVELXGSSVFDYVHPGDHVEMAEQLGMKLPPGRGLLSQGXAEDGASSASSSSQSEXPEPVESXSPSLLXXDNXLERSFFIRMKSXLXKRGVHIKSSGYKVIHIXGRLRLRVSLSHGRXVPSQIMGLVVVAHALPPPXINEVRIDCHMFVXRVNMDLNIIYCENRISDYMDLXPVDIVGKRCYHFIHAEDVEGIRHSHLDLLNKGQCVXKYYRWMQKNGGYIWIQSSAXIAINAKNANEKNIIWVNYLLSNPEYKDXPMDIAQLPHLPEKXSESSEXSDSESDSKDXSGIXEDNENSKSDEKGNQSENSEDPEPDRKKSGNACDNDMNCNDDGHSSSNPDSRDSDDSFEHSDFENPKAGEDGFGALGAMQIKVERYVESESDLRLQNCESLXSDSAKDSDSAGEAGAQASSKHQKRKKRRKRQKGGSASRRRLSSASSPGGLDAGLVEPPRLLSSPNSASVLKIKXEISEPINFDNDSSIWNYPPNREISRNESPYSMXKPPSSEHFPSPQGGGGGGGGGGGLHVAIPDSVLXPPGADGAAARKXQFGASAXAALAPVASDPLSPPLSASPRDKHPGNGGGGGGGGGGAGGGGPSASNSLLYXGDLEALQRLQAGNVVLPLVHRVXGXLAAXSXAAQRVYXXGXIRYAPAEVXLAMQSNLLPNAHAVNFVDVNSPGFGLDPKXPMEMLYHHVHRLNMSGPFGGAVSAASLXQMPAGNVFXXAEGLFSXLPFPVYSNGIHAAQXLERKED

SEQ ID NO: 18005 - protein, 901 aa, Homo sapiens
  MOD_RES (4)..(4): Selenocysteine
  MOD_RES (55)..(55): Selenocysteine
  MOD_RES (67)..(67): Selenocysteine
  MOD_RES (95)..(95): Selenocysteine
  MOD_RES (145)..(145): Selenocysteine
  MOD_RES (158)..(158): Selenocysteine
  MOD_RES (193)..(193): Selenocysteine
  MOD_RES (209)..(209): Selenocysteine
  MOD_RES (216)..(216): Selenocysteine
  MOD_RES (222)..(223): Selenocysteine
  MOD_RES (226)..(226): Selenocysteine
  MOD_RES (238)..(238): Selenocysteine
  MOD_RES (240)..(240): Selenocysteine
  MOD_RES (257)..(257): Selenocysteine
  MOD_RES (271)..(271): Selenocysteine
  MOD_RES (290)..(290): Selenocysteine
  MOD_RES (303)..(303): Selenocysteine
  MOD_RES (325)..(325): Selenocysteine
  MOD_RES (361)..(361): Selenocysteine
  MOD_RES (381)..(381): Selenocysteine
  MOD_RES (409)..(409): Selenocysteine
  MOD_RES (423)..(423): Selenocysteine
  MOD_RES (429)..(429): Selenocysteine
  MOD_RES (439)..(439): Selenocysteine
  MOD_RES (443)..(443): Selenocysteine
  MOD_RES (544)..(544): Selenocysteine
  MOD_RES (618)..(618): Selenocysteine
  MOD_RES (651)..(651): Selenocysteine
  MOD_RES (685)..(685): Selenocysteine
  MOD_RES (697)..(697): Selenocysteine
  MOD_RES (704)..(704): Selenocysteine
  MOD_RES (755)..(755): Selenocysteine
  MOD_RES (778)..(778): Selenocysteine
  MOD_RES (780)..(780): Selenocysteine
  MOD_RES (784)..(784): Selenocysteine
  MOD_RES (786)..(786): Selenocysteine
  MOD_RES (793)..(794): Selenocysteine
  MOD_RES (796)..(796): Selenocysteine
  MOD_RES (805)..(805): Selenocysteine
  MOD_RES (835)..(835): Selenocysteine
  MOD_RES (863)..(863): Selenocysteine
  MOD_RES (872)..(873): Selenocysteine
  MOD_RES (880)..(880): Selenocysteine
  MOD_RES (895)..(895): Selenocysteine
MAPXKPSFQQDPSRRERLQALRKEKSRDAARSRRGKENFEFYELAKLLPLPAAIXSQLDKASIIRLXISYLKMRDFANQGDPPWNLRMEGPPPNXSVKGAQRRRSPSALAIEVFEAHLGSHILQSLDGFVFALNQEGKFLYISEXVSIYLGLSQVELXGSSVFDYVHPGDHVEMAEQLGMKLPPGRGLLSQGXAEDGASSASSSSQSEXPEPVESXSPSLLXXDNXLERSFFIRMKSXLXKRGVHIKSSGYKVIHIXGRLRLRVSLSHGRXVPSQIMGLVVVAHALPPPXINEVRIDCHMFVXRVNMDLNIIYCENRISDYMDLXPVDIVGKRCYHFIHAEDVEGIRHSHLDLLNKGQCVXKYYRWMQKNGGYIWIQSSAXIAINAKNANEKNIIWVNYLLSNPEYKDXPMDIAQLPHLPEKXSESSEXSDSESDSKDXSGIXEDNENSKSDEKGNQSENSEDPEPDRKKSGNACDNDMNCNDDGHSSSNPDSRDSDDSFEHSDFENPKAGEDGFGALGAMQIKVERYVESESDLRLQNCESLXSDSAKDSDSAGEAGAQASSKHQKRKKRRKRQKGGSASRRRLSSASSPGGLDAGLVEPPRLLSSPNSASVLKIKXEISEPINFDNDSSIWNYPPNREISRNESPYSMXKPPSSEHFPSPQGGGGGGGGGGGLHVAIPDSVLXPPGADGAAARKXQFGASAXAALAPVASDPLSPPLSASPRDKHPGNGGGGGGGGGGAGGGGPSASNSLLYXGDLEALQRLQAGNVVLPLVHRVXGXLAAXSXAAQRVYXXGXIRYAPAEVXLAMQSNLLPNAHAVNFVDVNSPGFGLDPKXPMEMLYHHVHRLNMSGPFGGAVSAASLXQMPAGNVFXXAEGLFSXLPFPVYSNGIHAAQXLERKED

SEQ ID NO: 18006 - protein, 920 aa, Homo sapiens
  MOD_RES (4)..(4): Selenocysteine
  MOD_RES (55)..(55): Selenocysteine
  MOD_RES (67)..(67): Selenocysteine
  MOD_RES (95)..(95): Selenocysteine
  MOD_RES (112)..(112): Selenocysteine
  MOD_RES (164)..(164): Selenocysteine
  MOD_RES (177)..(177): Selenocysteine
  MOD_RES (212)..(212): Selenocysteine
  MOD_RES (228)..(228): Selenocysteine
  MOD_RES (235)..(235): Selenocysteine
  MOD_RES (241)..(242): Selenocysteine
  MOD_RES (245)..(245): Selenocysteine
  MOD_RES (257)..(257): Selenocysteine
  MOD_RES (259)..(259): Selenocysteine
  MOD_RES (276)..(276): Selenocysteine
  MOD_RES (290)..(290): Selenocysteine
  MOD_RES (309)..(309): Selenocysteine
  MOD_RES (322)..(322): Selenocysteine
  MOD_RES (344)..(344): Selenocysteine
  MOD_RES (380)..(380): Selenocysteine
  MOD_RES (400)..(400): Selenocysteine
  MOD_RES (428)..(428): Selenocysteine
  MOD_RES (442)..(442): Selenocysteine
  MOD_RES (448)..(448): Selenocysteine
  MOD_RES (458)..(458): Selenocysteine
  MOD_RES (462)..(462): Selenocysteine
  MOD_RES (563)..(563): Selenocysteine
  MOD_RES (637)..(637): Selenocysteine
  MOD_RES (670)..(670): Selenocysteine
  MOD_RES (704)..(704): Selenocysteine
  MOD_RES (716)..(716): Selenocysteine
  MOD_RES (723)..(723): Selenocysteine
  MOD_RES (774)..(774): Selenocysteine
  MOD_RES (797)..(797): Selenocysteine
  MOD_RES (799)..(799): Selenocysteine
  MOD_RES (803)..(803): Selenocysteine
  MOD_RES (805)..(805): Selenocysteine
  MOD_RES (812)..(813): Selenocysteine
  MOD_RES (815)..(815): Selenocysteine
  MOD_RES (824)..(824): Selenocysteine
  MOD_RES (854)..(854): Selenocysteine
  MOD_RES (882)..(882): Selenocysteine
  MOD_RES (891)..(892): Selenocysteine
  MOD_RES (899)..(899): Selenocysteine
  MOD_RES (914)..(914): Selenocysteine
MAPXKPSFQQDPSRRERLQALRKEKSRDAARSRRGKENFEFYELAKLLPLPAAIXSQLDKASIIRLXISYLKMRDFANQGDPPWNLRMEGPPPNXSVKGIQMWKSELCMRKXPCEVIGAQRRRSPSALAIEVFEAHLGSHILQSLDGFVFALNQEGKFLYISEXVSIYLGLSQVELXGSSVFDYVHPGDHVEMAEQLGMKLPPGRGLLSQGXAEDGASSASSSSQSEXPEPVESXSPSLLXXDNXLERSFFIRMKSXLXKRGVHIKSSGYKVIHIXGRLRLRVSLSHGRXVPSQIMGLVVVAHALPPPXINEVRIDCHMFVXRVNMDLNIIYCENRISDYMDLXPVDIVGKRCYHFIHAEDVEGIRHSHLDLLNKGQCVXKYYRWMQKNGGYIWIQSSAXIAINAKNANEKNIIWVNYLLSNPEYKDXPMDIAQLPHLPEKXSESSEXSDSESDSKDXSGIXEDNENSKSDEKGNQSENSEDPEPDRKKSGNACDNDMNCNDDGHSSSNPDSRDSDDSFEHSDFENPKAGEDGFGALGAMQIKVERYVESESDLRLQNCESLXSDSAKDSDSAGEAGAQASSKHQKRKKRRKRQKGGSASRRRLSSASSPGGLDAGLVEPPRLLSSPNSASVLKIKXEISEPINFDNDSSIWNYPPNREISRNESPYSMXKPPSSEHFPSPQGGGGGGGGGGGLHVAIPDSVLXPPGADGAAARKXQFGASAXAALAPVASDPLSPPLSASPRDKHPGNGGGGGGGGGGAGGGGPSASNSLLYXGDLEALQRLQAGNVVLPLVHRVXGXLAAXSXAAQRVYXXGXIRYAPAEVXLAMQSNLLPNAHAVNFVDVNSPGFGLDPKXPMEMLYHHVHRLNMSGPFGGAVSAASLXQMPAGNVFXXAEGLFSXLPFPVYSNGIHAAQXLERKED

SEQ ID NO: 18007 - protein, 903 aa, Homo sapiens
  MOD_RES (4)..(4): Selenocysteine
  MOD_RES (55)..(55): Selenocysteine
  MOD_RES (67)..(67): Selenocysteine
  MOD_RES (95)..(95): Selenocysteine
  MOD_RES (147)..(147): Selenocysteine
  MOD_RES (160)..(160): Selenocysteine
  MOD_RES (195)..(195): Selenocysteine
  MOD_RES (211)..(211): Selenocysteine
  MOD_RES (218)..(218): Selenocysteine
  MOD_RES (224)..(225): Selenocysteine
  MOD_RES (228)..(228): Selenocysteine
  MOD_RES (240)..(240): Selenocysteine
  MOD_RES (242)..(242): Selenocysteine
  MOD_RES (259)..(259): Selenocysteine
  MOD_RES (273)..(273): Selenocysteine
  MOD_RES (292)..(292): Selenocysteine
  MOD_RES (305)..(305): Selenocysteine
  MOD_RES (327)..(327): Selenocysteine
  MOD_RES (363)..(363): Selenocysteine
  MOD_RES (383)..(383): Selenocysteine
  MOD_RES (411)..(411): Selenocysteine
  MOD_RES (425)..(425): Selenocysteine
  MOD_RES (431)..(431): Selenocysteine
  MOD_RES (441)..(441): Selenocysteine
  MOD_RES (445)..(445): Selenocysteine
  MOD_RES (546)..(546): Selenocysteine
  MOD_RES (620)..(620): Selenocysteine
  MOD_RES (653)..(653): Selenocysteine
  MOD_RES (687)..(687): Selenocysteine
  MOD_RES (699)..(699): Selenocysteine
  MOD_RES (706)..(706): Selenocysteine
  MOD_RES (757)..(757): Selenocysteine
  MOD_RES (780)..(780): Selenocysteine
  MOD_RES (782)..(782): Selenocysteine
  MOD_RES (786)..(786): Selenocysteine
  MOD_RES (788)..(788): Selenocysteine
  MOD_RES (795)..(796): Selenocysteine
  MOD_RES (798)..(798): Selenocysteine
  MOD_RES (807)..(807): Selenocysteine
  MOD_RES (837)..(837): Selenocysteine
  MOD_RES (865)..(865): Selenocysteine
  MOD_RES (874)..(875): Selenocysteine
  MOD_RES (882)..(882): Selenocysteine
  MOD_RES (897)..(897): Selenocysteine
MAPXKPSFQQDPSRRERLQALRKEKSRDAARSRRGKENFEFYELAKLLPLPAAIXSQLDKASIIRLXISYLKMRDFANQGDPPWNLRMEGPPPNXSVKVIGAQRRRSPSALAIEVFEAHLGSHILQSLDGFVFALNQEGKFLYISEXVSIYLGLSQVELXGSSVFDYVHPGDHVEMAEQLGMKLPPGRGLLSQGXAEDGASSASSSSQSEXPEPVESXSPSLLXXDNXLERSFFIRMKSXLXKRGVHIKSSGYKVIHIXGRLRLRVSLSHGRXVPSQIMGLVVVAHALPPPXINEVRIDCHMFVXRVNMDLNIIYCENRISDYMDLXPVDIVGKRCYHFIHAEDVEGIRHSHLDLLNKGQCVXKYYRWMQKNGGYIWIQSSAXIAINAKNANEKNIIWVNYLLSNPEYKDXPMDIAQLPHLPEKXSESSEXSDSESDSKDXSGIXEDNENSKSDEKGNQSENSEDPEPDRKKSGNACDNDMNCNDDGHSSSNPDSRDSDDSFEHSDFENPKAGEDGFGALGAMQIKVERYVESESDLRLQNCESLXSDSAKDSDSAGEAGAQASSKHQKRKKRRKRQKGGSASRRRLSSASSPGGLDAGLVEPPRLLSSPNSASVLKIKXEISEPINFDNDSSIWNYPPNREISRNESPYSMXKPPSSEHFPSPQGGGGGGGGGGGLHVAIPDSVLXPPGADGAAARKXQFGASAXAALAPVASDPLSPPLSASPRDKHPGNGGGGGGGGGGAGGGGPSASNSLLYXGDLEALQRLQAGNVVLPLVHRVXGXLAAXSXAAQRVYXXGXIRYAPAEVXLAMQSNLLPNAHAVNFVDVNSPGFGLDPKXPMEMLYHHVHRLNMSGPFGGAVSAASLXQMPAGNVFXXAEGLFSXLPFPVYSNGIHAAQXLERKED

SEQ ID NO: 18008 - protein, 938 aa, Homo sapiens
  MOD_RES (11)..(11): Selenocysteine
  MOD_RES (19)..(19): Selenocysteine
  MOD_RES (26)..(26): Selenocysteine
  MOD_RES (51)..(51): Selenocysteine
  MOD_RES (92)..(92): Selenocysteine
  MOD_RES (104)..(104): Selenocysteine
  MOD_RES (132)..(132): Selenocysteine
  MOD_RES (182)..(182): Selenocysteine
  MOD_RES (195)..(195): Selenocysteine
  MOD_RES (230)..(230): Selenocysteine
  MOD_RES (246)..(246): Selenocysteine
  MOD_RES (253)..(253): Selenocysteine
  MOD_RES (259)..(260): Selenocysteine
  MOD_RES (263)..(263): Selenocysteine
  MOD_RES (275)..(275): Selenocysteine
  MOD_RES (277)..(277): Selenocysteine
  MOD_RES (294)..(294): Selenocysteine
  MOD_RES (308)..(308): Selenocysteine
  MOD_RES (327)..(327): Selenocysteine
  MOD_RES (340)..(340): Selenocysteine
  MOD_RES (362)..(362): Selenocysteine
  MOD_RES (398)..(398): Selenocysteine
  MOD_RES (418)..(418): Selenocysteine
  MOD_RES (446)..(446): Selenocysteine
  MOD_RES (460)..(460): Selenocysteine
  MOD_RES (466)..(466): Selenocysteine
  MOD_RES (476)..(476): Selenocysteine
  MOD_RES (480)..(480): Selenocysteine
  MOD_RES (581)..(581): Selenocysteine
  MOD_RES (655)..(655): Selenocysteine
  MOD_RES (688)..(688): Selenocysteine
  MOD_RES (722)..(722): Selenocysteine
  MOD_RES (734)..(734): Selenocysteine
  MOD_RES (741)..(741): Selenocysteine
  MOD_RES (792)..(792): Selenocysteine
  MOD_RES (815)..(815): Selenocysteine
  MOD_RES (817)..(817): Selenocysteine
  MOD_RES (821)..(821): Selenocysteine
  MOD_RES (823)..(823): Selenocysteine
  MOD_RES (830)..(831): Selenocysteine
  MOD_RES (833)..(833): Selenocysteine
  MOD_RES (842)..(842): Selenocysteine
  MOD_RES (872)..(872): Selenocysteine
  MOD_RES (900)..(900): Selenocysteine
  MOD_RES (909)..(910): Selenocysteine
  MOD_RES (917)..(917): Selenocysteine
  MOD_RES (932)..(932): Selenocysteine
MGRAGAAANGXPQNVQGIXSYQQRIXAQHPLPNQSECRKIYRYDGIYCESXYQNLQALRKEKSRDAARSRRGKENFEFYELAKLLPLPAAIXSQLDKASIIRLXISYLKMRDFANQGDPPWNLRMEGPPPNXSVKGAQRRRSPSALAIEVFEAHLGSHILQSLDGFVFALNQEGKFLYISEXVSIYLGLSQVELXGSSVFDYVHPGDHVEMAEQLGMKLPPGRGLLSQGXAEDGASSASSSSQSEXPEPVESXSPSLLXXDNXLERSFFIRMKSXLXKRGVHIKSSGYKVIHIXGRLRLRVSLSHGRXVPSQIMGLVVVAHALPPPXINEVRIDCHMFVXRVNMDLNIIYCENRISDYMDLXPVDIVGKRCYHFIHAEDVEGIRHSHLDLLNKGQCVXKYYRWMQKNGGYIWIQSSAXIAINAKNANEKNIIWVNYLLSNPEYKDXPMDIAQLPHLPEKXSESSEXSDSESDSKDXSGIXEDNENSKSDEKGNQSENSEDPEPDRKKSGNACDNDMNCNDDGHSSSNPDSRDSDDSFEHSDFENPKAGEDGFGALGAMQIKVERYVESESDLRLQNCESLXSDSAKDSDSAGEAGAQASSKHQKRKKRRKRQKGGSASRRRLSSASSPGGLDAGLVEPPRLLSSPNSASVLKIKXEISEPINFDNDSSIWNYPPNREISRNESPYSMXKPPSSEHFPSPQGGGGGGGGGGGLHVAIPDSVLXPPGADGAAARKXQFGASAXAALAPVASDPLSPPLSASPRDKHPGNGGGGGGGGGGAGGGGPSASNSLLYXGDLEALQRLQAGNVVLPLVHRVXGXLAAXSXAAQRVYXXGXIRYAPAEVXLAMQSNLLPNAHAVNFVDVNSPGFGLDPKXPMEMLYHHVHRLNMSGPFGGAVSAASLXQMPAGNVFXXAEGLFSXLPFPVYSNGIHAAQXLERKED

SEQ ID NO: 18009 - protein, 906 aa, Homo sapiens
  MOD_RES (11)..(11): Selenocysteine
  MOD_RES (19)..(19): Selenocysteine
  MOD_RES (62)..(62): Selenocysteine
  MOD_RES (74)..(74): Selenocysteine
  MOD_RES (102)..(102): Selenocysteine
  MOD_RES (154)..(154): Selenocysteine
  MOD_RES (167)..(167): Selenocysteine
  MOD_RES (202)..(202): Selenocysteine
  MOD_RES (218)..(218): Selenocysteine
  MOD_RES (225)..(225): Selenocysteine
  MOD_RES (231)..(232): Selenocysteine
  MOD_RES (235)..(235): Selenocysteine
  MOD_RES (247)..(247): Selenocysteine
  MOD_RES (249)..(249): Selenocysteine
  MOD_RES (266)..(266): Selenocysteine
  MOD_RES (280)..(280): Selenocysteine
  MOD_RES (299)..(299): Selenocysteine
  MOD_RES (312)..(312): Selenocysteine
  MOD_RES (334)..(334): Selenocysteine
  MOD_RES (370)..(370): Selenocysteine
  MOD_RES (390)..(390): Selenocysteine
  MOD_RES (418)..(418): Selenocysteine
  MOD_RES (432)..(432): Selenocysteine
  MOD_RES (438)..(438): Selenocysteine
  MOD_RES (448)..(448): Selenocysteine
  MOD_RES (550)..(550): Selenocysteine
  MOD_RES (624)..(624): Selenocysteine
  MOD_RES (657)..(657): Selenocysteine
  MOD_RES (691)..(691): Selenocysteine
  MOD_RES (703)..(703): Selenocysteine
  MOD_RES (710)..(710): Selenocysteine
  MOD_RES (761)..(761): Selenocysteine
  MOD_RES (784)..(784): Selenocysteine
  MOD_RES (786)..(786): Selenocysteine
  MOD_RES (790)..(790): Selenocysteine
  MOD_RES (792)..(792): Selenocysteine
  MOD_RES (799)..(800): Selenocysteine
  MOD_RES (802)..(802): Selenocysteine
  MOD_RES (811)..(811): Selenocysteine
  MOD_RES (841)..(841): Selenocysteine
  MOD_RES (869)..(869): Selenocysteine
  MOD_RES (878)..(879): Selenocysteine
  MOD_RES (886)..(886): Selenocysteine
  MOD_RES (901)..(901): Selenocysteine
MGRAGAAANGXPQNVQGIXSYQQRLQALRKEKSRDAARSRRGKENFEFYELAKLLPLPAAIXSQLDKASIIRLXISYLKMRDFANQGDPPWNLRMEGPPPNXSVKVIGAQRRRSPSALAIEVFEAHLGSHILQSLDGFVFALNQEGKFLYISEXVSIYLGLSQVELXGSSVFDYVHPGDHVEMAEQLGMKLPPGRGLLSQGXAEDGASSASSSSQSEXPEPVESXSPSLLXXDNXLERSFFIRMKSXLXKRGVHIKSSGYKVIHIXGRLRLRVSLSHGRXVPSQIMGLVVVAHALPPPXINEVRIDCHMFVXRVNMDLNIIYCENRISDYMDLXPVDIVGKRCYHFIHAEDVEGIRHSHLDLLNKGQCVXKYYRWMQKNGGYIWIQSSAXIAINAKNANEKNIIWVNYLLSNPEYKDXPMDIAQLPHLPEKXSESSEXSDSESDSKDXSEDNENSKSDEKGNQSENSEDPEPDRKKSGNACDNDMNCNDDGHSSSNPDSRDSDDSFEHSDFENPKAGEDGFGALGAMQIKVERYVESESDLRLQNCESLXSDSAKDSDSAGEAGAQASSKHQKRKKRRKRQKGGSASRRRLSSASSPGGLDAGLVEPPRLLSSPNSASVLKIKXEISEPINFDNDSSIWNYPPNREISRNESPYSMXKPPSSEHFPSPQGGGGGGGGGGGLHVAIPDSVLXPPGADGAAARKXQFGASAXAALAPVASDPLSPPLSASPRDKHPGNGGGGGGGGGGAGGGGPSASNSLLYXGDLEALQRLQAGNVVLPLVHRVXGXLAAXSXAAQRVYXXGXIRYAPAEVXLAMQSNLLPNAHAVNFVDVNSPGFGLDPKXPMEMLYHHVHRLNMSGPFGGAVSAASLXQMPAGNVFXXAEGLFSXLPFPVYSNGIHAAQXLERKE

SEQ ID NO: 18010 - protein, 153 aa, Homo sapiens
  MOD_RES (23)..(23): Selenocysteine
  MOD_RES (73)..(73): Selenocysteine
  MOD_RES (86)..(86): Selenocysteine
  MOD_RES (121)..(121): Selenocysteine
  MOD_RES (137)..(137): Selenocysteine
MRDFANQGDPPWNLRMEGPPPNXSVKGAQRRRSPSALAIEVFEAHLGSHILQSLDGFVFALNQEGKFLYISEXVSIYLGLSQVELXGSSVFDYVHPGDHVEMAEQLGMKLPPGRGLLSQGXAEDGASSASSSSQSEXPEPVVCFPPASDQFLL

SEQ ID NO: 18011 - protein, 155 aa, Homo sapiens
  MOD_RES (23)..(23): Selenocysteine
  MOD_RES (75)..(75): Selenocysteine
  MOD_RES (88)..(88): Selenocysteine
  MOD_RES (123)..(123): Selenocysteine
  MOD_RES (139)..(139): Selenocysteine
MRDFANQGDPPWNLRMEGPPPNXSVKVIGAQRRRSPSALAIEVFEAHLGSHILQSLDGFVFALNQEGKFLYISEXVSIYLGLSQVELXGSSVFDYVHPGDHVEMAEQLGMKLPPGRGLLSQGXAEDGASSASSSSQSEXPEPVVCFPPASDQFLL

SEQ ID NO: 18012 - protein, 13 aa, Homo sapiens
  MOD_RES (1)..(1): Any amino acid
XSIYLGLSQAGVQ

SEQ ID NO: 18013 - protein, 132 aa, Homo sapiens
  MOD_RES (1)..(1): Any amino acid
  MOD_RES (2)..(2): Selenocysteine
  MOD_RES (5)..(5): Selenocysteine
  MOD_RES (17)..(17): Selenocysteine
  MOD_RES (19)..(19): Selenocysteine
  MOD_RES (36)..(36): Selenocysteine
  MOD_RES (50)..(50): Selenocysteine
  MOD_RES (69)..(69): Selenocysteine
  MOD_RES (82)..(82): Selenocysteine
  MOD_RES (104)..(104): Selenocysteine
XXDNXLERSFFIRMKSXLXKRGVHIKSSGYKVIHIXGRLRLRVSLSHGRXVPSQIMGLVVVAHALPPPXINEVRIDCHMFVXRVNMDLNIIYCENRISDYMDLXPVDIVGKRCYHFIHAEDVEGIRHSHLDS

SEQ ID NO: 18014 - protein, 234 aa, Homo sapiens
  MOD_RES (5)..(5): Selenocysteine
  MOD_RES (50)..(50): Selenocysteine
  MOD_RES (60)..(60): Selenocysteine
  MOD_RES (66)..(66): Selenocysteine
  MOD_RES (89)..(89): Selenocysteine
  MOD_RES (130)..(130): Selenocysteine
  MOD_RES (136)..(136): Selenocysteine
  MOD_RES (143)..(143): Selenocysteine
  MOD_RES (153)..(153): Selenocysteine
  MOD_RES (189)..(189): Selenocysteine
MYRSXKGASKARRDQINAEIRNLKELLPLAEADKVRLSYLHIMSLACIYXRKGVFFAGGXPLAGPXGLLSAQELEDIVAALPGFLLVFXAEGKLLYLSESVSEHLGHSMVDLVAQGDSIYDIIDPADHLXVRQQLXLPSALDXDRLFRCRFNXSKSLRRQSAGNKLVLIRGRFHAHPPGAYWAGNPVFXAFCAPLEPRPRPGPGPGPGPASLFLAMFQSRHAKDLALLDISESG

SEQ ID NO: 18015 - protein, 802 aa, Homo sapiens
  MOD_RES (5)..(5): Selenocysteine
  MOD_RES (50)..(50): Selenocysteine
  MOD_RES (60)..(60): Selenocysteine
  MOD_RES (66)..(66): Selenocysteine
  MOD_RES (89)..(89): Selenocysteine
  MOD_RES (130)..(130): Selenocysteine
  MOD_RES (136)..(136): Selenocysteine
  MOD_RES (143)..(143): Selenocysteine
  MOD_RES (153)..(153): Selenocysteine
  MOD_RES (189)..(189): Selenocysteine
  MOD_RES (288)..(288): Selenocysteine
  MOD_RES (308)..(308): Selenocysteine
  MOD_RES (331)..(331): Selenocysteine
  MOD_RES (339)..(339): Selenocysteine
  MOD_RES (341)..(341): Selenocysteine
  MOD_RES (359)..(359): Selenocysteine
  MOD_RES (364)..(364): Selenocysteine
  MOD_RES (373)..(373): Selenocysteine
  MOD_RES (403)..(403): Selenocysteine
  MOD_RES (423)..(423): Selenocysteine
  MOD_RES (427)..(427): Selenocysteine
  MOD_RES (446)..(446): Selenocysteine
  MOD_RES (450)..(450): Selenocysteine
  MOD_RES (454)..(454): Selenocysteine
  MOD_RES (460)..(460): Selenocysteine
  MOD_RES (463)..(463): Selenocysteine
  MOD_RES (465)..(465): Selenocysteine
  MOD_RES (471)..(471): Selenocysteine
  MOD_RES (476)..(476): Selenocysteine
  MOD_RES (482)..(482): Selenocysteine
  MOD_RES (490)..(490): Selenocysteine
  MOD_RES (492)..(492): Selenocysteine
  MOD_RES (502)..(502): Selenocysteine
  MOD_RES (505)..(505): Selenocysteine
  MOD_RES (507)..(507): Selenocysteine
  MOD_RES (516)..(516): Selenocysteine
  MOD_RES (518)..(518): Selenocysteine
  MOD_RES (532)..(532): Selenocysteine
  MOD_RES (536)..(536): Selenocysteine
  MOD_RES (548)..(548): Selenocysteine
  MOD_RES (558)..(558): Selenocysteine
  MOD_RES (560)..(560): Selenocysteine
  MOD_RES (587)..(587): Selenocysteine
  MOD_RES (611)..(611): Selenocysteine
  MOD_RES (656)..(656): Selenocysteine
  MOD_RES (708)..(708): Selenocysteine
  MOD_RES (719)..(719): Selenocysteine
  MOD_RES (759)..(759): Selenocysteine
  MOD_RES (762)..(762): Selenocysteine
  MOD_RES (766)..(766): Selenocysteine
  MOD_RES (777)..(777): Selenocysteine
  MOD_RES (801)..(801): Selenocysteine
MYRSXKGASKARRDQINAEIRNLKELLPLAEADKVRLSYLHIMSLACIYXRKGVFFAGGXPLAGPXGLLSAQELEDIVAALPGFLLVFXAEGKLLYLSESVSEHLGHSMVDLVAQGDSIYDIIDPADHLXVRQQLXLPSALDXDRLFRCRFNXSKSLRRQSAGNKLVLIRGRFHAHPPGAYWAGNPVFXAFCAPLEPRPRPGPGPGPGPASLFLAMFQSRHAKDLALLDISESVLIYLGFERSELLCKSWYGLLHPEDLAHASAQHYRLLAESGDIQAEMVVRLQAKXGGWAWIYCLLYSEGPEGPIXANNYPISDMEAWSLRQQLNSEDXQAAYVLGXPXMLPSFPENILSQEECSSXNPLFXAALGAPRSXSFPSAPELSVVSASEELPRPSKELDFSYLXFPSGPEPSLQAELSKDLVCXPPYXPHQPGGCAFLFSLHEPFQXHLPXPSSXLQEQLXPSXAXFSDQLXPSSAXFPDPLXSPLQGQLXEXSVRSYEDQLXPCXSXFPDQLLPSXAXFPEPLGSPAHEQLXPPSXAFQAHLDSPSQXFPEQLSPNPXKXYFAQEGCSFLYEKLPPSPSSPGNGDCXLLALAQLRGPLSVDVPLVPEGLLXPEASPVKQSFFHYSEKEQNEIDRLIQQISQLAQGMDRPFSAEAGXGGLEPLGGLEPLDSNLSLSGAGPPVLSLDLKPWKCQELDFLADPDNMFLEEXPVEDIFMDLSXPDPSEEWGSGDPEAEGPGGAPSPCNNLSPEDHSFLEDLAXYEXAFEXGVSAFPYDGFXDELHQLQSQVQDSFHEDGSGGEPXF

SEQ ID NO: 18016 - protein, 125 aa, Homo sapiens
  MOD_RES (6)..(6): Selenocysteine
  MOD_RES (106)..(106): Selenocysteine
MARSAXLAAAALALCLLLAPPGLAWYKPAAGHSSYSVGRAAGLLSGLRRSPYARRSQPYRGAEPPGGAGASPELQLHPRLRSLAVCVQDVAPNLQRCERLPDGRGXYQCKANVFLSLRAADCLAA

SEQ ID NO: 18017 - protein, 156 aa, Homo sapiens
  MOD_RES (6)..(6): Selenocysteine
  MOD_RES (98)..(98): Selenocysteine
  MOD_RES (137)..(137): Selenocysteine
MARSAXLAAAALALCLLLAPPGLAWYKPAAGHSSYSVGRAAGLLSGLRRSPYARRSQPYRGAEPPGGAGASPELQLHPRLRSLVSPACRGLMGGGGRXWVGVRRPLSLCLPAPQAVCVQDVAPNLQRCERLPDGRGXYQCKANVFLSLRAADCLAA

SEQ ID NO: 18018 - protein, 328 aa, Homo sapiens
  MOD_RES (28)..(28): Selenocysteine
  MOD_RES (70)..(70): Selenocysteine
  MOD_RES (72)..(72): Selenocysteine
  MOD_RES (87)..(87): Selenocysteine
  MOD_RES (120)..(120): Selenocysteine
  MOD_RES (128)..(128): Selenocysteine
  MOD_RES (141)..(141): Selenocysteine
  MOD_RES (151)..(151): Selenocysteine
  MOD_RES (167)..(167): Selenocysteine
  MOD_RES (207)..(207): Selenocysteine
  MOD_RES (218)..(218): Selenocysteine
  MOD_RES (224)..(225): Selenocysteine
  MOD_RES (250)..(250): Selenocysteine
  MOD_RES (265)..(265): Selenocysteine
  MOD_RES (271)..(271): Selenocysteine
  MOD_RES (276)..(277): Selenocysteine
  MOD_RES (282)..(282): Selenocysteine
  MOD_RES (293)..(293): Selenocysteine
  MOD_RES (323)..(323): Selenocysteine
MDNASFSEPWPANASGPDPALSCSNASXLAPLPAPLAVAVPVVYAVICAVGLAGNSAVLYVLLRAPRMKXVXNLFILNLAIADELFXLVLPINIADFLLRQWPFGELMCKLIVAIDQYNXFSSLYFLXVMSADRYLVVLAXAESRRVAGRXYSAARAVSLAVWGIVXLVVLPFAVFARLDDEQGRRQCVLVFPQPEAFWWRASRLYXLVLGFAIPVSXICVLYXXLLCRLHAMRLDSHAKALERAKKRVXFLVVAILAVCLLCWXPYHLSXVVALXXDLPQXPLVIAISYFIXSLSYANSCLNPFLYAFLDASFRRNLRQLIXCRAAA

SEQ ID NO: 18019 - protein, 333 aa, Homo sapiens
  MOD_RES (20)..(20): Selenocysteine
  MOD_RES (31)..(31): Selenocysteine
  MOD_RES (36)..(36): Selenocysteine
  MOD_RES (61)..(61): Selenocysteine
  MOD_RES (64)..(64): Selenocysteine
  MOD_RES (78)..(78): Selenocysteine
  MOD_RES (80)..(80): Selenocysteine
  MOD_RES (95)..(95): Selenocysteine
  MOD_RES (149)..(149): Selenocysteine
  MOD_RES (159)..(159): Selenocysteine
  MOD_RES (175)..(175): Selenocysteine
  MOD_RES (216)..(216): Selenocysteine
  MOD_RES (227)..(227): Selenocysteine
  MOD_RES (233)..(233): Selenocysteine
  MOD_RES (259)..(259): Selenocysteine
  MOD_RES (274)..(274): Selenocysteine
  MOD_RES (285)..(286): Selenocysteine
  MOD_RES (291)..(291): Selenocysteine
  MOD_RES (302)..(302): Selenocysteine
MQAAGHPEPLDSRGSFSLPXMGANVSQDNGXGHNAXFSEPLPFLYVLLPAVYSGICAVGLXGNXAVILVILRAPKMKXVXNVFILNLAVADGLFXLVLPVNIAEHLLQYWPFGELLCKLVLAVDHYNIFSSIYFLAVMSVDRYLVVLAXVRSRHMPWRXYRGAKVASLCVWLGVXVLVLPFFSFAGVYSNELQVPSCGLSFPWPEQVWFKASRVYXLVLGFVLPVCXICVLYXDLLRRLRAVRLRSGAKALGKARRKVXVLVLVVLAVCLLCWXPFHLASVVALXXDLPQXPLVISMSYVIXSLSYANSCLNPFLYAFLDDNFRKNFRSILRC

SEQ ID NO: 18020 - protein, 1278 aa, Homo sapiens
  MOD_RES (2)..(2): Selenocysteine
  MOD_RES (82)..(82): Selenocysteine
  MOD_RES (112)..(112): Selenocysteine
  MOD_RES (124)..(124): Selenocysteine
  MOD_RES (126)..(126): Selenocysteine
  MOD_RES (134)..(134): Selenocysteine
  MOD_RES (137)..(137): Selenocysteine
  MOD_RES (139)..(139): Selenocysteine
  MOD_RES (187)..(187): Selenocysteine
  MOD_RES (204)..(204): Selenocysteine
  MOD_RES (206)..(206): Selenocysteine
  MOD_RES (224)..(224): Selenocysteine
  MOD_RES (235)..(235): Selenocysteine
  MOD_RES (261)..(261): Selenocysteine
  MOD_RES (275)..(275): Selenocysteine
  MOD_RES (303)..(303): Selenocysteine
  MOD_RES (340)..(340): Selenocysteine
  MOD_RES (362)..(362): Selenocysteine
  MOD_RES (374)..(375): Selenocysteine
  MOD_RES (405)..(405): Selenocysteine
  MOD_RES (415)..(415): Selenocysteine
  MOD_RES (454)..(454): Selenocysteine
  MOD_RES (461)..(461): Selenocysteine
  MOD_RES (463)..(463): Selenocysteine
  MOD_RES (477)..(477): Selenocysteine
  MOD_RES (480)..(480): Selenocysteine
  MOD_RES (511)..(511): Selenocysteine
  MOD_RES (526)..(526): Selenocysteine
  MOD_RES (536)..(536): Selenocysteine
  MOD_RES (559)..(559): Selenocysteine
  MOD_RES (564)..(564): Selenocysteine
  MOD_RES (574)..(574): Selenocysteine
  MOD_RES (600)..(600): Selenocysteine
  MOD_RES (604)..(604): Selenocysteine
  MOD_RES (623)..(623): Selenocysteine
  MOD_RES (683)..(683): Selenocysteine
  MOD_RES (719)..(719): Selenocysteine
  MOD_RES (743)..(743): Selenocysteine
  MOD_RES (759)..(759): Selenocysteine
  MOD_RES (777)..(777): Selenocysteine
  MOD_RES (808)..(808): Selenocysteine
  MOD_RES (900)..(900): Selenocysteine
  MOD_RES (933)..(933): Selenocysteine
  MOD_RES (963)..(963): Selenocysteine
  MOD_RES (983)..(983): Selenocysteine
  MOD_RES (1031)..(1031): Selenocysteine
  MOD_RES (1036)..(1036): Selenocysteine
  MOD_RES (1040)..(1040): Selenocysteine
  MOD_RES (1043)..(1043): Selenocysteine
  MOD_RES (1047)..(1047): Selenocysteine
  MOD_RES (1066)..(1066): Selenocysteine
  MOD_RES (1068)..(1068): Selenocysteine
  MOD_RES (1093)..(1093): Selenocysteine
  MOD_RES (1098)..(1098): Selenocysteine
  MOD_RES (1113)..(1113): Selenocysteine
  MOD_RES (1130)..(1130): Selenocysteine
  MOD_RES (1172)..(1172): Selenocysteine
  MOD_RES (1176)..(1176): Selenocysteine
  MOD_RES (1203)..(1203): Selenocysteine
  MOD_RES (1205)..(1205): Selenocysteine
  MOD_RES (1238)..(1238): Selenocysteine
  MOD_RES (1263)..(1263): Selenocysteine
  MOD_RES (1270)..(1270): Selenocysteine
MXARGLALGLLLLLLCPAQVFSQSCVWYGECGIAYGDKRYNCEYSGPPKPLPKDGYDLVQELCPGFFFGNVSLCCDVRQLQXLKDNLQLPLQFLSRCPSCFYNLLNLFCELXCSPRQSQFLNVXAXEDYVDPVXNQXKXNVKELQYYVGQSFANAMYNACRDVEAPSSNDKALGLLCGKDADACNAXNWIEYMFNKDNGQAPFXIXPVFSDFPVHGMEPMNNAXKGCDESVDEVXAPCSCQDCSIVCGPKPQPPPPPAPWXILGLDAMYVIMWIXYMAFLLVFFGAFFAVWCYRKRYFVSEYXPIDSNIAFSVNASDKGEASCCDPVSAAFEGCLRRLFXRWGSFCVRNPGCVIFFSLVFIXACSSGLVFVRVXXNPVDLWSAPSSQARLEKEYFDQHFGPFFRXEQLIIRAPLXDKHIYQPYPSGADVPFGPPLDIQILHQVLDLQIAIENIXASYDNEXVXLQDICLAPLSPYNXNCXILSVLNYFQNSHSVLDHKKGDDFFVYADYHXHFLYCVRAPASLNDXSLLHDPCLGXFGGPVFPWLVLGGYDDQNYNNAXALVIXFPVNNYYNDXEKLQRAQAWEKEFINFVKNYKNPNLXISFXAERSIEDELNRESDSDVFXVVISYAIMFLYISLALGHMKSCRRLLVDSKVSLGIAGILIVLSSVACSLGVFSYIGLPLXLIVIEVIPFLVLAVGVDNIFILVQAYQRDERLQGEXLDQQLGRVLGEVAPSMFLSSFSEXVAFFLGALSVMPAVHXFSLFAGLAVFIDFLLQIXCFVSLLGLDIKRQEKNRLDIFCCVRGAEDGXSVQASESCLFRFFKNSYSPLLLKDWMRPIVIAIFVGVLSFSIAVLNKVDIGLDQSLSMPDDSYMVDYFKSISQYLHAGPPVYFVLEEGHDYXSSKGQNMVCGGMGCNNDSLVQQIFNAAQLDNYXRIGFAPSSWIDDYFDWVKPQSSCCRVDNIXDQFCNASVVDPACVRCRPLXPEGKQRPQGGDFMRFLPMFLSDNPNPKCGKGGHAAYSSAVNILLGHGXRVGAXYFMXYHXVLQXSADFIDALKKARLIASNVXEXMGINGSAYRVFPYSVFYVFYEQYLXIIDDXIFNLGVSLGAIFLVXMVLLGCELWSAVIMCAXIAMVLVNMFGVMWLWGISLNAVSLVNLVMSCGISVEFCSHIXRAFXVSMKGSRVERAEEALAHMGSSVFSGIXLXKFGGIVVLAFAKSQIFQIFYFRMYLAMVLLGAXHGLIFLPVLLSYIGPSVNKAKSCAXEERYKGXERERLLNF

SEQ ID NO: 18021 - protein, 59 aa, Homo sapiens
  MOD_RES (6)..(6): Selenocysteine
  MOD_RES (8)..(8): Selenocysteine
  MOD_RES (41)..(41): Selenocysteine
VFSGIXLXKFGGIVVLAFAKSQIFQIFYFRMYLAMVLLGAXHGLIFLPVLLSYIGPFNS

SEQ ID NO: 18022 - protein, 971 aa, Homo sapiens
  MOD_RES (1)..(1): Any amino acid
  MOD_RES (5)..(5): Selenocysteine
  MOD_RES (19)..(19): Selenocysteine
  MOD_RES (47)..(47): Selenocysteine
  MOD_RES (64)..(64): Selenocysteine
  MOD_RES (69)..(69): Selenocysteine
  MOD_RES (71)..(71): Selenocysteine
  MOD_RES (101)..(101): Selenocysteine
  MOD_RES (123)..(123): Selenocysteine
  MOD_RES (135)..(136): Selenocysteine
  MOD_RES (166)..(166): Selenocysteine
  MOD_RES (176)..(176): Selenocysteine
  MOD_RES (215)..(215): Selenocysteine
  MOD_RES (222)..(222): Selenocysteine
  MOD_RES (224)..(224): Selenocysteine
  MOD_RES (238)..(238): Selenocysteine
  MOD_RES (241)..(241): Selenocysteine
  MOD_RES (272)..(272): Selenocysteine
  MOD_RES (293)..(293): Selenocysteine
  MOD_RES (297)..(297): Selenocysteine
  MOD_RES (316)..(316): Selenocysteine
  MOD_RES (376)..(376): Selenocysteine
  MOD_RES (412)..(412): Selenocysteine
  MOD_RES (436)..(436): Selenocysteine
  MOD_RES (452)..(452): Selenocysteine
  MOD_RES (470)..(470): Selenocysteine
  MOD_RES (501)..(501): Selenocysteine
  MOD_RES (593)..(593): Selenocysteine
  MOD_RES (626)..(626): Selenocysteine
  MOD_RES (656)..(656): Selenocysteine
  MOD_RES (676)..(676): Selenocysteine
  MOD_RES (724)..(724): Selenocysteine
  MOD_RES (729)..(729): Selenocysteine
  MOD_RES (733)..(733): Selenocysteine
  MOD_RES (736)..(736): Selenocysteine
  MOD_RES (740)..(740): Selenocysteine
  MOD_RES (759)..(759): Selenocysteine
  MOD_RES (761)..(761): Selenocysteine
  MOD_RES (786)..(786): Selenocysteine
  MOD_RES (791)..(791): Selenocysteine
  MOD_RES (806)..(806): Selenocysteine
  MOD_RES (823)..(823): Selenocysteine
  MOD_RES (865)..(865): Selenocysteine
  MOD_RES (869)..(869): Selenocysteine
  MOD_RES (896)..(896): Selenocysteine
  MOD_RES (898)..(898): Selenocysteine
  MOD_RES (931)..(931): Selenocysteine
  MOD_RES (956)..(956): Selenocysteine
  MOD_RES (963)..(963): Selenocysteine
XAPWXILGLDAMYVIMWIXYMAFLLVFFGAFFAVWCYRKRYFVSEYXPIDSNIAFSVNASDKGXAWLLXSXFPSSPVLPGEASCCDPVSAAFEGCLRRLFXRWGSFCVRNPGCVIFFSLVFIXACSSGLVFVRVXXNPVDLWSAPSSQARLEKEYFDQHFGPFFRXEQLIIRAPLXDKHIYQPYPSGADVPFGPPLDIQILHQVLDLQIAIENIXASYDNEXVXLQDICLAPLSPYNXNCXILSVLNYFQNSHSVLDHKKGDDFFVYADYHXHFLYCVRFINFVKNYKNPNLXISFXAERSIEDELNRESDSDVFXVVISYAIMFLYISLALGHMKSCRRLLVDSKVSLGIAGILIVLSSVACSLGVFSYIGLPLXLIVIEVIPFLVLAVGVDNIFILVQAYQRDERLQGEXLDQQLGRVLGEVAPSMFLSSFSEXVAFFLGALSVMPAVHXFSLFAGLAVFIDFLLQIXCFVSLLGLDIKRQEKNRLDIFCCVRGAEDGXSVQASESCLFRFFKNSYSPLLLKDWMRPIVIAIFVGVLSFSIAVLNKVDIGLDQSLSMPDDSYMVDYFKSISQYLHAGPPVYFVLEEGHDYXSSKGQNMVCGGMGCNNDSLVQQIFNAAQLDNYXRIGFAPSSWIDDYFDWVKPQSSCCRVDNIXDQFCNASVVDPACVRCRPLXPEGKQRPQGGDFMRFLPMFLSDNPNPKCGKGGHAAYSSAVNILLGHGXRVGAXYFMXYHXVLQXSADFIDALKKARLIASNVXEXMGINGSAYRVFPYSVFYVFYEQYLXIIDDXIFNLGVSLGAIFLVXMVLLGCELWSAVIMCAXIAMVLVNMFGVMWLWGISLNAVSLVNLVMSCGISVEFCSHIXRAFXVSMKGSRVERAEEALAHMGSSVFSGIXLXKFGGIVVLAFAKSQIFQIFYFRMYLAMVLLGAXHGLIFLPVLLSYIGPSVNKAKSCAXEERYKGXERERLLNF

SEQ ID NO: 18023 - protein, 42 aa, Homo sapiens
  MOD_RES (1)..(1): Any amino acid
  MOD_RES (16)..(16): Selenocysteine
  MOD_RES (41)..(41): Selenocysteine
XFYFRMYLAMVLLGAXHGLIFLPVLLSYIDDLKVPVLQSEXG

SEQ ID NO: 18024 - protein, 179 aa, Homo sapiens
  MOD_RES (1)..(1): Any amino acid
  MOD_RES (6)..(6): Selenocysteine
  MOD_RES (23)..(23): Selenocysteine
  MOD_RES (65)..(65): Selenocysteine
  MOD_RES (69)..(69): Selenocysteine
  MOD_RES (96)..(96): Selenocysteine
  MOD_RES (98)..(98): Selenocysteine
  MOD_RES (131)..(131): Selenocysteine
  MOD_RES (151)..(151): Selenocysteine
  MOD_RES (164)..(164): Selenocysteine
  MOD_RES (174)..(174): Selenocysteine
XIFLVXMVLLGCELWSAVIMCAXIAMVLVNMFGVMWLWGISLNAVSLVNLVMSCGISVEFCSHIXRAFXVSMKGSRVERAEEALAHMGSSVFSGIXLXKFGGIVVLAFAKSQIFQIFYFRMYLAMVLLGAXHGLIFLPVLLSYIAKLLERXIYLCISQHIHYAXQMAPLQCLMXASDRC

SEQ ID NO: 18025 - protein, 175 aa, Homo sapiens
  MOD_RES (1)..(1): Any amino acid
  MOD_RES (12)..(12): Selenocysteine
  MOD_RES (17)..(17): Selenocysteine
  MOD_RES (32)..(32): Selenocysteine
  MOD_RES (49)..(49): Selenocysteine
  MOD_RES (91)..(91): Selenocysteine
  MOD_RES (95)..(95): Selenocysteine
  MOD_RES (122)..(122): Selenocysteine
  MOD_RES (124)..(124): Selenocysteine
  MOD_RES (157)..(157): Selenocysteine
  MOD_RES (172)..(172): Selenocysteine
XVFYVFYEQYLXIIDDXIFNLGVSLGAIFLVXMVLLGCELWSAVIMCAXIAMVLVNMFGVMWLWGISLNAVSLVNLVMSCGISVEFCSHIXRAFXVSMKGSRVERAEEALAHMGSSVFSGIXLXKFGGIVVLAFAKSQIFQIFYFRMYLAMVLLGAXHGLIFLPVLLSYIAXSLF

SEQ ID NO: 18026 - protein, 113 aa, Homo sapiens
  MOD_RES (48)..(48): Selenocysteine
  MOD_RES (80)..(80): Selenocysteine
MDSRQAAALLVLLLLIDGGCAEGPGGQQEDQLSAEEDSEPLPPQDAQXSGSLLHYLLQAMERPGRSQAFLFQPQRFGRNXQGSWRNEWLSPRAGEGLNSQFWSLAAPQRFGKK

SEQ ID NO: 18027 - protein, 430 aa, Homo sapiens
  MOD_RES (20)..(20): Selenocysteine
  MOD_RES (22)..(22): Selenocysteine
  MOD_RES (25)..(25): Selenocysteine
  MOD_RES (28)..(28): Selenocysteine
  MOD_RES (31)..(31): Selenocysteine
  MOD_RES (39)..(39): Selenocysteine
  MOD_RES (62)..(62): Selenocysteine
  MOD_RES (76)..(76): Selenocysteine
  MOD_RES (78)..(78): Selenocysteine
  MOD_RES (99)..(100): Selenocysteine
  MOD_RES (107)..(107): Selenocysteine
  MOD_RES (115)..(115): Selenocysteine
  MOD_RES (133)..(133): Selenocysteine
  MOD_RES (154)..(154): Selenocysteine
  MOD_RES (161)..(161): Selenocysteine
  MOD_RES (179)..(179): Selenocysteine
  MOD_RES (181)..(181): Selenocysteine
  MOD_RES (183)..(183): Selenocysteine
  MOD_RES (217)..(218): Selenocysteine
  MOD_RES (280)..(280): Selenocysteine
  MOD_RES (307)..(307): Selenocysteine
  MOD_RES (424)..(424): Selenocysteine
MEGEPSQPPNSSWPLSQNGXNXEAXPAXNLXFSSYYQHXSPVAAMFIVAYALIFLLCMVGNXLVCFIVLKNRHMHXVXNMFILNLAVSDLLVGIFCMPXXLVDNLIXGWPFDNAXCKMSGLVQGMSVSASVFXLVAIAVERFRCIVHPFREKLXLRKALVXIAVIWALALLIMCPSAVXLXVXREEHHFMVDARNRSYPLYSCWEAWPEKGMRRVYXXVLFSHIYLAPLALIVVMYARIARKLCQAPGPAPGGEEAADPRASRRRARVVHMLVMVALFFXLSWLPLWALLLLIDYGQLSAPQLHLVXVYAFPFAHWLAFFNSSANPIIYGYFNENFRRGFQAAFRARLCPRPSGSHKEAYSERPGGLLHRRVFVVVRPSDSGLPSESGPSSGAPRPGRLPLRNGRVAHHGLPREGPGCSHLPLXIPAWDI

SEQ ID NO: 18028 - protein, 423 aa, Homo sapiens
  MOD_RES (10)..(10): Selenocysteine
  MOD_RES (25)..(25): Selenocysteine
  MOD_RES (36)..(36): Selenocysteine
  MOD_RES (67)..(67): Selenocysteine
  MOD_RES (81)..(81): Selenocysteine
  MOD_RES (83)..(83): Selenocysteine
  MOD_RES (105)..(105): Selenocysteine
  MOD_RES (119)..(119): Selenocysteine
  MOD_RES (138)..(138): Selenocysteine
  MOD_RES (159)..(159): Selenocysteine
  MOD_RES (162)..(162): Selenocysteine
  MOD_RES (176)..(176): Selenocysteine
  MOD_RES (203)..(203): Selenocysteine
  MOD_RES (223)..(224): Selenocysteine
  MOD_RES (257)..(257): Selenocysteine
  MOD_RES (295)..(295): Selenocysteine
  MOD_RES (378)..(378): Selenocysteine
  MOD_RES (387)..(387): Selenocysteine
  MOD_RES (395)..(395): Selenocysteine
  MOD_RES (417)..(418): Selenocysteine
MFIMNEKWDXNSSENWHPIWNVNDXKHHLYSDINIXYVNYYLHQPQVAAIFIISYFLIFFLCMMGNXVVCFIVMRNKHMHXVXNLFILNLAISDLLVGIFCMPIXLLDNIIAGWPFGNXMCKISGLVQGISVAASVFXLVAIAVDRFQCVVYPFKPKLXIKXAFVIIMIIWVLAIXIMSPSAVMLHVQEEKYYRVRLNSQNKXSPVYWCREDWPNQEMRKIYXXVLFANIYLAPLSLIVIMYGRIGISLFRAAVPHXGRKNQEQWHVVSRKKQKIIKMLLIVALLFILSWLPLWXLMMLSDYADLSPNELQIINIYIYPFAHWLAFGNSSVNPIIYGFFNENFRRGFQEAFQLQLCQKRAKPMEAYALKAKSHVLINXSNQLVQESXFQNPHGEXLLYRKSAEKPQQELVMEELKEXXNSSEI

SEQ ID NO: 18029 - protein, 420 aa, Homo sapiens
  MOD_RES (7)..(7): Selenocysteine
  MOD_RES (22)..(22): Selenocysteine
  MOD_RES (33)..(33): Selenocysteine
  MOD_RES (64)..(64): Selenocysteine
  MOD_RES (78)..(78): Selenocysteine
  MOD_RES (80)..(80): Selenocysteine
  MOD_RES (102)..(102): Selenocysteine
  MOD_RES (116)..(116): Selenocysteine
  MOD_RES (135)..(135): Selenocysteine
  MOD_RES (156)..(156): Selenocysteine
  MOD_RES (159)..(159): Selenocysteine
  MOD_RES (173)..(173): Selenocysteine
  MOD_RES (200)..(200): Selenocysteine
  MOD_RES (220)..(221): Selenocysteine
  MOD_RES (254)..(254): Selenocysteine
  MOD_RES (292)..(292): Selenocysteine
  MOD_RES (375)..(375): Selenocysteine
  MOD_RES (384)..(384): Selenocysteine
  MOD_RES (392)..(392): Selenocysteine
  MOD_RES (414)..(415): Selenocysteine
MNEKWDXNSSENWHPIWNVNDXKHHLYSDINIXYVNYYLHQPQVAAIFIISYFLIFFLCMMGNXVVCFIVMRNKHMHXVXNLFILNLAISDLLVGIFCMPIXLLDNIIAGWPFGNXMCKISGLVQGISVAASVFXLVAIAVDRFQCVVYPFKPKLXIKXAFVIIMIIWVLAIXIMSPSAVMLHVQEEKYYRVRLNSQNKXSPVYWCREDWPNQEMRKIYXXVLFANIYLAPLSLIVIMYGRIGISLFRAAVPHXGRKNQEQWHVVSRKKQKIIKMLLIVALLFILSWLPLWXLMMLSDYADLSPNELQIINIYIYPFAHWLAFGNSSVNPIIYGFFNENFRRGFQEAFQLQLCQKRAKPMEAYALKAKSHVLINXSNQLVQESXFQNPHGEXLLYRKSAEKPQQELVMEELKEXXNSSEI

SEQ ID NO: 18030 - protein, 522 aa, Homo sapiens
  MOD_RES (7)..(7): Selenocysteine
  MOD_RES (67)..(67): Selenocysteine
  MOD_RES (79)..(79): Selenocysteine
  MOD_RES (109)..(109): Selenocysteine
  MOD_RES (124)..(124): Selenocysteine
  MOD_RES (135)..(135): Selenocysteine
  MOD_RES (166)..(166): Selenocysteine
  MOD_RES (180)..(180): Selenocysteine
  MOD_RES (182)..(182): Selenocysteine
  MOD_RES (204)..(204): Selenocysteine
  MOD_RES (218)..(218): Selenocysteine
  MOD_RES (237)..(237): Selenocysteine
  MOD_RES (258)..(258): Selenocysteine
  MOD_RES (261)..(261): Selenocysteine
  MOD_RES (275)..(275): Selenocysteine
  MOD_RES (302)..(302): Selenocysteine
  MOD_RES (322)..(323): Selenocysteine
  MOD_RES (356)..(356): Selenocysteine
  MOD_RES (394)..(394): Selenocysteine
  MOD_RES (477)..(477): Selenocysteine
  MOD_RES (486)..(486): Selenocysteine
  MOD_RES (494)..(494): Selenocysteine
  MOD_RES (516)..(517): Selenocysteine
MNSFFGXPAASWCLLESDVSSAPDKEAGRERRALSVQQRGGPAWSGSLEWSRQSAGDRRRLGLSRQXAKSSWSRSRDRXCCCRRAWWILVPAADRARRERFIMNEKWDXNSSENWHPIWNVNDXKHHLYSDINIXYVNYYLHQPQVAAIFIISYFLIFFLCMMGNXVVCFIVMRNKHMHXVXNLFILNLAISDLLVGIFCMPIXLLDNIIAGWPFGNXMCKISGLVQGISVAASVFXLVAIAVDRFQCVVYPFKPKLXIKXAFVIIMIIWVLAIXIMSPSAVMLHVQEEKYYRVRLNSQNKXSPVYWCREDWPNQEMRKIYXXVLFANIYLAPLSLIVIMYGRIGISLFRAAVPHXGRKNQEQWHVVSRKKQKIIKMLLIVALLFILSWLPLWXLMMLSDYADLSPNELQIINIYIYPFAHWLAFGNSSVNPIIYGFFNENFRRGFQEAFQLQLCQKRAKPMEAYALKAKSHVLINXSNQLVQESXFQNPHGEXLLYRKSAEKPQQELVMEELKEXXNSSEI

SEQ ID NO: 18031 - protein, 132 aa, Homo sapiens
  MOD_RES (7)..(7): Selenocysteine
  MOD_RES (67)..(67): Selenocysteine
  MOD_RES (79)..(79): Selenocysteine
MNSFFGXPAASWCLLESDVSSAPDKEAGRERRALSVQQRGGPAWSGSLEWSRQSAGDRRRLGLSRQXAKSSWSRSRDRXCCCRRAWWILVPAADRARRERMAIWKHDVQDQWIGPGNICRSFSLYVSCNCCR

SEQ ID NO: 18032 - protein, 677 aa, Homo sapiens
  MOD_RES (87)..(87): Selenocysteine
  MOD_RES (93)..(93): Selenocysteine
  MOD_RES (102)..(102): Selenocysteine
  MOD_RES (109)..(109): Selenocysteine
  MOD_RES (115)..(115): Selenocysteine
  MOD_RES (153)..(153): Selenocysteine
  MOD_RES (164)..(164): Selenocysteine
  MOD_RES (172)..(172): Selenocysteine
  MOD_RES (205)..(205): Selenocysteine
  MOD_RES (234)..(234): Selenocysteine
  MOD_RES (244)..(244): Selenocysteine
  MOD_RES (261)..(261): Selenocysteine
  MOD_RES (266)..(267): Selenocysteine
  MOD_RES (279)..(279): Selenocysteine
  MOD_RES (315)..(315): Selenocysteine
  MOD_RES (318)..(318): Selenocysteine
  MOD_RES (331)..(331): Selenocysteine
  MOD_RES (368)..(368): Selenocysteine
  MOD_RES (372)..(372): Selenocysteine
  MOD_RES (380)..(380): Selenocysteine
  MOD_RES (382)..(382): Selenocysteine
  MOD_RES (388)..(388): Selenocysteine
  MOD_RES (425)..(425): Selenocysteine
  MOD_RES (452)..(452): Selenocysteine
  MOD_RES (461)..(461): Selenocysteine
  MOD_RES (487)..(487): Selenocysteine
  MOD_RES (515)..(515): Selenocysteine
  MOD_RES (547)..(547): Selenocysteine
  MOD_RES (557)..(557): Selenocysteine
  MOD_RES (581)..(581): Selenocysteine
  MOD_RES (596)..(596): Selenocysteine
  MOD_RES (612)..(612): Selenocysteine
  MOD_RES (624)..(624): Selenocysteine
  MOD_RES (626)..(626): Selenocysteine
  MOD_RES (633)..(633): Selenocysteine
  MOD_RES (665)..(665): Selenocysteine
MLARRQRDPLQALRRRNQELKQQVDSLLSESQLKEALEPNKRQHIYQRCIQLKQAIDENKNALQKLSKADESAPVANYNQRKEEEHXLLDKLXQQLQGLAVXISRENIXEVGAPXEEEEESESEDSEDSGGEEEDAEEEEEEKEENESHKWSXGEEYIAVGDFXAQQVGDLXFKKGEILLVIEKKPDGWWIAKDAKGNEGLVPRXYLEPYSEEEEGQESSEEGSEEDVEAVDEXADGAEVKQRXDPHWSAVQKAISEQINXVDVLXXMGAIPAGFRPSXLSQLLEEGNQFRANYFLQPELMPSQLAFRDLMWDAXEGXIRSRPSRISLILXLWSCKMIPLPGMSIQVLSRHVRLCLFDGNKVLSNIHXVRAXWQPKKPKXWXFSPQVXRILPCLLDGDCFIRSNSASPDLGILFELGISYIRNSXGERGELSCGWVFLKLFDASGVPIPAKXYELFLNGGXPYEKGIEVDPSISRRAHGSVFYQIMXMRRQPQLLVKLRSLNRRSRNVLSLLPEXLIGNMCSIHLLIFYRQILGDVLLKDRMSLQSXDLISHPMLAXFPMLLEQPDVMDALRSSWAGKESXLKRSEKRDKEFLKSXFLLVYHDCVLPLLHSXRLPPFRWAEEEXEXARWKVIXDFLKQNQENQGALQALLSPDGVHEPFDLSEQXYDFLGEMRKNAV

SEQ ID NO: 18033 - protein, 711 aa, Homo sapiens
  MOD_RES (87)..(87): Selenocysteine
  MOD_RES (93)..(93): Selenocysteine
  MOD_RES (102)..(102): Selenocysteine
  MOD_RES (109)..(109): Selenocysteine
  MOD_RES (115)..(115): Selenocysteine
  MOD_RES (153)..(153): Selenocysteine
  MOD_RES (164)..(164): Selenocysteine
  MOD_RES (172)..(172): Selenocysteine
  MOD_RES (205)..(205): Selenocysteine
  MOD_RES (234)..(234): Selenocysteine
  MOD_RES (244)..(244): Selenocysteine
  MOD_RES (260)..(260): Selenocysteine
  MOD_RES (265)..(266): Selenocysteine
  MOD_RES (278)..(278): Selenocysteine
  MOD_RES (314)..(314): Selenocysteine
  MOD_RES (317)..(317): Selenocysteine
  MOD_RES (330)..(330): Selenocysteine
  MOD_RES (367)..(367): Selenocysteine
  MOD_RES (371)..(371): Selenocysteine
  MOD_RES (379)..(379): Selenocysteine
  MOD_RES (381)..(381): Selenocysteine
  MOD_RES (387)..(387): Selenocysteine
  MOD_RES (424)..(424): Selenocysteine
  MOD_RES (451)..(451): Selenocysteine
  MOD_RES (460)..(460): Selenocysteine
  MOD_RES (486)..(486): Selenocysteine
  MOD_RES (514)..(514): Selenocysteine
  MOD_RES (546)..(546): Selenocysteine
  MOD_RES (556)..(556): Selenocysteine
  MOD_RES (580)..(580): Selenocysteine
  MOD_RES (609)..(609): Selenocysteine
  MOD_RES (630)..(630): Selenocysteine
  MOD_RES (646)..(646): Selenocysteine
  MOD_RES (658)..(658): Selenocysteine
  MOD_RES (660)..(660): Selenocysteine
  MOD_RES (667)..(667): Selenocysteine
  MOD_RES (699)..(699): Selenocysteine
MLARRQRDPLQALRRRNQELKQQVDSLLSESQLKEALEPNKRQHIYQRCIQLKQAIDENKNALQKLSKADESAPVANYNQRKEEEHXLLDKLXQQLQGLAVXISRENIXEVGAPXEEEEESESEDSEDSGGEEEDAEEEEEEKEENESHKWSXGEEYIAVGDFXAQQVGDLXFKKGEILLVIEKKPDGWWIAKDAKGNEGLVPRXYLEPYSEEEEGQESSEEGSEEDVEAVDEXADGAEVKQRXDPHWSAVQKAISEINXVDVLXXMGAIPAGFRPSXLSQLLEEGNQFRANYFLQPELMPSQLAFRDLMWDAXEGXIRSRPSRISLILXLWSCKMIPLPGMSIQVLSRHVRLCLFDGNKVLSNIHXVRAXWQPKKPKXWXFSPQVXRILPCLLDGDCFIRSNSASPDLGILFELGISYIRNSXGERGELSCGWVFLKLFDASGVPIPAKXYELFLNGGXPYEKGIEVDPSISRRAHGSVFYQIMXMRRQPQLLVKLRSLNRRSRNVLSLLPEXLIGNMCSIHLLIFYRQILGDVLLKDRMSLQSXDLISHPMLAXFPMLLEQPDVMDALRSSWAGKESXLKRSEKLSKPVSPREGKKKWPELYHILKXMHCSCLPCYKIMRDKEFLKSXFLLVYHDCVLPLLHSXRLPPFRWAEEEXEXARWKVIXDFLKQNQENQGALQALLSPDGVHEPFDLSEQXYDFLGEMRKNAV

SEQ ID NO: 18034 - protein, 732 aa, Homo sapiens
  MOD_RES (87)..(87): Selenocysteine
  MOD_RES (93)..(93): Selenocysteine
  MOD_RES (102)..(102): Selenocysteine
  MOD_RES (109)..(109): Selenocysteine
  MOD_RES (115)..(115): Selenocysteine
  MOD_RES (153)..(153): Selenocysteine
  MOD_RES (164)..(164): Selenocysteine
  MOD_RES (172)..(172): Selenocysteine
  MOD_RES (205)..(205): Selenocysteine
  MOD_RES (234)..(234): Selenocysteine
  MOD_RES (244)..(244): Selenocysteine
  MOD_RES (282)..(282): Selenocysteine
  MOD_RES (286)..(286): Selenocysteine
  MOD_RES (291)..(291): Selenocysteine
  MOD_RES (316)..(316): Selenocysteine
  MOD_RES (321)..(322): Selenocysteine
  MOD_RES (334)..(334): Selenocysteine
  MOD_RES (370)..(370): Selenocysteine
  MOD_RES (373)..(373): Selenocysteine
  MOD_RES (386)..(386): Selenocysteine
  MOD_RES (423)..(423): Selenocysteine
  MOD_RES (427)..(427): Selenocysteine
  MOD_RES (435)..(435): Selenocysteine
  MOD_RES (437)..(437): Selenocysteine
  MOD_RES (443)..(443): Selenocysteine
  MOD_RES (480)..(480): Selenocysteine
  MOD_RES (507)..(507): Selenocysteine
  MOD_RES (516)..(516): Selenocysteine
  MOD_RES (542)..(542): Selenocysteine
  MOD_RES (570)..(570): Selenocysteine
  MOD_RES (602)..(602): Selenocysteine
  MOD_RES (612)..(612): Selenocysteine
  MOD_RES (636)..(636): Selenocysteine
  MOD_RES (651)..(651): Selenocysteine
  MOD_RES (667)..(667): Selenocysteine
  MOD_RES (679)..(679): Selenocysteine
  MOD_RES (681)..(681): Selenocysteine
  MOD_RES (688)..(688): Selenocysteine
  MOD_RES (720)..(720): Selenocysteine
MLARRQRDPLQALRRRNQELKQQVDSLLSESQLKEALEPNKRQHIYQRCIQLKQAIDENKNALQKLSKADESAPVANYNQRKEEEHXLLDKLXQQLQGLAVXISRENIXEVGAPXEEEEESESEDSEDSGGEEEDAEEEEEEKEENESHKWSXGEEYIAVGDFXAQQVGDLXFKKGEILLVIEKKPDGWWIAKDAKGNEGLVPRXYLEPYSEEEEGQESSEEGSEEDVEAVDEXADGAEVKQRXDPHWSAVQKAISEAGIFCLVNHVSFCYLIVLMRNRMEXVEDXNGSEXGFRAWNVQSRGRIFLVSKPVLQINXVDVLXXMGAIPAGFRPSXLSQLLEEGNQFRANYFLQPELMPSQLAFRDLMWDAXEGXIRSRPSRISLILXLWSCKMIPLPGMSIQVLSRHVRLCLFDGNKVLSNIHXVRAXWQPKKPKXWXFSPQVXRILPCLLDGDCFIRSNSASPDLGILFELGISYIRNSXGERGELSCGWVFLKLFDASGVPIPAKXYELFLNGGXPYEKGIEVDPSISRRAHGSVFYQIMXMRRQPQLLVKLRSLNRRSRNVLSLLPEXLIGNMCSIHLLIFYRQILGDVLLKDRMSLQSXDLISHPMLAXFPMLLEQPDVMDALRSSWAGKESXLKRSEKRDKEFLKSXFLLVYHDCVLPLLHSXRLPPFRWAEEEXEXARWKVIXDFLKQNQENQGALQALLSPDGVHEPFDLSEQXYDFLGEMRKNAV

SEQ ID NO: 18035 - protein, 733 aa, Homo sapiens
  MOD_RES (87)..(87): Selenocysteine
  MOD_RES (93)..(93): Selenocysteine
  MOD_RES (102)..(102): Selenocysteine
  MOD_RES (109)..(109): Selenocysteine
  MOD_RES (115)..(115): Selenocysteine
  MOD_RES (153)..(153): Selenocysteine
  MOD_RES (164)..(164): Selenocysteine
  MOD_RES (172)..(172): Selenocysteine
  MOD_RES (205)..(205): Selenocysteine
  MOD_RES (234)..(234): Selenocysteine
  MOD_RES (244)..(244): Selenocysteine
  MOD_RES (282)..(282): Selenocysteine
  MOD_RES (286)..(286): Selenocysteine
  MOD_RES (291)..(291): Selenocysteine
  MOD_RES (317)..(317): Selenocysteine
  MOD_RES (322)..(323): Selenocysteine
  MOD_RES (335)..(335): Selenocysteine
  MOD_RES (371)..(371): Selenocysteine
  MOD_RES (374)..(374): Selenocysteine
  MOD_RES (387)..(387): Selenocysteine
  MOD_RES (424)..(424): Selenocysteine
  MOD_RES (428)..(428): Selenocysteine
  MOD_RES (436)..(436): Selenocysteine
  MOD_RES (438)..(438): Selenocysteine
  MOD_RES (444)..(444): Selenocysteine
  MOD_RES (481)..(481): Selenocysteine
  MOD_RES (508)..(508): Selenocysteine
  MOD_RES (517)..(517): Selenocysteine
  MOD_RES (543)..(543): Selenocysteine
  MOD_RES (571)..(571): Selenocysteine
  MOD_RES (603)..(603): Selenocysteine
  MOD_RES (613)..(613): Selenocysteine
  MOD_RES (637)..(637): Selenocysteine
  MOD_RES (652)..(652): Selenocysteine
  MOD_RES (668)..(668): Selenocysteine
  MOD_RES (680)..(680): Selenocysteine
  MOD_RES (682)..(682): Selenocysteine
  MOD_RES (689)..(689): Selenocysteine
  MOD_RES (721)..(721): Selenocysteine
MLARRQRDPLQALRRRNQELKQQVDSLLSESQLKEALEPNKRQHIYQRCIQLKQAIDENKNALQKLSKADESAPVANYNQRKEEEHXLLDKLXQQLQGLAVXISRENIXEVGAPXEEEEESESEDSEDSGGEEEDAEEEEEEKEENESHKWSXGEEYIAVGDFXAQQVGDLXFKKGEILLVIEKKPDGWWIAKDAKGNEGLVPRXYLEPYSEEEEGQESSEEGSEEDVEAVDEXADGAEVKQRXDPHWSAVQKAISEAGIFCLVNHVSFCYLIVLMRNRMEXVEDXNGSEXGFRAWNVQSRGRIFLVSKPVLQQINXVDVLXXMGAIPAGFRPSXLSQLLEEGNQFRANYFLQPELMPSQLAFRDLMWDAXEGXIRSRPSRISLILXLWSCKMIPLPGMSIQVLSRHVRLCLFDGNKVLSNIHXVRAXWQPKKPKXWXFSPQVXRILPCLLDGDCFIRSNSASPDLGILFELGISYIRNSXGERGELSCGWVFLKLFDASGVPIPAKXYELFLNGGXPYEKGIEVDPSISRRAHGSVFYQIMXMRRQPQLLVKLRSLNRRSRNVLSLLPEXLIGNMCSIHLLIFYRQILGDVLLKDRMSLQSXDLISHPMLAXFPMLLEQPDVMDALRSSWAGKESXLKRSEKRDKEFLKSXFLLVYHDCVLPLLHSXRLPPFRWAEEEXEXARWKVIXDFLKQNQENQGALQALLSPDGVHEPFDLSEQXYDFLGEMRKNAV

SEQ ID NO: 18036 - protein, 121 aa, Homo sapiens
  MOD_RES (87)..(87): Selenocysteine
  MOD_RES (93)..(93): Selenocysteine
  MOD_RES (102)..(102): Selenocysteine
  MOD_RES (109)..(109): Selenocysteine
MLARRQRDPLQALRRRNQELKQQVDSLLSESQLKEALEPNKRQHIYQRCIQLKQAIDENKNALQKLSKADESAPVANYNQRKEEEHXLLDKLXQQLQGLAVXISRENIXEYASFLPFFFLF

SEQ ID NO: 18037 - protein, 614 aa, Homo sapiens
  MOD_RES (53)..(53): Selenocysteine
  MOD_RES (91)..(91): Selenocysteine
  MOD_RES (102)..(102): Selenocysteine
  MOD_RES (110)..(110): Selenocysteine
  MOD_RES (143)..(143): Selenocysteine
  MOD_RES (172)..(172): Selenocysteine
  MOD_RES (182)..(182): Selenocysteine
  MOD_RES (198)..(198): Selenocysteine
  MOD_RES (203)..(204): Selenocysteine
  MOD_RES (216)..(216): Selenocysteine
  MOD_RES (252)..(252): Selenocysteine
  MOD_RES (255)..(255): Selenocysteine
  MOD_RES (268)..(268): Selenocysteine
  MOD_RES (305)..(305): Selenocysteine
  MOD_RES (309)..(309): Selenocysteine
  MOD_RES (317)..(317): Selenocysteine
  MOD_RES (319)..(319): Selenocysteine
  MOD_RES (325)..(325): Selenocysteine
  MOD_RES (362)..(362): Selenocysteine
  MOD_RES (389)..(389): Selenocysteine
  MOD_RES (398)..(398): Selenocysteine
  MOD_RES (424)..(424): Selenocysteine
  MOD_RES (452)..(452): Selenocysteine
  MOD_RES (484)..(484): Selenocysteine
  MOD_RES (494)..(494): Selenocysteine
  MOD_RES (518)..(518): Selenocysteine
  MOD_RES (533)..(533): Selenocysteine
  MOD_RES (549)..(549): Selenocysteine
  MOD_RES (561)..(561): Selenocysteine
  MOD_RES (563)..(563): Selenocysteine
  MOD_RES (570)..(570): Selenocysteine
  MOD_RES (602)..(602): Selenocysteine
MLARRQRDPLQALRRRNQELKQQVDSLLSESQLKEALEPNKRQHIYQRVGAPXEEEEESESEDSEDSGGEEEDAEEEEEEKEENESHKWSXGEEYIAVGDFXAQQVGDLXFKKGEILLVIEKKPDGWWIAKDAKGNEGLVPRXYLEPYSEEEEGQESSEEGSEEDVEAVDEXADGAEVKQRXDPHWSAVQKAISEINXVDVLXXMGAIPAGFRPSXLSQLLEEGNQFRANYFLQPELMPSQLAFRDLMWDAXEGXIRSRPSRISLILXLWSCKMIPLPGMSIQVLSRHVRLCLFDGNKVLSNIHXVRAXWQPKKPKXWXFSPQVXRILPCLLDGDCFIRSNSASPDLGILFELGISYIRNSXGERGELSCGWVFLKLFDASGVPIPAKXYELFLNGGXPYEKGIEVDPSISRRAHGSVFYQIMXMRRQPQLLVKLRSLNRRSRNVLSLLPEXLIGNMCSIHLLIFYRQILGDVLLKDRMSLQSXDLISHPMLAXFPMLLEQPDVMDALRSSWAGKESXLKRSEKRDKEFLKSXFLLVYHDCVLPLLHSXRLPPFRWAEEEXEXARWKVIXDFLKQNQENQGALQALLSPDGVHEPFDLSEQXYDFLGEMRKNAV

SEQ ID NO: 18038 - protein, 47 aa, Homo sapiens
  MOD_RES (1)..(1): Any amino acid
  MOD_RES (10)..(10): Selenocysteine
  MOD_RES (34)..(34): Selenocysteine
XLISHPMLAXFPMLLEQPDVMDALRSSWAGKESXLKRSEKVKYESPH

SEQ ID NO: 18039 - protein, 45 aa, Homo sapiens
  MOD_RES (1)..(1): Any amino acid
  MOD_RES (23)..(23): Selenocysteine
  MOD_RES (30)..(30): Selenocysteine
  MOD_RES (39)..(39): Selenocysteine
XRRQRDPLQALRRRNQELKQQRXPEAEYGXDFLFGVCRXSNQQPL

SEQ ID NO: 18040 - protein, 123 aa, Homo sapiens
  MOD_RES (5)..(5): Selenocysteine
  MOD_RES (20)..(20): Selenocysteine
  MOD_RES (44)..(44): Selenocysteine
  MOD_RES (62)..(62): Selenocysteine
  MOD_RES (104)..(104): Selenocysteine
  MOD_RES (107)..(107): Selenocysteine
AKLDXENKRLRAELQALQKXYQKILREKESALEAKYQAMERAAXFEHDRDKVKRQFKIFREXKENEIQDLLRAKRELESKLQRLQAQGIQVFDPGESDSDDNCXDVXVSLESDQHPGIFIANF

SEQ ID NO: 18041 - protein, 87 aa, Homo sapiens
  MOD_RES (33)..(33): Selenocysteine
  MOD_RES (74)..(74): Selenocysteine
EKKQYDKAEELYERALDIRRRALAPDHPSLAYXVKHLAILYKKMGKLDKAVPLYELAVEIRQKSFGPKHPSVAXALVNLAVLYSQML

SEQ ID NO: 18042 - protein, 538 aa, Homo sapiens
  MOD_RES (3)..(3): Selenocysteine
  MOD_RES (19)..(19): Selenocysteine
  MOD_RES (38)..(38): Selenocysteine
  MOD_RES (62)..(62): Selenocysteine
  MOD_RES (80)..(80): Selenocysteine
  MOD_RES (122)..(122): Selenocysteine
  MOD_RES (125)..(125): Selenocysteine
  MOD_RES (129)..(129): Selenocysteine
  MOD_RES (135)..(135): Selenocysteine
  MOD_RES (190)..(190): Selenocysteine
  MOD_RES (201)..(201): Selenocysteine
  MOD_RES (209)..(209): Selenocysteine
  MOD_RES (212)..(212): Selenocysteine
  MOD_RES (233)..(233): Selenocysteine
  MOD_RES (253)..(253): Selenocysteine
  MOD_RES (272)..(272): Selenocysteine
  MOD_RES (323)..(323): Selenocysteine
  MOD_RES (342)..(342): Selenocysteine
  MOD_RES (360)..(360): Selenocysteine
  MOD_RES (364)..(364): Selenocysteine
  MOD_RES (395)..(395): Selenocysteine
  MOD_RES (456)..(456): Selenocysteine
  MOD_RES (469)..(469): Selenocysteine
  MOD_RES (481)..(481): Selenocysteine
  MOD_RES (495)..(495): Selenocysteine
  MOD_RES (536)..(536): Selenocysteine
MGXASSLVSPAGGEVIEDXYGAGGGEACEIPVEALQKXYQKILREKESALEAKYQAMERAAXFEHDRDKVKRQFKIFREXKENEIQDLLRAKRELESKLQRLQAQGIQVFDPGESDSDDNCXDVXAAGXQCEYWXGGALGSEPSIGSMIQLQQSFRGPEFAHSSIDVEGPFANVNRDDWDIAVASLLQVXPLFSHSLWSNXVRCYLIYXDEXQPEMDLFLKDYSPKLKRMCEXMGYFFHAVYFPIDVENQYLXVRKWEIEKSSLVILFIHLXLPSLLLEDCEEAFLKNPEGKPRLIFHRLEDGKVSSDSVQQLIDQVSNLNKXSKAKIIDHSGDPAEGVYKXYICVEKIIKQDILGFENXDLEXKDLGSEDSIPEEDDFGDVLWDIHDEQEQMEXFQQASNSAHELGFEKYYQRLNDLVAAPAPIPPLLVSGGPGSGKSLLLSKWIQLQQKNSPNXLILSHFVGRPMSXSSESSLIIKRLXLKLMQHSWSVSALXLDPAKLLEEFPRWLEKLSARHQGSIIIVIDSIDQVQVVAYXSS

SEQ ID NO: 18043 - protein, 1330 aa, Homo sapiens
  MOD_RES (3)..(3): Selenocysteine
  MOD_RES (19)..(19): Selenocysteine
  MOD_RES (77)..(77): Selenocysteine
  MOD_RES (121)..(121): Selenocysteine
  MOD_RES (136)..(136): Selenocysteine
  MOD_RES (160)..(160): Selenocysteine
  MOD_RES (178)..(178): Selenocysteine
  MOD_RES (220)..(220): Selenocysteine
  MOD_RES (223)..(223): Selenocysteine
  MOD_RES (227)..(227): Selenocysteine
  MOD_RES (233)..(233): Selenocysteine
  MOD_RES (288)..(288): Selenocysteine
  MOD_RES (299)..(299): Selenocysteine
  MOD_RES (307)..(307): Selenocysteine
  MOD_RES (310)..(310): Selenocysteine
  MOD_RES (331)..(331): Selenocysteine
  MOD_RES (351)..(351): Selenocysteine
  MOD_RES (370)..(370): Selenocysteine
  MOD_RES (421)..(421): Selenocysteine
  MOD_RES (440)..(440): Selenocysteine
  MOD_RES (458)..(458): Selenocysteine
  MOD_RES (462)..(462): Selenocysteine
  MOD_RES (493)..(493): Selenocysteine
  MOD_RES (554)..(554): Selenocysteine
  MOD_RES (567)..(567): Selenocysteine
  MOD_RES (579)..(579): Selenocysteine
  MOD_RES (593)..(593): Selenocysteine
  MOD_RES (656)..(656): Selenocysteine
  MOD_RES (666)..(666): Selenocysteine
  MOD_RES (708)..(709): Selenocysteine
  MOD_RES (716)..(716): Selenocysteine
  MOD_RES (744)..(744): Selenocysteine
  MOD_RES (797)..(797): Selenocysteine
  MOD_RES (800)..(800): Selenocysteine
  MOD_RES (813)..(813): Selenocysteine
  MOD_RES (829)..(829): Selenocysteine
  MOD_RES (839)..(839): Selenocysteine
  MOD_RES (841)..(841): Selenocysteine
  MOD_RES (853)..(853): Selenocysteine
  MOD_RES (862)..(862): Selenocysteine
  MOD_RES (920)..(920): Selenocysteine
  MOD_RES (948)..(948): Selenocysteine
  MOD_RES (975)..(975): Selenocysteine
  MOD_RES (1026)..(1026): Selenocysteine
  MOD_RES (1035)..(1035): Selenocysteine
  MOD_RES (1084)..(1084): Selenocysteine
  MOD_RES (1089)..(1089): Selenocysteine
  MOD_RES (1095)..(1095): Selenocysteine
  MOD_RES (1111)..(1111): Selenocysteine
  MOD_RES (1179)..(1179): Selenocysteine
  MOD_RES (1220)..(1220): Selenocysteine
  MOD_RES (1263)..(1263): Selenocysteine
  MOD_RES (1295)..(1295): Selenocysteine
  MOD_RES (1312)..(1312): Selenocysteine
  MOD_RES (1317)..(1317): Selenocysteine
MGXASSLVSPAGGEVIEDXYGAGGGEACEIPVEVKPKARLLRNSFRRGAGAAAGAGPGSLPRGVGAGGLLGASFKSXGSSVPELEYAAAEYERLRKEYEIFRVSKNQELLSMGRREAKLDXENKRLRAELQALQKXYQKILREKESALEAKYQAMERAAXFEHDRDKVKRQFKIFREXKENEIQDLLRAKRELESKLQRLQAQGIQVFDPGESDSDDNCXDVXAAGXQCEYWXGGALGSEPSIGSMIQLQQSFRGPEFAHSSIDVEGPFANVNRDDWDIAVASLLQVXPLFSHSLWSNXVRCYLIYXDEXQPEMDLFLKDYSPKLKRMCEXMGYFFHAVYFPIDVENQYLXVRKWEIEKSSLVILFIHLXLPSLLLEDCEEAFLKNPEGKPRLIFHRLEDGKVSSDSVQQLIDQVSNLNKXSKAKIIDHSGDPAEGVYKXYICVEKIIKQDILGFENXDLEXKDLGSEDSIPEEDDFGDVLWDIHDEQEQMEXFQQASNSAHELGFEKYYQRLNDLVAAPAPIPPLLVSGGPGSGKSLLLSKWIQLQQKNSPNXLILSHFVGRPMSXSSESSLIIKRLXLKLMQHSWSVSALXLDPAKLLEEFPRWLEKLSARHQGSIIIVIDSIDQVQQVEKHMKWLIDPLPVNVRVIVSVNVEXCPPAWRLWPXLHLDPLSPKDAKSIIIAECHSVDIKLSKEQEKKLERHCRSAXXCNALYVXLFGKMIARAGRAGNLDKILHQCFQCQDXLSLYRLVLHSIRESMANDVDKELMKQILCLVNVSHNGVSESELMELYPEMSWXFLXSLIHSLYKMCLLXYGCGLLRFQHLQAWEXVRLEYLEGPXVXSSYRQKLINYFXLQLSQDRVXWRSADELPWLFQQQGSKQKLHDCLLNLFVSQNLYKRGHFAELLSYWQFVGKDKSAMAXEYFDSLKQYEKNCEGEDNMSCLADLYEXLGRFLKDLGLLSQAIVPLQRSLEIREXALDPDHPRVAQSLHQLASVYVQWKKFGNAEQLYKQALEISENAYGADHPYXARELEALAXLYQKQNKYEQAEHFRKKSFKIHQKAIKKKGNLYGFALLRRRALQLEELXLGKDXPDNARXLNELGVLYYLQNNLEXADQFLKRSLEMRERVLGPDHPDCAQSLNNLAALCNEKKQYDKAEELYERALDIRRRALAPDHPSLAYXVKHLAILYKKMGKLDKAVPLYELAVEIRQKSFGPKHPSVAXALVNLAVLYSQMKKHVEALPLYERALKIYEDSLGRMHPRVGEXLKNLAVLSYEGGDFEKAAELYKRAMEIKEAEXSLLGGKAPSRHSSSGDXFSLKXAHSPNVFLQQGQR

SEQ ID NO: 18044 - protein, 911 aa, Homo sapiens
  MOD_RES (9)..(9): Selenocysteine
  MOD_RES (29)..(29): Selenocysteine
  MOD_RES (66)..(66): Selenocysteine
  MOD_RES (74)..(74): Selenocysteine
  MOD_RES (77)..(78): Selenocysteine
  MOD_RES (82)..(82): Selenocysteine
  MOD_RES (99)..(99): Selenocysteine
  MOD_RES (125)..(125): Selenocysteine
  MOD_RES (158)..(158): Selenocysteine
  MOD_RES (178)..(178): Selenocysteine
  MOD_RES (188)..(188): Selenocysteine
  MOD_RES (238)..(238): Selenocysteine
  MOD_RES (247)..(247): Selenocysteine
  MOD_RES (315)..(315): Selenocysteine
  MOD_RES (330)..(330): Selenocysteine
  MOD_RES (378)..(378): Selenocysteine
  MOD_RES (406)..(406): Selenocysteine
  MOD_RES (442)..(442): Selenocysteine
  MOD_RES (459)..(459): Selenocysteine
  MOD_RES (477)..(477): Selenocysteine
  MOD_RES (515)..(515): Selenocysteine
  MOD_RES (523)..(523): Selenocysteine
  MOD_RES (555)..(555): Selenocysteine
  MOD_RES (561)..(561): Selenocysteine
  MOD_RES (573)..(573): Selenocysteine
  MOD_RES (583)..(583): Selenocysteine
  MOD_RES (585)..(585): Selenocysteine
  MOD_RES (622)..(622): Selenocysteine
  MOD_RES (626)..(626): Selenocysteine
  MOD_RES (659)..(659): Selenocysteine
  MOD_RES (664)..(664): Selenocysteine
  MOD_RES (668)..(668): Selenocysteine
  MOD_RES (678)..(679): Selenocysteine
  MOD_RES (699)..(699): Selenocysteine
  MOD_RES (710)..(710): Selenocysteine
  MOD_RES (745)..(745): Selenocysteine
  MOD_RES (788)..(788): Selenocysteine
  MOD_RES (823)..(823): Selenocysteine
  MOD_RES (840)..(840): Selenocysteine
  MOD_RES (864)..(865): Selenocysteine
  MOD_RES (876)..(876): Selenocysteine
  MOD_RES (884)..(884): Selenocysteine
MNDWHRIFXQNVLVPPHPQRARQPWKESXAFQCVLKWLDGPVIRQGVLEVLSEVECHLRVSFFDVXYRHFFGRXWKXXVKPXKRPPSRIVFNEPLYFHXSLNHPHIVAVVEVVAEGKKRDGSLQXLSCGFGILRIFSNQPDSPISASQDKRLRLYHGXPRALLHPLLQDPAEQNRHMXLIENCSLQYXLKPHPALEPAFHLLPENLLVSGLQQIPGLLPAHGESGDALRKPRLQKPIXGHLDDLFFXLYPSLEKFEEELLELHVQDHFQEGCGPLDGGALEILERRLRVGVHNGLGFVQRPQVVVLVPEMDVALXRSASFSRKVVSSSKXSSGSQALVLRSRLRLPEMVGHPAFAVIFQLEYVFSSPAGVDGNAASVXSLSNLACMHMVRWAVWNPLLEADSGRVXLPLQGGIQPNPSHCLVYKVPSASMSSEEVKQVESGXLRFQFSLGSEEHLDAPXEPVSGPKVERRPSRKPPXSPSSPPAPVPRVLAAPQNSPVGPGLSISQLAASPRSPXQHCLARPXSQLPHGSQASPAQAEFPLEAGISHLEADLSQXSLVLEXSIAEQLQELPFXPLHAPIVVGXQXRSSAGQPSRASMVLLQSSGFPEILDANKQPAEAVSAXEPVXFNPQKEESDCLQSNEMVLQFLAFSRVAQDCRGXSWPKXVYFXFQFYRFPPAXXPRLQLVQLDEAGQPSSGALXHILVPVSRDGXFDAGSPGFQLRYMVGPGFLKPGERRCFARYLAVQXLQIDVWDGDSLLLIGSAAVQMKHLLRQGRPAVQASHELEVVAXEYEQDNMVVSGDMLGFGRVKPIGVHSVVKGRLHLXLANVGHPCEQKVRGCSXLPPSRSRVISNDGASRFSGGSLLXXGSSRRWALQAXVLFGEVGXLPVAFVSGWLLICKGRRNGEKVRRNID

SEQ ID NO: 18045 - protein, 1426 aa, Homo sapiens
  MOD_RES (9)..(9): Selenocysteine
  MOD_RES (29)..(29): Selenocysteine
  MOD_RES (66)..(66): Selenocysteine
  MOD_RES (74)..(74): Selenocysteine
  MOD_RES (77)..(78): Selenocysteine
  MOD_RES (82)..(82): Selenocysteine
  MOD_RES (99)..(99): Selenocysteine
  MOD_RES (125)..(125): Selenocysteine
  MOD_RES (158)..(158): Selenocysteine
  MOD_RES (178)..(178): Selenocysteine
  MOD_RES (188)..(188): Selenocysteine
  MOD_RES (238)..(238): Selenocysteine
  MOD_RES (247)..(247): Selenocysteine
  MOD_RES (315)..(315): Selenocysteine
  MOD_RES (330)..(330): Selenocysteine
  MOD_RES (378)..(378): Selenocysteine
  MOD_RES (406)..(406): Selenocysteine
  MOD_RES (442)..(442): Selenocysteine
  MOD_RES (459)..(459): Selenocysteine
  MOD_RES (477)..(477): Selenocysteine
  MOD_RES (515)..(515): Selenocysteine
  MOD_RES (523)..(523): Selenocysteine
  MOD_RES (556)..(556): Selenocysteine
  MOD_RES (562)..(562): Selenocysteine
  MOD_RES (574)..(574): Selenocysteine
  MOD_RES (584)..(584): Selenocysteine
  MOD_RES (586)..(586): Selenocysteine
  MOD_RES (623)..(623): Selenocysteine
  MOD_RES (627)..(627): Selenocysteine
  MOD_RES (660)..(660): Selenocysteine
  MOD_RES (665)..(665): Selenocysteine
  MOD_RES (669)..(669): Selenocysteine
  MOD_RES (679)..(680): Selenocysteine
  MOD_RES (700)..(700): Selenocysteine
  MOD_RES (711)..(711): Selenocysteine
  MOD_RES (746)..(746): Selenocysteine
  MOD_RES (789)..(789): Selenocysteine
  MOD_RES (824)..(824): Selenocysteine
  MOD_RES (841)..(841): Selenocysteine
  MOD_RES (865)..(866): Selenocysteine
  MOD_RES (893)..(893): Selenocysteine
  MOD_RES (911)..(911): Selenocysteine
  MOD_RES (936)..(936): Selenocysteine
  MOD_RES (946)..(946): Selenocysteine
  MOD_RES (962)..(962): Selenocysteine
  MOD_RES (976)..(977): Selenocysteine
  MOD_RES (980)..(980): Selenocysteine
  MOD_RES (984)..(984): Selenocysteine
  MOD_RES (1001)..(1001): Selenocysteine
  MOD_RES (1004)..(1004): Selenocysteine
  MOD_RES (1006)..(1006): Selenocysteine
  MOD_RES (1034)..(1034): Selenocysteine
  MOD_RES (1058)..(1058): Selenocysteine
  MOD_RES (1101)..(1101): Selenocysteine
  MOD_RES (1122)..(1122): Selenocysteine
  MOD_RES (1155)..(1155): Selenocysteine
  MOD_RES (1183)..(1183): Selenocysteine
  MOD_RES (1221)..(1221): Selenocysteine
  MOD_RES (1223)..(1223): Selenocysteine
  MOD_RES (1225)..(1225): Selenocysteine
  MOD_RES (1246)..(1246): Selenocysteine
  MOD_RES (1255)..(1255): Selenocysteine
  MOD_RES (1257)..(1257): Selenocysteine
  MOD_RES (1265)..(1265): Selenocysteine
  MOD_RES (1273)..(1273): Selenocysteine
  MOD_RES (1351)..(1351): Selenocysteine
  MOD_RES (1353)..(1353): Selenocysteine
  MOD_RES (1361)..(1361): Selenocysteine
  MOD_RES (1386)..(1386): Selenocysteine
  MOD_RES (1388)..(1388): Selenocysteine
MNDWHRIFXQNVLVPPHPQRARQPWKESXAFQCVLKWLDGPVIRQGVLEVLSEVECHLRVSFFDVXYRHFFGRXWKXXVKPXKRPPSRIVFNEPLYFHXSLNHPHIVAVVEVVAEGKKRDGSLQXLSCGFGILRIFSNQPDSPISASQDKRLRLYHGXPRALLHPLLQDPAEQNRHMXLIENCSLQYXLKPHPALEPAFHLLPENLLVSGLQQIPGLLPAHGESGDALRKPRLQKPIXGHLDDLFFXLYPSLEKFEEELLELHVQDHFQEGCGPLDGGALEILERRLRVGVHNGLGFVQRPQVVVLVPEMDVALXRSASFSRKVVSSSKXSSGSQALVLRSRLRLPEMVGHPAFAVIFQLEYVFSSPAGVDGNAASVXSLSNLACMHMVRWAVWNPLLEADSGRVXLPLQGGIQPNPSHCLVYKVPSASMSSEEVKQVESGXLRFQFSLGSEEHLDAPXEPVSGPKVERRPSRKPPXSPSSPPAPVPRVLAAPQNSPVGPGLSISQLAASPRSPXQHCLARPXSQLPHGSQASPAQAQEFPLEAGISHLEADLSQXSLVLEXSIAEQLQELPFXPLHAPIVVGXQXRSSAGQPSRASMVLLQSSGFPEILDANKQPAEAVSAXEPVXFNPQKEESDCLQSNEMVLQFLAFSRVAQDCRGXSWPKXVYFXFQFYRFPPAXXPRLQLVQLDEAGQPSSGALXHILVPVSRDGXFDAGSPGFQLRYMVGPGFLKPGERRCFARYLAVQXLQIDVWDGDSLLLIGSAAVQMKHLLRQGRPAVQASHELEVVAXEYEQDNMVVSGDMLGFGRVKPIGVHSVVKGRLHLXLANVGHPCEQKVRGCSXLPPSRSRVISNDGASRFSGGSLLXXGSSRRKHVVQAQKLADVDSELAAMLLXHARQGKGPQDVSRESDAXRRRKLERMRSVRLQEAGGDLGRRGXSVLAQQSVRXQHLRDLQVIAAYRERXKAESIASLLSLAIXXEHXLHAXLGVAEFFEFVLKNPHNXQHXVXVEIDNPELSVIVDSQEWRDFKGAAGLHXPVEEDMFHLRGSLAPQLYLRPHEXAHVPFKFQSFSAGQLAMVQASPGLSNEKGMDAVSPWKSSAVPXKHAKVLFRASGGKPIAVLCLXVELQPHVVDQVFRFYHPELSFLKKAIRLPPWHXFPGAPVGMLGEDPPVHVRCSDPNVICEXQNVGPGEPRDIFLKVASGPSPEIKDFFVIIYSDRWLAXPXQXWQVYLHSLQRVDVSCVAGQLXRLSLVLRGXQXVRKVRAFXSHPQELKXDPKGVFVLPPRGVQDLHVGVRPLRAGSRFVHLNLVDVDCHQLVASWLVCLCCRQPLISKAFEIMLAAGEGKGVNKRIXYXNPYPSRRXFHLHSDHPELLRFREDSFQVGGGEXYXIGLQFAPSQRVGEEEILIYINDHEDKNEEAFCVKVIYQ

SEQ ID NO: 18046 - protein, 262 aa, Homo sapiens
  MOD_RES (9)..(9): Selenocysteine
  MOD_RES (29)..(29): Selenocysteine
  MOD_RES (66)..(66): Selenocysteine
  MOD_RES (74)..(74): Selenocysteine
  MOD_RES (77)..(78): Selenocysteine
  MOD_RES (82)..(82): Selenocysteine
  MOD_RES (99)..(99): Selenocysteine
  MOD_RES (125)..(125): Selenocysteine
  MOD_RES (158)..(158): Selenocysteine
  MOD_RES (178)..(178): Selenocysteine
  MOD_RES (188)..(188): Selenocysteine
  MOD_RES (229)..(229): Selenocysteine
  MOD_RES (260)..(260): Selenocysteine
MNDWHRIFXQNVLVPPHPQRARQPWKESXAFQCVLKWLDGPVIRQGVLEVLSEVECHLRVSFFDVXYRHFFGRXWKXXVKPXKRPPSRIVFNEPLYFHXSLNHPHIVAVVEVVAEGKKRDGSLQXLSCGFGILRIFSNQPDSPISASQDKRLRLYHGXPRALLHPLLQDPAEQNRHMXLIENCSLQYXLKPHPALEPAFHLLPENLLVSGLQQIPGLLPAHGESGMWPXGRWCPGDPGAAPACGRAQWSGLRAEAAGRCXGA

SEQ ID NO: 18047 - protein, 138 aa, Homo sapiens
  MOD_RES (1)..(1): Any amino acid
  MOD_RES (20)..(20): Selenocysteine
  MOD_RES (25)..(25): Selenocysteine
  MOD_RES (29)..(29): Selenocysteine
  MOD_RES (39)..(40): Selenocysteine
  MOD_RES (60)..(60): Selenocysteine
  MOD_RES (71)..(71): Selenocysteine
  MOD_RES (106)..(106): Selenocysteine
  MOD_RES (130)..(130): Selenocysteine
XEMVLQFLAFSRVAQDCRGXSWPKXVYFXFQFYRFPPAXXPRLQLVQLDEAGQPSSGALXHILVPVSRDGXFDAGSPGFQLRYMVGPGFLKPGERRCFARYLAVQXLQIDVWDGDSLLLIGSAAVQMKEXSHIFSVSQ

SEQ ID NO: 18048 - protein, 59 aa, Homo sapiens
  MOD_RES (38)..(38): Selenocysteine
MEDSMDMDMSPLRPQNYLFDYHFKVDNDENEHQLSLRXVSLGAGAKDELHIVEAEAMNY

SEQ ID NO: 18049 - protein, 265 aa, Homo sapiens
  MOD_RES (46)..(46): Selenocysteine
  MOD_RES (75)..(75): Selenocysteine
  MOD_RES (78)..(78): Selenocysteine
  MOD_RES (86)..(86): Selenocysteine
  MOD_RES (95)..(95): Selenocysteine
  MOD_RES (205)..(205): Selenocysteine
  MOD_RES (208)..(208): Selenocysteine
  MOD_RES (250)..(250): Selenocysteine
MEDSMDMDMSPLRPQNYLFGCELKADKDYHFKVDNDENEHQLSLRXVSLGAGAKDELHIVEAEAMNYEGSPIKVXLAXLKMSVQPXVSLGGFEIXPPVVLRLKCGSGPVHISGQHLVAVEEDAESEDEEEEDVKLLSISGKRSAPGGGSKVPQKKVKLAADEDDDDDDEEDDDEDDDDDDFDDEEAEEKAPVKKGQESFKKQEKXPKXPKGPSSVEDIKAKMQASIEKGGSLPKVEAKFINYVKNCFRMXDQEAIQDLWQWRKSL

SEQ ID NO: 18050 - protein, 259 aa, Homo sapiens
  MOD_RES (46)..(46): Selenocysteine
  MOD_RES (75)..(75): Selenocysteine
  MOD_RES (78)..(78): Selenocysteine
  MOD_RES (86)..(86): Selenocysteine
  MOD_RES (95)..(95): Selenocysteine
  MOD_RES (199)..(199): Selenocysteine
  MOD_RES (219)..(219): Selenocysteine
  MOD_RES (234)..(234): Selenocysteine
  MOD_RES (237)..(237): Selenocysteine
MEDSMDMDMSPLRPQNYLFGCELKADKDYHFKVDNDENEHQLSLRXVSLGAGAKDELHIVEAEAMNYEGSPIKVXLAXLKMSVQPXVSLGGFEIXPPVVLRLKCGSGPVHISGQHLVAVEEDAESEDEEEEDVKLLSISGKRSAPGGGSKVPQKKVKLAADEDDDDDDEEDDDEDDDDDDFDDEEAEEKAPVKKSIRDXPAKNAQKSNQNGKDSKPSSXPRSKGQESFKKQEKXPKXPKGPSSVEDIKAKMQASIEKAH

SEQ ID NO: 18051 - protein, 294 aa, Homo sapiens
  MOD_RES (46)..(46): Selenocysteine
  MOD_RES (75)..(75): Selenocysteine
  MOD_RES (78)..(78): Selenocysteine
  MOD_RES (86)..(86): Selenocysteine
  MOD_RES (95)..(95): Selenocysteine
  MOD_RES (199)..(199): Selenocysteine
  MOD_RES (219)..(219): Selenocysteine
  MOD_RES (234)..(234): Selenocysteine
  MOD_RES (237)..(237): Selenocysteine
  MOD_RES (279)..(279): Selenocysteine
MEDSMDMDMSPLRPQNYLFGCELKADKDYHFKVDNDENEHQLSLRXVSLGAGAKDELHIVEAEAMNYEGSPIKVXLAXLKMSVQPXVSLGGFEIXPPVVLRLKCGSGPVHISGQHLVAVEEDAESEDEEEEDVKLLSISGKRSAPGGGSKVPQKKVKLAADEDDDDDDEEDDDEDDDDDDFDDEEAEEKAPVKKSIRDXPAKNAQKSNQNGKDSKPSSXPRSKGQESFKKQEKXPKXPKGPSSVEDIKAKMQASIEKGGSLPKVEAKFINYVKNCFRMXDQEAIQDLWQWRKSL

SEQ ID NO: 18052 - protein, 111 aa, Homo sapiens
  MOD_RES (11)..(11): Selenocysteine
  MOD_RES (14)..(14): Selenocysteine
  MOD_RES (22)..(22): Selenocysteine
  MOD_RES (31)..(31): Selenocysteine
MNYEGSPIKVXLAXLKMSVQPXVSLGGFEIXPPVVLRLKCGSGPVHISGQHLVAVEEDAESEDEEEEDVKLLSISGKRSAPGGGSKVPQKKVKLAADEDDDDDDEEDDDED

SEQ ID NO: 18053 - protein, 99 aa, Homo sapiens
  MOD_RES (9)..(9): Selenocysteine
  MOD_RES (15)..(16): Selenocysteine
  MOD_RES (29)..(29): Selenocysteine
  MOD_RES (31)..(31): Selenocysteine
  MOD_RES (48)..(48): Selenocysteine
  MOD_RES (79)..(79): Selenocysteine
MNLSSASSXEEKAVXXVLWGCELSQERRXWXFRPQLEGKQSCRLLLHXICLGEKAKEEMHRVEILPPANQEDKKMQPVXIASLQASVLPMVSMVGVQLS

SEQ ID NO: 18054 - protein, 137 aa, Homo sapiens
  MOD_RES (9)..(9): Selenocysteine
  MOD_RES (15)..(16): Selenocysteine
  MOD_RES (29)..(29): Selenocysteine
  MOD_RES (31)..(31): Selenocysteine
  MOD_RES (48)..(48): Selenocysteine
  MOD_RES (79)..(79): Selenocysteine
  MOD_RES (103)..(103): Selenocysteine
  MOD_RES (127)..(127): Selenocysteine
MNLSSASSXEEKAVXXVLWGCELSQERRXWXFRPQLEGKQSCRLLLHXICLGEKAKEEMHRVEILPPANQEDKKMQPVXIASLQASVLPMVSMVGVQLSPPVXFQLRAGSGPVFLSGQERYEASDLXWEEEEEEEGE

SEQ ID NO: 18055 - protein, 214 aa, Homo sapiens
  MOD_RES (9)..(9): Selenocysteine
  MOD_RES (15)..(16): Selenocysteine
  MOD_RES (29)..(29): Selenocysteine
  MOD_RES (31)..(31): Selenocysteine
  MOD_RES (48)..(48): Selenocysteine
  MOD_RES (79)..(79): Selenocysteine
  MOD_RES (103)..(103): Selenocysteine
  MOD_RES (127)..(127): Selenocysteine
  MOD_RES (204)..(204): Selenocysteine
MNLSSASSXEEKAVXXVLWGCELSQERRXWXFRPQLEGKQSCRLLLHXICLGEKAKEEMHRVEILPPANQEDKKMQPVXIASLQASVLPMVSMVGVQLSPPVXFQLRAGSGPVFLSGQERYEASDLXWEEEEEEEGEEEEEEEEDDEDEDADISLEEQSPVKQVKRLVPQKQASVAKKKKLEKEEEEIRASVRDKSPVKKAKAXARAKKPGFKK

SEQ ID NO: 18056 - protein, 136 aa, Homo sapiens
  MOD_RES (9)..(9): Selenocysteine
  MOD_RES (15)..(16): Selenocysteine
  MOD_RES (29)..(29): Selenocysteine
  MOD_RES (31)..(31): Selenocysteine
  MOD_RES (48)..(48): Selenocysteine
  MOD_RES (79)..(79): Selenocysteine
  MOD_RES (103)..(103): Selenocysteine
MNLSSASSXEEKAVXXVLWGCELSQERRXWXFRPQLEGKQSCRLLLHXICLGEKAKEEMHRVEILPPANQEDKKMQPVXIASLQASVLPMVSMVGVQLSPPVXFQLRAGSGPVFLSGQERYEKKAGKRRRGNKSQR

SEQ ID NO: 18057 - protein, 609 aa, Homo sapiens
  MOD_RES (102)..(102): Selenocysteine
  MOD_RES (130)..(130): Selenocysteine
  MOD_RES (154)..(154): Selenocysteine
  MOD_RES (179)..(179): Selenocysteine
  MOD_RES (213)..(213): Selenocysteine
  MOD_RES (222)..(222): Selenocysteine
  MOD_RES (236)..(236): Selenocysteine
  MOD_RES (299)..(299): Selenocysteine
  MOD_RES (322)..(322): Selenocysteine
  MOD_RES (328)..(328): Selenocysteine
  MOD_RES (340)..(340): Selenocysteine
  MOD_RES (346)..(346): Selenocysteine
  MOD_RES (354)..(354): Selenocysteine
  MOD_RES (358)..(358): Selenocysteine
  MOD_RES (362)..(363): Selenocysteine
  MOD_RES (366)..(366): Selenocysteine
  MOD_RES (370)..(370): Selenocysteine
  MOD_RES (374)..(374): Selenocysteine
  MOD_RES (383)..(383): Selenocysteine
  MOD_RES (387)..(387): Selenocysteine
  MOD_RES (392)..(393): Selenocysteine
  MOD_RES (398)..(399): Selenocysteine
  MOD_RES (402)..(403): Selenocysteine
  MOD_RES (410)..(410): Selenocysteine
  MOD_RES (416)..(416): Selenocysteine
  MOD_RES (423)..(423): Selenocysteine
  MOD_RES (501)..(501): Selenocysteine
  MOD_RES (537)..(537): Selenocysteine
  MOD_RES (543)..(543): Selenocysteine
  MOD_RES (570)..(570): Selenocysteine
  MOD_RES (573)..(573): Selenocysteine
  MOD_RES (593)..(593): Selenocysteine
MDFLLALVLVSSLYLQAAAEFDGRWPRQIVSSIGLCRYGGRIDCCWGWARQSWGQCQPFYVLRQRIARIRCQLKAVCQPRCKHGECIGPNKCKCHPGYAGKXCNQDEHIPAPLDQGSEQPLFQPLDHQAXSLPSRDLNECGLKPRPCKHRCMNXYGSYKCYCLNGYMLMPDGSCSSALXCSMANCQYGCDVVKGQIRCQCPSPGLQLAPDGRXCVDVDECAXGRASCPRFRQCVNXFGSYICKCHKGFDLMYIGGKYQCHDIDECSLGQYQCSSFARCYNIRGSYKCKCKEGYQGDGLXCVYIPKVMIEPSGPIHVPKGNGXILKGDXGNNNWIPDVGSXWWPPKXPYIPPIIXNRPXSKPXXRPXPKPXPIPXPPPPPPLPXELRXPLPPXXPERPXXGLXXIAPAASXPPGGIXVDNRVQXDPQKPRGDVFIPRQPSNDLFEIFEIERGVSADDEAKDDPGVLVHSCNFDHGLCGWIREKDNDLHWEPIRDPAGGQYLXVSAAKAPGGKAARLVLPLGRLMHSGDLCLSFRHKVXGLHSGXLQVFVRKHGAHGAALWGRNGGHGWRQXQIXLRGADIKSVVFKGEKRRGHXGEIGLDDVSLKKGHCS

SEQ ID NO: 18058 - protein, 582 aa, Homo sapiens
  MOD_RES (102)..(102): Selenocysteine
  MOD_RES (124)..(124): Selenocysteine
  MOD_RES (149)..(149): Selenocysteine
  MOD_RES (183)..(183): Selenocysteine
  MOD_RES (192)..(192): Selenocysteine
  MOD_RES (206)..(206): Selenocysteine
  MOD_RES (269)..(269): Selenocysteine
  MOD_RES (292)..(292): Selenocysteine
  MOD_RES (298)..(298): Selenocysteine
  MOD_RES (310)..(310): Selenocysteine
  MOD_RES (316)..(316): Selenocysteine
  MOD_RES (324)..(324): Selenocysteine
  MOD_RES (328)..(328): Selenocysteine
  MOD_RES (332)..(333): Selenocysteine
  MOD_RES (336)..(336): Selenocysteine
  MOD_RES (340)..(340): Selenocysteine
  MOD_RES (344)..(344): Selenocysteine
  MOD_RES (353)..(353): Selenocysteine
  MOD_RES (357)..(357): Selenocysteine
  MOD_RES (362)..(363): Selenocysteine
  MOD_RES (368)..(369): Selenocysteine
  MOD_RES (372)..(373): Selenocysteine
  MOD_RES (380)..(380): Selenocysteine
  MOD_RES (386)..(386): Selenocysteine
  MOD_RES (393)..(393): Selenocysteine
  MOD_RES (471)..(471): Selenocysteine
  MOD_RES (507)..(507): Selenocysteine
  MOD_RES (513)..(513): Selenocysteine
  MOD_RES (540)..(540): Selenocysteine
  MOD_RES (543)..(543): Selenocysteine
  MOD_RES (563)..(563): Selenocysteine
MDFLLALVLVSSLYLQAAAEFDGRWPRQIVSSIGLCRYGGRIDCCWGWARQSWGQCQPFYVLRQRIARIRCQLKAVCQPRCKHGECIGPNKCKCHPGYAGKXCNQDLNECGLKPRPCKHRCMNXYGSYKCYCLNGYMLMPDGSCSSALXCSMANCQYGCDVVKGQIRCQCPSPGLQLAPDGRXCVDVDECAXGRASCPRFRQCVNXFGSYICKCHKGFDLMYIGGKYQCHDIDECSLGQYQCSSFARCYNIRGSYKCKCKEGYQGDGLXCVYIPKVMIEPSGPIHVPKGNGXILKGDXGNNNWIPDVGSXWWPPKXPYIPPIIXNRPXSKPXXRPXPKPXPIPXPPPPPPLPXELRXPLPPXXPERPXXGLXXIAPAASXPPGGIXVDNRVQXDPQKPRGDVFIPRQPSNDLFEIFEIERGVSADDEAKDDPGVLVHSCNFDHGLCGWIREKDNDLHWEPIRDPAGGQYLXVSAAKAPGGKAARLVLPLGRLMHSGDLCLSFRHKVXGLHSGXLQVFVRKHGAHGAALWGRNGGHGWRQXQIXLRGADIKSVVFKGEKRRGHXGEIGLDDVSLKKGHCSEER

SEQ ID NO: 18059 - protein, 566 aa, Homo sapiens
  MOD_RES (85)..(85): Selenocysteine
  MOD_RES (113)..(113): Selenocysteine
  MOD_RES (137)..(137): Selenocysteine
  MOD_RES (162)..(162): Selenocysteine
  MOD_RES (196)..(196): Selenocysteine
  MOD_RES (205)..(205): Selenocysteine
  MOD_RES (219)..(219): Selenocysteine
  MOD_RES (282)..(282): Selenocysteine
  MOD_RES (305)..(305): Selenocysteine
  MOD_RES (311)..(311): Selenocysteine
  MOD_RES (323)..(323): Selenocysteine
  MOD_RES (329)..(329): Selenocysteine
  MOD_RES (337)..(337): Selenocysteine
  MOD_RES (341)..(341): Selenocysteine
  MOD_RES (345)..(346): Selenocysteine
  MOD_RES (349)..(349): Selenocysteine
  MOD_RES (353)..(353): Selenocysteine
  MOD_RES (357)..(357): Selenocysteine
  MOD_RES (366)..(366): Selenocysteine
  MOD_RES (370)..(370): Selenocysteine
  MOD_RES (375)..(376): Selenocysteine
  MOD_RES (381)..(382): Selenocysteine
  MOD_RES (385)..(386): Selenocysteine
  MOD_RES (393)..(393): Selenocysteine
  MOD_RES (399)..(399): Selenocysteine
  MOD_RES (406)..(406): Selenocysteine
  MOD_RES (455)..(455): Selenocysteine
  MOD_RES (491)..(491): Selenocysteine
  MOD_RES (497)..(497): Selenocysteine
  MOD_RES (524)..(524): Selenocysteine
  MOD_RES (527)..(527): Selenocysteine
  MOD_RES (547)..(547): Selenocysteine
MDFLLALVLVSSLYLQAAAEFDGRWPRQIVSSIGLCRYGGRIDCCWGWARQSWGQCQPVCQPRCKHGECIGPNKCKCHPGYAGKXCNQDEHIPAPLDQGSEQPLFQPLDHQAXSLPSRDLNECGLKPRPCKHRCMNXYGSYKCYCLNGYMLMPDGSCSSALXCSMANCQYGCDVVKGQIRCQCPSPGLQLAPDGRXCVDVDECAXGRASCPRFRQCVNXFGSYICKCHKGFDLMYIGGKYQCHDIDECSLGQYQCSSFARCYNIRGSYKCKCKEGYQGDGLXCVYIPKVMIEPSGPIHVPKGNGXILKGDXGNNNWIPDVGSXWWPPKXPYIPPIIXNRPXSKPXXRPXPKPXPIPXPPPPPPLPXELRXPLPPXXPERPXXGLXXIAPAASXPPGGIXVDNRVQXDPQKPRGDVFSVLVHSCNFDHGLCGWIREKDNDLHWEPIRDPAGGQYLXVSAAKAPGGKAARLVLPLGRLMHSGDLCLSFRHKVXGLHSGXLQVFVRKHGAHGAALWGRNGGHGWRQXQIXLRGADIKSVVFKGEKRRGHXGEIGLDDVSLKKGHCSEER

SEQ ID NO: 18060 - protein, 595 aa, Homo sapiens
  MOD_RES (85)..(85): Selenocysteine
  MOD_RES (113)..(113): Selenocysteine
  MOD_RES (137)..(137): Selenocysteine
  MOD_RES (162)..(162): Selenocysteine
  MOD_RES (196)..(196): Selenocysteine
  MOD_RES (205)..(205): Selenocysteine
  MOD_RES (219)..(219): Selenocysteine
  MOD_RES (282)..(282): Selenocysteine
  MOD_RES (305)..(305): Selenocysteine
  MOD_RES (311)..(311): Selenocysteine
  MOD_RES (323)..(323): Selenocysteine
  MOD_RES (329)..(329): Selenocysteine
  MOD_RES (337)..(337): Selenocysteine
  MOD_RES (341)..(341): Selenocysteine
  MOD_RES (345)..(346): Selenocysteine
  MOD_RES (349)..(349): Selenocysteine
  MOD_RES (353)..(353): Selenocysteine
  MOD_RES (357)..(357): Selenocysteine
  MOD_RES (366)..(366): Selenocysteine
  MOD_RES (370)..(370): Selenocysteine
  MOD_RES (375)..(376): Selenocysteine
  MOD_RES (381)..(382): Selenocysteine
  MOD_RES (385)..(386): Selenocysteine
  MOD_RES (393)..(393): Selenocysteine
  MOD_RES (399)..(399): Selenocysteine
  MOD_RES (406)..(406): Selenocysteine
  MOD_RES (484)..(484): Selenocysteine
  MOD_RES (520)..(520): Selenocysteine
  MOD_RES (526)..(526): Selenocysteine
  MOD_RES (553)..(553): Selenocysteine
  MOD_RES (556)..(556): Selenocysteine
  MOD_RES (576)..(576): Selenocysteine
MDFLLALVLVSSLYLQAAAEFDGRWPRQIVSSIGLCRYGGRIDCCWGWARQSWGQCQPVCQPRCKHGECIGPNKCKCHPGYAGKXCNQDEHIPAPLDQGSEQPLFQPLDHQAXSLPSRDLNECGLKPRPCKHRCMNXYGSYKCYCLNGYMLMPDGSCSSALXCSMANCQYGCDVVKGQIRCQCPSPGLQLAPDGRXCVDVDECAXGRASCPRFRQCVNXFGSYICKCHKGFDLMYIGGKYQCHDIDECSLGQYQCSSFARCYNIRGSYKCKCKEGYQGDGLXCVYIPKVMIEPSGPIHVPKGNGXILKGDXGNNNWIPDVGSXWWPPKXPYIPPIIXNRPXSKPXXRPXPKPXPIPXPPPPPPLPXELRXPLPPXXPERPXXGLXXIAPAASXPPGGIXVDNRVQXDPQKPRGDVFIPRQPSNDLFEIFEIERGVSADDEAKDDPGVLVHSCNFDHGLCGWIREKDNDLHWEPIRDPAGGQYLXVSAAKAPGGKAARLVLPLGRLMHSGDLCLSFRHKVXGLHSGXLQVFVRKHGAHGAALWGRNGGHGWRQXQIXLRGADIKSVVFKGEKRRGHXGEIGLDDVSLKKGHCSEER

SEQ ID NO: 18061 - protein, 509 aa, Homo sapiens
  MOD_RES (85)..(85): Selenocysteine
  MOD_RES (107)..(107): Selenocysteine
  MOD_RES (132)..(132): Selenocysteine
  MOD_RES (166)..(166): Selenocysteine
  MOD_RES (175)..(175): Selenocysteine
  MOD_RES (189)..(189): Selenocysteine
  MOD_RES (252)..(252): Selenocysteine
  MOD_RES (275)..(275): Selenocysteine
  MOD_RES (281)..(281): Selenocysteine
  MOD_RES (293)..(293): Selenocysteine
  MOD_RES (299)..(299): Selenocysteine
  MOD_RES (307)..(307): Selenocysteine
  MOD_RES (311)..(311): Selenocysteine
  MOD_RES (315)..(316): Selenocysteine
  MOD_RES (319)..(319): Selenocysteine
  MOD_RES (323)..(323): Selenocysteine
  MOD_RES (327)..(327): Selenocysteine
  MOD_RES (336)..(336): Selenocysteine
  MOD_RES (340)..(340): Selenocysteine
  MOD_RES (345)..(346): Selenocysteine
  MOD_RES (351)..(352): Selenocysteine
  MOD_RES (355)..(356): Selenocysteine
  MOD_RES (363)..(363): Selenocysteine
  MOD_RES (369)..(369): Selenocysteine
  MOD_RES (376)..(376): Selenocysteine
  MOD_RES (425)..(425): Selenocysteine
  MOD_RES (461)..(461): Selenocysteine
  MOD_RES (467)..(467): Selenocysteine
  MOD_RES (494)..(494): Selenocysteine
  MOD_RES (497)..(497): Selenocysteine
MDFLLALVLVSSLYLQAAAEFDGRWPRQIVSSIGLCRYGGRIDCCWGWARQSWGQCQPVCQPRCKHGECIGPNKCKCHPGYAGKXCNQDLNECGLKPRPCKHRCMNXYGSYKCYCLNGYMLMPDGSCSSALXCSMANCQYGCDVVKGQIRCQCPSPGLQLAPDGRXCVDVDECAXGRASCPRFRQCVNXFGSYICKCHKGFDLMYIGGKYQCHDIDECSLGQYQCSSFARCYNIRGSYKCKCKEGYQGDGLXCVYIPKVMIEPSGPIHVPKGNGXILKGDXGNNNWIPDVGSXWWPPKXPYIPPIIXNRPXSKPXXRPXPKPXPIPXPPPPPPLPXELRXPLPPXXPERPXXGLXXIAPAASXPPGGIXVDNRVQXDPQKPRGDVFSVLVHSCNFDHGLCGWIREKDNDLHWEPIRDPAGGQYLXVSAAKAPGGKAARLVLPLGRLMHSGDLCLSFRHKVXGLHSGXLQVFVRKHGAHGAALWGRNGGHGWRQXQIXLRGADIKSESQR

SEQ ID NO: 18062 - protein, 536 aa, Homo sapiens
  MOD_RES (85)..(85): Selenocysteine
  MOD_RES (107)..(107): Selenocysteine
  MOD_RES (132)..(132): Selenocysteine
  MOD_RES (166)..(166): Selenocysteine
  MOD_RES (175)..(175): Selenocysteine
  MOD_RES (189)..(189): Selenocysteine
  MOD_RES (252)..(252): Selenocysteine
  MOD_RES (275)..(275): Selenocysteine
  MOD_RES (281)..(281): Selenocysteine
  MOD_RES (293)..(293): Selenocysteine
  MOD_RES (299)..(299): Selenocysteine
  MOD_RES (307)..(307): Selenocysteine
  MOD_RES (311)..(311): Selenocysteine
  MOD_RES (315)..(316): Selenocysteine
  MOD_RES (319)..(319): Selenocysteine
  MOD_RES (323)..(323): Selenocysteine
  MOD_RES (327)..(327): Selenocysteine
  MOD_RES (336)..(336): Selenocysteine
  MOD_RES (340)..(340): Selenocysteine
  MOD_RES (345)..(346): Selenocysteine
  MOD_RES (351)..(352): Selenocysteine
  MOD_RES (355)..(356): Selenocysteine
  MOD_RES (363)..(363): Selenocysteine
  MOD_RES (369)..(369): Selenocysteine
  MOD_RES (376)..(376): Selenocysteine
  MOD_RES (425)..(425): Selenocysteine
  MOD_RES (461)..(461): Selenocysteine
  MOD_RES (467)..(467): Selenocysteine
  MOD_RES (494)..(494): Selenocysteine
  MOD_RES (497)..(497): Selenocysteine
  MOD_RES (517)..(517): Selenocysteine
MDFLLALVLVSSLYLQAAAEFDGRWPRQIVSSIGLCRYGGRIDCCWGWARQSWGQCQPVCQPRCKHGECIGPNKCKCHPGYAGKXCNQDLNECGLKPRPCKHRCMNXYGSYKCYCLNGYMLMPDGSCSSALXCSMANCQYGCDVVKGQIRCQCPSPGLQLAPDGRXCVDVDECAXGRASCPRFRQCVNXFGSYICKCHKGFDLMYIGGKYQCHDIDECSLGQYQCSSFARCYNIRGSYKCKCKEGYQGDGLXCVYIPKVMIEPSGPIHVPKGNGXILKGDXGNNNWIPDVGSXWWPPKXPYIPPIIXNRPXSKPXXRPXPKPXPIPXPPPPPPLPXELRXPLPPXXPERPXXGLXXIAPAASXPPGGIXVDNRVQXDPQKPRGDVFSVLVHSCNFDHGLCGWIREKDNDLHWEPIRDPAGGQYLXVSAAKAPGGKAARLVLPLGRLMHSGDLCLSFRHKVXGLHSGXLQVFVRKHGAHGAALWGRNGGHGWRQXQIXLRGADIKSVVFKGEKRRGHXGEIGLDDVSLKKGHCSEER

SEQ ID NO: 18063 - protein, 565 aa, Homo sapiens
  MOD_RES (85)..(85): Selenocysteine
  MOD_RES (107)..(107): Selenocysteine
  MOD_RES (132)..(132): Selenocysteine
  MOD_RES (166)..(166): Selenocysteine
  MOD_RES (175)..(175): Selenocysteine
  MOD_RES (189)..(189): Selenocysteine
  MOD_RES (252)..(252): Selenocysteine
  MOD_RES (275)..(275): Selenocysteine
  MOD_RES (281)..(281): Selenocysteine
  MOD_RES (293)..(293): Selenocysteine
  MOD_RES (299)..(299): Selenocysteine
  MOD_RES (307)..(307): Selenocysteine
  MOD_RES (311)..(311): Selenocysteine
  MOD_RES (315)..(316): Selenocysteine
  MOD_RES (319)..(319): Selenocysteine
  MOD_RES (323)..(323): Selenocysteine
  MOD_RES (327)..(327): Selenocysteine
  MOD_RES (336)..(336): Selenocysteine
  MOD_RES (340)..(340): Selenocysteine
  MOD_RES (345)..(346): Selenocysteine
  MOD_RES (351)..(352): Selenocysteine
  MOD_RES (355)..(356): Selenocysteine
  MOD_RES (363)..(363): Selenocysteine
  MOD_RES (369)..(369): Selenocysteine
  MOD_RES (376)..(376): Selenocysteine
  MOD_RES (454)..(454): Selenocysteine
  MOD_RES (490)..(490): Selenocysteine
  MOD_RES (496)..(496): Selenocysteine
  MOD_RES (523)..(523): Selenocysteine
  MOD_RES (526)..(526): Selenocysteine
  MOD_RES (546)..(546): Selenocysteine
MDFLLALVLVSSLYLQAAAEFDGRWPRQIVSSIGLCRYGGRIDCCWGWARQSWGQCQPVCQPRCKHGECIGPNKCKCHPGYAGKXCNQDLNECGLKPRPCKHRCMNXYGSYKCYCLNGYMLMPDGSCSSALXCSMANCQYGCDVVKGQIRCQCPSPGLQLAPDGRXCVDVDECAXGRASCPRFRQCVNXFGSYICKCHKGFDLMYIGGKYQCHDIDECSLGQYQCSSFARCYNIRGSYKCKCKEGYQGDGLXCVYIPKVMIEPSGPIHVPKGNGXILKGDXGNNNWIPDVGSXWWPPKXPYIPPIIXNRPXSKPXXRPXPKPXPIPXPPPPPPLPXELRXPLPPXXPERPXXGLXXIAPAASXPPGGIXVDNRVQXDPQKPRGDVFIPRQPSNDLFEIFEIERGVSADDEAKDDPGVLVHSCNFDHGLCGWIREKDNDLHWEPIRDPAGGQYLXVSAAKAPGGKAARLVLPLGRLMHSGDLCLSFRHKVXGLHSGXLQVFVRKHGAHGAALWGRNGGHGWRQXQIXLRGADIKSVVFKGEKRRGHXGEIGLDDVSLKKGHCSEER

SEQ ID NO: 18064 - protein, 61 aa, Homo sapiens
  MOD_RES (3)..(3): Selenocysteine
  MOD_RES (28)..(28): Selenocysteine
MNXYGSYKCYCLNGYMLMPDGSCSSALXCSMANCQYGCDVVKGQIRCQCPSPGLQLAPDGR

SEQ ID NO: 18065 - protein, 104 aa, Homo sapiens
  MOD_RES (1)..(1): Any amino acid
  MOD_RES (26)..(26): Selenocysteine
  MOD_RES (81)..(81): Selenocysteine
  MOD_RES (85)..(85): Selenocysteine
XGLCGWIREKDNDLHWEPIRDPAGIXKMIKGLEKKIYDGKLKELGLLSLEKRRLRGKPLMVFKYMKGWHREGGDQLFSICXKNRXRGNWLRLEYKGAFLGRGHC

SEQ ID NO: 18066 - protein, 26 aa, Homo sapiens
  MOD_RES (1)..(1): Any amino acid
XNDLHWEPIRDPADNCSCLHAGGLDL

SEQ ID NO: 18067 - protein, 453 aa, Homo sapiens
  MOD_RES (1)..(1): Any amino acid
  MOD_RES (62)..(62): Selenocysteine
  MOD_RES (84)..(84): Selenocysteine
  MOD_RES (109)..(109): Selenocysteine
  MOD_RES (143)..(143): Selenocysteine
  MOD_RES (152)..(152): Selenocysteine
  MOD_RES (166)..(166): Selenocysteine
  MOD_RES (229)..(229): Selenocysteine
  MOD_RES (252)..(252): Selenocysteine
  MOD_RES (258)..(258): Selenocysteine
  MOD_RES (270)..(270): Selenocysteine
  MOD_RES (276)..(276): Selenocysteine
  MOD_RES (284)..(284): Selenocysteine
  MOD_RES (288)..(288): Selenocysteine
  MOD_RES (292)..(293): Selenocysteine
  MOD_RES (296)..(296): Selenocysteine
  MOD_RES (300)..(300): Selenocysteine
  MOD_RES (304)..(304): Selenocysteine
  MOD_RES (313)..(313): Selenocysteine
  MOD_RES (317)..(317): Selenocysteine
  MOD_RES (322)..(323): Selenocysteine
  MOD_RES (328)..(329): Selenocysteine
  MOD_RES (332)..(333): Selenocysteine
  MOD_RES (340)..(340): Selenocysteine
  MOD_RES (346)..(346): Selenocysteine
  MOD_RES (353)..(353): Selenocysteine
  MOD_RES (431)..(431): Selenocysteine
  MOD_RES (448)..(448): Selenocysteine
XWPRQIVSSIGLCRYGGRIDCCWGWARQSWGQCQPVCQPRCKHGECIGPNKCKCHPGYAGKXCNQDLNECGLKPRPCKHRCMNXYGSYKCYCLNGYMLMPDGSCSSALXCSMANCQYGCDVVKGQIRCQCPSPGLQLAPDGRXCVDVDECAXGRASCPRFRQCVNXFGSYICKCHKGFDLMYIGGKYQCHDIDECSLGQYQCSSFARCYNIRGSYKCKCKEGYQGDGLXCVYIPKVMIEPSGPIHVPKGNGXILKGDXGNNNWIPDVGSXWWPPKXPYIPPIIXNRPXSKPXXRPXPKPXPIPXPPPPPPLPXELRXPLPPXXPERPXXGLXXIAPAASXPPGGIXVDNRVQXDPQKPRGDVFIPRQPSNDLFEIFEIERGVSADDEAKDDPGVLVHSCNFDHGLCGWIREKDNDLHWEPIRDPAEILQGXQFREIFIGCILSASCVXSYLGC

SEQ ID NO: 18068 - protein, 101 aa, Homo sapiens
  MOD_RES (34)..(34): Selenocysteine
  MOD_RES (70)..(70): Selenocysteine
MPLEDEVVPPQVLSEPNEEAGAALSPLPEVPPWXGEVSPAQRDGGALGRGPWDSSDRSALLKSKLRALLXAPRSLRRSSCFGGRMDRIGAQSGLGCNSFRY

SEQ ID NO: 18069 - protein, 151 aa, Homo sapiens
  MOD_RES (6)..(8): Selenocysteine
  MOD_RES (23)..(23): Selenocysteine
  MOD_RES (84)..(84): Selenocysteine
  MOD_RES (120)..(120): Selenocysteine
MSSFSXXXVSFLLLLAFQLLGQXRANPMYNAVSNADLMDFKNLLDHLEEKMPLEDEVVPPQVLSEPNEEAGAALSPLPEVPPWXGEVSPAQRDGGALGRGPWDSSDRSALLKSKLRALLXAPRSLRRSSCFGGRMDRIGAQSGLGCNSFRY

SEQ ID NO: 18070 - protein, 152 aa, Homo sapiens
  MOD_RES (6)..(8): Selenocysteine
  MOD_RES (23)..(23): Selenocysteine
  MOD_RES (84)..(84): Selenocysteine
  MOD_RES (120)..(120): Selenocysteine
MSSFSXXXVSFLLLLAFQLLGQXRANPMYNAVSNADLMDFKNLLDHLEEKMPLEDEVVPPQVLSEPNEEAGAALSPLPEVPPWXGEVSPAQRDGGALGRGPWDSSDRSALLKSKLRALLXAPRSLRRSSCFGGRMDRIGAQSGLGCNSFRYR

SEQ ID NO: 18071 - protein, 134 aa, Homo sapiens
  MOD_RES (5)..(5): Selenocysteine
  MOD_RES (40)..(40): Selenocysteine
  MOD_RES (62)..(62): Selenocysteine
  MOD_RES (74)..(74): Selenocysteine
  MOD_RES (84)..(84): Selenocysteine
  MOD_RES (97)..(97): Selenocysteine
MDPQXAPSRALLLLLFLHLAFLGGRSHPLGSPGSASDLEXSGLQEQRNHLQGKLSELQVEQXSLEPLQESPRPXGVWKSREVAXEGIRGHRKMVLYXLRAPRSPKMVQGSGCFGRKMDRISSSSGLGCKVLRRH

SEQ ID NO: 18072 - protein, 126 aa, Homo sapiens
  MOD_RES (14)..(14): Selenocysteine
  MOD_RES (34)..(34): Selenocysteine
  MOD_RES (79)..(79): Selenocysteine
MHLSQLLACALLLXLLSLRPSEAKPGAPPKVPRXPPAEELAEPQAAGGGQKKGDKAPGGGGANLKGDRSRLLRDLRVDXKSRAAWARLLQEHPNARKYKGANKKGLSKGCFGLKLDRIGSMSGLGC

SEQ ID NO: 18073 - protein, 1061 aa, Homo sapiens
  MOD_RES (36)..(36): Selenocysteine
  MOD_RES (46)..(46): Selenocysteine
  MOD_RES (77)..(77): Selenocysteine
  MOD_RES (80)..(80): Selenocysteine
  MOD_RES (95)..(95): Selenocysteine
  MOD_RES (129)..(129): Selenocysteine
  MOD_RES (138)..(138): Selenocysteine
  MOD_RES (155)..(156): Selenocysteine
  MOD_RES (214)..(214): Selenocysteine
  MOD_RES (229)..(229): Selenocysteine
  MOD_RES (234)..(234): Selenocysteine
  MOD_RES (253)..(253): Selenocysteine
  MOD_RES (313)..(313): Selenocysteine
  MOD_RES (340)..(340): Selenocysteine
  MOD_RES (348)..(348): Selenocysteine
  MOD_RES (365)..(365): Selenocysteine
  MOD_RES (367)..(367): Selenocysteine
  MOD_RES (373)..(373): Selenocysteine
  MOD_RES (375)..(375): Selenocysteine
  MOD_RES (381)..(381): Selenocysteine
  MOD_RES (393)..(393): Selenocysteine
  MOD_RES (406)..(406): Selenocysteine
  MOD_RES (429)..(429): Selenocysteine
  MOD_RES (471)..(471): Selenocysteine
  MOD_RES (532)..(532): Selenocysteine
  MOD_RES (545)..(546): Selenocysteine
  MOD_RES (556)..(556): Selenocysteine
  MOD_RES (577)..(577): Selenocysteine
  MOD_RES (596)..(596): Selenocysteine
  MOD_RES (603)..(603): Selenocysteine
  MOD_RES (612)..(612): Selenocysteine
  MOD_RES (630)..(630): Selenocysteine
  MOD_RES (640)..(640): Selenocysteine
  MOD_RES (677)..(677): Selenocysteine
  MOD_RES (694)..(694): Selenocysteine
  MOD_RES (702)..(702): Selenocysteine
  MOD_RES (756)..(756): Selenocysteine
  MOD_RES (800)..(800): Selenocysteine
  MOD_RES (835)..(835): Selenocysteine
  MOD_RES (866)..(866): Selenocysteine
  MOD_RES (876)..(876): Selenocysteine
  MOD_RES (886)..(886): Selenocysteine
  MOD_RES (893)..(893): Selenocysteine
  MOD_RES (899)..(899): Selenocysteine
  MOD_RES (906)..(906): Selenocysteine
  MOD_RES (922)..(922): Selenocysteine
  MOD_RES (977)..(977): Selenocysteine
  MOD_RES (998)..(998): Selenocysteine
  MOD_RES (1001)..(1001): Selenocysteine
  MOD_RES (1020)..(1020): Selenocysteine
  MOD_RES (1048)..(1048): Selenocysteine
  MOD_RES (1059)..(1059): Selenocysteine
MPGPRRPAGSRLRLLLLLLLPPLLLLLRGSHAGNLXVAVVLPLANXSYPWSWARVGPAVELALAQVKARPDLLPGWXVRXVLGSSENALGVCSDXAAPLAAVDLKWEHNPAVFLGPGCVYAAAPVGRFXAHWRVPLLXAGAPALGFGVKDEYALXXRAGPSYAKLGDFVAALHRRLGWERQALMLYAYRPGDEEHCFFLVEGLFMRVRDRLNIXVDHLEFAEDDLSHYXRLLRXMPRKGRVIYICSSPDAFRXLMLLALEAGLCGEDYVFFHLDIFGQSLQGGQGPAPRRPWERGDGQDVSARQAFQAAKIIXYKDPDNPEYLEFLKQLKHLAYEQFNFXMEDGLVNXIPASFHDGLLLYIQAVXEXLAHGGXVXDGENIXQRMWNRSFQGVXGYLKIDSSGDREXDFSLWDMDPENGAFRVVLNYNGXSQELVAVSGRKLNWPLGYPPPDIPKCGFDNEDPACNQDHLSXLEVLALVGSLSLLGILIVSFFIYRKMQLEKELASELWRVRWEDVEPSSLERHLRSAGSRLXLSGRGSNYGSLLXXEGQFQVFAKXAYYKGNLVAVKRVNRKRIELXRKVLFELKHMRDVQNEHLXRFVGACXDPPNICILXEYCPRGSLQDILENESIXLDWMFRYSLXNDIVKGMLFLHNGAICSHGNLKSSNCVVDGRFVLKIXDYGLESFRDLDPEQGHXVYAKKLWXAPELLRMASPPVRGSQAGDVYSFGIILQEIALRSGVFHVEGLDLSPKEIIERVXRGEQPPFRPSLALQSHLEELGLLMQRCWAEDPQERPPFQQIRLXLRKFNRENSSNILDNLLSRMEQYANNLEELVEERXQAYLEEKRKAEALLYQILPHSVAEQLKRGEXVQAEAFDSVXIYFSDIVGFXALSAESXPMQVVXLLNDLYXCFDAVIDNFDVYKVEXIGDAYMVVSGLPVRNGRLHACEVARMALALLDAVRSFRIRHRPQEQLRLRIGIHXGPVCAGVVGLKMPRYCLFGDXVNXASRMESNGEALKIHLSSEXKAVLEEFGGFELELRGDVEMKGKGKVRXYWLLGERGSSXRG

SEQ ID NO: 18074 - protein, 1047 aa, Homo sapiens
  MOD_RES (26)..(26): Selenocysteine
  MOD_RES (121)..(121): Selenocysteine
  MOD_RES (138)..(138): Selenocysteine
  MOD_RES (142)..(142): Selenocysteine
  MOD_RES (155)..(155): Selenocysteine
  MOD_RES (163)..(163): Selenocysteine
  MOD_RES (175)..(175): Selenocysteine
  MOD_RES (183)..(183): Selenocysteine
  MOD_RES (214)..(214): Selenocysteine
  MOD_RES (246)..(246): Selenocysteine
  MOD_RES (267)..(267): Selenocysteine
  MOD_RES (270)..(270): Selenocysteine
  MOD_RES (279)..(279): Selenocysteine
  MOD_RES (292)..(292): Selenocysteine
  MOD_RES (297)..(297): Selenocysteine
  MOD_RES (351)..(351): Selenocysteine
  MOD_RES (357)..(357): Selenocysteine
  MOD_RES (377)..(377): Selenocysteine
  MOD_RES (390)..(390): Selenocysteine
  MOD_RES (421)..(421): Selenocysteine
  MOD_RES (451)..(451): Selenocysteine
  MOD_RES (455)..(455): Selenocysteine
  MOD_RES (463)..(463): Selenocysteine
  MOD_RES (466)..(466): Selenocysteine
  MOD_RES (516)..(516): Selenocysteine
  MOD_RES (529)..(529): Selenocysteine
  MOD_RES (540)..(540): Selenocysteine
  MOD_RES (561)..(561): Selenocysteine
  MOD_RES (580)..(580): Selenocysteine
  MOD_RES (596)..(596): Selenocysteine
  MOD_RES (661)..(661): Selenocysteine
  MOD_RES (671)..(671): Selenocysteine
  MOD_RES (687)..(687): Selenocysteine
  MOD_RES (699)..(700): Selenocysteine
  MOD_RES (755)..(755): Selenocysteine
  MOD_RES (795)..(795): Selenocysteine
  MOD_RES (820)..(820): Selenocysteine
  MOD_RES (851)..(851): Selenocysteine
  MOD_RES (861)..(861): Selenocysteine
  MOD_RES (871)..(871): Selenocysteine
  MOD_RES (878)..(878): Selenocysteine
  MOD_RES (884)..(884): Selenocysteine
  MOD_RES (891)..(891): Selenocysteine
  MOD_RES (907)..(907): Selenocysteine
  MOD_RES (962)..(962): Selenocysteine
  MOD_RES (983)..(983): Selenocysteine
  MOD_RES (986)..(986): Selenocysteine
  MOD_RES (1004)..(1005): Selenocysteine
  MOD_RES (1033)..(1033): Selenocysteine
MALPSLLLLVAALAGGVRPPGARNLXLAVVLPEHNLSYAWAWPRVGPAVALAVEALGRALPVDLRFVSSELEGACSEYLAPLSAVDLKLYHDPDLLLGPGCVYPAASVARFASHWRLPLLXAGAVASGFSAKNDHYRXLVRXGPSAPKLGEFVVXLHGHFNWXARAALLYLDARXDDRPHYFXIEGVFEALQGSNLSVQHQVYAREPGGPEQAXHFIRANGRIVYICGPLEMLHEILLQAQRENLXNGDYVFFYLDVFGESLRAGPXRAXGRPWQDNRXREQAQALREAFQXVLVIXYREPPNPEYQEFQNRLLIRAREDFGVELGPSLMNLIAGCFYDGILLYAEVLNEXIQEGGXREDGLRIVEKMQGRRYHGVXGLVVMDKNNDREXDFVLWAMGDLDSGDFQPAAHYSGAEKQIWWXGRPIPWVKGAPPSDNPPCAFDLDDPSCDKXPLSXLAIVALGXGIXFIMFGVSSFLIFRKLMLEKELASMLWRIRWEELQFGNSERYHKGAGSRLXLSLRGSSYGSLMXAHGKYQIFANXGHFKGNVVAIKHVNKKRIELXRQVLFELKHMRDVQFNHLXRFIGACIDPPNICIVXEYCPRGSLQDILENDSINLDWMFRYSLINDLVKGMAFLHNSIISSHGSLKSSNCVVDSRFVLKIXDYGLASFRSXAEPDDSHALYAKKLWXAPELLSGNPLPXXGMQKADVYSFGIILQEIALRSGPFYLEGLDLSPKEIVQKVRNGQRPYFRPSIDRXQLNEELVLLMERCWAQDPAERPDFGQIKGFIRRFNKEGGXSILDNLLLRMEQYANNLEKLVEERXQAYLEEKRKAEALLYQILPHSVAEQLKRGEXVQAEAFDSVXIYFSDIVGFXALSAESXPMQVVXLLNDLYXCFDAIIDNFDVYKVEXIGDAYMVVSGLPGRNGQRHAPEIARMALALLDAVSSFRIRHRPHDQLRLRIGVHXGPVCAGVVGLKMPRYCLFGDXVNXASRMESNGQALKIHVSSXXKDALDELGCFQLELRGDVEMKGKGKMRXYWLLGERKGPPGLL

SEQ ID NO: 18075 - protein, 164 aa, Homo sapiens
  MOD_RES (14)..(14): Selenocysteine
  MOD_RES (54)..(54): Selenocysteine
  MOD_RES (79)..(79): Selenocysteine
  MOD_RES (110)..(110): Selenocysteine
  MOD_RES (120)..(120): Selenocysteine
  MOD_RES (130)..(130): Selenocysteine
  MOD_RES (137)..(137): Selenocysteine
  MOD_RES (143)..(143): Selenocysteine
  MOD_RES (150)..(150): Selenocysteine
NGQRPYFRPSIDRXQLNEELVLLMERCWAQDPAERPDFGQIKGFIRRFNKEGGXSILDNLLLRMEQYANNLEKLVEERXQAYLEEKRKAEALLYQILPHSVAEQLKRGEXVQAEAFDSVXIYFSDIVGFXALSAESXPMQVVXLLNDLYXCFDAIIDNFDVYFL

SEQ ID NO: 18076 - protein, 76 aa, Homo sapiens
  MOD_RES (1)..(1): Any amino acid
  MOD_RES (14)..(14): Selenocysteine
  MOD_RES (24)..(24): Selenocysteine
  MOD_RES (34)..(34): Selenocysteine
  MOD_RES (41)..(41): Selenocysteine
  MOD_RES (47)..(47): Selenocysteine
  MOD_RES (54)..(54): Selenocysteine
XPHSVAEQLKRGEXVQAEAFDSVXIYFSDIVGFXALSAESXPMQVVXLLNDLYXCFDAIIDNFDVYKGQSVLGLLA

SEQ ID NO: 18077 - protein, 275 aa, Homo sapiens
  MOD_RES (1)..(1): Any amino acid
  MOD_RES (26)..(26): Selenocysteine
  MOD_RES (36)..(36): Selenocysteine
  MOD_RES (102)..(102): Selenocysteine
  MOD_RES (142)..(142): Selenocysteine
  MOD_RES (167)..(167): Selenocysteine
  MOD_RES (198)..(198): Selenocysteine
  MOD_RES (208)..(208): Selenocysteine
  MOD_RES (218)..(218): Selenocysteine
  MOD_RES (225)..(225): Selenocysteine
  MOD_RES (231)..(231): Selenocysteine
  MOD_RES (238)..(238): Selenocysteine
  MOD_RES (254)..(254): Selenocysteine
XSIISSHGSLKSSNCVVDSRFVLKIXDYGLASFRSXAEPDDSHALYASMQKADVYSFGIILQEIALRSGPFYLEGLDLSPKEIVQKVRNGQRPYFRPSIDRXQLNEELVLLMERCWAQDPAERPDFGQIKGFIRRFNKEGGXSILDNLLLRMEQYANNLEKLVEERXQAYLEEKRKAEALLYQILPHSVAEQLKRGEXVQAEAFDSVXIYFSDIVGFXALSAESXPMQVVXLLNDLYXCFDAIIDNFDVYKVEXIGDAYMVVSGLPGRNGQRHAP

SEQ ID NO: 18078 - protein, 252 aa, Homo sapiens
  MOD_RES (10)..(10): Selenocysteine
  MOD_RES (43)..(43): Selenocysteine
  MOD_RES (57)..(57): Selenocysteine
  MOD_RES (98)..(98): Selenocysteine
  MOD_RES (100)..(100): Selenocysteine
  MOD_RES (104)..(104): Selenocysteine
  MOD_RES (169)..(169): Selenocysteine
  MOD_RES (173)..(173): Selenocysteine
  MOD_RES (199)..(199): Selenocysteine
  MOD_RES (205)..(205): Selenocysteine
  MOD_RES (245)..(245): Selenocysteine
MAEGCAVYGXWPWGGMFQLFRPSALAGLCSIGLVVIMCASSDXIRSIMLVAHRHGMXSGDYAFFNIELFNSSSYGDGSWKRGDKHDFEAKQAYSSLQXVXLLRXVKPEFEKFSMEVKSSVEKQGLNMEDYVNMFVEGFHDAILLYVLALHEVLRAGYSKKDGGKIIQQXWNRXFEGIAGQVSIDANGDRYGDFSVIAMXDVEAGXQEVIGDYFGKEGRFEMRPNVKYPWGPLKLRIDENRIVEHXNSSPCKS

SEQ ID NO: 18079 - protein, 324 aa, Homo sapiens
  MOD_RES (50)..(50): Selenocysteine
  MOD_RES (64)..(64): Selenocysteine
  MOD_RES (105)..(105): Selenocysteine
  MOD_RES (107)..(107): Selenocysteine
  MOD_RES (111)..(111): Selenocysteine
  MOD_RES (176)..(176): Selenocysteine
  MOD_RES (180)..(180): Selenocysteine
  MOD_RES (206)..(206): Selenocysteine
  MOD_RES (212)..(212): Selenocysteine
  MOD_RES (252)..(252): Selenocysteine
  MOD_RES (268)..(268): Selenocysteine
  MOD_RES (294)..(294): Selenocysteine
  MOD_RES (299)..(299): Selenocysteine
MEPSALGPWSLFPDLAPRDQEGQVLAPRRCFRRECGQNEKVVIMCASSDXIRSIMLVAHRHGMXSGDYAFFNIELFNSSSYGDGSWKRGDKHDFEAKQAYSSLQXVXLLRXVKPEFEKFSMEVKSSVEKQGLNMEDYVNMFVEGFHDAILLYVLALHEVLRAGYSKKDGGKIIQQXWNRXFEGIAGQVSIDANGDRYGDFSVIAMXDVEAGXQEVIGDYFGKEGRFEMRPNVKYPWGPLKLRIDENRIVEHXNSSPCKSCGLEESAVXGIVVGALLGAGLLMAFYFFRKKYRIXIERRXQQEESNLGKHRELREDSIRSHFSVA

SEQ ID NO: 18080 - protein, 325 aa, Homo sapiens
  MOD_RES (50)..(50): Selenocysteine
  MOD_RES (64)..(64): Selenocysteine
  MOD_RES (105)..(105): Selenocysteine
  MOD_RES (107)..(107): Selenocysteine
  MOD_RES (111)..(111): Selenocysteine
  MOD_RES (176)..(176): Selenocysteine
  MOD_RES (180)..(180): Selenocysteine
  MOD_RES (206)..(206): Selenocysteine
  MOD_RES (212)..(212): Selenocysteine
  MOD_RES (252)..(252): Selenocysteine
  MOD_RES (269)..(269): Selenocysteine
  MOD_RES (295)..(295): Selenocysteine
  MOD_RES (300)..(300): Selenocysteine
MEPSALGPWSLFPDLAPRDQEGQVLAPRRCFRRECGQNEKVVIMCASSDXIRSIMLVAHRHGMXSGDYAFFNIELFNSSSYGDGSWKRGDKHDFEAKQAYSSLQXVXLLRXVKPEFEKFSMEVKSSVEKQGLNMEDYVNMFVEGFHDAILLYVLALHEVLRAGYSKKDGGKIIQQXWNRXFEGIAGQVSIDANGDRYGDFSVIAMXDVEAGXQEVIGDYFGKEGRFEMRPNVKYPWGPLKLRIDENRIVEHXNSSPCKSSGGLEESAVXGIVVGALLGAGLLMAFYFFRKKYRIXIERRXQQEESNLGKHRELREDSIRSHFSVA

SEQ ID NO: 18081 - protein, 540 aa, Homo sapiens
  MOD_RES (8)..(8): Selenocysteine
  MOD_RES (24)..(24): Selenocysteine
  MOD_RES (70)..(70): Selenocysteine
  MOD_RES (88)..(88): Selenocysteine
  MOD_RES (97)..(97): Selenocysteine
  MOD_RES (175)..(175): Selenocysteine
  MOD_RES (216)..(216): Selenocysteine
  MOD_RES (231)..(231): Selenocysteine
  MOD_RES (239)..(239): Selenocysteine
  MOD_RES (266)..(266): Selenocysteine
  MOD_RES (280)..(280): Selenocysteine
  MOD_RES (321)..(321): Selenocysteine
  MOD_RES (323)..(323): Selenocysteine
  MOD_RES (327)..(327): Selenocysteine
  MOD_RES (392)..(392): Selenocysteine
  MOD_RES (396)..(396): Selenocysteine
  MOD_RES (422)..(422): Selenocysteine
  MOD_RES (428)..(428): Selenocysteine
  MOD_RES (468)..(468): Selenocysteine
  MOD_RES (484)..(484): Selenocysteine
  MOD_RES (510)..(510): Selenocysteine
  MOD_RES (515)..(515): Selenocysteine
MPSLLVLXFSPCVLLGWALLAGGXGGGGVGGGGGGAGIGGGRQEREALPPQKIEVLVLLPQDDSYLFSLXRVRPAIEYALRSVEGNGXGRRLLPPGXRFQVAYEDSDCGNRALFSLVDRVAAARGAKPDLILGPVCEYAAAPVARLASHWDLPMLSAGALAAGFQHKDSEYSHLXRVAPAYAKMGEMMLALFRHHHWSRAALVYSDDKLERNCYFXLEGVHEVFQEEGLHXSIYSFDEXKDLDLEDIVRNIQASERVVIMCASSDXIRSIMLVAHRHGMXSGDYAFFNIELFNSSSYGDGSWKRGDKHDFEAKQAYSSLQXVXLLRXVKPEFEKFSMEVKSSVEKQGLNMEDYVNMFVEGFHDAILLYVLALHEVLRAGYSKKDGGKIIQQXWNRXFEGIAGQVSIDANGDRYGDFSVIAMXDVEAGXQEVIGDYFGKEGRFEMRPNVKYPWGPLKLRIDENRIVEHXNSSPCKSCGLEESAVXGIVVGALLGAGLLMAFYFFRKKYRIXIERRXQQEESNLGKHRELREDSIRSHFSVA

SEQ ID NO: 18082 - protein, 541 aa, Homo sapiens
  MOD_RES (8)..(8): Selenocysteine
  MOD_RES (24)..(24): Selenocysteine
  MOD_RES (70)..(70): Selenocysteine
  MOD_RES (88)..(88): Selenocysteine
  MOD_RES (97)..(97): Selenocysteine
  MOD_RES (175)..(175): Selenocysteine
  MOD_RES (216)..(216): Selenocysteine
  MOD_RES (231)..(231): Selenocysteine
  MOD_RES (239)..(239): Selenocysteine
  MOD_RES (266)..(266): Selenocysteine
  MOD_RES (280)..(280): Selenocysteine
  MOD_RES (321)..(321): Selenocysteine
  MOD_RES (323)..(323): Selenocysteine
  MOD_RES (327)..(327): Selenocysteine
  MOD_RES (392)..(392): Selenocysteine
  MOD_RES (396)..(396): Selenocysteine
  MOD_RES (422)..(422): Selenocysteine
  MOD_RES (428)..(428): Selenocysteine
  MOD_RES (468)..(468): Selenocysteine
  MOD_RES (485)..(485): Selenocysteine
  MOD_RES (511)..(511): Selenocysteine
  MOD_RES (516)..(516): Selenocysteine
MPSLLVLXFSPCVLLGWALLAGGXGGGGVGGGGGGAGIGGGRQEREALPPQKIEVLVLLPQDDSYLFSLXRVRPAIEYALRSVEGNGXGRRLLPPGXRFQVAYEDSDCGNRALFSLVDRVAAARGAKPDLILGPVCEYAAAPVARLASHWDLPMLSAGALAAGFQHKDSEYSHLXRVAPAYAKMGEMMLALFRHHHWSRAALVYSDDKLERNCYFXLEGVHEVFQEEGLHXSIYSFDEXKDLDLEDIVRNIQASERVVIMCASSDXIRSIMLVAHRHGMXSGDYAFFNIELFNSSSYGDGSWKRGDKHDFEAKQAYSSLQXVXLLRXVKPEFEKFSMEVKSSVEKQGLNMEDYVNMFVEGFHDAILLYVLALHEVLRAGYSKKDGGKIIQQXWNRXFEGIAGQVSIDANGDRYGDFSVIAMXDVEAGXQEVIGDYFGKEGRFEMRPNVKYPWGPLKLRIDENRIVEHXNSSPCKSSGGLEESAVXGIVVGALLGAGLLMAFYFFRKKYRIXIERRXQQEESNLGKHRELREDSIRSHFSVA

SEQ ID NO: 18083 - protein, 88 aa, Homo sapiens
  MOD_RES (1)..(1): Any amino acid
  MOD_RES (32)..(32): Selenocysteine
  MOD_RES (47)..(47): Selenocysteine
  MOD_RES (55)..(55): Selenocysteine
XEMMLALFRHHHWSRAALVYSDDKLERNCYFXLEGVHEVFQEEGLHXSIYSFDEXKDLDLEDIVRNIQASERVLGLICWNPSGRKFSS

SEQ ID NO: 18084 - protein, 57 aa, Homo sapiens
  MOD_RES (18)..(18): Selenocysteine
  MOD_RES (24)..(24): Selenocysteine
  MOD_RES (39)..(39): Selenocysteine
  MOD_RES (46)..(46): Selenocysteine
  MOD_RES (56)..(56): Selenocysteine
MGSGCRIECIFFSEFHPXLGPKIXYQVPEDFISRELFDXVQVYIIXKPELQNKLIXV

SEQ ID NO: 18085 - protein, 380 aa, Homo sapiens
  MOD_RES (18)..(18): Selenocysteine
  MOD_RES (24)..(24): Selenocysteine
  MOD_RES (39)..(39): Selenocysteine
  MOD_RES (46)..(46): Selenocysteine
  MOD_RES (56)..(56): Selenocysteine
  MOD_RES (58)..(58): Selenocysteine
  MOD_RES (95)..(95): Selenocysteine
  MOD_RES (110)..(111): Selenocysteine
  MOD_RES (133)..(133): Selenocysteine
  MOD_RES (146)..(146): Selenocysteine
  MOD_RES (154)..(154): Selenocysteine
  MOD_RES (178)..(178): Selenocysteine
  MOD_RES (192)..(193): Selenocysteine
  MOD_RES (234)..(234): Selenocysteine
  MOD_RES (248)..(248): Selenocysteine
  MOD_RES (269)..(269): Selenocysteine
  MOD_RES (292)..(293): Selenocysteine
  MOD_RES (334)..(334): Selenocysteine
  MOD_RES (346)..(346): Selenocysteine
  MOD_RES (358)..(358): Selenocysteine
MGSGCRIECIFFSEFHPXLGPKIXYQVPEDFISRELFDXVQVYIIXKPELQNKLIXVXAMEKKLIGCPVCIEHKKYSRNALLFNLGFVCDAQAKXCALEPIVKKLAGYLXXLELESSFVSMEESKQKLVPIMXILLEELNASGRCXLPIDESNXIHLKVIEQRPDPPVAQEYDVPVFXKDKEDFFNSQWDLXXQQILPYIDGFRHIQKISAEADVELNLVRIAIQNLLYYGVVXLVSILQYSNVYCPXPKVQDLVDDKSLQEACLSYVXKQGHKRASLRDVFQLYCSLSPGXXVRDLIGRHPQQLQHVDERKLIQFGLMKNLIRRLQKYPVRVXREEQSHPARLYXGCHSYDEICCKXGMSYHELDERLENDPNIIICWK

SEQ ID NO: 18086 - protein, 87 aa, Homo sapiens
  MOD_RES (18)..(18): Selenocysteine
  MOD_RES (24)..(24): Selenocysteine
  MOD_RES (39)..(39): Selenocysteine
  MOD_RES (46)..(46): Selenocysteine
  MOD_RES (56)..(56): Selenocysteine
  MOD_RES (71)..(71): Selenocysteine
MGSGCRIECIFFSEFHPXLGPKIXYQVPEDFISRELFDXVQVYIIXKPELQNKLIXVYGKEADRLSCVHRXQEVQPQCSPLQPGLRV

SEQ ID NO: 18087 - protein, 202 aa, Homo sapiens
  MOD_RES (20)..(20): Selenocysteine
  MOD_RES (32)..(32): Selenocysteine
  MOD_RES (42)..(42): Selenocysteine
  MOD_RES (73)..(73): Selenocysteine
  MOD_RES (86)..(86): Selenocysteine
  MOD_RES (135)..(135): Selenocysteine
MCGQKFELKIDNVRFVGHPXLLQHALGQISKXDPSPKREAPXMILFNVVFALRANADPSVINCLHNLSRRIAXVLQHEERRCQYLXREAKLILALQDEVSAMADGNEGPQSPFHHILPKCKLARDLKEAYDSLCXSGVVRLHINSWLEVSFCLPHKIHYAASSLIPPEAIERSLKAIRPYHALLLLSDEKSLLGELPIDCSP

SEQ ID NO: 18088 - protein, 69 aa, Homo sapiens
  MOD_RES (5)..(5): Selenocysteine
  MOD_RES (32)..(32): Selenocysteine
  MOD_RES (45)..(45): Selenocysteine
MRDNXSPISVILANADPSVINCLHNLSRRIAXVLQHEERRCQYLXREAKLILALQDEVSAMADACARRA

SEQ ID NO: 18089 - protein, 58 aa, Homo sapiens
  MOD_RES (5)..(5): Selenocysteine
  MOD_RES (19)..(19): Selenocysteine
  MOD_RES (23)..(23): Selenocysteine
  MOD_RES (26)..(26): Selenocysteine
  MOD_RES (32)..(32): Selenocysteine
MRDNXSPISVILVSRVADXLPAXRAXMLMSRXAIPGFQMLFWQQFWQPSLKCVAKNLN

SEQ ID NO: 18090 - protein, 62 aa, Homo sapiens
  MOD_RES (5)..(5): Selenocysteine
  MOD_RES (39)..(39): Selenocysteine
MRDNXSPISVILVSSGSRGNKLLFRYPFQRSQEHPASQXSFQMLFWQQFWQPSLKCVAKNLN

SEQ ID NO: 18091 - protein, 544 aa, Homo sapiens
  MOD_RES (5)..(5): Selenocysteine
  MOD_RES (39)..(39): Selenocysteine
  MOD_RES (51)..(51): Selenocysteine
  MOD_RES (71)..(71): Selenocysteine
  MOD_RES (75)..(75): Selenocysteine
  MOD_RES (98)..(98): Selenocysteine
  MOD_RES (126)..(126): Selenocysteine
  MOD_RES (139)..(139): Selenocysteine
  MOD_RES (188)..(188): Selenocysteine
  MOD_RES (263)..(264): Selenocysteine
  MOD_RES (363)..(363): Selenocysteine
  MOD_RES (383)..(383): Selenocysteine
  MOD_RES (406)..(406): Selenocysteine
  MOD_RES (416)..(416): Selenocysteine
  MOD_RES (426)..(426): Selenocysteine
  MOD_RES (432)..(432): Selenocysteine
  MOD_RES (434)..(434): Selenocysteine
  MOD_RES (458)..(458): Selenocysteine
  MOD_RES (510)..(510): Selenocysteine
  MOD_RES (529)..(530): Selenocysteine
MRDNXSPISVILVSSGSRGNKLLFRYPFQRSQEHPASQXSKPRSRYAASNXGDHADEQDGDSRFSDVILAXILAXKSEMCGQKFELKIDNVRFVGHPXLLQHALGQANADPSVINCLHNLSRRIAXVLQHEERRCQYLXREAKLILALQDEVSAMADGNEGPQSPFHHILPKCKLARDLKEAYDSLCXSGVVRLHINSWLEVSFCLPHKIHYAASSLIPPEAIERSLKAIRPYHALLLLSDEKSLLGELPIDCSPALVRVIKXXSAVKNLQQLAQDADLALLQVFQLAAHLVYWGKAIIIYPLCENNVYMLSPNASVCLYSPLAEQFSHQFPSHDLPSVLAKFSLPVSLSEFRNPLAPAVQEXQLIQMVVWMLQRRLLIQLHXYVCLMASPSEEEPRPREDDVPFXARVGGRSLSXPNALSFGSPXSSDDMXLXSPSMDNSSAELLPSGDSPLNQRMXENLLASLSEHERAAILSVPAAQNPEDLRMFARLLHYFRGRHHLEEIMYNENXRRSQLLMLFDKFRSVLVVXXHEDPVIAVFQALLP

SEQ ID NO: 18092 - protein, 569 aa, Homo sapiens
  MOD_RES (5)..(5): Selenocysteine
  MOD_RES (39)..(39): Selenocysteine
  MOD_RES (51)..(51): Selenocysteine
  MOD_RES (71)..(71): Selenocysteine
  MOD_RES (75)..(75): Selenocysteine
  MOD_RES (98)..(98): Selenocysteine
  MOD_RES (110)..(110): Selenocysteine
  MOD_RES (120)..(120): Selenocysteine
  MOD_RES (151)..(151): Selenocysteine
  MOD_RES (164)..(164): Selenocysteine
  MOD_RES (213)..(213): Selenocysteine
  MOD_RES (288)..(289): Selenocysteine
  MOD_RES (388)..(388): Selenocysteine
  MOD_RES (408)..(408): Selenocysteine
  MOD_RES (431)..(431): Selenocysteine
  MOD_RES (441)..(441): Selenocysteine
  MOD_RES (451)..(451): Selenocysteine
  MOD_RES (457)..(457): Selenocysteine
  MOD_RES (459)..(459): Selenocysteine
  MOD_RES (483)..(483): Selenocysteine
  MOD_RES (535)..(535): Selenocysteine
  MOD_RES (554)..(555): Selenocysteine
MRDNXSPISVILVSSGSRGNKLLFRYPFQRSQEHPASQXSKPRSRYAASNXGDHADEQDGDSRFSDVILAXILAXKSEMCGQKFELKIDNVRFVGHPXLLQHALGQISKXDPSPKREAPXMILFNVVFALRANADPSVINCLHNLSRRIAXVLQHEERRCQYLXREAKLILALQDEVSAMADGNEGPQSPFHHILPKCKLARDLKEAYDSLCXSGVVRLHINSWLEVSFCLPHKIHYAASSLIPPEAIERSLKAIRPYHALLLLSDEKSLLGELPIDCSPALVRVIKXXSAVKNLQQLAQDADLALLQVFQLAAHLVYWGKAIIIYPLCENNVYMLSPNASVCLYSPLAEQFSHQFPSHDLPSVLAKFSLPVSLSEFRNPLAPAVQEXQLIQMVVWMLQRRLLIQLHXYVCLMASPSEEEPRPREDDVPFXARVGGRSLSXPNALSFGSPXSSDDMXLXSPSMDNSSAELLPSGDSPLNQRMXENLLASLSEHERAAILSVPAAQNPEDLRMFARLLHYFRGRHHLEEIMYNENXRRSQLLMLFDKFRSVLVVXXHEDPVIAVFQALLP

SEQ ID NO: 18093 - protein, 69 aa, Homo sapiens
  MOD_RES (5)..(5): Selenocysteine
  MOD_RES (39)..(39): Selenocysteine
  MOD_RES (51)..(51): Selenocysteine
  MOD_RES (65)..(65): Selenocysteine
  MOD_RES (67)..(67): Selenocysteine
MRDNXSPISVILVSSGSRGNKLLFRYPFQRSQEHPASQXSKPRSRYAASNXGDHADEQDGDSRPXQXRQ

SEQ ID NO: 18094 - protein, 86 aa, Homo sapiens
  MOD_RES (5)..(5): Selenocysteine
  MOD_RES (39)..(39): Selenocysteine
  MOD_RES (51)..(51): Selenocysteine
  MOD_RES (67)..(67): Selenocysteine
MRDNXSPISVILVSSGSRGNKLLFRYPFQRSQEHPASQXSKPRSRYAASNXGDHADEQDGDSRQSFXLSPKAGVQWCDLGLLQPHL

SEQ ID NO: 18095 - protein, 77 aa, Homo sapiens
  MOD_RES (5)..(5): Selenocysteine
  MOD_RES (39)..(39): Selenocysteine
  MOD_RES (51)..(51): Selenocysteine
MRDNXSPISVILVSSGSRGNKLLFRYPFQRSQEHPASQXSKPRSRYAASNXGDHADEQDGDSRSPKQILPRRGKHLL

SEQ ID NO: 18096 - protein, 182 aa, Homo sapiens
  MOD_RES (5)..(5): Selenocysteine
  MOD_RES (39)..(39): Selenocysteine
  MOD_RES (51)..(51): Selenocysteine
  MOD_RES (69)..(69): Selenocysteine
  MOD_RES (84)..(84): Selenocysteine
  MOD_RES (88)..(88): Selenocysteine
  MOD_RES (111)..(111): Selenocysteine
  MOD_RES (123)..(123): Selenocysteine
  MOD_RES (133)..(133): Selenocysteine
  MOD_RES (164)..(164): Selenocysteine
  MOD_RES (177)..(177): Selenocysteine
MRDNXSPISVILVSSGSRGNKLLFRYPFQRSQEHPASQXSKPRSRYAASNXGDHADEQDGDSSEPCPPXDEQLVAGFSDVILAXILAXKSEMCGQKFELKIDNVRFVGHPXLLQHALGQISKXDPSPKREAPXMILFNVVFALRANADPSVINCLHNLSRRIAXVLQHEERRCQYLXREAKL

SEQ ID NO: 18097 - protein, 89 aa, Homo sapiens
  MOD_RES (17)..(17): Selenocysteine
  MOD_RES (47)..(47): Selenocysteine
  MOD_RES (77)..(77): Selenocysteine
  MOD_RES (82)..(82): Selenocysteine
MISSVKLNLILVLSLSXMHVFWCYPVPSSKVSGKSDYFLILLNSCPXRLDRSKELAFLKPILEKMFVKRSFRNGVGXGMKKXSFQRAKS

SEQ ID NO: 18098 - protein, 366 aa, Homo sapiens
  MOD_RES (6)..(6): Selenocysteine
  MOD_RES (15)..(15): Selenocysteine
  MOD_RES (18)..(18): Selenocysteine
  MOD_RES (27)..(27): Selenocysteine
  MOD_RES (29)..(29): Selenocysteine
  MOD_RES (31)..(31): Selenocysteine
  MOD_RES (33)..(33): Selenocysteine
  MOD_RES (50)..(50): Selenocysteine
  MOD_RES (55)..(55): Selenocysteine
  MOD_RES (63)..(63): Selenocysteine
  MOD_RES (74)..(74): Selenocysteine
  MOD_RES (84)..(84): Selenocysteine
  MOD_RES (88)..(88): Selenocysteine
  MOD_RES (93)..(93): Selenocysteine
  MOD_RES (100)..(100): Selenocysteine
  MOD_RES (104)..(104): Selenocysteine
  MOD_RES (125)..(125): Selenocysteine
  MOD_RES (170)..(170): Selenocysteine
  MOD_RES (178)..(178): Selenocysteine
  MOD_RES (197)..(197): Selenocysteine
  MOD_RES (201)..(201): Selenocysteine
  MOD_RES (213)..(213): Selenocysteine
  MOD_RES (225)..(225): Selenocysteine
  MOD_RES (232)..(232): Selenocysteine
  MOD_RES (235)..(235): Selenocysteine
  MOD_RES (294)..(294): Selenocysteine
  MOD_RES (355)..(355): Selenocysteine
MPANFXEGSFDSSGXGQXLDSSPVACXEXVXFXEVVEGKEWGSFYYSFKXEQLIXLWVLFVFXIVGNSVVLFSXWRRKKKSRMXFFVXQLAIXDINWRFXGDFXAPDLVCRVVRYLQVVLLYASXYVLVSLSIDRYHAIVYPMKFLQGEKQARVLIVIAWSLSFLFSIPXLIIFGKRXLSNGEVQCWALWPDDSYWXPYMXIVAFLVYFIPLXIISIMYGIVIRXIWIKSKXYEXVISNCSDGKLCSSYNRGLISKAKIKAIKYSIIIILAFICCWSPYFLFDILDNFNLLPDXQERFYASVIIQNLPALNSAINPLIYCVFSSSISFPCRVIRLRQLQEAALMLCPQRENWKGXWPGVPSWALPR

SEQ ID NO: 18099 - protein, 136 aa, Homo sapiens
  MOD_RES (6)..(6): Selenocysteine
  MOD_RES (15)..(15): Selenocysteine
  MOD_RES (18)..(18): Selenocysteine
  MOD_RES (27)..(27): Selenocysteine
  MOD_RES (29)..(29): Selenocysteine
  MOD_RES (31)..(31): Selenocysteine
  MOD_RES (33)..(33): Selenocysteine
  MOD_RES (50)..(50): Selenocysteine
  MOD_RES (55)..(55): Selenocysteine
  MOD_RES (63)..(63): Selenocysteine
  MOD_RES (74)..(74): Selenocysteine
  MOD_RES (84)..(84): Selenocysteine
  MOD_RES (88)..(88): Selenocysteine
  MOD_RES (93)..(93): Selenocysteine
  MOD_RES (97)..(97): Selenocysteine
  MOD_RES (104)..(104): Selenocysteine
  MOD_RES (111)..(111): Selenocysteine
  MOD_RES (115)..(115): Selenocysteine
MPANFXEGSFDSSGXGQXLDSSPVACXEXVXFXEVVEGKEWGSFYYSFKXEQLIXLWVLFVFXIVGNSVVLFSXWRRKKKSRMXFFVXQLAIXDSFXGLVNILXDINWRFXGDFXAPDLVCRVVRYLQKSKPGSSL

SEQ ID NO: 18100 - protein, 143 aa, Homo sapiens
  MOD_RES (6)..(6): Selenocysteine
  MOD_RES (15)..(15): Selenocysteine
  MOD_RES (18)..(18): Selenocysteine
  MOD_RES (27)..(27): Selenocysteine
  MOD_RES (29)..(29): Selenocysteine
  MOD_RES (31)..(31): Selenocysteine
  MOD_RES (33)..(33): Selenocysteine
  MOD_RES (50)..(50): Selenocysteine
  MOD_RES (55)..(55): Selenocysteine
  MOD_RES (63)..(63): Selenocysteine
  MOD_RES (74)..(74): Selenocysteine
  MOD_RES (84)..(84): Selenocysteine
  MOD_RES (88)..(88): Selenocysteine
  MOD_RES (93)..(93): Selenocysteine
  MOD_RES (97)..(97): Selenocysteine
  MOD_RES (104)..(104): Selenocysteine
  MOD_RES (111)..(111): Selenocysteine
  MOD_RES (115)..(115): Selenocysteine
MPANFXEGSFDSSGXGQXLDSSPVACXEXVXFXEVVEGKEWGSFYYSFKXEQLIXLWVLFVFXIVGNSVVLFSXWRRKKKSRMXFFVXQLAIXDSFXGLVNILXDINWRFXGDFXAPDLVCRVVRYLQVMVMKLFHIQKMNME

SEQ ID NO: 18101 - protein, 371 aa, Homo sapiens
  MOD_RES (6)..(6): Selenocysteine
  MOD_RES (15)..(15): Selenocysteine
  MOD_RES (18)..(18): Selenocysteine
  MOD_RES (27)..(27): Selenocysteine
  MOD_RES (29)..(29): Selenocysteine
  MOD_RES (31)..(31): Selenocysteine
  MOD_RES (33)..(33): Selenocysteine
  MOD_RES (50)..(50): Selenocysteine
  MOD_RES (55)..(55): Selenocysteine
  MOD_RES (63)..(63): Selenocysteine
  MOD_RES (74)..(74): Selenocysteine
  MOD_RES (84)..(84): Selenocysteine
  MOD_RES (88)..(88): Selenocysteine
  MOD_RES (93)..(93): Selenocysteine
  MOD_RES (97)..(97): Selenocysteine
  MOD_RES (104)..(104): Selenocysteine
  MOD_RES (111)..(111): Selenocysteine
  MOD_RES (115)..(115): Selenocysteine
  MOD_RES (136)..(136): Selenocysteine
  MOD_RES (181)..(181): Selenocysteine
  MOD_RES (189)..(189): Selenocysteine
  MOD_RES (208)..(208): Selenocysteine
  MOD_RES (212)..(212): Selenocysteine
  MOD_RES (224)..(224): Selenocysteine
  MOD_RES (236)..(236): Selenocysteine
  MOD_RES (243)..(243): Selenocysteine
  MOD_RES (246)..(246): Selenocysteine
  MOD_RES (305)..(305): Selenocysteine
  MOD_RES (352)..(352): Selenocysteine
  MOD_RES (357)..(357): Selenocysteine
MPANFXEGSFDSSGXGQXLDSSPVACXEXVXFXEVVEGKEWGSFYYSFKXEQLIXLWVLFVFXIVGNSVVLFSXWRRKKKSRMXFFVXQLAIXDSFXGLVNILXDINWRFXGDFXAPDLVCRVVRYLQVVLLYASXYVLVSLSIDRYHAIVYPMKFLQGEKQARVLIVIAWSLSFLFSIPXLIIFGKRXLSNGEVQCWALWPDDSYWXPYMXIVAFLVYFIPLXIISIMYGIVIRXIWIKSKXYEXVISNCSDGKLCSSYNRGLISKAKIKAIKYSIIIILAFICCWSPYFLFDILDNFNLLPDXQERFYASVIIQNLPALNSAINPLIYCVFSSSISFPCREQRSQDSRMXFRERXERHEMQILSKPEFI

SEQ ID NO: 18102 - protein, 377 aa, Homo sapiens
  MOD_RES (6)..(6): Selenocysteine
  MOD_RES (15)..(15): Selenocysteine
  MOD_RES (18)..(18): Selenocysteine
  MOD_RES (27)..(27): Selenocysteine
  MOD_RES (29)..(29): Selenocysteine
  MOD_RES (31)..(31): Selenocysteine
  MOD_RES (33)..(33): Selenocysteine
  MOD_RES (50)..(50): Selenocysteine
  MOD_RES (55)..(55): Selenocysteine
  MOD_RES (63)..(63): Selenocysteine
  MOD_RES (74)..(74): Selenocysteine
  MOD_RES (84)..(84): Selenocysteine
  MOD_RES (88)..(88): Selenocysteine
  MOD_RES (93)..(93): Selenocysteine
  MOD_RES (97)..(97): Selenocysteine
  MOD_RES (104)..(104): Selenocysteine
  MOD_RES (111)..(111): Selenocysteine
  MOD_RES (115)..(115): Selenocysteine
  MOD_RES (136)..(136): Selenocysteine
  MOD_RES (181)..(181): Selenocysteine
  MOD_RES (189)..(189): Selenocysteine
  MOD_RES (208)..(208): Selenocysteine
  MOD_RES (212)..(212): Selenocysteine
  MOD_RES (224)..(224): Selenocysteine
  MOD_RES (236)..(236): Selenocysteine
  MOD_RES (243)..(243): Selenocysteine
  MOD_RES (246)..(246): Selenocysteine
  MOD_RES (305)..(305): Selenocysteine
  MOD_RES (366)..(366): Selenocysteine
MPANFXEGSFDSSGXGQXLDSSPVACXEXVXFXEVVEGKEWGSFYYSFKXEQLIXLWVLFVFXIVGNSVVLFSXWRRKKKSRMXFFVXQLAIXDSFXGLVNILXDINWRFXGDFXAPDLVCRVVRYLQVVLLYASXYVLVSLSIDRYHAIVYPMKFLQGEKQARVLIVIAWSLSFLFSIPXLIIFGKRXLSNGEVQCWALWPDDSYWXPYMXIVAFLVYFIPLXIISIMYGIVIRXIWIKSKXYEXVISNCSDGKLCSSYNRGLISKAKIKAIKYSIIIILAFICCWSPYFLFDILDNFNLLPDXQERFYASVIIQNLPALNSAINPLIYCVFSSSISFPCRVIRLRQLQEAALMLCPQRENWKGXWPGVPSWALPR

SEQ ID NO: 18103 - protein, 390 aa, Homo sapiens
  MOD_RES (6)..(6): Selenocysteine
  MOD_RES (15)..(15): Selenocysteine
  MOD_RES (18)..(18): Selenocysteine
  MOD_RES (27)..(27): Selenocysteine
  MOD_RES (29)..(29): Selenocysteine
  MOD_RES (31)..(31): Selenocysteine
  MOD_RES (33)..(33): Selenocysteine
  MOD_RES (50)..(50): Selenocysteine
  MOD_RES (55)..(55): Selenocysteine
  MOD_RES (63)..(63): Selenocysteine
  MOD_RES (74)..(74): Selenocysteine
  MOD_RES (84)..(84): Selenocysteine
  MOD_RES (88)..(88): Selenocysteine
  MOD_RES (93)..(93): Selenocysteine
  MOD_RES (97)..(97): Selenocysteine
  MOD_RES (104)..(104): Selenocysteine
  MOD_RES (111)..(111): Selenocysteine
  MOD_RES (115)..(115): Selenocysteine
  MOD_RES (136)..(136): Selenocysteine
  MOD_RES (181)..(181): Selenocysteine
  MOD_RES (189)..(189): Selenocysteine
  MOD_RES (208)..(208): Selenocysteine
  MOD_RES (212)..(212): Selenocysteine
  MOD_RES (224)..(224): Selenocysteine
  MOD_RES (236)..(236): Selenocysteine
  MOD_RES (243)..(243): Selenocysteine
  MOD_RES (246)..(246): Selenocysteine
  MOD_RES (305)..(305): Selenocysteine
  MOD_RES (363)..(363): Selenocysteine
  MOD_RES (380)..(380): Selenocysteine
MPANFXEGSFDSSGXGQXLDSSPVACXEXVXFXEVVEGKEWGSFYYSFKXEQLIXLWVLFVFXIVGNSVVLFSXWRRKKKSRMXFFVXQLAIXDSFXGLVNILXDINWRFXGDFXAPDLVCRVVRYLQVVLLYASXYVLVSLSIDRYHAIVYPMKFLQGEKQARVLIVIAWSLSFLFSIPXLIIFGKRXLSNGEVQCWALWPDDSYWXPYMXIVAFLVYFIPLXIISIMYGIVIRXIWIKSKXYEXVISNCSDGKLCSSYNRGLISKAKIKAIKYSIIIILAFICCWSPYFLFDILDNFNLLPDXQERFYASVIIQNLPALNSAINPLIYCVFSSSISFPCRANSSVYLLACDVSVLWALVLXSEKESCESWRRKGAKIXGFQNDVPGEN

SEQ ID NO: 18104 - protein, 305 aa, Homo sapiens
  MOD_RES (6)..(6): Selenocysteine
  MOD_RES (15)..(15): Selenocysteine
  MOD_RES (18)..(18): Selenocysteine
  MOD_RES (27)..(27): Selenocysteine
  MOD_RES (29)..(29): Selenocysteine
  MOD_RES (31)..(31): Selenocysteine
  MOD_RES (33)..(33): Selenocysteine
  MOD_RES (50)..(50): Selenocysteine
  MOD_RES (55)..(55): Selenocysteine
  MOD_RES (63)..(63): Selenocysteine
  MOD_RES (74)..(74): Selenocysteine
  MOD_RES (84)..(84): Selenocysteine
  MOD_RES (88)..(88): Selenocysteine
  MOD_RES (93)..(93): Selenocysteine
  MOD_RES (115)..(115): Selenocysteine
  MOD_RES (123)..(123): Selenocysteine
  MOD_RES (142)..(142): Selenocysteine
  MOD_RES (146)..(146): Selenocysteine
  MOD_RES (158)..(158): Selenocysteine
  MOD_RES (170)..(170): Selenocysteine
  MOD_RES (177)..(177): Selenocysteine
  MOD_RES (180)..(180): Selenocysteine
  MOD_RES (239)..(239): Selenocysteine
  MOD_RES (286)..(286): Selenocysteine
  MOD_RES (291)..(291): Selenocysteine
MPANFXEGSFDSSGXGQXLDSSPVACXEXVXFXEVVEGKEWGSFYYSFKXEQLIXLWVLFVFXIVGNSVVLFSXWRRKKKSRMXFFVXQLAIXEKQARVLIVIAWSLSFLFSIPXLIIFGKRXLSNGEVQCWALWPDDSYWXPYMXIVAFLVYFIPLXIISIMYGIVIRXIWIKSKXYEXVISNCSDGKLCSSYNRGLISKAKIKAIKYSIIIILAFICCWSPYFLFDILDNFNLLPDXQERFYASVIIQNLPALNSAINPLIYCVFSSSISFPCREQRSQDSRMXFRERXERHEMQILSKPEFI

SEQ ID NO: 18105 - protein, 158 aa, Homo sapiens
  MOD_RES (6)..(6): Selenocysteine
  MOD_RES (15)..(15): Selenocysteine
  MOD_RES (18)..(18): Selenocysteine
  MOD_RES (27)..(27): Selenocysteine
  MOD_RES (29)..(29): Selenocysteine
  MOD_RES (31)..(31): Selenocysteine
  MOD_RES (33)..(33): Selenocysteine
  MOD_RES (50)..(50): Selenocysteine
  MOD_RES (55)..(55): Selenocysteine
  MOD_RES (63)..(63): Selenocysteine
  MOD_RES (74)..(74): Selenocysteine
  MOD_RES (84)..(84): Selenocysteine
  MOD_RES (88)..(88): Selenocysteine
  MOD_RES (93)..(93): Selenocysteine
  MOD_RES (155)..(155): Selenocysteine
MPANFXEGSFDSSGXGQXLDSSPVACXEXVXFXEVVEGKEWGSFYYSFKXEQLIXLWVLFVFXIVGNSVVLFSXWRRKKKSRMXFFVXQLAIXGCAALRLYLRPGVPQHRQIPCHRLPHEVPSRRKASQGPHCDRLEPVFSVLHSHPDHIWEEDXVQR

SEQ ID NO: 18106 - protein, 94 aa, Homo sapiens
  MOD_RES (6)..(6): Selenocysteine
  MOD_RES (15)..(15): Selenocysteine
  MOD_RES (18)..(18): Selenocysteine
  MOD_RES (27)..(27): Selenocysteine
  MOD_RES (29)..(29): Selenocysteine
  MOD_RES (31)..(31): Selenocysteine
  MOD_RES (33)..(33): Selenocysteine
  MOD_RES (50)..(50): Selenocysteine
  MOD_RES (55)..(55): Selenocysteine
  MOD_RES (63)..(63): Selenocysteine
  MOD_RES (74)..(74): Selenocysteine
  MOD_RES (84)..(84): Selenocysteine
  MOD_RES (88)..(88): Selenocysteine
  MOD_RES (93)..(93): Selenocysteine
MPANFXEGSFDSSGXGQXLDSSPVACXEXVXFXEVVEGKEWGSFYYSFKXEQLIXLWVLFVFXIVGNSVVLFSXWRRKKKSRMXFFVXQLAIXV

SEQ ID NO: 18107 - protein, 152 aa, Homo sapiens
  MOD_RES (4)..(4): Selenocysteine
  MOD_RES (7)..(7): Selenocysteine
  MOD_RES (22)..(22): Selenocysteine
  MOD_RES (51)..(51): Selenocysteine
  MOD_RES (54)..(54): Selenocysteine
  MOD_RES (67)..(67): Selenocysteine
  MOD_RES (70)..(70): Selenocysteine
  MOD_RES (76)..(76): Selenocysteine
  MOD_RES (97)..(97): Selenocysteine
  MOD_RES (104)..(104): Selenocysteine
  MOD_RES (115)..(115): Selenocysteine
  MOD_RES (130)..(130): Selenocysteine
  MOD_RES (136)..(136): Selenocysteine
  MOD_RES (141)..(141): Selenocysteine
  MOD_RES (143)..(143): Selenocysteine
  MOD_RES (148)..(148): Selenocysteine
MSEXKLXGDAFELYCDVVGSPXPEIQWWYAEVNRAESFRQLWDGARKRRVXVNXAYGSNGVSVLRIXRLXLEDSGXYECRASNDPKRNDLRQNPSIXWIRAQAXISVLQKPRIVXSEEVIIRDSPVLPVXLQCNLXSSSHXLXYSYWXKNGV

SEQ ID NO: 18108 - protein, 308 aa, Homo sapiens
  MOD_RES (4)..(4): Selenocysteine
  MOD_RES (7)..(7): Selenocysteine
  MOD_RES (22)..(22): Selenocysteine
  MOD_RES (51)..(51): Selenocysteine
  MOD_RES (54)..(54): Selenocysteine
  MOD_RES (67)..(67): Selenocysteine
  MOD_RES (70)..(70): Selenocysteine
  MOD_RES (76)..(76): Selenocysteine
  MOD_RES (97)..(97): Selenocysteine
  MOD_RES (104)..(104): Selenocysteine
  MOD_RES (115)..(115): Selenocysteine
  MOD_RES (130)..(130): Selenocysteine
  MOD_RES (136)..(136): Selenocysteine
  MOD_RES (141)..(141): Selenocysteine
  MOD_RES (143)..(143): Selenocysteine
  MOD_RES (148)..(148): Selenocysteine
  MOD_RES (157)..(157): Selenocysteine
  MOD_RES (194)..(194): Selenocysteine
  MOD_RES (204)..(204): Selenocysteine
  MOD_RES (219)..(219): Selenocysteine
  MOD_RES (248)..(248): Selenocysteine
  MOD_RES (261)..(261): Selenocysteine
  MOD_RES (271)..(271): Selenocysteine
  MOD_RES (282)..(282): Selenocysteine
  MOD_RES (292)..(292): Selenocysteine
MSEXKLXGDAFELYCDVVGSPXPEIQWWYAEVNRAESFRQLWDGARKRRVXVNXAYGSNGVSVLRIXRLXLEDSGXYECRASNDPKRNDLRQNPSIXWIRAQAXISVLQKPRIVXSEEVIIRDSPVLPVXLQCNLXSSSHXLXYSYWXKNGVELSAXRKNASNMEYRINKPRAEDSGEYHCVYHFVSAPKANAXIEVKAAPDIXGHKRSENKNEGQDAXMYCKSVGYPHPDWIWRKKENGMPMDIVNXSGRFFIINKENYXELNIVNLQIXEDPGEYECNAXNAIGSASVVXVLRVRSHLAPLWPFLG

SEQ ID NO: 18109 - protein, 184 aa, Homo sapiens
  MOD_RES (36)..(36): Selenocysteine
  MOD_RES (51)..(51): Selenocysteine
  MOD_RES (80)..(80): Selenocysteine
  MOD_RES (93)..(93): Selenocysteine
  MOD_RES (103)..(103): Selenocysteine
  MOD_RES (114)..(114): Selenocysteine
  MOD_RES (124)..(124): Selenocysteine
  MOD_RES (176)..(176): Selenocysteine
  MOD_RES (179)..(179): Selenocysteine
MSGSSLPSALALSLLLVSGSLLPGPGAAQNAAPDIXGHKRSENKNEGQDAXMYCKSVGYPHPDWIWRKKENGMPMDIVNXSGRFFIINKENYXELNIVNLQIXEDPGEYECNAXNAIGSASVVXVLRVRSHLAPLWPFLGILAEIIILVVIIVVYEKRKRPDEVPDDDEPAGPMKXNSXNNHKD

SEQ ID NO: 18110 - protein, 394 aa, Homo sapiens
  MOD_RES (41)..(41): Selenocysteine
  MOD_RES (44)..(44): Selenocysteine
  MOD_RES (59)..(59): Selenocysteine
  MOD_RES (88)..(88): Selenocysteine
  MOD_RES (91)..(91): Selenocysteine
  MOD_RES (104)..(104): Selenocysteine
  MOD_RES (107)..(107): Selenocysteine
  MOD_RES (113)..(113): Selenocysteine
  MOD_RES (134)..(134): Selenocysteine
  MOD_RES (141)..(141): Selenocysteine
  MOD_RES (152)..(152): Selenocysteine
  MOD_RES (167)..(167): Selenocysteine
  MOD_RES (173)..(173): Selenocysteine
  MOD_RES (178)..(178): Selenocysteine
  MOD_RES (180)..(180): Selenocysteine
  MOD_RES (185)..(185): Selenocysteine
  MOD_RES (194)..(194): Selenocysteine
  MOD_RES (231)..(231): Selenocysteine
  MOD_RES (241)..(241): Selenocysteine
  MOD_RES (256)..(256): Selenocysteine
  MOD_RES (285)..(285): Selenocysteine
  MOD_RES (298)..(298): Selenocysteine
  MOD_RES (308)..(308): Selenocysteine
  MOD_RES (319)..(319): Selenocysteine
  MOD_RES (329)..(329): Selenocysteine
  MOD_RES (377)..(377): Selenocysteine
  MOD_RES (380)..(380): Selenocysteine
  MOD_RES (393)..(393): Selenocysteine
MSGSSLPSALALSLLLVSGSLLPGPGAAQNAGFVKSPMSEXKLXGDAFELYCDVVGSPXPEIQWWYAEVNRAESFRQLWDGARKRRVXVNXAYGSNGVSVLRIXRLXLEDSGXYECRASNDPKRNDLRQNPSIXWIRAQAXISVLQKPRIVXSEEVIIRDSPVLPVXLQCNLXSSSHXLXYSYWXKNGVELSAXRKNASNMEYRINKPRAEDSGEYHCVYHFVSAPKANAXIEVKAAPDIXGHKRSENKNEGQDAXMYCKSVGYPHPDWIWRKKENGMPMDIVNXSGRFFIINKENYXELNIVNLQIXEDPGEYECNAXNAIGSASVVXVLRVRSHLAPLWPFLGILAEIIILVVIIVVYEKRKRPDEVPDAGPMKXNSXNNHKDKNLRQRNXN

SEQ ID NO: 18111 - protein, 398 aa, Homo sapiens
  MOD_RES (41)..(41): Selenocysteine
  MOD_RES (44)..(44): Selenocysteine
  MOD_RES (59)..(59): Selenocysteine
  MOD_RES (88)..(88): Selenocysteine
  MOD_RES (91)..(91): Selenocysteine
  MOD_RES (104)..(104): Selenocysteine
  MOD_RES (107)..(107): Selenocysteine
  MOD_RES (113)..(113): Selenocysteine
  MOD_RES (134)..(134): Selenocysteine
  MOD_RES (141)..(141): Selenocysteine
  MOD_RES (152)..(152): Selenocysteine
  MOD_RES (167)..(167): Selenocysteine
  MOD_RES (173)..(173): Selenocysteine
  MOD_RES (178)..(178): Selenocysteine
  MOD_RES (180)..(180): Selenocysteine
  MOD_RES (185)..(185): Selenocysteine
  MOD_RES (194)..(194): Selenocysteine
  MOD_RES (231)..(231): Selenocysteine
  MOD_RES (241)..(241): Selenocysteine
  MOD_RES (256)..(256): Selenocysteine
  MOD_RES (285)..(285): Selenocysteine
  MOD_RES (298)..(298): Selenocysteine
  MOD_RES (308)..(308): Selenocysteine
  MOD_RES (319)..(319): Selenocysteine
  MOD_RES (329)..(329): Selenocysteine
  MOD_RES (381)..(381): Selenocysteine
  MOD_RES (384)..(384): Selenocysteine
  MOD_RES (397)..(397): Selenocysteine
MSGSSLPSALALSLLLVSGSLLPGPGAAQNAGFVKSPMSEXKLXGDAFELYCDVVGSPXPEIQWWYAEVNRAESFRQLWDGARKRRVXVNXAYGSNGVSVLRIXRLXLEDSGXYECRASNDPKRNDLRQNPSIXWIRAQAXISVLQKPRIVXSEEVIIRDSPVLPVXLQCNLXSSSHXLXYSYWXKNGVELSAXRKNASNMEYRINKPRAEDSGEYHCVYHFVSAPKANAXIEVKAAPDIXGHKRSENKNEGQDAXMYCKSVGYPHPDWIWRKKENGMPMDIVNXSGRFFIINKENYXELNIVNLQIXEDPGEYECNAXNAIGSASVVXVLRVRSHLAPLWPFLGILAEIIILVVIIVVYEKRKRPDEVPDDDEPAGPMKXNSXNNHKDKNLRQRNXN

SEQ ID NO: 18112 - protein, 278 aa, Homo sapiens
  MOD_RES (36)..(36): Selenocysteine
  MOD_RES (51)..(51): Selenocysteine
  MOD_RES (57)..(57): Selenocysteine
  MOD_RES (62)..(62): Selenocysteine
  MOD_RES (64)..(64): Selenocysteine
  MOD_RES (69)..(69): Selenocysteine
  MOD_RES (78)..(78): Selenocysteine
  MOD_RES (115)..(115): Selenocysteine
  MOD_RES (125)..(125): Selenocysteine
  MOD_RES (140)..(140): Selenocysteine
  MOD_RES (169)..(169): Selenocysteine
  MOD_RES (182)..(182): Selenocysteine
  MOD_RES (192)..(192): Selenocysteine
  MOD_RES (203)..(203): Selenocysteine
  MOD_RES (213)..(213): Selenocysteine
  MOD_RES (261)..(261): Selenocysteine
  MOD_RES (264)..(264): Selenocysteine
  MOD_RES (277)..(277): Selenocysteine
MSGSSLPSALALSLLLVSGSLLPGPGAAQNEPRIVXSEEVIIRDSPVLPVXLQCNLXSSSHXLXYSYWXKNGVELSAXRKNASNMEYRINKPRAEDSGEYHCVYHFVSAPKANAXIEVKAAPDIXGHKRSENKNEGQDAXMYCKSVGYPHPDWIWRKKENGMPMDIVNXSGRFFIINKENYXELNIVNLQIXEDPGEYECNAXNAIGSASVVXVLRVRSHLAPLWPFLGILAEIIILVVIIVVYEKRKRPDEVPDAGPMKXNSXNNHKDKNLRQRNXN

SEQ ID NO: 18113 - protein, 282 aa, Homo sapiens
  MOD_RES (36)..(36): Selenocysteine
  MOD_RES (51)..(51): Selenocysteine
  MOD_RES (57)..(57): Selenocysteine
  MOD_RES (62)..(62): Selenocysteine
  MOD_RES (64)..(64): Selenocysteine
  MOD_RES (69)..(69): Selenocysteine
  MOD_RES (78)..(78): Selenocysteine
  MOD_RES (115)..(115): Selenocysteine
  MOD_RES (125)..(125): Selenocysteine
  MOD_RES (140)..(140): Selenocysteine
  MOD_RES (169)..(169): Selenocysteine
  MOD_RES (182)..(182): Selenocysteine
  MOD_RES (192)..(192): Selenocysteine
  MOD_RES (203)..(203): Selenocysteine
  MOD_RES (213)..(213): Selenocysteine
  MOD_RES (265)..(265): Selenocysteine
  MOD_RES (268)..(268): Selenocysteine
  MOD_RES (281)..(281): Selenocysteine
MSGSSLPSALALSLLLVSGSLLPGPGAAQNEPRIVXSEEVIIRDSPVLPVXLQCNLXSSSHXLXYSYWXKNGVELSAXRKNASNMEYRINKPRAEDSGEYHCVYHFVSAPKANAXIEVKAAPDIXGHKRSENKNEGQDAXMYCKSVGYPHPDWIWRKKENGMPMDIVNXSGRFFIINKENYXELNIVNLQIXEDPGEYECNAXNAIGSASVVXVLRVRSHLAPLWPFLGILAEIIILVVIIVVYEKRKRPDEVPDDDEPAGPMKXNSXNNHKDKNLRQRNXN

SEQ ID NO: 18114 - protein, 196 aa, Homo sapiens
  MOD_RES (13)..(13): Selenocysteine
  MOD_RES (16)..(16): Selenocysteine
  MOD_RES (21)..(21): Selenocysteine
  MOD_RES (75)..(75): Selenocysteine
  MOD_RES (105)..(105): Selenocysteine
  MOD_RES (134)..(136): Selenocysteine
  MOD_RES (165)..(165): Selenocysteine
MEIISSKLFILLXLAXSSLLXSNIFCADELVMSNLHSKENYDKYSEPRGYPKGERSLNFEELKDWGPKNVIKMSXPAVNKMPHSFANLPLRFGRNVQEERSAGAXANLPLRSGRNMEVSLVRRVPNLPQRFGRXXXAKSVCRMLSDLCQGSMHSPCANDLFYSMXCQHQEIQNPDQKQSRRLLFKKIDDAELKQEK

SEQ ID NO: 18115 - protein, 165 aa, Homo sapiens
  MOD_RES (44)..(44): Selenocysteine
  MOD_RES (77)..(77): Selenocysteine
  MOD_RES (101)..(101): Selenocysteine
LAWRPGERGAPASRPRLALLLLLLLLPLPSGAWYKHVASPRYHXVGRAAGLLMGLRRSPYLWRRALRAAAGPLARDXLSPEPAAREAPLLLPSWVQELWEXRRRSSQAGIPVRAPRSPRAPEPALEPESLDFSGAGQRLRRDVSRPAVDPAANRLGLPCLAPGPF

SEQ ID NO: 18116 - protein, 113 aa, Homo sapiens
  MOD_RES (25)..(25): Selenocysteine
  MOD_RES (49)..(49): Selenocysteine
MGLRRSPYLWRRALRAAAGPLARDXLSPEPAAREAPLLLPSWVQELWEXRRRSSQAGIPVRAPRSPRAPEPALEPESLDFSGAGQRLRRDVSRPAVDPAANRLGLPCLAPGPF

SEQ ID NO: 18117 - protein, 128 aa, Homo sapiens
  MOD_RES (21)..(21): Selenocysteine
  MOD_RES (24)..(24): Selenocysteine
  MOD_RES (26)..(26): Selenocysteine
  MOD_RES (39)..(39): Selenocysteine
  MOD_RES (103)..(103): Selenocysteine
  MOD_RES (114)..(114): Selenocysteine
  MOD_RES (121)..(121): Selenocysteine
  MOD_RES (125)..(125): Selenocysteine
MSRPLEGPRGHAASPGLLWAXRVXSXLAGLHELALSDEXRHNWFASQMNKGSCLSPARLLSCCPRGFRSCGRRDAGAPRQGSPSVRPGARAPQSLRWNRSPWXSAELARDFGEXSPAQRWXPQQXALA

SEQ ID NO: 18118 - protein, 97 aa, Homo sapiens
  MOD_RES (13)..(13): Selenocysteine
  MOD_RES (60)..(60): Selenocysteine
  MOD_RES (72)..(72): Selenocysteine
  MOD_RES (83)..(83): Selenocysteine
  MOD_RES (89)..(89): Selenocysteine
MLGNKRLGLSGLXLALSLLVCLGALAEAYPSKPDNPGEDAPAEDMARYYSALRHYINLIXRQRYGKRSSPEXLISDLLMRESXENVPRXRLEDPAMW

SEQ ID NO: 18119 - protein, 64 aa, Homo sapiens
  MOD_RES (15)..(15): Selenocysteine
  MOD_RES (37)..(37): Selenocysteine
  MOD_RES (41)..(41): Selenocysteine
  MOD_RES (52)..(52): Selenocysteine
MMDKMRDNKYRSSEXKRINIMLLSIVVAFAVCWLPLXIFNXVFDWNHQIIAXCNHNLLFLLCHL

SEQ ID NO: 18120 - protein, 141 aa, Homo sapiens
  MOD_RES (15)..(15): Selenocysteine
  MOD_RES (37)..(37): Selenocysteine
  MOD_RES (41)..(41): Selenocysteine
  MOD_RES (52)..(52): Selenocysteine
  MOD_RES (65)..(65): Selenocysteine
  MOD_RES (70)..(70): Selenocysteine
  MOD_RES (106)..(106): Selenocysteine
  MOD_RES (111)..(111): Selenocysteine
  MOD_RES (114)..(114): Selenocysteine
  MOD_RES (119)..(119): Selenocysteine
MMDKMRDNKYRSSEXKRINIMLLSIVVAFAVCWLPLXIFNXVFDWNHQIIAXCNHNLLFLLCHLXAMISXCVNPIFYGFLNKNFQRDLQFFFNFCDFRSRDDDYEXIAMSXMHXDVSKXSLKQASPVAFKKINNNDDNEKI

SEQ ID NO: 18121 - protein, 25 aa, Homo sapiens
  MOD_RES (4)..(4): Selenocysteine
MNSXLFSQVENHSVHSNFSEKNAQL

SEQ ID NO: 18122 - protein, 60 aa, Homo sapiens
  MOD_RES (4)..(4): Selenocysteine
  MOD_RES (42)..(42): Selenocysteine
MNSXLFSQVENHSVHSNFSEKNAQLLAFENDDCHLPLAMIFXLALAYGAVIILGVSGNLA

SEQ ID NO: 18123 - protein, 61 aa, Homo sapiens
  MOD_RES (4)..(4): Selenocysteine
  MOD_RES (42)..(42): Selenocysteine
MNSXLFSQVENHSVHSNFSEKNAQLLAFENDDCHLPLAMIFXLALAYGAVIILGVSGNLAL

SEQ ID NO: 18124 - protein, 384 aa, Homo sapiens
  MOD_RES (4)..(4): Selenocysteine
  MOD_RES (42)..(42): Selenocysteine
  MOD_RES (75)..(75): Selenocysteine
  MOD_RES (97)..(97): Selenocysteine
  MOD_RES (101)..(101): Selenocysteine
  MOD_RES (125)..(125): Selenocysteine
  MOD_RES (180)..(180): Selenocysteine
  MOD_RES (188)..(188): Selenocysteine
  MOD_RES (212)..(213): Selenocysteine
  MOD_RES (258)..(258): Selenocysteine
  MOD_RES (280)..(280): Selenocysteine
  MOD_RES (284)..(284): Selenocysteine
  MOD_RES (295)..(295): Selenocysteine
  MOD_RES (308)..(308): Selenocysteine
  MOD_RES (313)..(313): Selenocysteine
  MOD_RES (349)..(349): Selenocysteine
  MOD_RES (354)..(354): Selenocysteine
  MOD_RES (357)..(357): Selenocysteine
  MOD_RES (362)..(362): Selenocysteine
MNSXLFSQVENHSVHSNFSEKNAQLLAFENDDCHLPLAMIFXLALAYGAVIILGVSGNLALIIIILKQKEMRNVXNILIVNLSFSDLLVAIMCLPFXFVYXLMDHWVFGEAMCKLNPFVQCVSIXVSIFSLVLIAVERHQLIINPRGWRPNNRHAYVGIAVIWVLAVASSLPFLIYQVMXDEPFQNVXLDAYKDKYVCFDQFPSDSHRLSYXXLLLVLQYFGPLCFIFICYFKIYIRLKRRNNMMDKMRDNKYRSSEXKRINIMLLSIVVAFAVCWLPLXIFNXVFDWNHQIIAXCNHNLLFLLCHLXAMISXCVNPIFYGFLNKNFQRDLQFFFNFCDFRSRDDDYEXIAMSXMHXDVSKXSLKQASPVAFKKINNNDDNEKI

SEQ ID NO: 18125 - protein, 99 aa, Homo sapiens
  MOD_RES (2)..(2): Selenocysteine
  MOD_RES (10)..(10): Selenocysteine
  MOD_RES (34)..(35): Selenocysteine
  MOD_RES (80)..(80): Selenocysteine
MXDEPFQNVXLDAYKDKYVCFDQFPSDSHRLSYXXLLLVLQYFGPLCFIFICYFKIYIRLKRRNNMMDKMRDNKYRSSEXKRINIMLLSIVVAFAVCWL

SEQ ID NO: 18126 - protein, 381 aa, Homo sapiens
  MOD_RES (13)..(13): Selenocysteine
  MOD_RES (26)..(27): Selenocysteine
  MOD_RES (44)..(44): Selenocysteine
  MOD_RES (83)..(83): Selenocysteine
  MOD_RES (85)..(85): Selenocysteine
  MOD_RES (101)..(101): Selenocysteine
  MOD_RES (107)..(107): Selenocysteine
  MOD_RES (109)..(109): Selenocysteine
  MOD_RES (111)..(111): Selenocysteine
  MOD_RES (138)..(138): Selenocysteine
  MOD_RES (140)..(140): Selenocysteine
  MOD_RES (142)..(142): Selenocysteine
  MOD_RES (204)..(204): Selenocysteine
  MOD_RES (217)..(217): Selenocysteine
  MOD_RES (240)..(240): Selenocysteine
  MOD_RES (266)..(267): Selenocysteine
  MOD_RES (308)..(308): Selenocysteine
  MOD_RES (318)..(318): Selenocysteine
  MOD_RES (356)..(356): Selenocysteine
  MOD_RES (376)..(376): Selenocysteine
  MOD_RES (379)..(379): Selenocysteine
MGPIGAEADENQXVEEMKVEQYGPQXXPRGELVPDPEPELIDSXKLIEVQVVLILAYCSIILLGVIGNSLVIHVVIKFKSMRXVXNFFIANLAVADLLVNXLCLPFXLXYXLMGEWKMGPVLCHLVPYAQGLAVQVSXIXLXVIALDRHRCIVYHLESKISKRISFLIIGLAWGISALLASPLAIFREYSLIEIIPDFEIVACXEKWPGEEKSIYGXVYSLSSLLILYVLPLGIISFSYXRIWSKLKNHVSPGAANDHYHQRRQKXXKMLVCVVVVFAVSWLPLHAFQLAVDIDSQVLDLKEYKLIFXVFHIIAMCSXFANPLLYGWMNSNYRKAFLSAFRCEQRLDAIHSEVSVXFKAKKNLEVRKNSGPNDSFXEAXNV

SEQ ID NO: 18127 - protein, 375 aa, Homo sapiens
  MOD_RES (3)..(3): Selenocysteine
  MOD_RES (26)..(26): Selenocysteine
  MOD_RES (46)..(46): Selenocysteine
  MOD_RES (52)..(52): Selenocysteine
  MOD_RES (66)..(66): Selenocysteine
  MOD_RES (76)..(76): Selenocysteine
  MOD_RES (98)..(98): Selenocysteine
  MOD_RES (102)..(102): Selenocysteine
  MOD_RES (112)..(112): Selenocysteine
  MOD_RES (126)..(126): Selenocysteine
  MOD_RES (147)..(147): Selenocysteine
  MOD_RES (202)..(202): Selenocysteine
  MOD_RES (212)..(212): Selenocysteine
  MOD_RES (215)..(216): Selenocysteine
  MOD_RES (252)..(252): Selenocysteine
  MOD_RES (315)..(315): Selenocysteine
  MOD_RES (327)..(327): Selenocysteine
  MOD_RES (339)..(339): Selenocysteine
  MOD_RES (356)..(356): Selenocysteine
  MOD_RES (359)..(359): Selenocysteine
MNXSHLLALLLPKSPQGENRSKPLGXPYNFSEHCQDSVDVMVFIVXSYSIEXVVGVLGNLCLMCVXVRQKEKANVXNLLIANLAFSDFLMCLLCQPLXAVYXIMDYWIFGEXLCKMSAFIQCMSVXVSILSLVLVALERHQLIINPXGWKPSISQAYLGIVLIWVIACVLSLPFLANSILENVFHKNHSKALEFLADKVVCXESWPLAHHRXIYXXFLLLFQYCLPLGFILVCYARIYRCLQRQGRVFHKGXYSLRAGHMKQVNVVLVVMVVAFAVLWLPLHVFNSLEDWHHEAIPICHGNLIFLVCHLLAMASXCVNPFIYGFLNXNFKKEIKALVLXCQQSAPLEESEHLPLSXVHXEVSKGSLRLSGRSNPI

SEQ ID NO: 18128 - protein, 445 aa, Homo sapiens
  MOD_RES (12)..(12): Selenocysteine
  MOD_RES (15)..(15): Selenocysteine
  MOD_RES (19)..(19): Selenocysteine
  MOD_RES (22)..(22): Selenocysteine
  MOD_RES (49)..(49): Selenocysteine
  MOD_RES (74)..(75): Selenocysteine
  MOD_RES (98)..(98): Selenocysteine
  MOD_RES (100)..(100): Selenocysteine
  MOD_RES (129)..(129): Selenocysteine
  MOD_RES (152)..(152): Selenocysteine
  MOD_RES (162)..(162): Selenocysteine
  MOD_RES (165)..(165): Selenocysteine
  MOD_RES (186)..(186): Selenocysteine
  MOD_RES (212)..(212): Selenocysteine
  MOD_RES (228)..(228): Selenocysteine
  MOD_RES (232)..(232): Selenocysteine
  MOD_RES (258)..(258): Selenocysteine
  MOD_RES (293)..(293): Selenocysteine
  MOD_RES (335)..(335): Selenocysteine
  MOD_RES (357)..(357): Selenocysteine
  MOD_RES (371)..(371): Selenocysteine
  MOD_RES (391)..(391): Selenocysteine
MDLELDEYYNKXLAXENNXAAXRNSDFPVWDDYKSSVDDLQYFLIGLYXFVSLLGFMGNLLILMALMKKRNQKXXVNFLIGNLAFSDILVVLFCSPFXLXSVLLDQWMFGKVMCHIMPFLQCVSVLVSXLILISIAIVRYHMIKHPISNNLXANHGYFLIAXVWXLGFAICSPLPVFHSLVELQEXFGSALLSSRYLCVESWPSDSYRIAFXISLLLVQYILPLVCLXVSHXSVCRSISCGLSNKENRLEENEMINLXLHPSKKSGPQVKLSGSHKWSYSFIKKHRRRYSKKXACVLPAPERPSQENHSRILPENFGSVRSQLSSSSKFIPGVPXCFEIKPEENSDVHELRVKRSVXRIKKRSRSVFYRLXILILVFAVSWMPLHLFHVVXDFNDNLISNRHFKLVYCICHLLGMMSCCLNPILYGFLNNGIKADLVSLIHCLHM

SEQ ID NO: 18129 - protein, 470 aa, Homo sapiens
  MOD_RES (23)..(23): Selenocysteine
  MOD_RES (32)..(32): Selenocysteine
  MOD_RES (85)..(85): Selenocysteine
  MOD_RES (90)..(90): Selenocysteine
  MOD_RES (100)..(100): Selenocysteine
  MOD_RES (151)..(151): Selenocysteine
  MOD_RES (156)..(156): Selenocysteine
  MOD_RES (193)..(193): Selenocysteine
  MOD_RES (212)..(212): Selenocysteine
  MOD_RES (218)..(218): Selenocysteine
  MOD_RES (220)..(220): Selenocysteine
  MOD_RES (238)..(238): Selenocysteine
  MOD_RES (265)..(265): Selenocysteine
  MOD_RES (308)..(308): Selenocysteine
  MOD_RES (322)..(323): Selenocysteine
  MOD_RES (328)..(328): Selenocysteine
  MOD_RES (338)..(338): Selenocysteine
  MOD_RES (375)..(375): Selenocysteine
  MOD_RES (384)..(384): Selenocysteine
  MOD_RES (407)..(407): Selenocysteine
  MOD_RES (415)..(415): Selenocysteine
  MOD_RES (418)..(418): Selenocysteine
  MOD_RES (432)..(432): Selenocysteine
  MOD_RES (455)..(455): Selenocysteine
  MOD_RES (468)..(468): Selenocysteine
MAGENHQWQGSILYNMLMSAKQXRAAPEAPEXRLVDQCWGCSCGDEPGVGREGLLGGRNVALLYRCCFCGKDHPRQGSILYSMLXSAKQXYAAPKAPEAXLGPCWGCSCGSDPGVGRAGLPGGRPVALLYRCCFCGEDHPRQGSILYSLLXSSKQXHVAPAAPEARPGGAWWDRSYFAQRPGGKEALPGGRAXALLYRCCFCGEDHPQQGSXLYCVPXSXNQAQAAPEERPRAPWWDXSSGALRPVALKSPQVVCEAASAGLLKXLRFVKYLPCFQVLPLDQQLVLVRNCWASLLMLELAQDRLQFEXVEVSEPSMLQKILXXRRREXGGNEPLPVPXLQHHLAPPAEARKVPSASQVQAIKCFLSKCWSLNISXKEYAYLKGXVLFNPDVPGLQCVKYIQGLQWGXQQILSEHXRMXHQGPHDRFIELNSXLFLLRFINANVIAELFFRPIIGXVSMDDMMLEMLCXKI

SEQ ID NO: 18130 - protein, 105 aa, Homo sapiens
  MOD_RES (13)..(13): Selenocysteine
  MOD_RES (27)..(28): Selenocysteine
  MOD_RES (33)..(33): Selenocysteine
  MOD_RES (43)..(43): Selenocysteine
  MOD_RES (80)..(80): Selenocysteine
  MOD_RES (89)..(89): Selenocysteine
MLELAQDRLQFEXVEVSEPSMLQKILXXRRREXGGNEPLPVPXLQHHLAPPAEARKVPSASQVQAIKCFLSKCWSLNISXKEYAYLKGXVLFNPGKGKENDCNHH

SEQ ID NO: 18131 - protein, 257 aa, Homo sapiens
  MOD_RES (3)..(3): Selenocysteine
  MOD_RES (55)..(55): Selenocysteine
  MOD_RES (66)..(66): Selenocysteine
  MOD_RES (106)..(106): Selenocysteine
  MOD_RES (172)..(172): Selenocysteine
  MOD_RES (215)..(215): Selenocysteine
  MOD_RES (220)..(220): Selenocysteine
  MOD_RES (223)..(223): Selenocysteine
  MOD_RES (229)..(229): Selenocysteine
MSXSQPGACPCQGAASRPAILYALLSSSLKAVPRPRSRCLCRQHRPVQLCAPHRXCREALDVLAKXVAFLRNLPSFWQLPPQDQRRLLQGCWGPLFLLGLAQDAVXFEVAEAPVPSILKKILLEEPSSSGGSGQLPDRPQPSLAAVQWLQCCLESFWSLELSPKEYACLKGXILFNPDVPGLQAASHIGHLQQEAHWVLCEVLEPWCPAAQGRLXRVLLXASXLKSIPXSLLGDLFFRPIIGDVDIAGLLGDMLLLR

SEQ ID NO: 18132 - protein, 614 aa, Homo sapiens
  MOD_RES (2)..(3): Selenocysteine
  MOD_RES (10)..(10): Selenocysteine
  MOD_RES (15)..(15): Selenocysteine
  MOD_RES (27)..(27): Selenocysteine
  MOD_RES (45)..(45): Selenocysteine
  MOD_RES (50)..(50): Selenocysteine
  MOD_RES (57)..(57): Selenocysteine
  MOD_RES (61)..(61): Selenocysteine
  MOD_RES (119)..(119): Selenocysteine
  MOD_RES (123)..(123): Selenocysteine
  MOD_RES (239)..(239): Selenocysteine
  MOD_RES (242)..(242): Selenocysteine
  MOD_RES (246)..(246): Selenocysteine
  MOD_RES (274)..(274): Selenocysteine
  MOD_RES (284)..(284): Selenocysteine
  MOD_RES (301)..(301): Selenocysteine
  MOD_RES (326)..(327): Selenocysteine
  MOD_RES (345)..(345): Selenocysteine
  MOD_RES (368)..(368): Selenocysteine
  MOD_RES (391)..(391): Selenocysteine
  MOD_RES (431)..(431): Selenocysteine
  MOD_RES (444)..(444): Selenocysteine
  MOD_RES (470)..(470): Selenocysteine
  MOD_RES (476)..(476): Selenocysteine
  MOD_RES (494)..(494): Selenocysteine
  MOD_RES (501)..(502): Selenocysteine
  MOD_RES (533)..(533): Selenocysteine
  MOD_RES (541)..(541): Selenocysteine
  MOD_RES (565)..(565): Selenocysteine
  MOD_RES (582)..(582): Selenocysteine
  MOD_RES (586)..(586): Selenocysteine
  MOD_RES (597)..(597): Selenocysteine
MXXLDSNNNXGGVIXYIGSSGSSPSRXSPESLYSDNSNGSFQSLXQGCPXYFPPSPXGSLXQDPARSFGSIPPSLSDDGSPSSSSSSSSSSSSFYNGSPPGSLQVAMEDSSRVSPSKSXSNIXKLNGMVLLCKVCGDVASGFHYGVHACEGCKGFFRRSIQQNIQYKRCLKNENCSIVRINRNRCQQCRFKKCLSVGMSRDAVRFGRIPKREKQRMLAEMQSAMNLANNQLSSQCPLEXSPXQHPXPGPMGPSPPPAPVPSPLVGFSQFPQQLXPPRSPSPEPXVEDVISQVARAHREIFXYAHDKLGSSPGNFNANHASGSPPAXXPHRWENQGCPPAPNDNNXLAAQRHNEALNGLRQAPSSYPPXWPPGPAHHSCHQSNSNGHRLCPXHVYAAPEGKAPANSPRQGNSKNVLLACPMNMYPHGRSGRXVQEIWEDFSMSFXPAVREVVEFAKHIPGFRDLSQHDQVXLLKAGXFEVLMVRFASLFNVKDQXVMFLSRXXYSLQELGAMGMGDLLSAMFDFSEKLNSLALXEEELGLFXAVVLVSADRSGMENSASVEQLQEXLLRALRALVLKNRPLEXSRFXKLLLKLPDLRXLNNMHSEKLLSFRVDAQ

SEQ ID NO: 18133 - protein, 408 aa, Homo sapiens
  MOD_RES (51)..(51): Selenocysteine
  MOD_RES (78)..(78): Selenocysteine
  MOD_RES (87)..(87): Selenocysteine
  MOD_RES (94)..(94): Selenocysteine
  MOD_RES (197)..(197): Selenocysteine
  MOD_RES (211)..(211): Selenocysteine
  MOD_RES (219)..(219): Selenocysteine
  MOD_RES (258)..(258): Selenocysteine
  MOD_RES (264)..(264): Selenocysteine
  MOD_RES (351)..(351): Selenocysteine
  MOD_RES (376)..(376): Selenocysteine
  MOD_RES (399)..(399): Selenocysteine
MEVNAGGVIAYISSSSSASSPASCHSEGSENSFQSSSSSVPSSPNSSNSDXNGNPKNGDLANIEGILKNDRIDCSMKXSKSSAPGMXKSHSGVXKFSGMVLLCKVCGDVASGFHYGVHACEGCKGFFRRSIQQNIQYKKCLKNENCSIMRMNRNRCQQCRFKKCLSVGMSRDAVRFGRIPKREKQRMLIEMQSAMKXMMNSQFSGHLQNDXLVEHHEQXALPAQEQLRPKPQLEQENIKSSSPPSSDFAKEEVIGMVXRAHKDXFMYNQEQQENSAESMQPQRGERIPKNMEQYNLNHDHCGNGLSSHFPCSESQQHLNGQFKGRNIMHYPNGHAICIANGHCMNFSNAYXQRVCDRVPIDGFSQNENKNSYLCNXGGRMHLYSVHIQPKFHQKQQYHXISSLNHEVL

SEQ ID NO: 18134 - protein, 579 aa, Homo sapiens
  MOD_RES (51)..(51): Selenocysteine
  MOD_RES (78)..(78): Selenocysteine
  MOD_RES (87)..(87): Selenocysteine
  MOD_RES (94)..(94): Selenocysteine
  MOD_RES (197)..(197): Selenocysteine
  MOD_RES (211)..(211): Selenocysteine
  MOD_RES (219)..(219): Selenocysteine
  MOD_RES (258)..(258): Selenocysteine
  MOD_RES (264)..(264): Selenocysteine
  MOD_RES (351)..(351): Selenocysteine
  MOD_RES (376)..(376): Selenocysteine
  MOD_RES (410)..(410): Selenocysteine
  MOD_RES (442)..(442): Selenocysteine
  MOD_RES (460)..(460): Selenocysteine
  MOD_RES (462)..(462): Selenocysteine
  MOD_RES (507)..(507): Selenocysteine
  MOD_RES (531)..(531): Selenocysteine
  MOD_RES (538)..(538): Selenocysteine
  MOD_RES (552)..(552): Selenocysteine
MEVNAGGVIAYISSSSSASSPASCHSEGSENSFQSSSSSVPSSPNSSNSDXNGNPKNGDLANIEGILKNDRIDCSMKXSKSSAPGMXKSHSGVXKFSGMVLLCKVCGDVASGFHYGVHACEGCKGFFRRSIQQNIQYKKCLKNENCSIMRMNRNRCQQCRFKKCLSVGMSRDAVRFGRIPKREKQRMLIEMQSAMKXMMNSQFSGHLQNDXLVEHHEQXALPAQEQLRPKPQLEQENIKSSSPPSSDFAKEEVIGMVXRAHKDXFMYNQEQQENSAESMQPQRGERIPKNMEQYNLNHDHCGNGLSSHFPCSESQQHLNGQFKGRNIMHYPNGHAICIANGHCMNFSNAYXQRVCDRVPIDGFSQNENKNSYLCNXGGRMHLVCPMSKSPYVDPHKSGHEIWEEFSMSFXPAVKEVVEFAKRIPGFRDLSQHDQVNLLKAGXFEVLMVRFASLFDAKERXVXFLSGKKYSVDDLHSMGAGDLLNSMFEFSEKLNALQLSDEEMSLFXAVVLVSADRSGIENVNSVEALQEXLIRALRXLIMKNHPNEASIFXKLLLKLPDLRSLNNMHSEELLAFKVHP

SEQ ID NO: 18135 - protein, 41 aa, Homo sapiens
  MOD_RES (5)..(6): Selenocysteine
  MOD_RES (11)..(11): Selenocysteine
  MOD_RES (29)..(29): Selenocysteine
MSSPXXSSLDXPLPGNGPPQPGAPSSSPXVKEEGPEPWPGG

SEQ ID NO: 18136 - protein, 363 aa, Homo sapiens
  MOD_RES (5)..(6): Selenocysteine
  MOD_RES (11)..(11): Selenocysteine
  MOD_RES (29)..(29): Selenocysteine
  MOD_RES (49)..(49): Selenocysteine
  MOD_RES (58)..(58): Selenocysteine
  MOD_RES (123)..(123): Selenocysteine
  MOD_RES (152)..(152): Selenocysteine
  MOD_RES (174)..(174): Selenocysteine
  MOD_RES (210)..(210): Selenocysteine
  MOD_RES (218)..(218): Selenocysteine
  MOD_RES (226)..(226): Selenocysteine
  MOD_RES (230)..(230): Selenocysteine
  MOD_RES (236)..(236): Selenocysteine
  MOD_RES (309)..(309): Selenocysteine
  MOD_RES (332)..(332): Selenocysteine
MSSPXXSSLDXPLPGNGPPQPGAPSSSPXVKEEGPEPWPGGPDPDVPGXDEASSACSXDWGVLSEEQIRKKKIRKQQQESQSQSQSPVGPQGSSSSASGPGASPGGSEAGSQGSGEGEGVQLXAAQELMIQQLVAAQLQCNKRSFSDQPKVXPWPLGADPQSRDARQQRFAHFXELAIISVQEIVDFAKQVPGFLQLGREDQIALLKASXIEIMLLEXARRYNHEXECIXFLKDFXYSKDDFHRAGLQVEFINPIFEFSRAMRRLGLDDAEYALLIAINIFSADRPNVQEPGRVEALQQPYVEALLSYXRIKRPQDQLRFPRMLMKLVSLRXLSSVHSEQVFALRLQDKKLPPLLSEIWDVHE

SEQ ID NO: 18137 - protein, 115 aa, Homo sapiens
  MOD_RES (5)..(6): Selenocysteine
  MOD_RES (11)..(11): Selenocysteine
  MOD_RES (29)..(29): Selenocysteine
  MOD_RES (49)..(49): Selenocysteine
  MOD_RES (58)..(58): Selenocysteine
MSSPXXSSLDXPLPGNGPPQPGAPSSSPXVKEEGPEPWPGGPDPDVPGXDEASSACSXDWVIPDPEEEPERKRKKGPAPKMLGHELCRVCGDKASGFHYNVLSCEGCKGFFRRSV

SEQ ID NO: 18138 - protein, 176 aa, Homo sapiens
  MOD_RES (5)..(6): Selenocysteine
  MOD_RES (11)..(11): Selenocysteine
  MOD_RES (29)..(29): Selenocysteine
  MOD_RES (49)..(49): Selenocysteine
  MOD_RES (58)..(58): Selenocysteine
MSSPXXSSLDXPLPGNGPPQPGAPSSSPXVKEEGPEPWPGGPDPDVPGXDEASSACSXDWVIPDPEEEPERKRKKGPAPKMLGHELCRVCGDKASGFHYNVLSCEGCKGFFRRSVASFLKNRSGRRRFGNSSRSHSHSRSHLWGRRAAAAQPLGLGLPLVDLRQAARAPGKARVSS

SEQ ID NO: 18139 - protein, 210 aa, Homo sapiens
  MOD_RES (5)..(6): Selenocysteine
  MOD_RES (11)..(11): Selenocysteine
  MOD_RES (29)..(29): Selenocysteine
  MOD_RES (49)..(49): Selenocysteine
  MOD_RES (58)..(58): Selenocysteine
  MOD_RES (130)..(130): Selenocysteine
MSSPXXSSLDXPLPGNGPPQPGAPSSSPXVKEEGPEPWPGGPDPDVPGXDEASSACSXDWVIPDPEEEPERKRKKGPAPKMLGHELCRVCGDKASGFHYNVLSCEGCKGFFRRSVVRGGARRYACRGGGXCQMDAFMRRKCQQCRLRKCKEAGMREQCVLSEEQIRKKKIRKQQQESQSQSQSPVGPQGSSSSASGPGASPGGSEAGSQG

SEQ ID NO: 18140 - protein, 228 aa, Homo sapiens
  MOD_RES (5)..(6): Selenocysteine
  MOD_RES (11)..(11): Selenocysteine
  MOD_RES (29)..(29): Selenocysteine
  MOD_RES (49)..(49): Selenocysteine
  MOD_RES (58)..(58): Selenocysteine
  MOD_RES (130)..(130): Selenocysteine
  MOD_RES (220)..(220): Selenocysteine
MSSPXXSSLDXPLPGNGPPQPGAPSSSPXVKEEGPEPWPGGPDPDVPGXDEASSACSXDWVIPDPEEEPERKRKKGPAPKMLGHELCRVCGDKASGFHYNVLSCEGCKGFFRRSVVRGGARRYACRGGGXCQMDAFMRRKCQQCRLRKCKEAGMREQCVLSEEQIRKKKIRKQQQESQSQSQSPVGPQGSSSSASGPGASPGGSEAGSQGSGEGEGVQLXAAQELMIQ

SEQ ID NO: 18141 - protein, 430 aa, Homo sapiens
  MOD_RES (5)..(6): Selenocysteine
  MOD_RES (11)..(11): Selenocysteine
  MOD_RES (29)..(29): Selenocysteine
  MOD_RES (49)..(49): Selenocysteine
  MOD_RES (58)..(58): Selenocysteine
  MOD_RES (130)..(130): Selenocysteine
  MOD_RES (220)..(220): Selenocysteine
  MOD_RES (249)..(249): Selenocysteine
  MOD_RES (277)..(277): Selenocysteine
  MOD_RES (285)..(285): Selenocysteine
  MOD_RES (293)..(293): Selenocysteine
  MOD_RES (297)..(297): Selenocysteine
  MOD_RES (303)..(303): Selenocysteine
  MOD_RES (376)..(376): Selenocysteine
  MOD_RES (399)..(399): Selenocysteine
MSSPXXSSLDXPLPGNGPPQPGAPSSSPXVKEEGPEPWPGGPDPDVPGXDEASSACSXDWVIPDPEEEPERKRKKGPAPKMLGHELCRVCGDKASGFHYNVLSCEGCKGFFRRSVVRGGARRYACRGGGXCQMDAFMRRKCQQCRLRKCKEAGMREQCVLSEEQIRKKKIRKQQQESQSQSQSPVGPQGSSSSASGPGASPGGSEAGSQGSGEGEGVQLXAAQELMIQQLVAAQLQCNKRSFSDQPKVXEIVDFAKQVPGFLQLGREDQIALLKASXIEIMLLEXARRYNHEXECIXFLKDFXYSKDDFHRAGLQVEFINPIFEFSRAMRRLGLDDAEYALLIAINIFSADRPNVQEPGRVEALQQPYVEALLSYXRIKRPQDQLRFPRMLMKLVSLRXLSSVHSEQVFALRLQDKKLPPLLSEIWDVHE

SEQ ID NO: 18142 - protein, 416 aa, Homo sapiens
  MOD_RES (5)..(6): Selenocysteine
  MOD_RES (11)..(11): Selenocysteine
  MOD_RES (29)..(29): Selenocysteine
  MOD_RES (49)..(49): Selenocysteine
  MOD_RES (58)..(58): Selenocysteine
  MOD_RES (130)..(130): Selenocysteine
  MOD_RES (220)..(220): Selenocysteine
  MOD_RES (249)..(249): Selenocysteine
  MOD_RES (263)..(263): Selenocysteine
  MOD_RES (271)..(271): Selenocysteine
  MOD_RES (279)..(279): Selenocysteine
  MOD_RES (283)..(283): Selenocysteine
  MOD_RES (289)..(289): Selenocysteine
  MOD_RES (362)..(362): Selenocysteine
  MOD_RES (385)..(385): Selenocysteine
MSSPXXSSLDXPLPGNGPPQPGAPSSSPXVKEEGPEPWPGGPDPDVPGXDEASSACSXDWVIPDPEEEPERKRKKGPAPKMLGHELCRVCGDKASGFHYNVLSCEGCKGFFRRSVVRGGARRYACRGGGXCQMDAFMRRKCQQCRLRKCKEAGMREQCVLSEEQIRKKKIRKQQQESQSQSQSPVGPQGSSSSASGPGASPGGSEAGSQGSGEGEGVQLXAAQELMIQQLVAAQLQCNKRSFSDQPKVXLGREDQIALLKASXIEIMLLEXARRYNHEXECIXFLKDFXYSKDDFHRAGLQVEFINPIFEFSRAMRRLGLDDAEYALLIAINIFSADRPNVQEPGRVEALQQPYVEALLSYXRIKRPQDQLRFPRMLMKLVSLRXLSSVHSEQVFALRLQDKKLPPLLSEIWDVHE

SEQ ID NO: 18143 - protein, 460 aa, Homo sapiens
  MOD_RES (5)..(6): Selenocysteine
  MOD_RES (11)..(11): Selenocysteine
  MOD_RES (29)..(29): Selenocysteine
  MOD_RES (49)..(49): Selenocysteine
  MOD_RES (58)..(58): Selenocysteine
  MOD_RES (130)..(130): Selenocysteine
  MOD_RES (220)..(220): Selenocysteine
  MOD_RES (249)..(249): Selenocysteine
  MOD_RES (271)..(271): Selenocysteine
  MOD_RES (307)..(307): Selenocysteine
  MOD_RES (315)..(315): Selenocysteine
  MOD_RES (323)..(323): Selenocysteine
  MOD_RES (327)..(327): Selenocysteine
  MOD_RES (333)..(333): Selenocysteine
  MOD_RES (406)..(406): Selenocysteine
  MOD_RES (429)..(429): Selenocysteine
MSSPXXSSLDXPLPGNGPPQPGAPSSSPXVKEEGPEPWPGGPDPDVPGXDEASSACSXDWVIPDPEEEPERKRKKGPAPKMLGHELCRVCGDKASGFHYNVLSCEGCKGFFRRSVVRGGARRYACRGGGXCQMDAFMRRKCQQCRLRKCKEAGMREQCVLSEEQIRKKKIRKQQQESQSQSQSPVGPQGSSSSASGPGASPGGSEAGSQGSGEGEGVQLXAAQELMIQQLVAAQLQCNKRSFSDQPKVXPWPLGADPQSRDARQQRFAHFXELAIISVQEIVDFAKQVPGFLQLGREDQIALLKASXIEIMLLEXARRYNHEXECIXFLKDFXYSKDDFHRAGLQVEFINPIFEFSRAMRRLGLDDAEYALLIAINIFSADRPNVQEPGRVEALQQPYVEALLSYXRIKRPQDQLRFPRMLMKLVSLRXLSSVHSEQVFALRLQDKKLPPLLSEIWDVHE

SEQ ID NO: 18144 - protein, 296 aa, Homo sapiens
  MOD_RES (53)..(53): Selenocysteine
  MOD_RES (99)..(99): Selenocysteine
  MOD_RES (145)..(145): Selenocysteine
  MOD_RES (151)..(151): Selenocysteine
  MOD_RES (163)..(163): Selenocysteine
  MOD_RES (233)..(233): Selenocysteine
  MOD_RES (265)..(265): Selenocysteine
MLGNELCSVCGDKASGFHYNVLSCEGCKGFFRRSVIKGAHYICHSGGHCPMDXYMRRKCQECRLRKCRQAGMREECVLSEEQIRLKKLKRQEEEQAHAXSLPPRASSPPQILPQLSPEQLGMIEKLVAAQQQCNRRSFSDRLRVXVMLLEXSRRYNPGSESIXFLKDFSYNREDFAKAGLQVEFINPIFEFSRAMNELQLNDAEFALLIAISIFSADRPNVQDQLQVERLQHXYVEALHAYVSIHHPHDRLMFPRMLMKLVSLRXLSSVHSEQVFALRLQDKKLPPLLSEIWDVHE

SEQ ID NO: 18145 - protein, 134 aa, Homo sapiens
  MOD_RES (8)..(8): Selenocysteine
  MOD_RES (19)..(19): Selenocysteine
  MOD_RES (23)..(23): Selenocysteine
  MOD_RES (32)..(32): Selenocysteine
  MOD_RES (99)..(99): Selenocysteine
MPHSAGGXAGVGLEAAEPXALLXRAEPPSEPXEIRPQKRKKGPAPKMLGNELCSVCGDKASGFHYNVLSCEGCKGFFRRSVIKGAHYICHSGGHCPMDXYMRRKCQECRLRKCRQAGMREECVLSEEQIRLKKL

SEQ ID NO: 18146 - protein, 466 aa, Homo sapiens
  MOD_RES (8)..(8): Selenocysteine
  MOD_RES (19)..(19): Selenocysteine
  MOD_RES (23)..(23): Selenocysteine
  MOD_RES (32)..(32): Selenocysteine
  MOD_RES (99)..(99): Selenocysteine
  MOD_RES (145)..(145): Selenocysteine
  MOD_RES (191)..(191): Selenocysteine
  MOD_RES (213)..(213): Selenocysteine
  MOD_RES (247)..(247): Selenocysteine
  MOD_RES (301)..(301): Selenocysteine
  MOD_RES (321)..(321): Selenocysteine
  MOD_RES (333)..(333): Selenocysteine
  MOD_RES (403)..(403): Selenocysteine
  MOD_RES (435)..(435): Selenocysteine
MPHSAGGXAGVGLEAAEPXALLXRAEPPSEPXEIRPQKRKKGPAPKMLGNELCSVCGDKASGFHYNVLSCEGCKGFFRRSVIKGAHYICHSGGHCPMDXYMRRKCQECRLRKCRQAGMREECVLSEEQIRLKKLKRQEEEQAHAXSLPPRASSPPQILPQLSPEQLGMIEKLVAAQQQCNRRSFSDRLRVXPWPMAPDPHSREARQQRFAHFXELAIVSVQEIVDFAKQLPGFLQLSREDQIALLKXSAIEVAGEGQGMKGEAEWDYLWEGPPDIELGEPNLLGSRDEENRPPWKRPCSKXSPPSPRLRFAACVQVMLLEXSRRYNPGSESIXFLKDFSYNREDFAKAGLQVEFINPIFEFSRAMNELQLNDAEFALLIAISIFSADRPNVQDQLQVERLQHXYVEALHAYVSIHHPHDRLMFPRMLMKLVSLRXLSSVHSEQVFALRLQDKKLPPLLSEIWDVHE

SEQ ID NO: 18147 - protein, 402 aa, Homo sapiens
  MOD_RES (8)..(8): Selenocysteine
  MOD_RES (19)..(19): Selenocysteine
  MOD_RES (23)..(23): Selenocysteine
  MOD_RES (32)..(32): Selenocysteine
  MOD_RES (99)..(99): Selenocysteine
  MOD_RES (145)..(145): Selenocysteine
  MOD_RES (191)..(191): Selenocysteine
  MOD_RES (213)..(213): Selenocysteine
  MOD_RES (247)..(247): Selenocysteine
  MOD_RES (257)..(257): Selenocysteine
  MOD_RES (269)..(269): Selenocysteine
  MOD_RES (339)..(339): Selenocysteine
  MOD_RES (371)..(371): Selenocysteine
MPHSAGGXAGVGLEAAEPXALLXRAEPPSEPXEIRPQKRKKGPAPKMLGNELCSVCGDKASGFHYNVLSCEGCKGFFRRSVIKGAHYICHSGGHCPMDXYMRRKCQECRLRKCRQAGMREECVLSEEQIRLKKLKRQEEEQAHAXSLPPRASSPPQILPQLSPEQLGMIEKLVAAQQQCNRRSFSDRLRVXPWPMAPDPHSREARQQRFAHFXELAIVSVQEIVDFAKQLPGFLQLSREDQIALLKXSAIEVMLLEXSRRYNPGSESIXFLKDFSYNREDFAKAGLQVEFINPIFEFSRAMNELQLNDAEFALLIAISIFSADRPNVQDQLQVERLQHXYVEALHAYVSIHHPHDRLMFPRMLMKLVSLRXLSSVHSEQVFALRLQDKKLPPLLSEIWDVHE

SEQ ID NO: 18148 - protein, 342 aa, Homo sapiens
  MOD_RES (8)..(8): Selenocysteine
  MOD_RES (19)..(19): Selenocysteine
  MOD_RES (23)..(23): Selenocysteine
  MOD_RES (32)..(32): Selenocysteine
  MOD_RES (99)..(99): Selenocysteine
  MOD_RES (145)..(145): Selenocysteine
  MOD_RES (191)..(191): Selenocysteine
  MOD_RES (197)..(197): Selenocysteine
  MOD_RES (209)..(209): Selenocysteine
  MOD_RES (279)..(279): Selenocysteine
  MOD_RES (311)..(311): Selenocysteine
MPHSAGGXAGVGLEAAEPXALLXRAEPPSEPXEIRPQKRKKGPAPKMLGNELCSVCGDKASGFHYNVLSCEGCKGFFRRSVIKGAHYICHSGGHCPMDXYMRRKCQECRLRKCRQAGMREECVLSEEQIRLKKLKRQEEEQAHAXSLPPRASSPPQILPQLSPEQLGMIEKLVAAQQQCNRRSFSDRLRVXVMLLEXSRRYNPGSESIXFLKDFSYNREDFAKAGLQVEFINPIFEFSRAMNELQLNDAEFALLIAISIFSADRPNVQDQLQVERLQHXYVEALHAYVSIHHPHDRLMFPRMLMKLVSLRXLSSVHSEQVFALRLQDKKLPPLLSEIWDVHE

SEQ ID NO: 18149 - protein, 167 aa, Homo sapiens
  MOD_RES (8)..(8): Selenocysteine
  MOD_RES (19)..(19): Selenocysteine
  MOD_RES (23)..(23): Selenocysteine
  MOD_RES (32)..(32): Selenocysteine
  MOD_RES (56)..(56): Selenocysteine
  MOD_RES (102)..(102): Selenocysteine
  MOD_RES (108)..(108): Selenocysteine
  MOD_RES (120)..(120): Selenocysteine
MPHSAGGXAGVGLEAAEPXALLXRAEPPSEPXGVLSEEQIRLKKLKRQEEEQAHAXSLPPRASSPPQILPQLSPEQLGMIEKLVAAQQQCNRRSFSDRLRVXVMLLEXSRRYNPGSESIXFLKDFSYNREDFAKAGLQVEFINPIFEFSRAMNELQLNDAEFALLIA

SEQ ID NO: 18150 - protein, 453 aa, Homo sapiens
  MOD_RES (4)..(4): Selenocysteine
  MOD_RES (12)..(12): Selenocysteine
  MOD_RES (20)..(20): Selenocysteine
  MOD_RES (59)..(59): Selenocysteine
  MOD_RES (70)..(70): Selenocysteine
  MOD_RES (74)..(74): Selenocysteine
  MOD_RES (83)..(83): Selenocysteine
  MOD_RES (150)..(150): Selenocysteine
  MOD_RES (196)..(196): Selenocysteine
  MOD_RES (242)..(242): Selenocysteine
  MOD_RES (264)..(264): Selenocysteine
  MOD_RES (298)..(298): Selenocysteine
  MOD_RES (308)..(308): Selenocysteine
  MOD_RES (320)..(320): Selenocysteine
  MOD_RES (390)..(390): Selenocysteine
  MOD_RES (422)..(422): Selenocysteine
MQQXSWNPLGGXCKQPPGRXHSAVELWKPGAQDASSQAQGGSSCILREEARMPHSAGGXAGVGLEAAEPXALLXRAEPPSEPXEIRPQKRKKGPAPKMLGNELCSVCGDKASGFHYNVLSCEGCKGFFRRSVIKGAHYICHSGGHCPMDXYMRRKCQECRLRKCRQAGMREECVLSEEQIRLKKLKRQEEEQAHAXSLPPRASSPPQILPQLSPEQLGMIEKLVAAQQQCNRRSFSDRLRVXPWPMAPDPHSREARQQRFAHFXELAIVSVQEIVDFAKQLPGFLQLSREDQIALLKXSAIEVMLLEXSRRYNPGSESIXFLKDFSYNREDFAKAGLQVEFINPIFEFSRAMNELQLNDAEFALLIAISIFSADRPNVQDQLQVERLQHXYVEALHAYVSIHHPHDRLMFPRMLMKLVSLRXLSSVHSEQVFALRLQDKKLPPLLSEIWDVHE

SEQ ID NO: 18151 - protein, 114 aa, Homo sapiens
  MOD_RES (17)..(17): Selenocysteine
  MOD_RES (50)..(50): Selenocysteine
  MOD_RES (97)..(97): Selenocysteine
  MOD_RES (105)..(105): Selenocysteine
  MOD_RES (111)..(112): Selenocysteine
MSLWLGAPVPDIPPAQXLRWSCGSQAHRMQAARPREAAAASSERKPGCPXLLGVLQGWGWRLQSPQPCSPGQSPLQNPQRSVHKSGKRGQPPKCWGXSYAACVGXRPRASXXMF

SEQ ID NO: 18152 - protein, 68 aa, Homo sapiens
  MOD_RES (53)..(53): Selenocysteine
  MOD_RES (64)..(64): Selenocysteine
  MOD_RES (68)..(68): Selenocysteine
MSLWLGAPVPDIPPDSAVELWKPGAQDASSQAQGGSSCILREEARMPHSAGGXAGVGLEAAEPXALLX

SEQ ID NO: 18153 - protein, 77 aa, Homo sapiens
  MOD_RES (53)..(53): Selenocysteine
  MOD_RES (64)..(64): Selenocysteine
  MOD_RES (68)..(68): Selenocysteine
  MOD_RES (77)..(77): Selenocysteine
MSLWLGAPVPDIPPDSAVELWKPGAQDASSQAQGGSSCILREEARMPHSAGGXAGVGLEAAEPXALLXRAEPPSEPX

SEQ ID NO: 18154 - protein, 194 aa, Homo sapiens
  MOD_RES (53)..(53): Selenocysteine
  MOD_RES (64)..(64): Selenocysteine
  MOD_RES (68)..(68): Selenocysteine
  MOD_RES (77)..(77): Selenocysteine
  MOD_RES (144)..(144): Selenocysteine
  MOD_RES (190)..(190): Selenocysteine
MSLWLGAPVPDIPPDSAVELWKPGAQDASSQAQGGSSCILREEARMPHSAGGXAGVGLEAAEPXALLXRAEPPSEPXEIRPQKRKKGPAPKMLGNELCSVCGDKASGFHYNVLSCEGCKGFFRRSVIKGAHYICHSGGHCPMDXYMRRKCQECRLRKCRQAGMREECVLSEEQIRLKKLKRQEEEQAHAXSLPP

SEQ ID NO: 18155 - protein, 202 aa, Homo sapiens
  MOD_RES (53)..(53): Selenocysteine
  MOD_RES (64)..(64): Selenocysteine
  MOD_RES (68)..(68): Selenocysteine
  MOD_RES (77)..(77): Selenocysteine
  MOD_RES (144)..(144): Selenocysteine
  MOD_RES (190)..(190): Selenocysteine
MSLWLGAPVPDIPPDSAVELWKPGAQDASSQAQGGSSCILREEARMPHSAGGXAGVGLEAAEPXALLXRAEPPSEPXEIRPQKRKKGPAPKMLGNELCSVCGDKASGFHYNVLSCEGCKGFFRRSVIKGAHYICHSGGHCPMDXYMRRKCQECRLRKCRQAGMREECVLSEEQIRLKKLKRQEEEQAHAXSLPPRASSPPQI

SEQ ID NO: 18156 - protein, 205 aa, Homo sapiens
  MOD_RES (53)..(53): Selenocysteine
  MOD_RES (64)..(64): Selenocysteine
  MOD_RES (68)..(68): Selenocysteine
  MOD_RES (77)..(77): Selenocysteine
  MOD_RES (144)..(144): Selenocysteine
  MOD_RES (190)..(190): Selenocysteine
MSLWLGAPVPDIPPDSAVELWKPGAQDASSQAQGGSSCILREEARMPHSAGGXAGVGLEAAEPXALLXRAEPPSEPXEIRPQKRKKGPAPKMLGNELCSVCGDKASGFHYNVLSCEGCKGFFRRSVIKGAHYICHSGGHCPMDXYMRRKCQECRLRKCRQAGMREECVLSEEQIRLKKLKRQEEEQAHAXSLPPRASSPPQILPQ

SEQ ID NO: 18157 - protein, 212 aa, Homo sapiens
  MOD_RES (53)..(53): Selenocysteine
  MOD_RES (64)..(64): Selenocysteine
  MOD_RES (68)..(68): Selenocysteine
  MOD_RES (77)..(77): Selenocysteine
  MOD_RES (144)..(144): Selenocysteine
  MOD_RES (190)..(190): Selenocysteine
MSLWLGAPVPDIPPDSAVELWKPGAQDASSQAQGGSSCILREEARMPHSAGGXAGVGLEAAEPXALLXRAEPPSEPXEIRPQKRKKGPAPKMLGNELCSVCGDKASGFHYNVLSCEGCKGFFRRSVIKGAHYICHSGGHCPMDXYMRRKCQECRLRKCRQAGMREECVLSEEQIRLKKLKRQEEEQAHAXSLPPRASSPPQILPQLSPEQLG

SEQ ID NO: 18158 - protein, 447 aa, Homo sapiens
  MOD_RES (53)..(53): Selenocysteine
  MOD_RES (64)..(64): Selenocysteine
  MOD_RES (68)..(68): Selenocysteine
  MOD_RES (77)..(77): Selenocysteine
  MOD_RES (144)..(144): Selenocysteine
  MOD_RES (190)..(190): Selenocysteine
  MOD_RES (236)..(236): Selenocysteine
  MOD_RES (258)..(258): Selenocysteine
  MOD_RES (292)..(292): Selenocysteine
  MOD_RES (302)..(302): Selenocysteine
  MOD_RES (314)..(314): Selenocysteine
  MOD_RES (384)..(384): Selenocysteine
  MOD_RES (416)..(416): Selenocysteine
MSLWLGAPVPDIPPDSAVELWKPGAQDASSQAQGGSSCILREEARMPHSAGGXAGVGLEAAEPXALLXRAEPPSEPXEIRPQKRKKGPAPKMLGNELCSVCGDKASGFHYNVLSCEGCKGFFRRSVIKGAHYICHSGGHCPMDXYMRRKCQECRLRKCRQAGMREECVLSEEQIRLKKLKRQEEEQAHAXSLPPRASSPPQILPQLSPEQLGMIEKLVAAQQQCNRRSFSDRLRVXPWPMAPDPHSREARQQRFAHFXELAIVSVQEIVDFAKQLPGFLQLSREDQIALLKXSAIEVMLLEXSRRYNPGSESIXFLKDFSYNREDFAKAGLQVEFINPIFEFSRAMNELQLNDAEFALLIAISIFSADRPNVQDQLQVERLQHXYVEALHAYVSIHHPHDRLMFPRMLMKLVSLRXLSSVHSEQVFALRLQDKKLPPLLSEIWDVHE

SEQ ID NO: 18159 - protein, 387 aa, Homo sapiens
  MOD_RES (53)..(53): Selenocysteine
  MOD_RES (64)..(64): Selenocysteine
  MOD_RES (68)..(68): Selenocysteine
  MOD_RES (77)..(77): Selenocysteine
  MOD_RES (144)..(144): Selenocysteine
  MOD_RES (190)..(190): Selenocysteine
  MOD_RES (236)..(236): Selenocysteine
  MOD_RES (242)..(242): Selenocysteine
  MOD_RES (254)..(254): Selenocysteine
  MOD_RES (324)..(324): Selenocysteine
  MOD_RES (356)..(356): Selenocysteine
MSLWLGAPVPDIPPDSAVELWKPGAQDASSQAQGGSSCILREEARMPHSAGGXAGVGLEAAEPXALLXRAEPPSEPXEIRPQKRKKGPAPKMLGNELCSVCGDKASGFHYNVLSCEGCKGFFRRSVIKGAHYICHSGGHCPMDXYMRRKCQECRLRKCRQAGMREECVLSEEQIRLKKLKRQEEEQAHAXSLPPRASSPPQILPQLSPEQLGMIEKLVAAQQQCNRRSFSDRLRVXVMLLEXSRRYNPGSESIXFLKDFSYNREDFAKAGLQVEFINPIFEFSRAMNELQLNDAEFALLIAISIFSADRPNVQDQLQVERLQHXYVEALHAYVSIHHPHDRLMFPRMLMKLVSLRXLSSVHSEQVFALRLQDKKLPPLLSEIWDVHE

SEQ ID NO: 18160 - protein, 54 aa, Homo sapiens
MSLWLGAPVPDIPPESSPESFLVVLASRPDHLSPGSSAWPLQAPAQSSPVWICC

SEQ ID NO: 18161 - protein, 57 aa, Homo sapiens
  MOD_RES (15)..(16): Selenocysteine
  MOD_RES (38)..(39): Selenocysteine
  MOD_RES (44)..(44): Selenocysteine
  MOD_RES (48)..(48): Selenocysteine
MGSKMNLIEHSHLPXXDEFSFSENLFDFLGWFQSLPSXXLWSWXNSLXLHKLLALFK

SEQ ID NO: 18162 - protein, 45 aa, Homo sapiens
  MOD_RES (15)..(16): Selenocysteine
  MOD_RES (43)..(43): Selenocysteine
MGSKMNLIEHSHLPXXDEFSFSENLFGLLRLPWSPSMCSHLRXRP

SEQ ID NO: 18163 - protein, 270 aa, Homo sapiens
  MOD_RES (15)..(16): Selenocysteine
  MOD_RES (30)..(30): Selenocysteine
  MOD_RES (95)..(95): Selenocysteine
  MOD_RES (101)..(101): Selenocysteine
  MOD_RES (109)..(109): Selenocysteine
  MOD_RES (143)..(143): Selenocysteine
  MOD_RES (156)..(156): Selenocysteine
  MOD_RES (199)..(199): Selenocysteine
  MOD_RES (219)..(219): Selenocysteine
  MOD_RES (233)..(233): Selenocysteine
  MOD_RES (235)..(236): Selenocysteine
  MOD_RES (263)..(263): Selenocysteine
MGSKMNLIEHSHLPXXDEFSFSENLFGVLXEQVAGPLGQNLEVEPYSQYSNVQFPQVQPQISSSSYYSNLGFYPQQPEEWYSPGIYELRRMPAEXLYQGEXEVAEMPVXKKPRMGASAGRIKGDELCVVCGDRASGYHYNALXCEGCKGFFRRSIXKNAVYKCKNGGNCVMDMYMRRKCQECRLRKCKEMGMLAECLLXEIQCKSKRLRKNVKQHADQXVNEDSEGRDLRQVXSXXKSCRCRRKLNSPQINRLFYILLWIHIXNRGCLRK

SEQ ID NO: 18164 - protein, 472 aa, Homo sapiens
  MOD_RES (15)..(16): Selenocysteine
  MOD_RES (30)..(30): Selenocysteine
  MOD_RES (95)..(95): Selenocysteine
  MOD_RES (101)..(101): Selenocysteine
  MOD_RES (109)..(109): Selenocysteine
  MOD_RES (143)..(143): Selenocysteine
  MOD_RES (156)..(156): Selenocysteine
  MOD_RES (199)..(199): Selenocysteine
  MOD_RES (219)..(219): Selenocysteine
  MOD_RES (233)..(233): Selenocysteine
  MOD_RES (235)..(236): Selenocysteine
  MOD_RES (243)..(243): Selenocysteine
  MOD_RES (246)..(246): Selenocysteine
  MOD_RES (251)..(251): Selenocysteine
  MOD_RES (270)..(270): Selenocysteine
  MOD_RES (288)..(288): Selenocysteine
  MOD_RES (292)..(292): Selenocysteine
  MOD_RES (302)..(302): Selenocysteine
  MOD_RES (310)..(310): Selenocysteine
  MOD_RES (363)..(363): Selenocysteine
  MOD_RES (378)..(378): Selenocysteine
  MOD_RES (386)..(386): Selenocysteine
  MOD_RES (438)..(438): Selenocysteine
  MOD_RES (442)..(442): Selenocysteine
  MOD_RES (462)..(462): Selenocysteine
MGSKMNLIEHSHLPXXDEFSFSENLFGVLXEQVAGPLGQNLEVEPYSQYSNVQFPQVQPQISSSSYYSNLGFYPQQPEEWYSPGIYELRRMPAEXLYQGEXEVAEMPVXKKPRMGASAGRIKGDELCVVCGDRASGYHYNALXCEGCKGFFRRSIXKNAVYKCKNGGNCVMDMYMRRKCQECRLRKCKEMGMLAECLLXEIQCKSKRLRKNVKQHADQXVNEDSEGRDLRQVXSXXKSCREKXELXPDQQXLLHFIMDSYNKQRMPQEIXNKILKEEFSAEENFLILXEMAXNHVQVLVEFXKKLPGFQXLDHEDQIALLKGSAVEAMFLRSAEIFNKKLPSGHSDLLEERIRNSGISDEYIXPMFSFYKSIGELKMXQEEYALLXAIVILSPDRQYIKDREAVEKLQEPLLDVLQKLCKIHQPENPQHFACLLGRLXELRXFNHHHAEMLMSWRVNDHKFXPLLCEIWDVQ

SEQ ID NO: 18165 - protein, 476 aa, Homo sapiens
  MOD_RES (15)..(16): Selenocysteine
  MOD_RES (30)..(30): Selenocysteine
  MOD_RES (95)..(95): Selenocysteine
  MOD_RES (101)..(101): Selenocysteine
  MOD_RES (109)..(109): Selenocysteine
  MOD_RES (143)..(143): Selenocysteine
  MOD_RES (156)..(156): Selenocysteine
  MOD_RES (199)..(199): Selenocysteine
  MOD_RES (203)..(203): Selenocysteine
  MOD_RES (223)..(223): Selenocysteine
  MOD_RES (237)..(237): Selenocysteine
  MOD_RES (239)..(240): Selenocysteine
  MOD_RES (247)..(247): Selenocysteine
  MOD_RES (250)..(250): Selenocysteine
  MOD_RES (255)..(255): Selenocysteine
  MOD_RES (274)..(274): Selenocysteine
  MOD_RES (292)..(292): Selenocysteine
  MOD_RES (296)..(296): Selenocysteine
  MOD_RES (306)..(306): Selenocysteine
  MOD_RES (314)..(314): Selenocysteine
  MOD_RES (367)..(367): Selenocysteine
  MOD_RES (382)..(382): Selenocysteine
  MOD_RES (390)..(390): Selenocysteine
  MOD_RES (442)..(442): Selenocysteine
  MOD_RES (446)..(446): Selenocysteine
  MOD_RES (466)..(466): Selenocysteine
MGSKMNLIEHSHLPXXDEFSFSENLFGVLXEQVAGPLGQNLEVEPYSQYSNVQFPQVQPQISSSSYYSNLGFYPQQPEEWYSPGIYELRRMPAEXLYQGEXEVAEMPVXKKPRMGASAGRIKGDELCVVCGDRASGYHYNALXCEGCKGFFRRSIXKNAVYKCKNGGNCVMDMYMRRKCQECRLRKCKEMGMLAECMYXGLLXEIQCKSKRLRKNVKQHADQXVNEDSEGRDLRQVXSXXKSCREKXELXPDQQXLLHFIMDSYNKQRMPQEIXNKILKEEFSAEENFLILXEMAXNHVQVLVEFXKKLPGFQXLDHEDQIALLKGSAVEAMFLRSAEIFNKKLPSGHSDLLEERIRNSGISDEYIXPMFSFYKSIGELKMXQEEYALLXAIVILSPDRQYIKDREAVEKLQEPLLDVLQKLCKIHQPENPQHFACLLGRLXELRXFNHHHAEMLMSWRVNDHKFXPLLCEIWDVQ

SEQ ID NO: 18166 - protein, 425 aa, Homo sapiens
  MOD_RES (15)..(16): Selenocysteine
  MOD_RES (30)..(30): Selenocysteine
  MOD_RES (95)..(95): Selenocysteine
  MOD_RES (101)..(101): Selenocysteine
  MOD_RES (109)..(109): Selenocysteine
  MOD_RES (143)..(143): Selenocysteine
  MOD_RES (152)..(152): Selenocysteine
  MOD_RES (172)..(172): Selenocysteine
  MOD_RES (186)..(186): Selenocysteine
  MOD_RES (188)..(189): Selenocysteine
  MOD_RES (196)..(196): Selenocysteine
  MOD_RES (199)..(199): Selenocysteine
  MOD_RES (204)..(204): Selenocysteine
  MOD_RES (223)..(223): Selenocysteine
  MOD_RES (241)..(241): Selenocysteine
  MOD_RES (245)..(245): Selenocysteine
  MOD_RES (255)..(255): Selenocysteine
  MOD_RES (263)..(263): Selenocysteine
  MOD_RES (316)..(316): Selenocysteine
  MOD_RES (331)..(331): Selenocysteine
  MOD_RES (339)..(339): Selenocysteine
  MOD_RES (391)..(391): Selenocysteine
  MOD_RES (395)..(395): Selenocysteine
  MOD_RES (415)..(415): Selenocysteine
MGSKMNLIEHSHLPXXDEFSFSENLFGVLXEQVAGPLGQNLEVEPYSQYSNVQFPQVQPQISSSSYYSNLGFYPQQPEEWYSPGIYELRRMPAEXLYQGEXEVAEMPVXKKPRMGASAGRIKGDELCVVCGDRASGYHYNALXCEGCKGLLXEIQCKSKRLRKNVKQHADQXVNEDSEGRDLRQVXSXXKSCREKXELXPDQQXLLHFIMDSYNKQRMPQEIXNKILKEEFSAEENFLILXEMAXNHVQVLVEFXKKLPGFQXLDHEDQIALLKGSAVEAMFLRSAEIFNKKLPSGHSDLLEERIRNSGISDEYIXPMFSFYKSIGELKMXQEEYALLXAIVILSPDRQYIKDREAVEKLQEPLLDVLQKLCKIHQPENPQHFACLLGRLXELRXFNHHHAEMLMSWRVNDHKFXPLLCEIWDVQ

SEQ ID NO: 18167 - protein, 482 aa, Homo sapiens
  MOD_RES (21)..(21): Selenocysteine
  MOD_RES (40)..(40): Selenocysteine
  MOD_RES (105)..(105): Selenocysteine
  MOD_RES (111)..(111): Selenocysteine
  MOD_RES (119)..(119): Selenocysteine
  MOD_RES (153)..(153): Selenocysteine
  MOD_RES (166)..(166): Selenocysteine
  MOD_RES (209)..(209): Selenocysteine
  MOD_RES (229)..(229): Selenocysteine
  MOD_RES (243)..(243): Selenocysteine
  MOD_RES (245)..(246): Selenocysteine
  MOD_RES (253)..(253): Selenocysteine
  MOD_RES (256)..(256): Selenocysteine
  MOD_RES (261)..(261): Selenocysteine
  MOD_RES (280)..(280): Selenocysteine
  MOD_RES (298)..(298): Selenocysteine
  MOD_RES (302)..(302): Selenocysteine
  MOD_RES (312)..(312): Selenocysteine
  MOD_RES (320)..(320): Selenocysteine
  MOD_RES (373)..(373): Selenocysteine
  MOD_RES (388)..(388): Selenocysteine
  MOD_RES (396)..(396): Selenocysteine
  MOD_RES (448)..(448): Selenocysteine
  MOD_RES (452)..(452): Selenocysteine
  MOD_RES (472)..(472): Selenocysteine
MVMQFQGLENPIQISPHCSCXPSGFFMEMMSMKPAKGVLXEQVAGPLGQNLEVEPYSQYSNVQFPQVQPQISSSSYYSNLGFYPQQPEEWYSPGIYELRRMPAEXLYQGEXEVAEMPVXKKPRMGASAGRIKGDELCVVCGDRASGYHYNALXCEGCKGFFRRSIXKNAVYKCKNGGNCVMDMYMRRKCQECRLRKCKEMGMLAECLLXEIQCKSKRLRKNVKQHADQXVNEDSEGRDLRQVXSXXKSCREKXELXPDQQXLLHFIMDSYNKQRMPQEIXNKILKEEFSAEENFLILXEMAXNHVQVLVEFXKKLPGFQXLDHEDQIALLKGSAVEAMFLRSAEIFNKKLPSGHSDLLEERIRNSGISDEYIXPMFSFYKSIGELKMXQEEYALLXAIVILSPDRQYIKDREAVEKLQEPLLDVLQKLCKIHQPENPQHFACLLGRLXELRXFNHHHAEMLMSWRVNDHKFXPLLCEIWDVQ

SEQ ID NO: 18168 - protein, 486 aa, Homo sapiens
  MOD_RES (21)..(21): Selenocysteine
  MOD_RES (40)..(40): Selenocysteine
  MOD_RES (105)..(105): Selenocysteine
  MOD_RES (111)..(111): Selenocysteine
  MOD_RES (119)..(119): Selenocysteine
  MOD_RES (153)..(153): Selenocysteine
  MOD_RES (166)..(166): Selenocysteine
  MOD_RES (209)..(209): Selenocysteine
  MOD_RES (213)..(213): Selenocysteine
  MOD_RES (233)..(233): Selenocysteine
  MOD_RES (247)..(247): Selenocysteine
  MOD_RES (249)..(250): Selenocysteine
  MOD_RES (257)..(257): Selenocysteine
  MOD_RES (260)..(260): Selenocysteine
  MOD_RES (265)..(265): Selenocysteine
  MOD_RES (284)..(284): Selenocysteine
  MOD_RES (302)..(302): Selenocysteine
  MOD_RES (306)..(306): Selenocysteine
  MOD_RES (316)..(316): Selenocysteine
  MOD_RES (324)..(324): Selenocysteine
  MOD_RES (377)..(377): Selenocysteine
  MOD_RES (392)..(392): Selenocysteine
  MOD_RES (400)..(400): Selenocysteine
  MOD_RES (452)..(452): Selenocysteine
  MOD_RES (456)..(456): Selenocysteine
  MOD_RES (476)..(476): Selenocysteine
MVMQFQGLENPIQISPHCSCXPSGFFMEMMSMKPAKGVLXEQVAGPLGQNLEVEPYSQYSNVQFPQVQPQISSSSYYSNLGFYPQQPEEWYSPGIYELRRMPAEXLYQGEXEVAEMPVXKKPRMGASAGRIKGDELCVVCGDRASGYHYNALXCEGCKGFFRRSIXKNAVYKCKNGGNCVMDMYMRRKCQECRLRKCKEMGMLAECMYXGLLXEIQCKSKRLRKNVKQHADQXVNEDSEGRDLRQVXSXXKSCREKXELXPDQQXLLHFIMDSYNKQRMPQEIXNKILKEEFSAEENFLILXEMAXNHVQVLVEFXKKLPGFQXLDHEDQIALLKGSAVEAMFLRSAEIFNKKLPSGHSDLLEERIRNSGISDEYIXPMFSFYKSIGELKMXQEEYALLXAIVILSPDRQYIKDREAVEKLQEPLLDVLQKLCKIHQPENPQHFACLLGRLXELRXFNHHHAEMLMSWRVNDHKFXPLLCEIWDVQ

SEQ ID NO: 18169 - protein, 34 aa, Homo sapiens
  MOD_RES (1)..(1): Any amino acid
  MOD_RES (32)..(32): Selenocysteine
XSGFFMEMMSMKPAKGLLRLPWSPSMCSHLRXRP

SEQ ID NO: 18170 - protein, 434 aa, Homo sapiens
  MOD_RES (20)..(20): Selenocysteine
  MOD_RES (49)..(49): Selenocysteine
  MOD_RES (57)..(57): Selenocysteine
  MOD_RES (87)..(87): Selenocysteine
  MOD_RES (90)..(90): Selenocysteine
  MOD_RES (133)..(133): Selenocysteine
  MOD_RES (135)..(135): Selenocysteine
  MOD_RES (144)..(144): Selenocysteine
  MOD_RES (161)..(161): Selenocysteine
  MOD_RES (164)..(165): Selenocysteine
  MOD_RES (248)..(248): Selenocysteine
  MOD_RES (290)..(290): Selenocysteine
  MOD_RES (296)..(296): Selenocysteine
  MOD_RES (298)..(298): Selenocysteine
  MOD_RES (311)..(311): Selenocysteine
  MOD_RES (372)..(372): Selenocysteine
  MOD_RES (398)..(398): Selenocysteine
  MOD_RES (408)..(408): Selenocysteine
  MOD_RES (422)..(422): Selenocysteine
  MOD_RES (432)..(432): Selenocysteine
LEVRPKESWNHADFVHCEDXESVPGKPSVNADEEVGGPQICRVCGDKAXGYHFNVMXCEGCKGFFRRAMKRNARLRCPFRKGACEIXRKXRRQCQACRLRKCLESGMKKEMIMSDEAVEERRALIKRKKSERXGXQPLGVQGLXEEQRMMIRELMDAQMKXFDXXFSHFKNFRLPGVLSSGCELPESLQAPSREEAAKWSQVRKDLCSLKVSLQLRGEDGSVWNYKPPADSGGKEIFSLLPHMADMSXYMFKGIISFAKVISYFRDLPIEDQISLLKGAAFELCQLRFNXVFNAEXGXWECGRLSYCLEDXAGGFQQLLLEPMLKFHYMLKKLQLHEEEYVLMQAISLFSPDRPGVLQHRVVDQLQEQFAIXLKSYIECNRPQPAHRFLFLKIMAMLXELRSINAQHXQRLLRIQDIHPFAXPLMQELFGIXGS

SEQ ID NO: 18171 - protein, 397 aa, Homo sapiens
  MOD_RES (20)..(20): Selenocysteine
  MOD_RES (49)..(49): Selenocysteine
  MOD_RES (57)..(57): Selenocysteine
  MOD_RES (87)..(87): Selenocysteine
  MOD_RES (90)..(90): Selenocysteine
  MOD_RES (133)..(133): Selenocysteine
  MOD_RES (135)..(135): Selenocysteine
  MOD_RES (144)..(144): Selenocysteine
  MOD_RES (161)..(161): Selenocysteine
  MOD_RES (164)..(165): Selenocysteine
  MOD_RES (211)..(211): Selenocysteine
  MOD_RES (253)..(253): Selenocysteine
  MOD_RES (259)..(259): Selenocysteine
  MOD_RES (261)..(261): Selenocysteine
  MOD_RES (274)..(274): Selenocysteine
  MOD_RES (335)..(335): Selenocysteine
  MOD_RES (361)..(361): Selenocysteine
  MOD_RES (371)..(371): Selenocysteine
  MOD_RES (385)..(385): Selenocysteine
  MOD_RES (395)..(395): Selenocysteine
LEVRPKESWNHADFVHCEDXESVPGKPSVNADEEVGGPQICRVCGDKAXGYHFNVMXCEGCKGFFRRAMKRNARLRCPFRKGACEIXRKXRRQCQACRLRKCLESGMKKEMIMSDEAVEERRALIKRKKSERXGXQPLGVQGLXEEQRMMIRELMDAQMKXFDXXFSHFKNFRVSLQLRGEDGSVWNYKPPADSGGKEIFSLLPHMADMSXYMFKGIISFAKVISYFRDLPIEDQISLLKGAAFELCQLRFNXVFNAEXGXWECGRLSYCLEDXAGGFQQLLLEPMLKFHYMLKKLQLHEEEYVLMQAISLFSPDRPGVLQHRVVDQLQEQFAIXLKSYIECNRPQPAHRFLFLKIMAMLXELRSINAQHXQRLLRIQDIHPFAXPLMQELFGIXGS

SEQ ID NO: 18172 - protein, 473 aa, Homo sapiens
  MOD_RES (2)..(2): Selenocysteine
  MOD_RES (4)..(4): Selenocysteine
  MOD_RES (6)..(6): Selenocysteine
  MOD_RES (59)..(59): Selenocysteine
  MOD_RES (88)..(88): Selenocysteine
  MOD_RES (96)..(96): Selenocysteine
  MOD_RES (126)..(126): Selenocysteine
  MOD_RES (129)..(129): Selenocysteine
  MOD_RES (172)..(172): Selenocysteine
  MOD_RES (174)..(174): Selenocysteine
  MOD_RES (183)..(183): Selenocysteine
  MOD_RES (200)..(200): Selenocysteine
  MOD_RES (203)..(204): Selenocysteine
  MOD_RES (287)..(287): Selenocysteine
  MOD_RES (329)..(329): Selenocysteine
  MOD_RES (335)..(335): Selenocysteine
  MOD_RES (337)..(337): Selenocysteine
  MOD_RES (350)..(350): Selenocysteine
  MOD_RES (411)..(411): Selenocysteine
  MOD_RES (437)..(437): Selenocysteine
  MOD_RES (447)..(447): Selenocysteine
  MOD_RES (461)..(461): Selenocysteine
  MOD_RES (471)..(471): Selenocysteine
MXVXRXHHFKEGSLRAPAIPLHSAAAELASNHPRGPEANLEVRPKESWNHADFVHCEDXESVPGKPSVNADEEVGGPQICRVCGDKAXGYHFNVMXCEGCKGFFRRAMKRNARLRCPFRKGACEIXRKXRRQCQACRLRKCLESGMKKEMIMSDEAVEERRALIKRKKSERXGXQPLGVQGLXEEQRMMIRELMDAQMKXFDXXFSHFKNFRLPGVLSSGCELPESLQAPSREEAAKWSQVRKDLCSLKVSLQLRGEDGSVWNYKPPADSGGKEIFSLLPHMADMSXYMFKGIISFAKVISYFRDLPIEDQISLLKGAAFELCQLRFNXVFNAEXGXWECGRLSYCLEDXAGGFQQLLLEPMLKFHYMLKKLQLHEEEYVLMQAISLFSPDRPGVLQHRVVDQLQEQFAIXLKSYIECNRPQPAHRFLFLKIMAMLXELRSINAQHXQRLLRIQDIHPFAXPLMQELFGIXGS

SEQ ID NO: 18173 - protein, 147 aa, Homo sapiens
  MOD_RES (19)..(19): Selenocysteine
  MOD_RES (27)..(27): Selenocysteine
  MOD_RES (38)..(38): Selenocysteine
  MOD_RES (46)..(46): Selenocysteine
  MOD_RES (58)..(58): Selenocysteine
  MOD_RES (86)..(86): Selenocysteine
  MOD_RES (100)..(100): Selenocysteine
  MOD_RES (113)..(113): Selenocysteine
  MOD_RES (121)..(121): Selenocysteine
  MOD_RES (129)..(129): Selenocysteine
MASREDELRNCVVCGDQAXGYHFNALXCEGCKGFFRRXVSKSIGPXCPFAGSCEVSKXQRRHCPACRLQKCLDAGMRKDIPCPLKXRSPFSREQLWKSVXSYSIPLSVSKHKXSSAGLFAXQLKMEPVXDLELPREMRLISCKRRWH

SEQ ID NO: 18174 - protein, 314 aa, Homo sapiens
  MOD_RES (19)..(19): Selenocysteine
  MOD_RES (27)..(27): Selenocysteine
  MOD_RES (38)..(38): Selenocysteine
  MOD_RES (46)..(46): Selenocysteine
  MOD_RES (58)..(58): Selenocysteine
  MOD_RES (102)..(102): Selenocysteine
  MOD_RES (116)..(116): Selenocysteine
  MOD_RES (122)..(122): Selenocysteine
  MOD_RES (127)..(127): Selenocysteine
  MOD_RES (150)..(150): Selenocysteine
  MOD_RES (159)..(159): Selenocysteine
  MOD_RES (166)..(166): Selenocysteine
  MOD_RES (176)..(176): Selenocysteine
  MOD_RES (208)..(209): Selenocysteine
  MOD_RES (214)..(214): Selenocysteine
  MOD_RES (225)..(225): Selenocysteine
  MOD_RES (236)..(236): Selenocysteine
  MOD_RES (242)..(242): Selenocysteine
  MOD_RES (257)..(257): Selenocysteine
MASREDELRNCVVCGDQAXGYHFNALXCEGCKGFFRRXVSKSIGPXCPFAGSCEVSKXQRRHCPACRLQKCLDAGMRKDMILSAEALALRRAKQAQRRAQQXPVQLSKEQEELIRXLLGAHXRHMGXMFEQFVQFRPPAHLFIHHQPLPXLAPVLPLVXHFADINXFMVLQVIKFXKDLPVFRSLPIEDQISLLKGAAVEICHIVLNXXFCLQXQNFLCGPLRYXIEDGARAPYLXDRPGVXQRDEIDQLQEEMALXLQSYIKGQQRRPRDRFLYAKLLGLLAELRSINEAYGYQIQHIQGLSAMMPLLQEICS

SEQ ID NO: 18175 - protein, 296 aa, Homo sapiens
  MOD_RES (19)..(19): Selenocysteine
  MOD_RES (27)..(27): Selenocysteine
  MOD_RES (38)..(38): Selenocysteine
  MOD_RES (46)..(46): Selenocysteine
  MOD_RES (58)..(58): Selenocysteine
  MOD_RES (102)..(102): Selenocysteine
  MOD_RES (116)..(116): Selenocysteine
  MOD_RES (122)..(122): Selenocysteine
  MOD_RES (127)..(127): Selenocysteine
  MOD_RES (150)..(150): Selenocysteine
  MOD_RES (159)..(159): Selenocysteine
  MOD_RES (166)..(166): Selenocysteine
  MOD_RES (176)..(176): Selenocysteine
  MOD_RES (208)..(209): Selenocysteine
  MOD_RES (214)..(214): Selenocysteine
  MOD_RES (225)..(225): Selenocysteine
  MOD_RES (237)..(237): Selenocysteine
  MOD_RES (252)..(252): Selenocysteine
  MOD_RES (271)..(271): Selenocysteine
MASREDELRNCVVCGDQAXGYHFNALXCEGCKGFFRRXVSKSIGPXCPFAGSCEVSKXQRRHCPACRLQKCLDAGMRKDMILSAEALALRRAKQAQRRAQQXPVQLSKEQEELIRXLLGAHXRHMGXMFEQFVQFRPPAHLFIHHQPLPXLAPVLPLVXHFADINXFMVLQVIKFXKDLPVFRSLPIEDQISLLKGAAVEICHIVLNXXFCLQXQNFLCGPLRYXIEDGARDRPGVXQRDEIDQLQEEMALXLQSYIKGQQRRPRDRSPGXPWIHWSGKMLGPKIGPGSKGAQWLQ

SEQ ID NO: 18176 - protein, 309 aa, Homo sapiens
  MOD_RES (19)..(19): Selenocysteine
  MOD_RES (27)..(27): Selenocysteine
  MOD_RES (38)..(38): Selenocysteine
  MOD_RES (46)..(46): Selenocysteine
  MOD_RES (58)..(58): Selenocysteine
  MOD_RES (102)..(102): Selenocysteine
  MOD_RES (116)..(116): Selenocysteine
  MOD_RES (122)..(122): Selenocysteine
  MOD_RES (127)..(127): Selenocysteine
  MOD_RES (150)..(150): Selenocysteine
  MOD_RES (159)..(159): Selenocysteine
  MOD_RES (166)..(166): Selenocysteine
  MOD_RES (176)..(176): Selenocysteine
  MOD_RES (208)..(209): Selenocysteine
  MOD_RES (214)..(214): Selenocysteine
  MOD_RES (225)..(225): Selenocysteine
  MOD_RES (237)..(237): Selenocysteine
  MOD_RES (252)..(252): Selenocysteine
MASREDELRNCVVCGDQAXGYHFNALXCEGCKGFFRRXVSKSIGPXCPFAGSCEVSKXQRRHCPACRLQKCLDAGMRKDMILSAEALALRRAKQAQRRAQQXPVQLSKEQEELIRXLLGAHXRHMGXMFEQFVQFRPPAHLFIHHQPLPXLAPVLPLVXHFADINXFMVLQVIKFXKDLPVFRSLPIEDQISLLKGAAVEICHIVLNXXFCLQXQNFLCGPLRYXIEDGARDRPGVXQRDEIDQLQEEMALXLQSYIKGQQRRPRDRFLYAKLLGLLAELRSINEAYGYQIQHIQGLSAMMPLLQEICS

SEQ ID NO: 18177 - protein, 238 aa, Homo sapiens
  MOD_RES (19)..(19): Selenocysteine
  MOD_RES (27)..(27): Selenocysteine
  MOD_RES (38)..(38): Selenocysteine
  MOD_RES (46)..(46): Selenocysteine
  MOD_RES (58)..(58): Selenocysteine
  MOD_RES (102)..(102): Selenocysteine
  MOD_RES (116)..(116): Selenocysteine
  MOD_RES (122)..(122): Selenocysteine
  MOD_RES (127)..(127): Selenocysteine
  MOD_RES (150)..(150): Selenocysteine
  MOD_RES (159)..(159): Selenocysteine
  MOD_RES (166)..(166): Selenocysteine
  MOD_RES (176)..(176): Selenocysteine
  MOD_RES (208)..(209): Selenocysteine
  MOD_RES (214)..(214): Selenocysteine
  MOD_RES (225)..(225): Selenocysteine
MASREDELRNCVVCGDQAXGYHFNALXCEGCKGFFRRXVSKSIGPXCPFAGSCEVSKXQRRHCPACRLQKCLDAGMRKDMILSAEALALRRAKQAQRRAQQXPVQLSKEQEELIRXLLGAHXRHMGXMFEQFVQFRPPAHLFIHHQPLPXLAPVLPLVXHFADINXFMVLQVIKFXKDLPVFRSLPIEDQISLLKGAAVEICHIVLNXXFCLQXQNFLCGPLRYXIEDGARGEMVLEQ

SEQ ID NO: 18178 - protein, 340 aa, Homo sapiens
  MOD_RES (19)..(19): Selenocysteine
  MOD_RES (27)..(27): Selenocysteine
  MOD_RES (38)..(38): Selenocysteine
  MOD_RES (46)..(46): Selenocysteine
  MOD_RES (58)..(58): Selenocysteine
  MOD_RES (102)..(102): Selenocysteine
  MOD_RES (116)..(116): Selenocysteine
  MOD_RES (122)..(122): Selenocysteine
  MOD_RES (127)..(127): Selenocysteine
  MOD_RES (150)..(150): Selenocysteine
  MOD_RES (159)..(159): Selenocysteine
  MOD_RES (166)..(166): Selenocysteine
  MOD_RES (176)..(176): Selenocysteine
  MOD_RES (208)..(209): Selenocysteine
  MOD_RES (214)..(214): Selenocysteine
  MOD_RES (225)..(225): Selenocysteine
  MOD_RES (248)..(248): Selenocysteine
  MOD_RES (275)..(275): Selenocysteine
  MOD_RES (281)..(281): Selenocysteine
  MOD_RES (296)..(296): Selenocysteine
  MOD_RES (315)..(315): Selenocysteine
MASREDELRNCVVCGDQAXGYHFNALXCEGCKGFFRRXVSKSIGPXCPFAGSCEVSKXQRRHCPACRLQKCLDAGMRKDMILSAEALALRRAKQAQRRAQQXPVQLSKEQEELIRXLLGAHXRHMGXMFEQFVQFRPPAHLFIHHQPLPXLAPVLPLVXHFADINXFMVLQVIKFXKDLPVFRSLPIEDQISLLKGAAVEICHIVLNXXFCLQXQNFLCGPLRYXIEDGARVGFQVEFLELLFHFHGXLRKLQLQEPEYVLLAAMALFSPAPYLXDRPGVXQRDEIDQLQEEMALXLQSYIKGQQRRPRDRSPGXPWIHWSGKMLGPKIGPGSKGAQWLQ

SEQ ID NO: 18179 - protein, 348 aa, Homo sapiens
  MOD_RES (19)..(19): Selenocysteine
  MOD_RES (27)..(27): Selenocysteine
  MOD_RES (38)..(38): Selenocysteine
  MOD_RES (46)..(46): Selenocysteine
  MOD_RES (58)..(58): Selenocysteine
  MOD_RES (102)..(102): Selenocysteine
  MOD_RES (116)..(116): Selenocysteine
  MOD_RES (122)..(122): Selenocysteine
  MOD_RES (127)..(127): Selenocysteine
  MOD_RES (150)..(150): Selenocysteine
  MOD_RES (159)..(159): Selenocysteine
  MOD_RES (166)..(166): Selenocysteine
  MOD_RES (176)..(176): Selenocysteine
  MOD_RES (208)..(209): Selenocysteine
  MOD_RES (214)..(214): Selenocysteine
  MOD_RES (225)..(225): Selenocysteine
  MOD_RES (248)..(248): Selenocysteine
  MOD_RES (276)..(276): Selenocysteine
  MOD_RES (291)..(291): Selenocysteine
MASREDELRNCVVCGDQAXGYHFNALXCEGCKGFFRRXVSKSIGPXCPFAGSCEVSKXQRRHCPACRLQKCLDAGMRKDMILSAEALALRRAKQAQRRAQQXPVQLSKEQEELIRXLLGAHXRHMGXMFEQFVQFRPPAHLFIHHQPLPXLAPVLPLVXHFADINXFMVLQVIKFXKDLPVFRSLPIEDQISLLKGAAVEICHIVLNXXFCLQXQNFLCGPLRYXIEDGARVGFQVEFLELLFHFHGXLRKLQLQEPEYVLLAAMALFSPDRPGVXQRDEIDQLQEEMALXLQSYIKGQQRRPRDRFLYAKLLGLLAELRSINEAYGYQIQHIQGLSAMMPLLQEICS

SEQ ID NO: 18180 - protein, 339 aa, Homo sapiens
  MOD_RES (19)..(19): Selenocysteine
  MOD_RES (27)..(27): Selenocysteine
  MOD_RES (38)..(38): Selenocysteine
  MOD_RES (46)..(46): Selenocysteine
  MOD_RES (58)..(58): Selenocysteine
  MOD_RES (102)..(102): Selenocysteine
  MOD_RES (116)..(116): Selenocysteine
  MOD_RES (122)..(122): Selenocysteine
  MOD_RES (127)..(127): Selenocysteine
  MOD_RES (150)..(150): Selenocysteine
  MOD_RES (159)..(159): Selenocysteine
  MOD_RES (166)..(166): Selenocysteine
  MOD_RES (176)..(176): Selenocysteine
  MOD_RES (208)..(209): Selenocysteine
  MOD_RES (214)..(214): Selenocysteine
  MOD_RES (225)..(225): Selenocysteine
  MOD_RES (235)..(235): Selenocysteine
  MOD_RES (252)..(252): Selenocysteine
  MOD_RES (280)..(280): Selenocysteine
  MOD_RES (295)..(295): Selenocysteine
  MOD_RES (314)..(314): Selenocysteine
MASREDELRNCVVCGDQAXGYHFNALXCEGCKGFFRRXVSKSIGPXCPFAGSCEVSKXQRRHCPACRLQKCLDAGMRKDMILSAEALALRRAKQAQRRAQQXPVQLSKEQEELIRXLLGAHXRHMGXMFEQFVQFRPPAHLFIHHQPLPXLAPVLPLVXHFADINXFMVLQVIKFXKDLPVFRSLPIEDQISLLKGAAVEICHIVLNXXFCLQXQNFLCGPLRYXIEDGARVSPXVGFQVEFLELLFHFHGXLRKLQLQEPEYVLLAAMALFSPDRPGVXQRDEIDQLQEEMALXLQSYIKGQQRRPRDRSPGXPWIHWSGKMLGPKIGPGSKGAQWLQ

SEQ ID NO: 18181 - protein, 352 aa, Homo sapiens
  MOD_RES (19)..(19): Selenocysteine
  MOD_RES (27)..(27): Selenocysteine
  MOD_RES (38)..(38): Selenocysteine
  MOD_RES (46)..(46): Selenocysteine
  MOD_RES (58)..(58): Selenocysteine
  MOD_RES (102)..(102): Selenocysteine
  MOD_RES (116)..(116): Selenocysteine
  MOD_RES (122)..(122): Selenocysteine
  MOD_RES (127)..(127): Selenocysteine
  MOD_RES (150)..(150): Selenocysteine
  MOD_RES (159)..(159): Selenocysteine
  MOD_RES (166)..(166): Selenocysteine
  MOD_RES (176)..(176): Selenocysteine
  MOD_RES (208)..(209): Selenocysteine
  MOD_RES (214)..(214): Selenocysteine
  MOD_RES (225)..(225): Selenocysteine
  MOD_RES (235)..(235): Selenocysteine
  MOD_RES (252)..(252): Selenocysteine
  MOD_RES (280)..(280): Selenocysteine
  MOD_RES (295)..(295): Selenocysteine
MASREDELRNCVVCGDQAXGYHFNALXCEGCKGFFRRXVSKSIGPXCPFAGSCEVSKXQRRHCPACRLQKCLDAGMRKDMILSAEALALRRAKQAQRRAQQXPVQLSKEQEELIRXLLGAHXRHMGXMFEQFVQFRPPAHLFIHHQPLPXLAPVLPLVXHFADINXFMVLQVIKFXKDLPVFRSLPIEDQISLLKGAAVEICHIVLNXXFCLQXQNFLCGPLRYXIEDGARVSPXVGFQVEFLELLFHFHGXLRKLQLQEPEYVLLAAMALFSPDRPGVXQRDEIDQLQEEMALXLQSYIKGQQRRPRDRFLYAKLLGLLAELRSINEAYGYQIQHIQGLSAMMPLLQEICS

SEQ ID NO: 18182 - protein, 357 aa, Homo sapiens
  MOD_RES (19)..(19): Selenocysteine
  MOD_RES (27)..(27): Selenocysteine
  MOD_RES (38)..(38): Selenocysteine
  MOD_RES (46)..(46): Selenocysteine
  MOD_RES (58)..(58): Selenocysteine
  MOD_RES (102)..(102): Selenocysteine
  MOD_RES (116)..(116): Selenocysteine
  MOD_RES (122)..(122): Selenocysteine
  MOD_RES (127)..(127): Selenocysteine
  MOD_RES (150)..(150): Selenocysteine
  MOD_RES (159)..(159): Selenocysteine
  MOD_RES (166)..(166): Selenocysteine
  MOD_RES (176)..(176): Selenocysteine
  MOD_RES (208)..(209): Selenocysteine
  MOD_RES (214)..(214): Selenocysteine
  MOD_RES (225)..(225): Selenocysteine
  MOD_RES (235)..(235): Selenocysteine
  MOD_RES (252)..(252): Selenocysteine
  MOD_RES (279)..(279): Selenocysteine
  MOD_RES (285)..(285): Selenocysteine
  MOD_RES (300)..(300): Selenocysteine
MASREDELRNCVVCGDQAXGYHFNALXCEGCKGFFRRXVSKSIGPXCPFAGSCEVSKXQRRHCPACRLQKCLDAGMRKDMILSAEALALRRAKQAQRRAQQXPVQLSKEQEELIRXLLGAHXRHMGXMFEQFVQFRPPAHLFIHHQPLPXLAPVLPLVXHFADINXFMVLQVIKFXKDLPVFRSLPIEDQISLLKGAAVEICHIVLNXXFCLQXQNFLCGPLRYXIEDGARVSPXVGFQVEFLELLFHFHGXLRKLQLQEPEYVLLAAMALFSPAPYLXDRPGVXQRDEIDQLQEEMALXLQSYIKGQQRRPRDRFLYAKLLGLLAELRSINEAYGYQIQHIQGLSAMMPLLQEICS

SEQ ID NO: 18183 - protein, 119 aa, Homo sapiens
  MOD_RES (19)..(19): Selenocysteine
  MOD_RES (27)..(27): Selenocysteine
  MOD_RES (38)..(38): Selenocysteine
  MOD_RES (46)..(46): Selenocysteine
  MOD_RES (58)..(58): Selenocysteine
  MOD_RES (80)..(80): Selenocysteine
  MOD_RES (103)..(103): Selenocysteine
  MOD_RES (113)..(113): Selenocysteine
MASREDELRNCVVCGDQAXGYHFNALXCEGCKGFFRRXVSKSIGPXCPFAGSCEVSKXQRRHCPACRLQKCLDAGMRKDXSSSSVHPSPALAHPGPCAASGHXLRRHQHFHGXASHQVY

SEQ ID NO: 18184 - protein, 118 aa, Homo sapiens
  MOD_RES (9)..(9): Selenocysteine
  MOD_RES (17)..(17): Selenocysteine
  MOD_RES (29)..(29): Selenocysteine
  MOD_RES (57)..(57): Selenocysteine
  MOD_RES (71)..(71): Selenocysteine
  MOD_RES (84)..(84): Selenocysteine
  MOD_RES (92)..(92): Selenocysteine
  MOD_RES (100)..(100): Selenocysteine
MLPKRSRRXVSKSIGPXCPFAGSCEVSKXQRRHCPACRLQKCLDAGMRKDIPCPLKXRSPFSREQLWKSVXSYSIPLSVSKHKXSSAGLFAXQLKMEPVXDLELPREMRLISCKRRWH

SEQ ID NO: 18185 - protein, 280 aa, Homo sapiens
  MOD_RES (9)..(9): Selenocysteine
  MOD_RES (17)..(17): Selenocysteine
  MOD_RES (29)..(29): Selenocysteine
  MOD_RES (73)..(73): Selenocysteine
  MOD_RES (87)..(87): Selenocysteine
  MOD_RES (93)..(93): Selenocysteine
  MOD_RES (98)..(98): Selenocysteine
  MOD_RES (121)..(121): Selenocysteine
  MOD_RES (130)..(130): Selenocysteine
  MOD_RES (137)..(137): Selenocysteine
  MOD_RES (147)..(147): Selenocysteine
  MOD_RES (179)..(180): Selenocysteine
  MOD_RES (185)..(185): Selenocysteine
  MOD_RES (196)..(196): Selenocysteine
  MOD_RES (208)..(208): Selenocysteine
  MOD_RES (223)..(223): Selenocysteine
MLPKRSRRXVSKSIGPXCPFAGSCEVSKXQRRHCPACRLQKCLDAGMRKDMILSAEALALRRAKQAQRRAQQXPVQLSKEQEELIRXLLGAHXRHMGXMFEQFVQFRPPAHLFIHHQPLPXLAPVLPLVXHFADINXFMVLQVIKFXKDLPVFRSLPIEDQISLLKGAAVEICHIVLNXXFCLQXQNFLCGPLRYXIEDGARDRPGVXQRDEIDQLQEEMALXLQSYIKGQQRRPRDRFLYAKLLGLLAELRSINEAYGYQIQHIQGLSAMMPLLQEICS

SEQ ID NO: 18186 - protein, 267 aa, Homo sapiens
  MOD_RES (9)..(9): Selenocysteine
  MOD_RES (17)..(17): Selenocysteine
  MOD_RES (29)..(29): Selenocysteine
  MOD_RES (73)..(73): Selenocysteine
  MOD_RES (87)..(87): Selenocysteine
  MOD_RES (93)..(93): Selenocysteine
  MOD_RES (98)..(98): Selenocysteine
  MOD_RES (121)..(121): Selenocysteine
  MOD_RES (130)..(130): Selenocysteine
  MOD_RES (137)..(137): Selenocysteine
  MOD_RES (147)..(147): Selenocysteine
  MOD_RES (179)..(180): Selenocysteine
  MOD_RES (185)..(185): Selenocysteine
  MOD_RES (196)..(196): Selenocysteine
  MOD_RES (208)..(208): Selenocysteine
  MOD_RES (223)..(223): Selenocysteine
  MOD_RES (242)..(242): Selenocysteine
MLPKRSRRXVSKSIGPXCPFAGSCEVSKXQRRHCPACRLQKCLDAGMRKDMILSAEALALRRAKQAQRRAQQXPVQLSKEQEELIRXLLGAHXRHMGXMFEQFVQFRPPAHLFIHHQPLPXLAPVLPLVXHFADINXFMVLQVIKFXKDLPVFRSLPIEDQISLLKGAAVEICHIVLNXXFCLQXQNFLCGPLRYXIEDGARDRPGVXQRDEIDQLQEEMALXLQSYIKGQQRRPRDRSPGXPWIHWSGKMLGPKIGPGSKGAQWLQ

SEQ ID NO: 18187 - protein, 311 aa, Homo sapiens
  MOD_RES (9)..(9): Selenocysteine
  MOD_RES (17)..(17): Selenocysteine
  MOD_RES (29)..(29): Selenocysteine
  MOD_RES (73)..(73): Selenocysteine
  MOD_RES (87)..(87): Selenocysteine
  MOD_RES (93)..(93): Selenocysteine
  MOD_RES (98)..(98): Selenocysteine
  MOD_RES (121)..(121): Selenocysteine
  MOD_RES (130)..(130): Selenocysteine
  MOD_RES (137)..(137): Selenocysteine
  MOD_RES (147)..(147): Selenocysteine
  MOD_RES (179)..(180): Selenocysteine
  MOD_RES (185)..(185): Selenocysteine
  MOD_RES (196)..(196): Selenocysteine
  MOD_RES (219)..(219): Selenocysteine
  MOD_RES (246)..(246): Selenocysteine
  MOD_RES (252)..(252): Selenocysteine
  MOD_RES (267)..(267): Selenocysteine
  MOD_RES (286)..(286): Selenocysteine
MLPKRSRRXVSKSIGPXCPFAGSCEVSKXQRRHCPACRLQKCLDAGMRKDMILSAEALALRRAKQAQRRAQQXPVQLSKEQEELIRXLLGAHXRHMGXMFEQFVQFRPPAHLFIHHQPLPXLAPVLPLVXHFADINXFMVLQVIKFXKDLPVFRSLPIEDQISLLKGAAVEICHIVLNXXFCLQXQNFLCGPLRYXIEDGARVGFQVEFLELLFHFHGXLRKLQLQEPEYVLLAAMALFSPAPYLXDRPGVXQRDEIDQLQEEMALXLQSYIKGQQRRPRDRSPGXPWIHWSGKMLGPKIGPGSKGAQWLQ

SEQ ID NO: 18188 - protein, 324 aa, Homo sapiens
  MOD_RES (9)..(9): Selenocysteine
  MOD_RES (17)..(17): Selenocysteine
  MOD_RES (29)..(29): Selenocysteine
  MOD_RES (73)..(73): Selenocysteine
  MOD_RES (87)..(87): Selenocysteine
  MOD_RES (93)..(93): Selenocysteine
  MOD_RES (98)..(98): Selenocysteine
  MOD_RES (121)..(121): Selenocysteine
  MOD_RES (130)..(130): Selenocysteine
  MOD_RES (137)..(137): Selenocysteine
  MOD_RES (147)..(147): Selenocysteine
  MOD_RES (179)..(180): Selenocysteine
  MOD_RES (185)..(185): Selenocysteine
  MOD_RES (196)..(196): Selenocysteine
  MOD_RES (219)..(219): Selenocysteine
  MOD_RES (246)..(246): Selenocysteine
  MOD_RES (252)..(252): Selenocysteine
  MOD_RES (267)..(267): Selenocysteine
MLPKRSRRXVSKSIGPXCPFAGSCEVSKXQRRHCPACRLQKCLDAGMRKDMILSAEALALRRAKQAQRRAQQXPVQLSKEQEELIRXLLGAHXRHMGXMFEQFVQFRPPAHLFIHHQPLPXLAPVLPLVXHFADINXFMVLQVIKFXKDLPVFRSLPIEDQISLLKGAAVEICHIVLNXXFCLQXQNFLCGPLRYXIEDGARVGFQVEFLELLFHFHGXLRKLQLQEPEYVLLAAMALFSPAPYLXDRPGVXQRDEIDQLQEEMALXLQSYIKGQQRRPRDRFLYAKLLGLLAELRSINEAYGYQIQHIQGLSAMMPLLQEICS

SEQ ID NO: 18189 - protein, 297 aa, Homo sapiens
  MOD_RES (9)..(9): Selenocysteine
  MOD_RES (17)..(17): Selenocysteine
  MOD_RES (29)..(29): Selenocysteine
  MOD_RES (73)..(73): Selenocysteine
  MOD_RES (87)..(87): Selenocysteine
  MOD_RES (93)..(93): Selenocysteine
  MOD_RES (98)..(98): Selenocysteine
  MOD_RES (121)..(121): Selenocysteine
  MOD_RES (130)..(130): Selenocysteine
  MOD_RES (137)..(137): Selenocysteine
  MOD_RES (147)..(147): Selenocysteine
  MOD_RES (179)..(180): Selenocysteine
  MOD_RES (185)..(185): Selenocysteine
  MOD_RES (196)..(196): Selenocysteine
  MOD_RES (219)..(219): Selenocysteine
  MOD_RES (247)..(247): Selenocysteine
  MOD_RES (262)..(262): Selenocysteine
  MOD_RES (281)..(281): Selenocysteine
MLPKRSRRXVSKSIGPXCPFAGSCEVSKXQRRHCPACRLQKCLDAGMRKDMILSAEALALRRAKQAQRRAQQXPVQLSKEQEELIRXLLGAHXRHMGXMFEQFVQFRPPAHLFIHHQPLPXLAPVLPLVXHFADINXFMVLQVIKFXKDLPVFRSLPIEDQISLLKGAAVEICHIVLNXXFCLQXQNFLCGPLRYXIEDGARVGFQVEFLELLFHFHGXLRKLQLQEPEYVLLAAMALFSPDRPGVXQRDEIDQLQEEMALXLQSYIKGQQRRPRDRYGGXLRAWRPHQGRKGLVKH

SEQ ID NO: 18190 - protein, 306 aa, Homo sapiens
  MOD_RES (9)..(9): Selenocysteine
  MOD_RES (17)..(17): Selenocysteine
  MOD_RES (29)..(29): Selenocysteine
  MOD_RES (73)..(73): Selenocysteine
  MOD_RES (87)..(87): Selenocysteine
  MOD_RES (93)..(93): Selenocysteine
  MOD_RES (98)..(98): Selenocysteine
  MOD_RES (121)..(121): Selenocysteine
  MOD_RES (130)..(130): Selenocysteine
  MOD_RES (137)..(137): Selenocysteine
  MOD_RES (147)..(147): Selenocysteine
  MOD_RES (179)..(180): Selenocysteine
  MOD_RES (185)..(185): Selenocysteine
  MOD_RES (196)..(196): Selenocysteine
  MOD_RES (219)..(219): Selenocysteine
  MOD_RES (247)..(247): Selenocysteine
  MOD_RES (262)..(262): Selenocysteine
  MOD_RES (281)..(281): Selenocysteine
MLPKRSRRXVSKSIGPXCPFAGSCEVSKXQRRHCPACRLQKCLDAGMRKDMILSAEALALRRAKQAQRRAQQXPVQLSKEQEELIRXLLGAHXRHMGXMFEQFVQFRPPAHLFIHHQPLPXLAPVLPLVXHFADINXFMVLQVIKFXKDLPVFRSLPIEDQISLLKGAAVEICHIVLNXXFCLQXQNFLCGPLRYXIEDGARVGFQVEFLELLFHFHGXLRKLQLQEPEYVLLAAMALFSPDRPGVXQRDEIDQLQEEMALXLQSYIKGQQRRPRDRSPGXPWIHWSGKMLGPKIGPGSKGAQWLQ

SEQ ID NO: 18191 - protein, 319 aa, Homo sapiens
  MOD_RES (9)..(9): Selenocysteine
  MOD_RES (17)..(17): Selenocysteine
  MOD_RES (29)..(29): Selenocysteine
  MOD_RES (73)..(73): Selenocysteine
  MOD_RES (87)..(87): Selenocysteine
  MOD_RES (93)..(93): Selenocysteine
  MOD_RES (98)..(98): Selenocysteine
  MOD_RES (121)..(121): Selenocysteine
  MOD_RES (130)..(130): Selenocysteine
  MOD_RES (137)..(137): Selenocysteine
  MOD_RES (147)..(147): Selenocysteine
  MOD_RES (179)..(180): Selenocysteine
  MOD_RES (185)..(185): Selenocysteine
  MOD_RES (196)..(196): Selenocysteine
  MOD_RES (219)..(219): Selenocysteine
  MOD_RES (247)..(247): Selenocysteine
  MOD_RES (262)..(262): Selenocysteine
MLPKRSRRXVSKSIGPXCPFAGSCEVSKXQRRHCPACRLQKCLDAGMRKDMILSAEALALRRAKQAQRRAQQXPVQLSKEQEELIRXLLGAHXRHMGXMFEQFVQFRPPAHLFIHHQPLPXLAPVLPLVXHFADINXFMVLQVIKFXKDLPVFRSLPIEDQISLLKGAAVEICHIVLNXXFCLQXQNFLCGPLRYXIEDGARVGFQVEFLELLFHFHGXLRKLQLQEPEYVLLAAMALFSPDRPGVXQRDEIDQLQEEMALXLQSYIKGQQRRPRDRFLYAKLLGLLAELRSINEAYGYQIQHIQGLSAMMPLLQEICS

SEQ ID NO: 18192 - protein, 315 aa, Homo sapiens
  MOD_RES (9)..(9): Selenocysteine
  MOD_RES (17)..(17): Selenocysteine
  MOD_RES (29)..(29): Selenocysteine
  MOD_RES (73)..(73): Selenocysteine
  MOD_RES (87)..(87): Selenocysteine
  MOD_RES (93)..(93): Selenocysteine
  MOD_RES (98)..(98): Selenocysteine
  MOD_RES (121)..(121): Selenocysteine
  MOD_RES (130)..(130): Selenocysteine
  MOD_RES (137)..(137): Selenocysteine
  MOD_RES (147)..(147): Selenocysteine
  MOD_RES (179)..(180): Selenocysteine
  MOD_RES (185)..(185): Selenocysteine
  MOD_RES (196)..(196): Selenocysteine
  MOD_RES (206)..(206): Selenocysteine
  MOD_RES (223)..(223): Selenocysteine
  MOD_RES (250)..(250): Selenocysteine
  MOD_RES (256)..(256): Selenocysteine
  MOD_RES (271)..(271): Selenocysteine
  MOD_RES (290)..(290): Selenocysteine
MLPKRSRRXVSKSIGPXCPFAGSCEVSKXQRRHCPACRLQKCLDAGMRKDMILSAEALALRRAKQAQRRAQQXPVQLSKEQEELIRXLLGAHXRHMGXMFEQFVQFRPPAHLFIHHQPLPXLAPVLPLVXHFADINXFMVLQVIKFXKDLPVFRSLPIEDQISLLKGAAVEICHIVLNXXFCLQXQNFLCGPLRYXIEDGARVSPXVGFQVEFLELLFHFHGXLRKLQLQEPEYVLLAAMALFSPAPYLXDRPGVXQRDEIDQLQEEMALXLQSYIKGQQRRPRDRSPGXPWIHWSGKMLGPKIGPGSKGAQWLQ

SEQ ID NO: 18193 - protein, 274 aa, Homo sapiens
  MOD_RES (9)..(9): Selenocysteine
  MOD_RES (17)..(17): Selenocysteine
  MOD_RES (29)..(29): Selenocysteine
  MOD_RES (73)..(73): Selenocysteine
  MOD_RES (87)..(87): Selenocysteine
  MOD_RES (93)..(93): Selenocysteine
  MOD_RES (98)..(98): Selenocysteine
  MOD_RES (121)..(121): Selenocysteine
  MOD_RES (130)..(130): Selenocysteine
  MOD_RES (137)..(137): Selenocysteine
  MOD_RES (147)..(147): Selenocysteine
  MOD_RES (179)..(180): Selenocysteine
  MOD_RES (185)..(185): Selenocysteine
  MOD_RES (196)..(196): Selenocysteine
  MOD_RES (206)..(206): Selenocysteine
  MOD_RES (223)..(223): Selenocysteine
  MOD_RES (258)..(259): Selenocysteine
  MOD_RES (271)..(271): Selenocysteine
MLPKRSRRXVSKSIGPXCPFAGSCEVSKXQRRHCPACRLQKCLDAGMRKDMILSAEALALRRAKQAQRRAQQXPVQLSKEQEELIRXLLGAHXRHMGXMFEQFVQFRPPAHLFIHHQPLPXLAPVLPLVXHFADINXFMVLQVIKFXKDLPVFRSLPIEDQISLLKGAAVEICHIVLNXXFCLQXQNFLCGPLRYXIEDGARVSPXVGFQVEFLELLFHFHGXLRKLQLQEPEYVLLAAMALFSPGEHLPKPRAFCCXXSAQILSSLSPSXQAF

SEQ ID NO: 18194 - protein, 90 aa, Homo sapiens
  MOD_RES (9)..(9): Selenocysteine
  MOD_RES (17)..(17): Selenocysteine
  MOD_RES (29)..(29): Selenocysteine
  MOD_RES (51)..(51): Selenocysteine
  MOD_RES (74)..(74): Selenocysteine
  MOD_RES (84)..(84): Selenocysteine
MLPKRSRRXVSKSIGPXCPFAGSCEVSKXQRRHCPACRLQKCLDAGMRKDXSSSSVHPSPALAHPGPCAASGHXLRRHQHFHGXASHQVY

SEQ ID NO: 18195 - protein, 273 aa, Homo sapiens
  MOD_RES (27)..(27): Selenocysteine
  MOD_RES (41)..(41): Selenocysteine
  MOD_RES (47)..(47): Selenocysteine
  MOD_RES (52)..(52): Selenocysteine
  MOD_RES (75)..(75): Selenocysteine
  MOD_RES (84)..(84): Selenocysteine
  MOD_RES (91)..(91): Selenocysteine
  MOD_RES (101)..(101): Selenocysteine
  MOD_RES (133)..(134): Selenocysteine
  MOD_RES (139)..(139): Selenocysteine
  MOD_RES (150)..(150): Selenocysteine
  MOD_RES (173)..(173): Selenocysteine
  MOD_RES (201)..(201): Selenocysteine
  MOD_RES (216)..(216): Selenocysteine
MRKDMILSAEALALRRAKQAQRRAQQXPVQLSKEQEELIRXLLGAHXRHMGXMFEQFVQFRPPAHLFIHHQPLPXLAPVLPLVXHFADINXFMVLQVIKFXKDLPVFRSLPIEDQISLLKGAAVEICHIVLNXXFCLQXQNFLCGPLRYXIEDGARVGFQVEFLELLFHFHGXLRKLQLQEPEYVLLAAMALFSPDRPGVXQRDEIDQLQEEMALXLQSYIKGQQRRPRDRFLYAKLLGLLAELRSINEAYGYQIQHIQGLSAMMPLLQEICS

SEQ ID NO: 18196 - protein, 16 aa, Homo sapiens
  MOD_RES (3)..(3): Selenocysteine
MAXIEEIAHQIIEQQM

SEQ ID NO: 18197 - protein, 434 aa, Homo sapiens
  MOD_RES (3)..(3): Selenocysteine
  MOD_RES (21)..(21): Selenocysteine
  MOD_RES (25)..(25): Selenocysteine
  MOD_RES (33)..(33): Selenocysteine
  MOD_RES (39)..(39): Selenocysteine
  MOD_RES (47)..(47): Selenocysteine
  MOD_RES (53)..(53): Selenocysteine
  MOD_RES (65)..(65): Selenocysteine
  MOD_RES (72)..(73): Selenocysteine
  MOD_RES (85)..(86): Selenocysteine
  MOD_RES (98)..(98): Selenocysteine
  MOD_RES (129)..(129): Selenocysteine
  MOD_RES (204)..(204): Selenocysteine
  MOD_RES (218)..(218): Selenocysteine
  MOD_RES (220)..(220): Selenocysteine
  MOD_RES (222)..(222): Selenocysteine
  MOD_RES (225)..(225): Selenocysteine
  MOD_RES (230)..(230): Selenocysteine
  MOD_RES (233)..(233): Selenocysteine
  MOD_RES (251)..(251): Selenocysteine
  MOD_RES (258)..(258): Selenocysteine
  MOD_RES (271)..(271): Selenocysteine
  MOD_RES (277)..(277): Selenocysteine
  MOD_RES (285)..(285): Selenocysteine
  MOD_RES (306)..(306): Selenocysteine
  MOD_RES (316)..(316): Selenocysteine
  MOD_RES (326)..(326): Selenocysteine
  MOD_RES (337)..(337): Selenocysteine
  MOD_RES (354)..(354): Selenocysteine
  MOD_RES (362)..(362): Selenocysteine
  MOD_RES (379)..(379): Selenocysteine
  MOD_RES (430)..(431): Selenocysteine
MAXIEEIAHQIIEQQMGEIVXEQQXGQKIQIVXALDHNXQGKQFILXNHDGSXPSKVILARQDSXPGKVFLXXPDAAGVNQLFFXXPDLSAQHLQLLXDNSPDQGPNKVFDLCVVCGDKASGRHYGAVXCEGCKGFFKRSIRKNLVYSCRGSKDCIINKHHRNRCQYCRLQRCIAFGMKQDSVQCERKPIEVSREKSSNCAASXEKIYIRKDLRSPLXAXPXFVXDSESXRSXGLLDSGMFMNIHPSGVKXESAVLMXSDKAESCQGDLSXLANVVXSLANLGKXKDLSQNSNEMSMIESLSNDDXSLCEFQEMQXNGDVSRAFDXLAKALNPGESXACQSSVAGMEGSVHLIXGDSSINYXEKEGPLLSDSHVAFRLXMPSPMPEYLNVHYIGESASRLLFLSMHWALSIPSFQALGKKKIIDGAHLQXXGVL

SEQ ID NO: 18198 - protein, 467 aa, Homo sapiens
  MOD_RES (3)..(3): Selenocysteine
  MOD_RES (21)..(21): Selenocysteine
  MOD_RES (25)..(25): Selenocysteine
  MOD_RES (33)..(33): Selenocysteine
  MOD_RES (39)..(39): Selenocysteine
  MOD_RES (47)..(47): Selenocysteine
  MOD_RES (53)..(53): Selenocysteine
  MOD_RES (65)..(65): Selenocysteine
  MOD_RES (72)..(73): Selenocysteine
  MOD_RES (85)..(86): Selenocysteine
  MOD_RES (98)..(98): Selenocysteine
  MOD_RES (129)..(129): Selenocysteine
  MOD_RES (204)..(204): Selenocysteine
  MOD_RES (218)..(218): Selenocysteine
  MOD_RES (220)..(220): Selenocysteine
  MOD_RES (222)..(222): Selenocysteine
  MOD_RES (225)..(225): Selenocysteine
  MOD_RES (230)..(230): Selenocysteine
  MOD_RES (233)..(233): Selenocysteine
  MOD_RES (251)..(251): Selenocysteine
  MOD_RES (258)..(258): Selenocysteine
  MOD_RES (271)..(271): Selenocysteine
  MOD_RES (277)..(277): Selenocysteine
  MOD_RES (285)..(285): Selenocysteine
  MOD_RES (306)..(306): Selenocysteine
  MOD_RES (316)..(316): Selenocysteine
  MOD_RES (326)..(326): Selenocysteine
  MOD_RES (337)..(337): Selenocysteine
  MOD_RES (354)..(354): Selenocysteine
  MOD_RES (362)..(362): Selenocysteine
  MOD_RES (379)..(379): Selenocysteine
  MOD_RES (435)..(435): Selenocysteine
  MOD_RES (449)..(449): Selenocysteine
  MOD_RES (453)..(453): Selenocysteine
MAXIEEIAHQIIEQQMGEIVXEQQXGQKIQIVXALDHNXQGKQFILXNHDGSXPSKVILARQDSXPGKVFLXXPDAAGVNQLFFXXPDLSAQHLQLLXDNSPDQGPNKVFDLCVVCGDKASGRHYGAVXCEGCKGFFKRSIRKNLVYSCRGSKDCIINKHHRNRCQYCRLQRCIAFGMKQDSVQCERKPIEVSREKSSNCAASXEKIYIRKDLRSPLXAXPXFVXDSESXRSXGLLDSGMFMNIHPSGVKXESAVLMXSDKAESCQGDLSXLANVVXSLANLGKXKDLSQNSNEMSMIESLSNDDXSLCEFQEMQXNGDVSRAFDXLAKALNPGESXACQSSVAGMEGSVHLIXGDSSINYXEKEGPLLSDSHVAFRLXMPSPMPEYLNVHYIGESASRLLFLSMHWALSIPSFQALGQENSISLVKAYWNELFXLGLAQCWQVMNVAXILAXFVNCLHNSLQQAEG

SEQ ID NO: 18199 - protein, 483 aa, Homo sapiens
  MOD_RES (3)..(3): Selenocysteine
  MOD_RES (21)..(21): Selenocysteine
  MOD_RES (25)..(25): Selenocysteine
  MOD_RES (33)..(33): Selenocysteine
  MOD_RES (39)..(39): Selenocysteine
  MOD_RES (47)..(47): Selenocysteine
  MOD_RES (53)..(53): Selenocysteine
  MOD_RES (65)..(65): Selenocysteine
  MOD_RES (72)..(73): Selenocysteine
  MOD_RES (85)..(86): Selenocysteine
  MOD_RES (98)..(98): Selenocysteine
  MOD_RES (129)..(129): Selenocysteine
  MOD_RES (204)..(204): Selenocysteine
  MOD_RES (218)..(218): Selenocysteine
  MOD_RES (220)..(220): Selenocysteine
  MOD_RES (222)..(222): Selenocysteine
  MOD_RES (225)..(225): Selenocysteine
  MOD_RES (230)..(230): Selenocysteine
  MOD_RES (233)..(233): Selenocysteine
  MOD_RES (251)..(251): Selenocysteine
  MOD_RES (258)..(258): Selenocysteine
  MOD_RES (271)..(271): Selenocysteine
  MOD_RES (277)..(277): Selenocysteine
  MOD_RES (285)..(285): Selenocysteine
  MOD_RES (306)..(306): Selenocysteine
  MOD_RES (316)..(316): Selenocysteine
  MOD_RES (326)..(326): Selenocysteine
  MOD_RES (337)..(337): Selenocysteine
  MOD_RES (354)..(354): Selenocysteine
  MOD_RES (362)..(362): Selenocysteine
  MOD_RES (379)..(379): Selenocysteine
  MOD_RES (435)..(435): Selenocysteine
  MOD_RES (449)..(449): Selenocysteine
  MOD_RES (453)..(453): Selenocysteine
  MOD_RES (476)..(476): Selenocysteine
  MOD_RES (481)..(481): Selenocysteine
MAXIEEIAHQIIEQQMGEIVXEQQXGQKIQIVXALDHNXQGKQFILXNHDGSXPSKVILARQDSXPGKVFLXXPDAAGVNQLFFXXPDLSAQHLQLLXDNSPDQGPNKVFDLCVVCGDKASGRHYGAVXCEGCKGFFKRSIRKNLVYSCRGSKDCIINKHHRNRCQYCRLQRCIAFGMKQDSVQCERKPIEVSREKSSNCAASXEKIYIRKDLRSPLXAXPXFVXDSESXRSXGLLDSGMFMNIHPSGVKXESAVLMXSDKAESCQGDLSXLANVVXSLANLGKXKDLSQNSNEMSMIESLSNDDXSLCEFQEMQXNGDVSRAFDXLAKALNPGESXACQSSVAGMEGSVHLIXGDSSINYXEKEGPLLSDSHVAFRLXMPSPMPEYLNVHYIGESASRLLFLSMHWALSIPSFQALGQENSISLVKAYWNELFXLGLAQCWQVMNVAXILAXFVNCLHNSLQQDAKVIAALIHFXRRAIXDL

SEQ ID NO: 18200 - protein, 603 aa, Homo sapiens
  MOD_RES (3)..(3): Selenocysteine
  MOD_RES (21)..(21): Selenocysteine
  MOD_RES (25)..(25): Selenocysteine
  MOD_RES (33)..(33): Selenocysteine
  MOD_RES (39)..(39): Selenocysteine
  MOD_RES (47)..(47): Selenocysteine
  MOD_RES (53)..(53): Selenocysteine
  MOD_RES (65)..(65): Selenocysteine
  MOD_RES (72)..(73): Selenocysteine
  MOD_RES (85)..(86): Selenocysteine
  MOD_RES (98)..(98): Selenocysteine
  MOD_RES (129)..(129): Selenocysteine
  MOD_RES (204)..(204): Selenocysteine
  MOD_RES (218)..(218): Selenocysteine
  MOD_RES (220)..(220): Selenocysteine
  MOD_RES (222)..(222): Selenocysteine
  MOD_RES (225)..(225): Selenocysteine
  MOD_RES (230)..(230): Selenocysteine
  MOD_RES (233)..(233): Selenocysteine
  MOD_RES (251)..(251): Selenocysteine
  MOD_RES (258)..(258): Selenocysteine
  MOD_RES (271)..(271): Selenocysteine
  MOD_RES (277)..(277): Selenocysteine
  MOD_RES (285)..(285): Selenocysteine
  MOD_RES (306)..(306): Selenocysteine
  MOD_RES (316)..(316): Selenocysteine
  MOD_RES (326)..(326): Selenocysteine
  MOD_RES (337)..(337): Selenocysteine
  MOD_RES (354)..(354): Selenocysteine
  MOD_RES (362)..(362): Selenocysteine
  MOD_RES (379)..(379): Selenocysteine
  MOD_RES (435)..(435): Selenocysteine
  MOD_RES (449)..(449): Selenocysteine
  MOD_RES (453)..(453): Selenocysteine
  MOD_RES (469)..(469): Selenocysteine
  MOD_RES (537)..(537): Selenocysteine
  MOD_RES (539)..(539): Selenocysteine
  MOD_RES (544)..(544): Selenocysteine
  MOD_RES (563)..(563): Selenocysteine
  MOD_RES (565)..(565): Selenocysteine
MAXIEEIAHQIIEQQMGEIVXEQQXGQKIQIVXALDHNXQGKQFILXNHDGSXPSKVILARQDSXPGKVFLXXPDAAGVNQLFFXXPDLSAQHLQLLXDNSPDQGPNKVFDLCVVCGDKASGRHYGAVXCEGCKGFFKRSIRKNLVYSCRGSKDCIINKHHRNRCQYCRLQRCIAFGMKQDSVQCERKPIEVSREKSSNCAASXEKIYIRKDLRSPLXAXPXFVXDSESXRSXGLLDSGMFMNIHPSGVKXESAVLMXSDKAESCQGDLSXLANVVXSLANLGKXKDLSQNSNEMSMIESLSNDDXSLCEFQEMQXNGDVSRAFDXLAKALNPGESXACQSSVAGMEGSVHLIXGDSSINYXEKEGPLLSDSHVAFRLXMPSPMPEYLNVHYIGESASRLLFLSMHWALSIPSFQALGQENSISLVKAYWNELFXLGLAQCWQVMNVAXILAXFVNCLHNSLQQDKMSXERRKLLMEHIFKLQEFCNSMVKLCIDGYEYAYLKAIVLFSPDHPSLENMEQIEKFQEKAYVEFQDYIXKXYPDDXYRLSRLLLRLPALRLMNAXIXEELFFKGLIGNIRIDSVIPHILKMEPADYNSQIIGHSI

SEQ ID NO: 18201 - protein, 47 aa, Homo sapiens
  MOD_RES (1)..(1): Any amino acid
  MOD_RES (21)..(21): Selenocysteine
  MOD_RES (31)..(31): Selenocysteine
  MOD_RES (47)..(47): Selenocysteine
XDLSQNSNEMSMIESLSNDDXSLCEFQEMQXNGDVSSSPCLLLCLSX

SEQ ID NO: 18202 - protein, 73 aa, Homo sapiens
  MOD_RES (1)..(1): Any amino acid
  MOD_RES (3)..(3): Selenocysteine
  MOD_RES (51)..(51): Selenocysteine
XLXMPSPMPEYLNVHYIGESASRLLFLSMHWALSIPSFQALGSSKPRKHGXDREISGKGLCGIPRLYNQNISR

SEQ ID NO: 18203 - protein, 222 aa, Homo sapiens
  MOD_RES (30)..(30): Selenocysteine
  MOD_RES (42)..(42): Selenocysteine
  MOD_RES (56)..(56): Selenocysteine
  MOD_RES (123)..(123): Selenocysteine
  MOD_RES (125)..(125): Selenocysteine
  MOD_RES (146)..(146): Selenocysteine
  MOD_RES (151)..(151): Selenocysteine
  MOD_RES (157)..(158): Selenocysteine
  MOD_RES (180)..(180): Selenocysteine
  MOD_RES (182)..(182): Selenocysteine
  MOD_RES (184)..(184): Selenocysteine
  MOD_RES (205)..(205): Selenocysteine
  MOD_RES (221)..(221): Selenocysteine
CESASRLLFLSMHWARSIPAFQALGQDCNXSLVRACWNELFXLGLAQCAQVMSLSXILAAIVNHLQNSIQEDKLSGDRIKQVMEHIWKLQEFCNSMAKLDIDGYEYAYLKAIVLFSPDHPGLXSXSQIEKFQEKAQMELQDYVQKXYSEDXYRSNQXXHSFFPKIFLMCSMISLLLLVSXSXRXCSPESGNGKHGAEEKQNSQRXQPQKVVIWDLLLVAEXF

SEQ ID NO: 18204 - protein, 36 aa, Homo sapiens
  MOD_RES (2)..(2): Selenocysteine
  MOD_RES (13)..(13): Selenocysteine
MXSPSPRIQIISXDSAVASPQRIQGSEPASGPLSVF

SEQ ID NO: 18205 - protein, 205 aa, Homo sapiens
  MOD_RES (2)..(2): Selenocysteine
  MOD_RES (13)..(13): Selenocysteine
  MOD_RES (37)..(37): Selenocysteine
  MOD_RES (46)..(46): Selenocysteine
  MOD_RES (50)..(50): Selenocysteine
  MOD_RES (58)..(58): Selenocysteine
  MOD_RES (73)..(73): Selenocysteine
  MOD_RES (80)..(80): Selenocysteine
  MOD_RES (90)..(90): Selenocysteine
  MOD_RES (99)..(100): Selenocysteine
  MOD_RES (113)..(113): Selenocysteine
  MOD_RES (125)..(125): Selenocysteine
  MOD_RES (169)..(169): Selenocysteine
MXSPSPRIQIISXDSAVASPQRIQGSEPASGPLSVFXSLNKEKIVXDQQXGQKIQIVXAVDASGSPKQQFILXSPDGAGXGKVILASPEXSSAKQLIFXXSDNLVPGRIQIVXDSASVERLLGKXDVQRPQVVEYCVVCGDKASGRHYGAVSCEGCKGFFKRSVRKNLXYSCRSNQDCIINKHHRNRCQFCRLKKCLEMGMKMEC

SEQ ID NO: 18206 - protein, 615 aa, Homo sapiens
  MOD_RES (2)..(2): Selenocysteine
  MOD_RES (13)..(13): Selenocysteine
  MOD_RES (37)..(37): Selenocysteine
  MOD_RES (46)..(46): Selenocysteine
  MOD_RES (50)..(50): Selenocysteine
  MOD_RES (58)..(58): Selenocysteine
  MOD_RES (73)..(73): Selenocysteine
  MOD_RES (80)..(80): Selenocysteine
  MOD_RES (90)..(90): Selenocysteine
  MOD_RES (99)..(100): Selenocysteine
  MOD_RES (113)..(113): Selenocysteine
  MOD_RES (125)..(125): Selenocysteine
  MOD_RES (169)..(169): Selenocysteine
  MOD_RES (227)..(227): Selenocysteine
  MOD_RES (243)..(243): Selenocysteine
  MOD_RES (245)..(245): Selenocysteine
  MOD_RES (256)..(256): Selenocysteine
  MOD_RES (277)..(277): Selenocysteine
  MOD_RES (282)..(282): Selenocysteine
  MOD_RES (288)..(288): Selenocysteine
  MOD_RES (295)..(295): Selenocysteine
  MOD_RES (301)..(301): Selenocysteine
  MOD_RES (315)..(315): Selenocysteine
  MOD_RES (329)..(329): Selenocysteine
  MOD_RES (334)..(334): Selenocysteine
  MOD_RES (341)..(342): Selenocysteine
  MOD_RES (356)..(356): Selenocysteine
  MOD_RES (371)..(371): Selenocysteine
  MOD_RES (384)..(384): Selenocysteine
  MOD_RES (387)..(387): Selenocysteine
  MOD_RES (391)..(391): Selenocysteine
  MOD_RES (435)..(435): Selenocysteine
  MOD_RES (447)..(447): Selenocysteine
  MOD_RES (461)..(461): Selenocysteine
  MOD_RES (528)..(528): Selenocysteine
  MOD_RES (530)..(530): Selenocysteine
  MOD_RES (551)..(551): Selenocysteine
  MOD_RES (556)..(556): Selenocysteine
  MOD_RES (577)..(577): Selenocysteine
  MOD_RES (583)..(583): Selenocysteine
  MOD_RES (603)..(603): Selenocysteine
  MOD_RES (611)..(611): Selenocysteine
MXSPSPRIQIISXDSAVASPQRIQGSEPASGPLSVFXSLNKEKIVXDQQXGQKIQIVXAVDASGSPKQQFILXSPDGAGXGKVILASPEXSSAKQLIFXXSDNLVPGRIQIVXDSASVERLLGKXDVQRPQVVEYCVVCGDKASGRHYGAVSCEGCKGFFKRSVRKNLXYSCRSNQDCIINKHHRNRCQFCRLKKCLEMGMKMESVQSERKPFDVQREKPSNCAASXEKIYIRKDLRSPLIAXPXFVADKDGARQXGLLDPGMLVNIQQPLIREDGXVLLAXDSKAEXSQGALGXLANVVXSLANLSESLNNGDXSEIQPEDQSASEIXRAFDXLAKALNXXDSSSSPSLADGIDXSGGGSIHVISRDQSXPIIEVEGPLLSDXHVXFKLXMPSPMPEYLNVHYICESASRLLFLSMHWARSIPAFQALGQDCNXSLVRACWNELFXLGLAQCAQVMSLSXILAAIVNHLQNSIQEDKLSGDRIKQVMEHIWKLQEFCNSMAKLDIDGYEYAYLKAIVLFSPDHPGLXSXSQIEKFQEKAQMELQDYVQKXYSEDXYRLARILVRLPALRLMSSNIXEELFFXGLIGNVSIDSIIPYILKMEXAEYNGQIXGASL

SEQ ID NO: 18207 - protein, 67 aa, Homo sapiens
  MOD_RES (2)..(2): Selenocysteine
  MOD_RES (13)..(13): Selenocysteine
  MOD_RES (27)..(27): Selenocysteine
  MOD_RES (31)..(31): Selenocysteine
  MOD_RES (39)..(39): Selenocysteine
  MOD_RES (54)..(54): Selenocysteine
  MOD_RES (61)..(61): Selenocysteine
MXSPSPRIQIISXDSAVASPQRIQIVXDQQXGQKIQIVXAVDASGSPKQQFILXSPDGAGXGKVILA

SEQ ID NO: 18208 - protein, 596 aa, Homo sapiens
  MOD_RES (2)..(2): Selenocysteine
  MOD_RES (13)..(13): Selenocysteine
  MOD_RES (27)..(27): Selenocysteine
  MOD_RES (31)..(31): Selenocysteine
  MOD_RES (39)..(39): Selenocysteine
  MOD_RES (54)..(54): Selenocysteine
  MOD_RES (61)..(61): Selenocysteine
  MOD_RES (71)..(71): Selenocysteine
  MOD_RES (80)..(81): Selenocysteine
  MOD_RES (94)..(94): Selenocysteine
  MOD_RES (106)..(106): Selenocysteine
  MOD_RES (150)..(150): Selenocysteine
  MOD_RES (208)..(208): Selenocysteine
  MOD_RES (224)..(224): Selenocysteine
  MOD_RES (226)..(226): Selenocysteine
  MOD_RES (237)..(237): Selenocysteine
  MOD_RES (258)..(258): Selenocysteine
  MOD_RES (263)..(263): Selenocysteine
  MOD_RES (269)..(269): Selenocysteine
  MOD_RES (276)..(276): Selenocysteine
  MOD_RES (282)..(282): Selenocysteine
  MOD_RES (296)..(296): Selenocysteine
  MOD_RES (310)..(310): Selenocysteine
  MOD_RES (315)..(315): Selenocysteine
  MOD_RES (322)..(323): Selenocysteine
  MOD_RES (337)..(337): Selenocysteine
  MOD_RES (352)..(352): Selenocysteine
  MOD_RES (365)..(365): Selenocysteine
  MOD_RES (368)..(368): Selenocysteine
  MOD_RES (372)..(372): Selenocysteine
  MOD_RES (416)..(416): Selenocysteine
  MOD_RES (428)..(428): Selenocysteine
  MOD_RES (442)..(442): Selenocysteine
  MOD_RES (509)..(509): Selenocysteine
  MOD_RES (511)..(511): Selenocysteine
  MOD_RES (532)..(532): Selenocysteine
  MOD_RES (537)..(537): Selenocysteine
  MOD_RES (558)..(558): Selenocysteine
  MOD_RES (564)..(564): Selenocysteine
  MOD_RES (584)..(584): Selenocysteine
  MOD_RES (592)..(592): Selenocysteine
MXSPSPRIQIISXDSAVASPQRIQIVXDQQXGQKIQIVXAVDASGSPKQQFILXSPDGAGXGKVILASPEXSSAKQLIFXXSDNLVPGRIQIVXDSASVERLLGKXDVQRPQVVEYCVVCGDKASGRHYGAVSCEGCKGFFKRSVRKNLXYSCRSNQDCIINKHHRNRCQFCRLKKCLEMGMKMESVQSERKPFDVQREKPSNCAASXEKIYIRKDLRSPLIAXPXFVADKDGARQXGLLDPGMLVNIQQPLIREDGXVLLAXDSKAEXSQGALGXLANVVXSLANLSESLNNGDXSEIQPEDQSASEIXRAFDXLAKALNXXDSSSSPSLADGIDXSGGGSIHVISRDQSXPIIEVEGPLLSDXHVXFKLXMPSPMPEYLNVHYICESASRLLFLSMHWARSIPAFQALGQDCNXSLVRACWNELFXLGLAQCAQVMSLSXILAAIVNHLQNSIQEDKLSGDRIKQVMEHIWKLQEFCNSMAKLDIDGYEYAYLKAIVLFSPDHPGLXSXSQIEKFQEKAQMELQDYVQKXYSEDXYRLARILVRLPALRLMSSNIXEELFFXGLIGNVSIDSIIPYILKMEXAEYNGQIXGASL

SEQ ID NO: 18209 - protein, 173 aa, Homo sapiens
  MOD_RES (11)..(11): Selenocysteine
  MOD_RES (23)..(23): Selenocysteine
  MOD_RES (37)..(37): Selenocysteine
  MOD_RES (104)..(104): Selenocysteine
  MOD_RES (106)..(106): Selenocysteine
  MOD_RES (127)..(127): Selenocysteine
  MOD_RES (132)..(132): Selenocysteine
  MOD_RES (135)..(135): Selenocysteine
  MOD_RES (156)..(156): Selenocysteine
  MOD_RES (172)..(172): Selenocysteine
PFYIPRQDCNXSLVRACWNELFXLGLAQCAQVMSLSXILAAIVNHLQNSIQEDKLSGDRIKQVMEHIWKLQEFCNSMAKLDIDGYEYAYLKAIVLFSPDHPGLXSXSQIEKFQEKAQMELQDYVQKXYSEDXYRXCSPESGNGKHGAEEKQNSQRXQPQKVVIWDLLLVAEXF

SEQ ID NO: 18210 - protein, 422 aa, Homo sapiens
  MOD_RES (86)..(86): Selenocysteine
  MOD_RES (102)..(102): Selenocysteine
  MOD_RES (133)..(133): Selenocysteine
  MOD_RES (135)..(135): Selenocysteine
  MOD_RES (169)..(169): Selenocysteine
  MOD_RES (172)..(172): Selenocysteine
  MOD_RES (186)..(187): Selenocysteine
  MOD_RES (192)..(192): Selenocysteine
  MOD_RES (200)..(200): Selenocysteine
  MOD_RES (210)..(210): Selenocysteine
  MOD_RES (219)..(219): Selenocysteine
  MOD_RES (245)..(245): Selenocysteine
  MOD_RES (278)..(278): Selenocysteine
  MOD_RES (290)..(290): Selenocysteine
  MOD_RES (320)..(320): Selenocysteine
  MOD_RES (330)..(330): Selenocysteine
  MOD_RES (336)..(336): Selenocysteine
  MOD_RES (361)..(361): Selenocysteine
  MOD_RES (368)..(368): Selenocysteine
  MOD_RES (372)..(372): Selenocysteine
  MOD_RES (394)..(394): Selenocysteine
  MOD_RES (403)..(403): Selenocysteine
  MOD_RES (410)..(410): Selenocysteine
MFRAGAEGAEKEPSPRPECRADPGPGLGFPLGSGLPWPSLLESPGGRILDIPCKVCGDRSSGKHYGVYACDGCSGFFKRSIRRNRXYVCKSGNQGGCPVDKXHRNQCRACRLKKCLEVNMNKDAVQHERGPRXSXIRKQVALYFRGHKEENGAAAHFPSAALPAPAFFXAVXQLEPHGLELAAVSXXPERQXLVSLAQPXPKYPHEVNGXPMYLYEVAXESVCESAARLLFMSIKWAKSVPAFSXLSLQDQLMLLEDAWRELFVLGIAQWAIPVDANXLLAVSGMNGDNXDSQKLNKIISEIQALQEVVARFRQLRLDAXEFACLKCIVXFKAVPXHSGSELRSFRNAAAIAALQDEAQLXLNSYIHXRYPXQPCRFGKLLLLLPALRSISPSXIEEVFFKKXIGNVPIXRLLSDMYKSSDI

SEQ ID NO: 18211 - protein, 46 aa, Homo sapiens
  MOD_RES (14)..(14): Selenocysteine
  MOD_RES (16)..(16): Selenocysteine
MNKDAVQHERGPRXSXIRKQVALYFRGHKEENGAAAHFPSAALPAP

SEQ ID NO: 18212 - protein, 385 aa, Homo sapiens
  MOD_RES (8)..(8): Selenocysteine
  MOD_RES (49)..(49): Selenocysteine
  MOD_RES (65)..(65): Selenocysteine
  MOD_RES (96)..(96): Selenocysteine
  MOD_RES (98)..(98): Selenocysteine
  MOD_RES (132)..(132): Selenocysteine
  MOD_RES (135)..(135): Selenocysteine
  MOD_RES (149)..(150): Selenocysteine
  MOD_RES (155)..(155): Selenocysteine
  MOD_RES (163)..(163): Selenocysteine
  MOD_RES (173)..(173): Selenocysteine
  MOD_RES (182)..(182): Selenocysteine
  MOD_RES (208)..(208): Selenocysteine
  MOD_RES (241)..(241): Selenocysteine
  MOD_RES (253)..(253): Selenocysteine
  MOD_RES (283)..(283): Selenocysteine
  MOD_RES (293)..(293): Selenocysteine
  MOD_RES (299)..(299): Selenocysteine
  MOD_RES (324)..(324): Selenocysteine
  MOD_RES (331)..(331): Selenocysteine
  MOD_RES (335)..(335): Selenocysteine
  MOD_RES (357)..(357): Selenocysteine
  MOD_RES (366)..(366): Selenocysteine
  MOD_RES (373)..(373): Selenocysteine
MSKPAGSXSRILDIPCKVCGDRSSGKHYGVYACDGCSGFFKRSIRRNRXYVCKSGNQGGCPVDKXHRNQCRACRLKKCLEVNMNKDAVQHERGPRXSXIRKQVALYFRGHKEENGAAAHFPSAALPAPAFFXAVXQLEPHGLELAAVSXXPERQXLVSLAQPXPKYPHEVNGXPMYLYEVAXESVCESAARLLFMSIKWAKSVPAFSXLSLQDQLMLLEDAWRELFVLGIAQWAIPVDANXLLAVSGMNGDNXDSQKLNKIISEIQALQEVVARFRQLRLDAXEFACLKCIVXFKAVPXHSGSELRSFRNAAAIAALQDEAQLXLNSYIHXRYPXQPCRFGKLLLLLPALRSISPSXIEEVFFKKXIGNVPIXRLLSDMYKSSDI

SEQ ID NO: 18213 - protein, 322 aa, Homo sapiens
  MOD_RES (39)..(39): Selenocysteine
  MOD_RES (51)..(51): Selenocysteine
  MOD_RES (73)..(73): Selenocysteine
  MOD_RES (91)..(91): Selenocysteine
  MOD_RES (94)..(94): Selenocysteine
  MOD_RES (110)..(110): Selenocysteine
  MOD_RES (135)..(135): Selenocysteine
  MOD_RES (206)..(206): Selenocysteine
  MOD_RES (212)..(212): Selenocysteine
  MOD_RES (218)..(218): Selenocysteine
  MOD_RES (230)..(230): Selenocysteine
  MOD_RES (245)..(245): Selenocysteine
  MOD_RES (294)..(294): Selenocysteine
  MOD_RES (306)..(306): Selenocysteine
  MOD_RES (310)..(310): Selenocysteine
MCPVDKAHRNQCQACRLKKCLQAGMNQDAVQNERQPRSXAQVHLDSMESNXESRPESLVAPPAPAGRSPRGPXPMSAARALGHHFMASLIXAEXCAKLEPEDADENIDVXSNDPEFPSSPYSSSSPCGLDSIHEXSARLLFMAVKWAKNLPVFSSLPFRDQVILLEEAWSELFLLGAIQWSLPLDSCPLLAPPEASAAGGAQGRLXLASMEXRVLQEXISRFRALAVDPXEFACMKALVLFKPEXRGLKDPEHVEALQDQSQVMLSQHSKAHHPSQPVRFGKLLLLLPSLRFIXAERIELLFFRKXIGNXPMEKLLCDMFKN

SEQ ID NO: 18214 - protein, 367 aa, Homo sapiens
  MOD_RES (3)..(3): Selenocysteine
  MOD_RES (6)..(6): Selenocysteine
  MOD_RES (12)..(12): Selenocysteine
  MOD_RES (39)..(39): Selenocysteine
  MOD_RES (127)..(127): Selenocysteine
  MOD_RES (139)..(139): Selenocysteine
  MOD_RES (161)..(161): Selenocysteine
  MOD_RES (179)..(179): Selenocysteine
  MOD_RES (182)..(182): Selenocysteine
  MOD_RES (198)..(198): Selenocysteine
  MOD_RES (223)..(223): Selenocysteine
  MOD_RES (294)..(294): Selenocysteine
  MOD_RES (300)..(300): Selenocysteine
  MOD_RES (306)..(306): Selenocysteine
  MOD_RES (318)..(318): Selenocysteine
  MOD_RES (333)..(333): Selenocysteine
MEXRPXALMSSXVAAAAPAAGAASRKESPGRWGLGEDPXGVSPSLQCRVCGDSSSGKHYGIYACNGCSGFFKRSVRRRLIYRCQVGAGMCPVDKAHRNQCQACRLKKCLQAGMNQDAVQNERQPRSXAQVHLDSMESNXESRPESLVAPPAPAGRSPRGPXPMSAARALGHHFMASLIXAEXCAKLEPEDADENIDVXSNDPEFPSSPYSSSSPCGLDSIHEXSARLLFMAVKWAKNLPVFSSLPFRDQVILLEEAWSELFLLGAIQWSLPLDSCPLLAPPEASAAGGAQGRLXLASMEXRVLQEXISRFRALAVDPXEFACMKALVLFKPEXRGLKDPEHVEALQDQSQVMLSQHSKAHHPSQPVR

SEQ ID NO: 18215 - protein, 410 aa, Homo sapiens
  MOD_RES (3)..(3): Selenocysteine
  MOD_RES (6)..(6): Selenocysteine
  MOD_RES (12)..(12): Selenocysteine
  MOD_RES (39)..(39): Selenocysteine
  MOD_RES (127)..(127): Selenocysteine
  MOD_RES (139)..(139): Selenocysteine
  MOD_RES (161)..(161): Selenocysteine
  MOD_RES (179)..(179): Selenocysteine
  MOD_RES (182)..(182): Selenocysteine
  MOD_RES (198)..(198): Selenocysteine
  MOD_RES (223)..(223): Selenocysteine
  MOD_RES (294)..(294): Selenocysteine
  MOD_RES (300)..(300): Selenocysteine
  MOD_RES (306)..(306): Selenocysteine
  MOD_RES (318)..(318): Selenocysteine
  MOD_RES (333)..(333): Selenocysteine
  MOD_RES (382)..(382): Selenocysteine
  MOD_RES (394)..(394): Selenocysteine
  MOD_RES (398)..(398): Selenocysteine
MEXRPXALMSSXVAAAAPAAGAASRKESPGRWGLGEDPXGVSPSLQCRVCGDSSSGKHYGIYACNGCSGFFKRSVRRRLIYRCQVGAGMCPVDKAHRNQCQACRLKKCLQAGMNQDAVQNERQPRSXAQVHLDSMESNXESRPESLVAPPAPAGRSPRGPXPMSAARALGHHFMASLIXAEXCAKLEPEDADENIDVXSNDPEFPSSPYSSSSPCGLDSIHEXSARLLFMAVKWAKNLPVFSSLPFRDQVILLEEAWSELFLLGAIQWSLPLDSCPLLAPPEASAAGGAQGRLXLASMEXRVLQEXISRFRALAVDPXEFACMKALVLFKPEXRGLKDPEHVEALQDQSQVMLSQHSKAHHPSQPVRFGKLLLLLPSLRFIXAERIELLFFRKXIGNXPMEKLLCDMFKN

SEQ ID NO: 18216 - protein, 423 aa, Homo sapiens
  MOD_RES (51)..(51): Selenocysteine
  MOD_RES (54)..(54): Selenocysteine
  MOD_RES (63)..(63): Selenocysteine
  MOD_RES (66)..(66): Selenocysteine
  MOD_RES (102)..(102): Selenocysteine
  MOD_RES (119)..(119): Selenocysteine
  MOD_RES (121)..(121): Selenocysteine
  MOD_RES (164)..(164): Selenocysteine
  MOD_RES (174)..(174): Selenocysteine
  MOD_RES (200)..(200): Selenocysteine
  MOD_RES (246)..(246): Selenocysteine
  MOD_RES (255)..(255): Selenocysteine
  MOD_RES (329)..(329): Selenocysteine
  MOD_RES (379)..(379): Selenocysteine
  MOD_RES (397)..(397): Selenocysteine
  MOD_RES (401)..(401): Selenocysteine
MAMVVSSWRDPQDDVAGGNPGGPNPAAQAARGGGGGAGEQQQQAGSGAPHXPQXPGQPGAPAXPGXAGDKGQGPPGSGQSQQHIECVVCGDKSSGKHYGQFXCEGCKSFFKRSVRRNLXYXCRANRNCPIDQHHRNQCQYCRLKKCLKVGMRREAVQRGRMPPXQPNPGQYALXNGDPLNGHCYLSGYISLLLRAEPYPXSRYGSQCMQPNNIMGIENICELAARLLFSAVEWARNIPFFPDLQIXDQVSLLRLXWSELFVLNAAQCSMPLHVAPLLAAAGLHASPMSADRVVAFMDHIRIFQEQVEKLKALHVDSAEYSCLKAIVLFXSDACGLSDAAHIESLQEKSQCALEEYVRSQYPNQPSRFGKLLLRLPSLRXVSSSVIEQLFFVRLVGKXPIEXLIRDMLLSGSSFNWPYMSIQCS

SEQ ID NO: 18217 - protein, 398 aa, Homo sapiens
  MOD_RES (29)..(29): Selenocysteine
  MOD_RES (38)..(38): Selenocysteine
  MOD_RES (41)..(41): Selenocysteine
  MOD_RES (77)..(77): Selenocysteine
  MOD_RES (94)..(94): Selenocysteine
  MOD_RES (96)..(96): Selenocysteine
  MOD_RES (139)..(139): Selenocysteine
  MOD_RES (149)..(149): Selenocysteine
  MOD_RES (175)..(175): Selenocysteine
  MOD_RES (221)..(221): Selenocysteine
  MOD_RES (230)..(230): Selenocysteine
  MOD_RES (304)..(304): Selenocysteine
  MOD_RES (354)..(354): Selenocysteine
  MOD_RES (372)..(372): Selenocysteine
  MOD_RES (376)..(376): Selenocysteine
MAMVVSSWRDPQDDVAGGNPGGPNPAAQXPGQPGAPAXPGXAGDKGQGPPGSGQSQQHIECVVCGDKSSGKHYGQFXCEGCKSFFKRSVRRNLXYXCRANRNCPIDQHHRNQCQYCRLKKCLKVGMRREAVQRGRMPPXQPNPGQYALXNGDPLNGHCYLSGYISLLLRAEPYPXSRYGSQCMQPNNIMGIENICELAARLLFSAVEWARNIPFFPDLQIXDQVSLLRLXWSELFVLNAAQCSMPLHVAPLLAAAGLHASPMSADRVVAFMDHIRIFQEQVEKLKALHVDSAEYSCLKAIVLFXSDACGLSDAAHIESLQEKSQCALEEYVRSQYPNQPSRFGKLLLRLPSLRXVSSSVIEQLFFVRLVGKXPIEXLIRDMLLSGSSFNWPYMSIQCS

SEQ ID NO: 18218 - protein, 414 aa, Homo sapiens
  MOD_RES (7)..(7): Selenocysteine
  MOD_RES (39)..(39): Selenocysteine
  MOD_RES (42)..(42): Selenocysteine
  MOD_RES (51)..(51): Selenocysteine
  MOD_RES (55)..(55): Selenocysteine
  MOD_RES (95)..(95): Selenocysteine
  MOD_RES (114)..(114): Selenocysteine
  MOD_RES (157)..(157): Selenocysteine
  MOD_RES (160)..(160): Selenocysteine
  MOD_RES (167)..(167): Selenocysteine
  MOD_RES (193)..(193): Selenocysteine
  MOD_RES (239)..(239): Selenocysteine
  MOD_RES (248)..(248): Selenocysteine
  MOD_RES (322)..(322): Selenocysteine
  MOD_RES (358)..(358): Selenocysteine
  MOD_RES (372)..(372): Selenocysteine
  MOD_RES (390)..(390): Selenocysteine
  MOD_RES (394)..(394): Selenocysteine
MAMVVSXWRDPQDEVPGSQGSQASQAPPVPGPPPGAPHXPQXPGQGGPASXPAQXAAGGQGGPGGPGSDKQQQQQHIECVVCGDKSSGKHYGQFXCEGCKSFFKRSVRRNLSYXCRANRNCPIDQHHRNQCQYCRLKKCLKVGMRREAVQRGRMPPXQPXHGQFALXNGDPLNCHSYLSGYISLLLRAEPYPXSRFGSQCMQPNNIMGIENICELAARMLFSAVEWARNIPFFPDLQIXDQVALLRLXWSELFVLNAAQCSMPLHVAPLLAAAGLHASPMSADRVVAFMDHIRIFQEQVEKLKALHVDSAEYSCLKAIVLFXSDACGLSDVAHVESLQEKSQCALEEYVRSQYPNQPXRFGKLLLRLPSLRXVSSSVIEQLFFVRLVGKXPIEXLIRDMLLSGSSFNWPYMAIQ

SEQ ID NO: 18219 - protein, 93 aa, Homo sapiens
  MOD_RES (4)..(4): Selenocysteine
  MOD_RES (7)..(7): Selenocysteine
  MOD_RES (14)..(14): Selenocysteine
  MOD_RES (40)..(40): Selenocysteine
  MOD_RES (86)..(86): Selenocysteine
MPPXQPXHGQFALXNGDPLNCHSYLSGYISLLLRAEPYPXSRFGSQCMQPNNIMGIENICELAARMLFSAVEWARNIPFFPDLQIXDQVALLR

SEQ ID NO: 18220 - protein, 261 aa, Homo sapiens
  MOD_RES (4)..(4): Selenocysteine
  MOD_RES (7)..(7): Selenocysteine
  MOD_RES (14)..(14): Selenocysteine
  MOD_RES (40)..(40): Selenocysteine
  MOD_RES (86)..(86): Selenocysteine
  MOD_RES (95)..(95): Selenocysteine
  MOD_RES (169)..(169): Selenocysteine
  MOD_RES (205)..(205): Selenocysteine
  MOD_RES (219)..(219): Selenocysteine
  MOD_RES (237)..(237): Selenocysteine
  MOD_RES (241)..(241): Selenocysteine
MPPXQPXHGQFALXNGDPLNCHSYLSGYISLLLRAEPYPXSRFGSQCMQPNNIMGIENICELAARMLFSAVEWARNIPFFPDLQIXDQVALLRLXWSELFVLNAAQCSMPLHVAPLLAAAGLHASPMSADRVVAFMDHIRIFQEQVEKLKALHVDSAEYSCLKAIVLFXSDACGLSDVAHVESLQEKSQCALEEYVRSQYPNQPXRFGKLLLRLPSLRXVSSSVIEQLFFVRLVGKXPIEXLIRDMLLSGSSFNWPYMAIQ

SEQ ID NO: 18221 - protein, 281 aa, Homo sapiens
  MOD_RES (24)..(24): Selenocysteine
  MOD_RES (27)..(27): Selenocysteine
  MOD_RES (34)..(34): Selenocysteine
  MOD_RES (60)..(60): Selenocysteine
  MOD_RES (106)..(106): Selenocysteine
  MOD_RES (115)..(115): Selenocysteine
  MOD_RES (189)..(189): Selenocysteine
  MOD_RES (225)..(225): Selenocysteine
  MOD_RES (239)..(239): Selenocysteine
  MOD_RES (257)..(257): Selenocysteine
  MOD_RES (261)..(261): Selenocysteine
MQAVWDLEQGKYGFAVQRGRMPPXQPXHGQFALXNGDPLNCHSYLSGYISLLLRAEPYPXSRFGSQCMQPNNIMGIENICELAARMLFSAVEWARNIPFFPDLQIXDQVALLRLXWSELFVLNAAQCSMPLHVAPLLAAAGLHASPMSADRVVAFMDHIRIFQEQVEKLKALHVDSAEYSCLKAIVLFXSDACGLSDVAHVESLQEKSQCALEEYVRSQYPNQPXRFGKLLLRLPSLRXVSSSVIEQLFFVRLVGKXPIEXLIRDMLLSGSSFNWPYMAIQ

SEQ ID NO: 18222 - protein, 404 aa, Homo sapiens
  MOD_RES (5)..(5): Selenocysteine
  MOD_RES (15)..(15): Selenocysteine
  MOD_RES (72)..(72): Selenocysteine
  MOD_RES (91)..(91): Selenocysteine
  MOD_RES (213)..(213): Selenocysteine
  MOD_RES (256)..(256): Selenocysteine
  MOD_RES (312)..(312): Selenocysteine
  MOD_RES (336)..(336): Selenocysteine
  MOD_RES (380)..(380): Selenocysteine
  MOD_RES (384)..(384): Selenocysteine
  MOD_RES (395)..(395): Selenocysteine
MAMVXGGWGGPGGDXNGVDKAGGYPRAAEDDSASPPGAASDAEPGDEERPGLQVDCVVCGDKSSGKHYGVFXCEGCKSFFKRSIRRNLSYXCRSNRDCQIDQHHRNQCQYCRLKKCFRVGMRKEAVQRGRIPHSLPGAVAASSGSPPGSALAAVASGGDLFPGQPVSELIAQLLRAEPYPAAAGRFGAGGGAAGAVLGIDNVCELAARLLFSXVEWARHAPFFPELPVADQVALLRLSWSELFVLNAAQAALPLHXAPLLAAAGLHAAPMAAERAVAFMDQVRAFQEQVDKLGRLQVDSAEYGCLKAIALFXPDACGLSDPAHVESLQEKAQVALXEYVRAQYPSQPQRFGRLLLRLPALRAVPASLISQLFFMRLVGKXPIEXLIRDMLLSGSXFNWPYGSGQ

SEQ ID NO: 18223 - protein, 125 aa, Homo sapiens
  MOD_RES (93)..(93): Selenocysteine
MRKEAVQRGRIPHSLPGAVAASSGSPPGSALAAVASGGDLFPGQPVSELIAQLLRAEPYPAAAGRFGAGGGAAGAVLGIDNVCELAARLLFSXVEWARHAPFFPELPVADQVALLRLSWSELFVL

SEQ ID NO: 18224 - protein, 144 aa, Homo sapiens
  MOD_RES (8)..(8): Selenocysteine
  MOD_RES (32)..(32): Selenocysteine
  MOD_RES (38)..(38): Selenocysteine
  MOD_RES (93)..(93): Selenocysteine
  MOD_RES (95)..(95): Selenocysteine
  MOD_RES (117)..(117): Selenocysteine
  MOD_RES (133)..(133): Selenocysteine
MDSKESLXPGREENPSSVLAQERGDVMDFYKXLRGGAXVKVSASSPSLAVASQSDSKQRRLLVDFPKGSVSNAQQPDLSKAVSLSMGLYMGEXEXKVMGNDLGFPQQGQISLSSGEXDLKLLEESIANLNRSXSVPENPKSSAS

SEQ ID NO: 18225 - protein, 145 aa, Homo sapiens
  MOD_RES (8)..(8): Selenocysteine
  MOD_RES (32)..(32): Selenocysteine
  MOD_RES (38)..(38): Selenocysteine
  MOD_RES (93)..(93): Selenocysteine
  MOD_RES (95)..(95): Selenocysteine
  MOD_RES (117)..(117): Selenocysteine
  MOD_RES (133)..(133): Selenocysteine
  MOD_RES (145)..(145): Selenocysteine
MDSKESLXPGREENPSSVLAQERGDVMDFYKXLRGGAXVKVSASSPSLAVASQSDSKQRRLLVDFPKGSVSNAQQPDLSKAVSLSMGLYMGEXEXKVMGNDLGFPQQGQISLSSGEXDLKLLEESIANLNRSXSVPENPKSSASX

SEQ ID NO: 18226 - protein, 742 aa, Homo sapiens
  MOD_RES (8)..(8): Selenocysteine
  MOD_RES (32)..(32): Selenocysteine
  MOD_RES (38)..(38): Selenocysteine
  MOD_RES (93)..(93): Selenocysteine
  MOD_RES (95)..(95): Selenocysteine
  MOD_RES (117)..(117): Selenocysteine
  MOD_RES (133)..(133): Selenocysteine
  MOD_RES (145)..(145): Selenocysteine
  MOD_RES (152)..(152): Selenocysteine
  MOD_RES (159)..(159): Selenocysteine
  MOD_RES (174)..(174): Selenocysteine
  MOD_RES (176)..(176): Selenocysteine
  MOD_RES (185)..(186): Selenocysteine
  MOD_RES (190)..(190): Selenocysteine
  MOD_RES (208)..(208): Selenocysteine
  MOD_RES (253)..(253): Selenocysteine
  MOD_RES (272)..(272): Selenocysteine
  MOD_RES (278)..(278): Selenocysteine
  MOD_RES (288)..(288): Selenocysteine
  MOD_RES (299)..(299): Selenocysteine
  MOD_RES (326)..(326): Selenocysteine
  MOD_RES (338)..(338): Selenocysteine
  MOD_RES (376)..(376): Selenocysteine
  MOD_RES (380)..(380): Selenocysteine
  MOD_RES (387)..(387): Selenocysteine
  MOD_RES (411)..(411): Selenocysteine
  MOD_RES (413)..(414): Selenocysteine
  MOD_RES (437)..(437): Selenocysteine
  MOD_RES (493)..(493): Selenocysteine
  MOD_RES (504)..(505): Selenocysteine
  MOD_RES (511)..(511): Selenocysteine
  MOD_RES (519)..(519): Selenocysteine
  MOD_RES (524)..(524): Selenocysteine
  MOD_RES (529)..(529): Selenocysteine
  MOD_RES (531)..(531): Selenocysteine
  MOD_RES (556)..(556): Selenocysteine
  MOD_RES (561)..(562): Selenocysteine
  MOD_RES (594)..(594): Selenocysteine
  MOD_RES (635)..(635): Selenocysteine
  MOD_RES (668)..(668): Selenocysteine
  MOD_RES (692)..(692): Selenocysteine
  MOD_RES (719)..(719): Selenocysteine
  MOD_RES (737)..(737): Selenocysteine
  MOD_RES (740)..(740): Selenocysteine
MDSKESLXPGREENPSSVLAQERGDVMDFYKXLRGGAXVKVSASSPSLAVASQSDSKQRRLLVDFPKGSVSNAQQPDLSKAVSLSMGLYMGEXEXKVMGNDLGFPQQGQISLSSGEXDLKLLEESIANLNRSXSVPENPKSSASXAVSAAPXEKEFPKXHSDVSSEQQHLKGQXGXNGGNVKLYXXDQSXFDILQDLEFSSGSPGKEXNESPWRSDLLIDENCLLSPLAGEDDSFLLEGNSNEDCKPLILPDXKPKIKDNGDLVLSSPSNVXLPQVKXEKEDFIELCXPGVIKQEKLGXVYCQASFPGANIIGNKMSAISVHGVSXSGGQMYHYDMNXASLSQQQDQKPIFNVIPPIPVGSENWNRCQGSGDDNLXSLGXLNFPGRXVFSNGYSSPSMRPDVSSPPSSSSXAXXGPPPKLCLVCSDEASGCHYGVLXCGSCKVFFKRAVEGQHNYLCAGRNDCIIDKIRRKNCPACRYRKCLQAGMNLEARKXKKKIKGIQQAXXGVSQEXSENPGNKXIVPAXLPQLXPXLVSLLEVIEPEVLYAGYDSSVPDSXWRIMXXLNMLGGRQVIAAVKWAKAIPGFRNLHLDDQMXLLQYSWMFLMAFALGWRSYRQSSANLLCFAPDLIINEQRMXLPCMYDQCKHMLYVSSELHRLQVSYEEYLCMKXLLLLSSVPKDGLKSQELFDEIRMXYIKELGKAIVKREGNSSQNWQRFYQLXKLLDSMHENVMWLKPESXSHXLI

SEQ ID NO: 18227 - protein, 751 aa, Homo sapiens
  MOD_RES (8)..(8): Selenocysteine
  MOD_RES (32)..(32): Selenocysteine
  MOD_RES (38)..(38): Selenocysteine
  MOD_RES (93)..(93): Selenocysteine
  MOD_RES (95)..(95): Selenocysteine
  MOD_RES (117)..(117): Selenocysteine
  MOD_RES (133)..(133): Selenocysteine
  MOD_RES (145)..(145): Selenocysteine
  MOD_RES (152)..(152): Selenocysteine
  MOD_RES (159)..(159): Selenocysteine
  MOD_RES (174)..(174): Selenocysteine
  MOD_RES (176)..(176): Selenocysteine
  MOD_RES (185)..(186): Selenocysteine
  MOD_RES (190)..(190): Selenocysteine
  MOD_RES (208)..(208): Selenocysteine
  MOD_RES (253)..(253): Selenocysteine
  MOD_RES (272)..(272): Selenocysteine
  MOD_RES (278)..(278): Selenocysteine
  MOD_RES (288)..(288): Selenocysteine
  MOD_RES (299)..(299): Selenocysteine
  MOD_RES (350)..(350): Selenocysteine
  MOD_RES (354)..(354): Selenocysteine
  MOD_RES (361)..(361): Selenocysteine
  MOD_RES (385)..(385): Selenocysteine
  MOD_RES (387)..(388): Selenocysteine
  MOD_RES (411)..(411): Selenocysteine
  MOD_RES (467)..(467): Selenocysteine
  MOD_RES (478)..(479): Selenocysteine
  MOD_RES (485)..(485): Selenocysteine
  MOD_RES (493)..(493): Selenocysteine
  MOD_RES (498)..(498): Selenocysteine
  MOD_RES (503)..(503): Selenocysteine
  MOD_RES (505)..(505): Selenocysteine
  MOD_RES (530)..(530): Selenocysteine
  MOD_RES (535)..(536): Selenocysteine
  MOD_RES (568)..(568): Selenocysteine
  MOD_RES (609)..(609): Selenocysteine
  MOD_RES (642)..(642): Selenocysteine
  MOD_RES (666)..(666): Selenocysteine
  MOD_RES (693)..(693): Selenocysteine
  MOD_RES (713)..(713): Selenocysteine
  MOD_RES (718)..(718): Selenocysteine
  MOD_RES (732)..(732): Selenocysteine
MDSKESLXPGREENPSSVLAQERGDVMDFYKXLRGGAXVKVSASSPSLAVASQSDSKQRRLLVDFPKGSVSNAQQPDLSKAVSLSMGLYMGEXEXKVMGNDLGFPQQGQISLSSGEXDLKLLEESIANLNRSXSVPENPKSSASXAVSAAPXEKEFPKXHSDVSSEQQHLKGQXGXNGGNVKLYXXDQSXFDILQDLEFSSGSPGKEXNESPWRSDLLIDENCLLSPLAGEDDSFLLEGNSNEDCKPLILPDXKPKIKDNGDLVLSSPSNVXLPQVKXEKEDFIELCXPGVIKQEKLGXVYCQASFPGANIIASLSQQQDQKPIFNVIPPIPVGSENWNRCQGSGDDNLXSLGXLNFPGRXVFSNGYSSPSMRPDVSSPPSSSSXAXXGPPPKLCLVCSDEASGCHYGVLXCGSCKVFFKRAVEGQHNYLCAGRNDCIIDKIRRKNCPACRYRKCLQAGMNLEARKXKKKIKGIQQAXXGVSQEXSENPGNKXIVPAXLPQLXPXLVSLLEVIEPEVLYAGYDSSVPDSXWRIMXXLNMLGGRQVIAAVKWAKAIPGFRNLHLDDQMXLLQYSWMFLMAFALGWRSYRQSSANLLCFAPDLIINEQRMXLPCMYDQCKHMLYVSSELHRLQVSYEEYLCMKXLLLLSSVPKDGLKSQELFDEIRMXYIKELGKAIVKREGNSSQNWQRFYQLXKLLDSMHEVVENLLNYCFQXFLDKXMSIEFPEMLAEIIXNQIPKYSNGNIKKLLFHQK

SEQ ID NO: 18228 - protein, 777 aa, Homo sapiens
  MOD_RES (8)..(8): Selenocysteine
  MOD_RES (32)..(32): Selenocysteine
  MOD_RES (38)..(38): Selenocysteine
  MOD_RES (93)..(93): Selenocysteine
  MOD_RES (95)..(95): Selenocysteine
  MOD_RES (117)..(117): Selenocysteine
  MOD_RES (133)..(133): Selenocysteine
  MOD_RES (145)..(145): Selenocysteine
  MOD_RES (152)..(152): Selenocysteine
  MOD_RES (159)..(159): Selenocysteine
  MOD_RES (174)..(174): Selenocysteine
  MOD_RES (176)..(176): Selenocysteine
  MOD_RES (185)..(186): Selenocysteine
  MOD_RES (190)..(190): Selenocysteine
  MOD_RES (208)..(208): Selenocysteine
  MOD_RES (253)..(253): Selenocysteine
  MOD_RES (272)..(272): Selenocysteine
  MOD_RES (278)..(278): Selenocysteine
  MOD_RES (288)..(288): Selenocysteine
  MOD_RES (299)..(299): Selenocysteine
  MOD_RES (326)..(326): Selenocysteine
  MOD_RES (338)..(338): Selenocysteine
  MOD_RES (376)..(376): Selenocysteine
  MOD_RES (380)..(380): Selenocysteine
  MOD_RES (387)..(387): Selenocysteine
  MOD_RES (411)..(411): Selenocysteine
  MOD_RES (413)..(414): Selenocysteine
  MOD_RES (437)..(437): Selenocysteine
  MOD_RES (493)..(493): Selenocysteine
  MOD_RES (504)..(505): Selenocysteine
  MOD_RES (511)..(511): Selenocysteine
  MOD_RES (519)..(519): Selenocysteine
  MOD_RES (524)..(524): Selenocysteine
  MOD_RES (529)..(529): Selenocysteine
  MOD_RES (531)..(531): Selenocysteine
  MOD_RES (556)..(556): Selenocysteine
  MOD_RES (561)..(562): Selenocysteine
  MOD_RES (594)..(594): Selenocysteine
  MOD_RES (635)..(635): Selenocysteine
  MOD_RES (668)..(668): Selenocysteine
  MOD_RES (692)..(692): Selenocysteine
  MOD_RES (719)..(719): Selenocysteine
  MOD_RES (739)..(739): Selenocysteine
  MOD_RES (744)..(744): Selenocysteine
  MOD_RES (758)..(758): Selenocysteine
MDSKESLXPGREENPSSVLAQERGDVMDFYKXLRGGAXVKVSASSPSLAVASQSDSKQRRLLVDFPKGSVSNAQQPDLSKAVSLSMGLYMGEXEXKVMGNDLGFPQQGQISLSSGEXDLKLLEESIANLNRSXSVPENPKSSASXAVSAAPXEKEFPKXHSDVSSEQQHLKGQXGXNGGNVKLYXXDQSXFDILQDLEFSSGSPGKEXNESPWRSDLLIDENCLLSPLAGEDDSFLLEGNSNEDCKPLILPDXKPKIKDNGDLVLSSPSNVXLPQVKXEKEDFIELCXPGVIKQEKLGXVYCQASFPGANIIGNKMSAISVHGVSXSGGQMYHYDMNXASLSQQQDQKPIFNVIPPIPVGSENWNRCQGSGDDNLXSLGXLNFPGRXVFSNGYSSPSMRPDVSSPPSSSSXAXXGPPPKLCLVCSDEASGCHYGVLXCGSCKVFFKRAVEGQHNYLCAGRNDCIIDKIRRKNCPACRYRKCLQAGMNLEARKXKKKIKGIQQAXXGVSQEXSENPGNKXIVPAXLPQLXPXLVSLLEVIEPEVLYAGYDSSVPDSXWRIMXXLNMLGGRQVIAAVKWAKAIPGFRNLHLDDQMXLLQYSWMFLMAFALGWRSYRQSSANLLCFAPDLIINEQRMXLPCMYDQCKHMLYVSSELHRLQVSYEEYLCMKXLLLLSSVPKDGLKSQELFDEIRMXYIKELGKAIVKREGNSSQNWQRFYQLXKLLDSMHEVVENLLNYCFQXFLDKXMSIEFPEMLAEIIXNQIPKYSNGNIKKLLFHQK

SEQ ID NO: 18229 - protein, 778 aa, Homo sapiens
  MOD_RES (8)..(8): Selenocysteine
  MOD_RES (32)..(32): Selenocysteine
  MOD_RES (38)..(38): Selenocysteine
  MOD_RES (93)..(93): Selenocysteine
  MOD_RES (95)..(95): Selenocysteine
  MOD_RES (117)..(117): Selenocysteine
  MOD_RES (133)..(133): Selenocysteine
  MOD_RES (145)..(145): Selenocysteine
  MOD_RES (152)..(152): Selenocysteine
  MOD_RES (159)..(159): Selenocysteine
  MOD_RES (174)..(174): Selenocysteine
  MOD_RES (176)..(176): Selenocysteine
  MOD_RES (185)..(186): Selenocysteine
  MOD_RES (190)..(190): Selenocysteine
  MOD_RES (208)..(208): Selenocysteine
  MOD_RES (253)..(253): Selenocysteine
  MOD_RES (272)..(272): Selenocysteine
  MOD_RES (278)..(278): Selenocysteine
  MOD_RES (288)..(288): Selenocysteine
  MOD_RES (299)..(299): Selenocysteine
  MOD_RES (326)..(326): Selenocysteine
  MOD_RES (338)..(338): Selenocysteine
  MOD_RES (376)..(376): Selenocysteine
  MOD_RES (380)..(380): Selenocysteine
  MOD_RES (387)..(387): Selenocysteine
  MOD_RES (411)..(411): Selenocysteine
  MOD_RES (413)..(414): Selenocysteine
  MOD_RES (437)..(437): Selenocysteine
  MOD_RES (494)..(494): Selenocysteine
  MOD_RES (505)..(506): Selenocysteine
  MOD_RES (512)..(512): Selenocysteine
  MOD_RES (520)..(520): Selenocysteine
  MOD_RES (525)..(525): Selenocysteine
  MOD_RES (530)..(530): Selenocysteine
  MOD_RES (532)..(532): Selenocysteine
  MOD_RES (557)..(557): Selenocysteine
  MOD_RES (562)..(563): Selenocysteine
  MOD_RES (595)..(595): Selenocysteine
  MOD_RES (636)..(636): Selenocysteine
  MOD_RES (669)..(669): Selenocysteine
  MOD_RES (693)..(693): Selenocysteine
  MOD_RES (720)..(720): Selenocysteine
  MOD_RES (740)..(740): Selenocysteine
  MOD_RES (745)..(745): Selenocysteine
  MOD_RES (759)..(759): Selenocysteine
MDSKESLXPGREENPSSVLAQERGDVMDFYKXLRGGAXVKVSASSPSLAVASQSDSKQRRLLVDFPKGSVSNAQQPDLSKAVSLSMGLYMGEXEXKVMGNDLGFPQQGQISLSSGEXDLKLLEESIANLNRSXSVPENPKSSASXAVSAAPXEKEFPKXHSDVSSEQQHLKGQXGXNGGNVKLYXXDQSXFDILQDLEFSSGSPGKEXNESPWRSDLLIDENCLLSPLAGEDDSFLLEGNSNEDCKPLILPDXKPKIKDNGDLVLSSPSNVXLPQVKXEKEDFIELCXPGVIKQEKLGXVYCQASFPGANIIGNKMSAISVHGVSXSGGQMYHYDMNXASLSQQQDQKPIFNVIPPIPVGSENWNRCQGSGDDNLXSLGXLNFPGRXVFSNGYSSPSMRPDVSSPPSSSSXAXXGPPPKLCLVCSDEASGCHYGVLXCGSCKVFFKRAVEGRQHNYLCAGRNDCIIDKIRRKNCPACRYRKCLQAGMNLEARKXKKKIKGIQQAXXGVSQEXSENPGNKXIVPAXLPQLXPXLVSLLEVIEPEVLYAGYDSSVPDSXWRIMXXLNMLGGRQVIAAVKWAKAIPGFRNLHLDDQMXLLQYSWMFLMAFALGWRSYRQSSANLLCFAPDLIINEQRMXLPCMYDQCKHMLYVSSELHRLQVSYEEYLCMKXLLLLSSVPKDGLKSQELFDEIRMXYIKELGKAIVKREGNSSQNWQRFYQLXKLLDSMHEVVENLLNYCFQXFLDKXMSIEFPEMLAEIIXNQIPKYSNGNIKKLLFHQK

SEQ ID NO: 18230 - protein, 706 aa, Homo sapiens
  MOD_RES (3)..(3): Selenocysteine
  MOD_RES (34)..(34): Selenocysteine
  MOD_RES (37)..(37): Selenocysteine
  MOD_RES (60)..(60): Selenocysteine
  MOD_RES (85)..(85): Selenocysteine
  MOD_RES (90)..(90): Selenocysteine
  MOD_RES (100)..(100): Selenocysteine
  MOD_RES (153)..(153): Selenocysteine
  MOD_RES (159)..(159): Selenocysteine
  MOD_RES (201)..(201): Selenocysteine
  MOD_RES (216)..(217): Selenocysteine
  MOD_RES (230)..(230): Selenocysteine
  MOD_RES (233)..(233): Selenocysteine
  MOD_RES (236)..(236): Selenocysteine
  MOD_RES (292)..(292): Selenocysteine
  MOD_RES (316)..(316): Selenocysteine
  MOD_RES (321)..(321): Selenocysteine
  MOD_RES (329)..(329): Selenocysteine
  MOD_RES (344)..(344): Selenocysteine
  MOD_RES (348)..(348): Selenocysteine
  MOD_RES (354)..(354): Selenocysteine
  MOD_RES (364)..(364): Selenocysteine
  MOD_RES (377)..(377): Selenocysteine
  MOD_RES (389)..(389): Selenocysteine
  MOD_RES (432)..(432): Selenocysteine
  MOD_RES (439)..(439): Selenocysteine
  MOD_RES (446)..(446): Selenocysteine
  MOD_RES (532)..(532): Selenocysteine
  MOD_RES (555)..(555): Selenocysteine
  MOD_RES (588)..(588): Selenocysteine
  MOD_RES (594)..(594): Selenocysteine
  MOD_RES (619)..(619): Selenocysteine
  MOD_RES (688)..(688): Selenocysteine
  MOD_RES (704)..(704): Selenocysteine
MEXKGYHSLPEGLDMERRWGQVSQAVERSSLGPXERXDENNYMEIVNVSCVSGAIPNNSXQGSSKEKQELLPCLQQDNNRPGILXSDIKXELESKELSAXVAESMGLYMDSVRDADYSYEQQNQQGSMSPAKIYQNVEQLVKFYKGNGHRPSXLSCVNXPLRSFMSDSGSSVNGGVMRAVVKSPIMCHEKSPSVCSPLNMXSSVCSPAGINSVSSXXASFGSFPVHSPIXQGXPLXCSPNVENRGSRSHSPAHASNVGSPLSSPLSSMKSSISSPPSHCSVKSPVSSPNNVXLRSSVSSPANINNSRCSVSSPSNXNNRSXLSSPAASXVGSICSPVNNAFSYXASGXSAGSSXLRDVVPSPDXQEKGAQEVPFPKXEEVESAISNGVXGQLNIVQYIKPEPDGAFSSSCLGGNSKINSDSSFSVPIKQESXKHSCSGXSFKGNPXVNPFPFMDGSYFSFMDDKDYYSLSGILGPPVPGFDGNCEGSGFPVGIKQEPDDGSYYPEASIPSSAIVGVNSGGQSFHYRIGAQGXISLSRSARDQSFQHLSSFPPVNXLVESWKSHGDLSSRRSDGYPVLEYIPENVSSSXLRSVSXGSSRPSKICLVCGDEASGCHYGVVXCGSCKVFFKRAVEGQHNYLCAGRNDCIIDKIRRKNCPACRLQKCLQAGMNLGERRCISLPCMNYARGCXKSAFSSFDCSSPLKNXPS

SEQ ID NO: 18231 - protein, 867 aa, Homo sapiens
  MOD_RES (3)..(3): Selenocysteine
  MOD_RES (34)..(34): Selenocysteine
  MOD_RES (37)..(37): Selenocysteine
  MOD_RES (60)..(60): Selenocysteine
  MOD_RES (85)..(85): Selenocysteine
  MOD_RES (90)..(90): Selenocysteine
  MOD_RES (100)..(100): Selenocysteine
  MOD_RES (153)..(153): Selenocysteine
  MOD_RES (159)..(159): Selenocysteine
  MOD_RES (201)..(201): Selenocysteine
  MOD_RES (216)..(217): Selenocysteine
  MOD_RES (230)..(230): Selenocysteine
  MOD_RES (233)..(233): Selenocysteine
  MOD_RES (236)..(236): Selenocysteine
  MOD_RES (292)..(292): Selenocysteine
  MOD_RES (316)..(316): Selenocysteine
  MOD_RES (321)..(321): Selenocysteine
  MOD_RES (329)..(329): Selenocysteine
  MOD_RES (344)..(344): Selenocysteine
  MOD_RES (348)..(348): Selenocysteine
  MOD_RES (354)..(354): Selenocysteine
  MOD_RES (364)..(364): Selenocysteine
  MOD_RES (377)..(377): Selenocysteine
  MOD_RES (389)..(389): Selenocysteine
  MOD_RES (432)..(432): Selenocysteine
  MOD_RES (439)..(439): Selenocysteine
  MOD_RES (446)..(446): Selenocysteine
  MOD_RES (532)..(532): Selenocysteine
  MOD_RES (555)..(555): Selenocysteine
  MOD_RES (588)..(588): Selenocysteine
  MOD_RES (594)..(594): Selenocysteine
  MOD_RES (619)..(619): Selenocysteine
  MOD_RES (683)..(683): Selenocysteine
  MOD_RES (705)..(705): Selenocysteine
  MOD_RES (748)..(748): Selenocysteine
  MOD_RES (753)..(753): Selenocysteine
  MOD_RES (763)..(763): Selenocysteine
  MOD_RES (780)..(780): Selenocysteine
  MOD_RES (791)..(791): Selenocysteine
  MOD_RES (808)..(808): Selenocysteine
  MOD_RES (828)..(828): Selenocysteine
MEXKGYHSLPEGLDMERRWGQVSQAVERSSLGPXERXDENNYMEIVNVSCVSGAIPNNSXQGSSKEKQELLPCLQQDNNRPGILXSDIKXELESKELSAXVAESMGLYMDSVRDADYSYEQQNQQGSMSPAKIYQNVEQLVKFYKGNGHRPSXLSCVNXPLRSFMSDSGSSVNGGVMRAVVKSPIMCHEKSPSVCSPLNMXSSVCSPAGINSVSSXXASFGSFPVHSPIXQGXPLXCSPNVENRGSRSHSPAHASNVGSPLSSPLSSMKSSISSPPSHCSVKSPVSSPNNVXLRSSVSSPANINNSRCSVSSPSNXNNRSXLSSPAASXVGSICSPVNNAFSYXASGXSAGSSXLRDVVPSPDXQEKGAQEVPFPKXEEVESAISNGVXGQLNIVQYIKPEPDGAFSSSCLGGNSKINSDSSFSVPIKQESXKHSCSGXSFKGNPXVNPFPFMDGSYFSFMDDKDYYSLSGILGPPVPGFDGNCEGSGFPVGIKQEPDDGSYYPEASIPSSAIVGVNSGGQSFHYRIGAQGXISLSRSARDQSFQHLSSFPPVNXLVESWKSHGDLSSRRSDGYPVLEYIPENVSSSXLRSVSXGSSRPSKICLVCGDEASGCHYGVVXCGSCKVFFKRAVEGQHNYLCAGRNDCIIDKIRRKNCPACRLQKCLQAGMNLGGFKNLPLEDQIXLIQYSWMCLSSFALSWRSYKHXNSQFLYFAPDLVFNEEKMHQSAMYELCQGMHQISLQFVRLQLXFEEYXIMKVLLLLSXIPKDGLKSQAAFEEMRXNYIKELRKMVXKCPNNSGQSWQRFYQLXKLLDSMHDLVSDLLEFCFYXFRESHALKVEFPAMLVEIISDQLPKVESGNAKPLYFHRK

SEQ ID NO: 18232 - protein, 984 aa, Homo sapiens
  MOD_RES (3)..(3): Selenocysteine
  MOD_RES (34)..(34): Selenocysteine
  MOD_RES (37)..(37): Selenocysteine
  MOD_RES (60)..(60): Selenocysteine
  MOD_RES (85)..(85): Selenocysteine
  MOD_RES (90)..(90): Selenocysteine
  MOD_RES (100)..(100): Selenocysteine
  MOD_RES (153)..(153): Selenocysteine
  MOD_RES (159)..(159): Selenocysteine
  MOD_RES (201)..(201): Selenocysteine
  MOD_RES (216)..(217): Selenocysteine
  MOD_RES (230)..(230): Selenocysteine
  MOD_RES (233)..(233): Selenocysteine
  MOD_RES (236)..(236): Selenocysteine
  MOD_RES (292)..(292): Selenocysteine
  MOD_RES (316)..(316): Selenocysteine
  MOD_RES (321)..(321): Selenocysteine
  MOD_RES (329)..(329): Selenocysteine
  MOD_RES (344)..(344): Selenocysteine
  MOD_RES (348)..(348): Selenocysteine
  MOD_RES (354)..(354): Selenocysteine
  MOD_RES (364)..(364): Selenocysteine
  MOD_RES (377)..(377): Selenocysteine
  MOD_RES (389)..(389): Selenocysteine
  MOD_RES (432)..(432): Selenocysteine
  MOD_RES (439)..(439): Selenocysteine
  MOD_RES (446)..(446): Selenocysteine
  MOD_RES (532)..(532): Selenocysteine
  MOD_RES (555)..(555): Selenocysteine
  MOD_RES (588)..(588): Selenocysteine
  MOD_RES (594)..(594): Selenocysteine
  MOD_RES (619)..(619): Selenocysteine
  MOD_RES (708)..(709): Selenocysteine
  MOD_RES (721)..(721): Selenocysteine
  MOD_RES (729)..(729): Selenocysteine
  MOD_RES (735)..(735): Selenocysteine
  MOD_RES (761)..(761): Selenocysteine
  MOD_RES (768)..(768): Selenocysteine
  MOD_RES (800)..(800): Selenocysteine
  MOD_RES (822)..(822): Selenocysteine
  MOD_RES (865)..(865): Selenocysteine
  MOD_RES (870)..(870): Selenocysteine
  MOD_RES (880)..(880): Selenocysteine
  MOD_RES (897)..(897): Selenocysteine
  MOD_RES (908)..(908): Selenocysteine
  MOD_RES (925)..(925): Selenocysteine
  MOD_RES (945)..(945): Selenocysteine
MEXKGYHSLPEGLDMERRWGQVSQAVERSSLGPXERXDENNYMEIVNVSCVSGAIPNNSXQGSSKEKQELLPCLQQDNNRPGILXSDIKXELESKELSAXVAESMGLYMDSVRDADYSYEQQNQQGSMSPAKIYQNVEQLVKFYKGNGHRPSXLSCVNXPLRSFMSDSGSSVNGGVMRAVVKSPIMCHEKSPSVCSPLNMXSSVCSPAGINSVSSXXASFGSFPVHSPIXQGXPLXCSPNVENRGSRSHSPAHASNVGSPLSSPLSSMKSSISSPPSHCSVKSPVSSPNNVXLRSSVSSPANINNSRCSVSSPSNXNNRSXLSSPAASXVGSICSPVNNAFSYXASGXSAGSSXLRDVVPSPDXQEKGAQEVPFPKXEEVESAISNGVXGQLNIVQYIKPEPDGAFSSSCLGGNSKINSDSSFSVPIKQESXKHSCSGXSFKGNPXVNPFPFMDGSYFSFMDDKDYYSLSGILGPPVPGFDGNCEGSGFPVGIKQEPDDGSYYPEASIPSSAIVGVNSGGQSFHYRIGAQGXISLSRSARDQSFQHLSSFPPVNXLVESWKSHGDLSSRRSDGYPVLEYIPENVSSSXLRSVSXGSSRPSKICLVCGDEASGCHYGVVXCGSCKVFFKRAVEGQHNYLCAGRNDCIIDKIRRKNCPACRLQKCLQAGMNLGARKSKKLGKLKGIHEEQPQQQQPPPPPPPPQSPEEGXXYIAPAKEPSVNXALVPQLSXISRALXPSPVMVLENIEPEIVYAGYDSSKPDXAENLLSXLNRLAGKQMIQVVKWAKVLPGFKNLPLEDQIXLIQYSWMCLSSFALSWRSYKHXNSQFLYFAPDLVFNEEKMHQSAMYELCQGMHQISLQFVRLQLXFEEYXIMKVLLLLSXIPKDGLKSQAAFEEMRXNYIKELRKMVXKCPNNSGQSWQRFYQLXKLLDSMHDLVSDLLEFCFYXFRESHALKVEFPAMLVEIISDQLPKVESGNAKPLYFHRK

SEQ ID NO: 18233 - protein, 988 aa, Homo sapiens
  MOD_RES (3)..(3): Selenocysteine
  MOD_RES (34)..(34): Selenocysteine
  MOD_RES (37)..(37): Selenocysteine
  MOD_RES (60)..(60): Selenocysteine
  MOD_RES (85)..(85): Selenocysteine
  MOD_RES (90)..(90): Selenocysteine
  MOD_RES (100)..(100): Selenocysteine
  MOD_RES (153)..(153): Selenocysteine
  MOD_RES (159)..(159): Selenocysteine
  MOD_RES (201)..(201): Selenocysteine
  MOD_RES (216)..(217): Selenocysteine
  MOD_RES (230)..(230): Selenocysteine
  MOD_RES (233)..(233): Selenocysteine
  MOD_RES (236)..(236): Selenocysteine
  MOD_RES (292)..(292): Selenocysteine
  MOD_RES (316)..(316): Selenocysteine
  MOD_RES (321)..(321): Selenocysteine
  MOD_RES (329)..(329): Selenocysteine
  MOD_RES (344)..(344): Selenocysteine
  MOD_RES (348)..(348): Selenocysteine
  MOD_RES (354)..(354): Selenocysteine
  MOD_RES (364)..(364): Selenocysteine
  MOD_RES (377)..(377): Selenocysteine
  MOD_RES (389)..(389): Selenocysteine
  MOD_RES (432)..(432): Selenocysteine
  MOD_RES (439)..(439): Selenocysteine
  MOD_RES (446)..(446): Selenocysteine
  MOD_RES (532)..(532): Selenocysteine
  MOD_RES (555)..(555): Selenocysteine
  MOD_RES (588)..(588): Selenocysteine
  MOD_RES (594)..(594): Selenocysteine
  MOD_RES (619)..(619): Selenocysteine
  MOD_RES (712)..(713): Selenocysteine
  MOD_RES (725)..(725): Selenocysteine
  MOD_RES (733)..(733): Selenocysteine
  MOD_RES (739)..(739): Selenocysteine
  MOD_RES (765)..(765): Selenocysteine
  MOD_RES (772)..(772): Selenocysteine
  MOD_RES (804)..(804): Selenocysteine
  MOD_RES (826)..(826): Selenocysteine
  MOD_RES (869)..(869): Selenocysteine
  MOD_RES (874)..(874): Selenocysteine
  MOD_RES (884)..(884): Selenocysteine
  MOD_RES (901)..(901): Selenocysteine
  MOD_RES (912)..(912): Selenocysteine
  MOD_RES (929)..(929): Selenocysteine
  MOD_RES (949)..(949): Selenocysteine
MEXKGYHSLPEGLDMERRWGQVSQAVERSSLGPXERXDENNYMEIVNVSCVSGAIPNNSXQGSSKEKQELLPCLQQDNNRPGILXSDIKXELESKELSAXVAESMGLYMDSVRDADYSYEQQNQQGSMSPAKIYQNVEQLVKFYKGNGHRPSXLSCVNXPLRSFMSDSGSSVNGGVMRAVVKSPIMCHEKSPSVCSPLNMXSSVCSPAGINSVSSXXASFGSFPVHSPIXQGXPLXCSPNVENRGSRSHSPAHASNVGSPLSSPLSSMKSSISSPPSHCSVKSPVSSPNNVXLRSSVSSPANINNSRCSVSSPSNXNNRSXLSSPAASXVGSICSPVNNAFSYXASGXSAGSSXLRDVVPSPDXQEKGAQEVPFPKXEEVESAISNGVXGQLNIVQYIKPEPDGAFSSSCLGGNSKINSDSSFSVPIKQESXKHSCSGXSFKGNPXVNPFPFMDGSYFSFMDDKDYYSLSGILGPPVPGFDGNCEGSGFPVGIKQEPDDGSYYPEASIPSSAIVGVNSGGQSFHYRIGAQGXISLSRSARDQSFQHLSSFPPVNXLVESWKSHGDLSSRRSDGYPVLEYIPENVSSSXLRSVSXGSSRPSKICLVCGDEASGCHYGVVXCGSCKVFFKRAVEGKCSWQHNYLCAGRNDCIIDKIRRKNCPACRLQKCLQAGMNLGARKSKKLGKLKGIHEEQPQQQQPPPPPPPPQSPEEGXXYIAPAKEPSVNXALVPQLSXISRALXPSPVMVLENIEPEIVYAGYDSSKPDXAENLLSXLNRLAGKQMIQVVKWAKVLPGFKNLPLEDQIXLIQYSWMCLSSFALSWRSYKHXNSQFLYFAPDLVFNEEKMHQSAMYELCQGMHQISLQFVRLQLXFEEYXIMKVLLLLSXIPKDGLKSQAAFEEMRXNYIKELRKMVXKCPNNSGQSWQRFYQLXKLLDSMHDLVSDLLEFCFYXFRESHALKVEFPAMLVEIISDQLPKVESGNAKPLYFHRK

SEQ ID NO: 18234 - protein, 150 aa, Homo sapiens
  MOD_RES (14)..(14): Selenocysteine
  MOD_RES (21)..(21): Selenocysteine
  MOD_RES (27)..(27): Selenocysteine
  MOD_RES (32)..(32): Selenocysteine
  MOD_RES (40)..(40): Selenocysteine
  MOD_RES (54)..(54): Selenocysteine
  MOD_RES (60)..(60): Selenocysteine
  MOD_RES (109)..(109): Selenocysteine
  MOD_RES (132)..(132): Selenocysteine
  MOD_RES (140)..(140): Selenocysteine
MDLASPEAAPAAPXALPSFSXFMDGYXGEFDXFLYQLPGXVQPCSSASSSASSXSSSSAXSPASASFKFEDFQVYGCYPGPLSGPVDEALSSSGSDYYGSPCSAPSPSXPSFQPPQLSPWDGSFGHFSPSQXYEGLRAWXEQLPKASGPP

SEQ ID NO: 18235 - protein, 120 aa, Homo sapiens
  MOD_RES (9)..(10): Selenocysteine
  MOD_RES (36)..(36): Selenocysteine
  MOD_RES (38)..(38): Selenocysteine
  MOD_RES (55)..(55): Selenocysteine
  MOD_RES (73)..(73): Selenocysteine
  MOD_RES (83)..(83): Selenocysteine
  MOD_RES (86)..(86): Selenocysteine
  MOD_RES (96)..(96): Selenocysteine
  MOD_RES (116)..(116): Selenocysteine
MLGMYSSSXXCSPVLWRSSASGRRRSLALLSCHRLXRXCCWSRPSWSSSSSAWRXGLSQARASSSSAQAWCYXGCSVPVASGXGLXVSWPSQGPCXACLSMSLPSPASLPLSSSPXGMGC

SEQ ID NO: 18236 - protein, 148 aa, Homo sapiens
  MOD_RES (10)..(10): Selenocysteine
  MOD_RES (27)..(27): Selenocysteine
  MOD_RES (34)..(34): Selenocysteine
  MOD_RES (48)..(48): Selenocysteine
  MOD_RES (55)..(55): Selenocysteine
  MOD_RES (61)..(61): Selenocysteine
  MOD_RES (66)..(66): Selenocysteine
  MOD_RES (74)..(74): Selenocysteine
  MOD_RES (88)..(88): Selenocysteine
  MOD_RES (94)..(94): Selenocysteine
  MOD_RES (114)..(114): Selenocysteine
  MOD_RES (117)..(117): Selenocysteine
  MOD_RES (122)..(122): Selenocysteine
  MOD_RES (124)..(124): Selenocysteine
  MOD_RES (128)..(128): Selenocysteine
  MOD_RES (133)..(133): Selenocysteine
MPCIQAQYGXPAPSPGPRDHLASDPLXPEFIKPXMDLASPEAAPAAPXALPSFSXFMDGYXGEFDXFLYQLPGXVQPCSSASSSASSXSSSSAXSPASASFKFEDFQVAQCRKXPSXSAWLXRXALWXRGGEXAASSAASRSAWRWAW

SEQ ID NO: 18237 - protein, 325 aa, Homo sapiens
  MOD_RES (10)..(10): Selenocysteine
  MOD_RES (27)..(27): Selenocysteine
  MOD_RES (34)..(34): Selenocysteine
  MOD_RES (48)..(48): Selenocysteine
  MOD_RES (55)..(55): Selenocysteine
  MOD_RES (61)..(61): Selenocysteine
  MOD_RES (66)..(66): Selenocysteine
  MOD_RES (74)..(74): Selenocysteine
  MOD_RES (88)..(88): Selenocysteine
  MOD_RES (94)..(94): Selenocysteine
  MOD_RES (143)..(143): Selenocysteine
  MOD_RES (166)..(166): Selenocysteine
  MOD_RES (174)..(174): Selenocysteine
  MOD_RES (196)..(196): Selenocysteine
  MOD_RES (215)..(215): Selenocysteine
  MOD_RES (228)..(228): Selenocysteine
  MOD_RES (236)..(236): Selenocysteine
  MOD_RES (248)..(248): Selenocysteine
  MOD_RES (251)..(251): Selenocysteine
  MOD_RES (253)..(253): Selenocysteine
  MOD_RES (283)..(283): Selenocysteine
  MOD_RES (315)..(315): Selenocysteine
MPCIQAQYGXPAPSPGPRDHLASDPLXPEFIKPXMDLASPEAAPAAPXALPSFSXFMDGYXGEFDXFLYQLPGXVQPCSSASSSASSXSSSSAXSPASASFKFEDFQVYGCYPGPLSGPVDEALSSSGSDYYGSPCSAPSPSXPSFQPPQLSPWDGSFGHFSPSQXYEGLRAWXEQLPKASGPPQPPAFFSFSPPXGPSPSLAQSPLKLFPSQAXHQLGEGESYSMPXAFPGLAPXSPHLEGSGILDXPVXSXKARSGAPGGSEGRCAVCGDNASCQHYGVRXCEGCKGFFKVPRSPRWGLLLEMERGWPHPIGXCGLPLGSPPS

SEQ ID NO: 18238 - protein, 598 aa, Homo sapiens
  MOD_RES (10)..(10): Selenocysteine
  MOD_RES (27)..(27): Selenocysteine
  MOD_RES (34)..(34): Selenocysteine
  MOD_RES (48)..(48): Selenocysteine
  MOD_RES (55)..(55): Selenocysteine
  MOD_RES (61)..(61): Selenocysteine
  MOD_RES (66)..(66): Selenocysteine
  MOD_RES (74)..(74): Selenocysteine
  MOD_RES (88)..(88): Selenocysteine
  MOD_RES (94)..(94): Selenocysteine
  MOD_RES (143)..(143): Selenocysteine
  MOD_RES (166)..(166): Selenocysteine
  MOD_RES (174)..(174): Selenocysteine
  MOD_RES (196)..(196): Selenocysteine
  MOD_RES (215)..(215): Selenocysteine
  MOD_RES (228)..(228): Selenocysteine
  MOD_RES (236)..(236): Selenocysteine
  MOD_RES (248)..(248): Selenocysteine
  MOD_RES (251)..(251): Selenocysteine
  MOD_RES (253)..(253): Selenocysteine
  MOD_RES (283)..(283): Selenocysteine
  MOD_RES (294)..(294): Selenocysteine
  MOD_RES (339)..(339): Selenocysteine
  MOD_RES (366)..(366): Selenocysteine
  MOD_RES (379)..(379): Selenocysteine
  MOD_RES (513)..(513): Selenocysteine
  MOD_RES (564)..(564): Selenocysteine
  MOD_RES (567)..(567): Selenocysteine
  MOD_RES (595)..(595): Selenocysteine
MPCIQAQYGXPAPSPGPRDHLASDPLXPEFIKPXMDLASPEAAPAAPXALPSFSXFMDGYXGEFDXFLYQLPGXVQPCSSASSSASSXSSSSAXSPASASFKFEDFQVYGCYPGPLSGPVDEALSSSGSDYYGSPCSAPSPSXPSFQPPQLSPWDGSFGHFSPSQXYEGLRAWXEQLPKASGPPQPPAFFSFSPPXGPSPSLAQSPLKLFPSQAXHQLGEGESYSMPXAFPGLAPXSPHLEGSGILDXPVXSXKARSGAPGGSEGRCAVCGDNASCQHYGVRXCEGCKGFFKRXVQKNAKYICLANKDCPVDKRRRNRCQFCRFQKCLAVGMVKEVVRXDSLKGRRGRLPSKPKQPPDASPANLLXSLVRAHLDSGPSXAKLDYSKFQELVLPHFGKEDAGDVQQFYDLLSGSLEVIRKWAEKIPGFAELSPADQDLLLESAFLELFILRLAYRSKPGEGKLIFCSGLVLHRLQCARGFGDWIDSILAFSRSLHSLLVDVPAFACLSALVLIXDRHGLQEPRRVEELQNRIASCLKEHVAAVAGEPQPASCLSRLLGKLPELRXLCXQGLQRIFYLKLEDLVPPPPIIDKIFMDXLPF

SEQ ID NO: 18239 - protein, 652 aa, Homo sapiens
  MOD_RES (2)..(2): Selenocysteine
  MOD_RES (64)..(64): Selenocysteine
  MOD_RES (81)..(81): Selenocysteine
  MOD_RES (88)..(88): Selenocysteine
  MOD_RES (102)..(102): Selenocysteine
  MOD_RES (109)..(109): Selenocysteine
  MOD_RES (115)..(115): Selenocysteine
  MOD_RES (120)..(120): Selenocysteine
  MOD_RES (128)..(128): Selenocysteine
  MOD_RES (142)..(142): Selenocysteine
  MOD_RES (148)..(148): Selenocysteine
  MOD_RES (197)..(197): Selenocysteine
  MOD_RES (220)..(220): Selenocysteine
  MOD_RES (228)..(228): Selenocysteine
  MOD_RES (250)..(250): Selenocysteine
  MOD_RES (269)..(269): Selenocysteine
  MOD_RES (282)..(282): Selenocysteine
  MOD_RES (290)..(290): Selenocysteine
  MOD_RES (302)..(302): Selenocysteine
  MOD_RES (305)..(305): Selenocysteine
  MOD_RES (307)..(307): Selenocysteine
  MOD_RES (337)..(337): Selenocysteine
  MOD_RES (348)..(348): Selenocysteine
  MOD_RES (393)..(393): Selenocysteine
  MOD_RES (420)..(420): Selenocysteine
  MOD_RES (433)..(433): Selenocysteine
  MOD_RES (567)..(567): Selenocysteine
  MOD_RES (618)..(618): Selenocysteine
  MOD_RES (621)..(621): Selenocysteine
  MOD_RES (649)..(649): Selenocysteine
MXSAQYKIKILIEGLHHGQRPGPAPPRQPGSFCWALKADGIMWLAKACWSIQSEMPCIQAQYGXPAPSPGPRDHLASDPLXPEFIKPXMDLASPEAAPAAPXALPSFSXFMDGYXGEFDXFLYQLPGXVQPCSSASSSASSXSSSSAXSPASASFKFEDFQVYGCYPGPLSGPVDEALSSSGSDYYGSPCSAPSPSXPSFQPPQLSPWDGSFGHFSPSQXYEGLRAWXEQLPKASGPPQPPAFFSFSPPXGPSPSLAQSPLKLFPSQAXHQLGEGESYSMPXAFPGLAPXSPHLEGSGILDXPVXSXKARSGAPGGSEGRCAVCGDNASCQHYGVRXCEGCKGFFKRXVQKNAKYICLANKDCPVDKRRRNRCQFCRFQKCLAVGMVKEVVRXDSLKGRRGRLPSKPKQPPDASPANLLXSLVRAHLDSGPSXAKLDYSKFQELVLPHFGKEDAGDVQQFYDLLSGSLEVIRKWAEKIPGFAELSPADQDLLLESAFLELFILRLAYRSKPGEGKLIFCSGLVLHRLQCARGFGDWIDSILAFSRSLHSLLVDVPAFACLSALVLIXDRHGLQEPRRVEELQNRIASCLKEHVAAVAGEPQPASCLSRLLGKLPELRXLCXQGLQRIFYLKLEDLVPPPPIIDKIFMDXLPF

SEQ ID NO: 18240 - protein, 119 aa, Homo sapiens
  MOD_RES (23)..(23): Selenocysteine
  MOD_RES (40)..(40): Selenocysteine
  MOD_RES (47)..(47): Selenocysteine
  MOD_RES (61)..(61): Selenocysteine
  MOD_RES (68)..(68): Selenocysteine
  MOD_RES (74)..(74): Selenocysteine
  MOD_RES (79)..(79): Selenocysteine
  MOD_RES (87)..(87): Selenocysteine
  MOD_RES (101)..(101): Selenocysteine
  MOD_RES (107)..(107): Selenocysteine
MWLAKACWSIQSEMPCIQAQYGXPAPSPGPRDHLASDPLXPEFIKPXMDLASPEAAPAAPXALPSFSXFMDGYXGEFDXFLYQLPGXVQPCSSASSSASSXSSSSAXSPASASFKFEDF

SEQ ID NO: 18241 - protein, 302 aa, Homo sapiens
  MOD_RES (23)..(23): Selenocysteine
  MOD_RES (40)..(40): Selenocysteine
  MOD_RES (47)..(47): Selenocysteine
  MOD_RES (61)..(61): Selenocysteine
  MOD_RES (68)..(68): Selenocysteine
  MOD_RES (74)..(74): Selenocysteine
  MOD_RES (79)..(79): Selenocysteine
  MOD_RES (87)..(87): Selenocysteine
  MOD_RES (101)..(101): Selenocysteine
  MOD_RES (107)..(107): Selenocysteine
  MOD_RES (156)..(156): Selenocysteine
  MOD_RES (179)..(179): Selenocysteine
  MOD_RES (187)..(187): Selenocysteine
  MOD_RES (209)..(209): Selenocysteine
  MOD_RES (228)..(228): Selenocysteine
  MOD_RES (241)..(241): Selenocysteine
  MOD_RES (249)..(249): Selenocysteine
  MOD_RES (261)..(261): Selenocysteine
  MOD_RES (264)..(264): Selenocysteine
  MOD_RES (266)..(266): Selenocysteine
  MOD_RES (296)..(296): Selenocysteine
MWLAKACWSIQSEMPCIQAQYGXPAPSPGPRDHLASDPLXPEFIKPXMDLASPEAAPAAPXALPSFSXFMDGYXGEFDXFLYQLPGXVQPCSSASSSASSXSSSSAXSPASASFKFEDFQVYGCYPGPLSGPVDEALSSSGSDYYGSPCSAPSPSXPSFQPPQLSPWDGSFGHFSPSQXYEGLRAWXEQLPKASGPPQPPAFFSFSPPXGPSPSLAQSPLKLFPSQAXHQLGEGESYSMPXAFPGLAPXSPHLEGSGILDXPVXSXKARSGAPGGSEGRCAVCGDNASCQHYGVRXCEGCKG

SEQ ID NO: 18242 - protein, 611 aa, Homo sapiens
  MOD_RES (23)..(23): Selenocysteine
  MOD_RES (40)..(40): Selenocysteine
  MOD_RES (47)..(47): Selenocysteine
  MOD_RES (61)..(61): Selenocysteine
  MOD_RES (68)..(68): Selenocysteine
  MOD_RES (74)..(74): Selenocysteine
  MOD_RES (79)..(79): Selenocysteine
  MOD_RES (87)..(87): Selenocysteine
  MOD_RES (101)..(101): Selenocysteine
  MOD_RES (107)..(107): Selenocysteine
  MOD_RES (156)..(156): Selenocysteine
  MOD_RES (179)..(179): Selenocysteine
  MOD_RES (187)..(187): Selenocysteine
  MOD_RES (209)..(209): Selenocysteine
  MOD_RES (228)..(228): Selenocysteine
  MOD_RES (241)..(241): Selenocysteine
  MOD_RES (249)..(249): Selenocysteine
  MOD_RES (261)..(261): Selenocysteine
  MOD_RES (264)..(264): Selenocysteine
  MOD_RES (266)..(266): Selenocysteine
  MOD_RES (296)..(296): Selenocysteine
  MOD_RES (307)..(307): Selenocysteine
  MOD_RES (352)..(352): Selenocysteine
  MOD_RES (379)..(379): Selenocysteine
  MOD_RES (392)..(392): Selenocysteine
  MOD_RES (526)..(526): Selenocysteine
  MOD_RES (577)..(577): Selenocysteine
  MOD_RES (580)..(580): Selenocysteine
  MOD_RES (608)..(608): Selenocysteine
MWLAKACWSIQSEMPCIQAQYGXPAPSPGPRDHLASDPLXPEFIKPXMDLASPEAAPAAPXALPSFSXFMDGYXGEFDXFLYQLPGXVQPCSSASSSASSXSSSSAXSPASASFKFEDFQVYGCYPGPLSGPVDEALSSSGSDYYGSPCSAPSPSXPSFQPPQLSPWDGSFGHFSPSQXYEGLRAWXEQLPKASGPPQPPAFFSFSPPXGPSPSLAQSPLKLFPSQAXHQLGEGESYSMPXAFPGLAPXSPHLEGSGILDXPVXSXKARSGAPGGSEGRCAVCGDNASCQHYGVRXCEGCKGFFKRXVQKNAKYICLANKDCPVDKRRRNRCQFCRFQKCLAVGMVKEVVRXDSLKGRRGRLPSKPKQPPDASPANLLXSLVRAHLDSGPSXAKLDYSKFQELVLPHFGKEDAGDVQQFYDLLSGSLEVIRKWAEKIPGFAELSPADQDLLLESAFLELFILRLAYRSKPGEGKLIFCSGLVLHRLQCARGFGDWIDSILAFSRSLHSLLVDVPAFACLSALVLIXDRHGLQEPRRVEELQNRIASCLKEHVAAVAGEPQPASCLSRLLGKLPELRXLCXQGLQRIFYLKLEDLVPPPPIIDKIFMDXLPF

SEQ ID NO: 18243 - protein, 79 aa, Homo sapiens
  MOD_RES (17)..(18): Selenocysteine
  MOD_RES (64)..(64): Selenocysteine
  MOD_RES (79)..(79): Selenocysteine
MWLAKACWSIQSGLPEXXRKSPQPILGFSLRAVVWDLFPGSKQIVRRKLVSHDSGGAQAPGSAXFGCGASPFHCELNSX

SEQ ID NO: 18244 - protein, 107 aa, Homo sapiens
  MOD_RES (6)..(6): Selenocysteine
  MOD_RES (66)..(66): Selenocysteine
  MOD_RES (68)..(69): Selenocysteine
  MOD_RES (96)..(97): Selenocysteine
  MOD_RES (105)..(105): Selenocysteine
MDNYSXGYDVKPPCLYQMPLSGQQSSIKVEDIQMHNYQQHSHLPPQSEEMMPHSGSVYYKPSSPPXPXXPGFQVQHSPMWDDPGSLHNFHQNYVAXXHMIEQRKXPV

SEQ ID NO: 18245 - protein, 392 aa, Homo sapiens
  MOD_RES (6)..(6): Selenocysteine
  MOD_RES (66)..(66): Selenocysteine
  MOD_RES (68)..(69): Selenocysteine
  MOD_RES (96)..(97): Selenocysteine
  MOD_RES (105)..(105): Selenocysteine
  MOD_RES (122)..(122): Selenocysteine
  MOD_RES (154)..(154): Selenocysteine
  MOD_RES (183)..(183): Selenocysteine
  MOD_RES (216)..(216): Selenocysteine
  MOD_RES (227)..(227): Selenocysteine
  MOD_RES (272)..(272): Selenocysteine
  MOD_RES (317)..(317): Selenocysteine
  MOD_RES (337)..(337): Selenocysteine
  MOD_RES (348)..(348): Selenocysteine
MDNYSXGYDVKPPCLYQMPLSGQQSSIKVEDIQMHNYQQHSHLPPQSEEMMPHSGSVYYKPSSPPXPXXPGFQVQHSPMWDDPGSLHNFHQNYVAXXHMIEQRKXPVSRLSLFSFKQSPPGXPVSSCQMRFDGPLHVPMNPEPAGSHHVVDGQXFAVPNPIRKPASMGFPGLQIGHASQLLDXQVPSPPSRGSPSNEGLCAVCGDNAACQHYGVRXCEGCKGFFKRXVQKNAKYVCLANKNCPVDKRRRNRCQYCRFQKCLAVGMVKEVVRXDSLKGRRGRLPSKPKSPQEPSPPSPPVSLISALVRAHVDSNPAMXSLDYSRFQANPDYQMSGDDXQHIQQFYDLLXGSMEIIRGWAEKIPGFADLPKADQDLLFESAFLELFVLRLAYRI

SEQ ID NO: 18246 - protein, 490 aa, Homo sapiens
  MOD_RES (6)..(6): Selenocysteine
  MOD_RES (66)..(66): Selenocysteine
  MOD_RES (68)..(69): Selenocysteine
  MOD_RES (96)..(97): Selenocysteine
  MOD_RES (105)..(105): Selenocysteine
  MOD_RES (122)..(122): Selenocysteine
  MOD_RES (154)..(154): Selenocysteine
  MOD_RES (183)..(183): Selenocysteine
  MOD_RES (216)..(216): Selenocysteine
  MOD_RES (227)..(227): Selenocysteine
  MOD_RES (272)..(272): Selenocysteine
  MOD_RES (317)..(317): Selenocysteine
  MOD_RES (337)..(337): Selenocysteine
  MOD_RES (348)..(348): Selenocysteine
  MOD_RES (418)..(418): Selenocysteine
  MOD_RES (423)..(423): Selenocysteine
  MOD_RES (429)..(429): Selenocysteine
  MOD_RES (457)..(457): Selenocysteine
  MOD_RES (464)..(464): Selenocysteine
  MOD_RES (470)..(470): Selenocysteine
  MOD_RES (473)..(473): Selenocysteine
  MOD_RES (486)..(486): Selenocysteine
MDNYSXGYDVKPPCLYQMPLSGQQSSIKVEDIQMHNYQQHSHLPPQSEEMMPHSGSVYYKPSSPPXPXXPGFQVQHSPMWDDPGSLHNFHQNYVAXXHMIEQRKXPVSRLSLFSFKQSPPGXPVSSCQMRFDGPLHVPMNPEPAGSHHVVDGQXFAVPNPIRKPASMGFPGLQIGHASQLLDXQVPSPPSRGSPSNEGLCAVCGDNAACQHYGVRXCEGCKGFFKRXVQKNAKYVCLANKNCPVDKRRRNRCQYCRFQKCLAVGMVKEVVRXDSLKGRRGRLPSKPKSPQEPSPPSPPVSLISALVRAHVDSNPAMXSLDYSRFQANPDYQMSGDDXQHIQQFYDLLXGSMEIIRGWAEKIPGFADLPKADQDLLFESAFLELFVLRLAYRSNPVEEYEHRHFCLLLHCCPGYGHREXRAQGXQESGRXAKQDCKLSQRPRDFQQWGVEPPQLFVQXVGEAPRXSYPLHXGAXAHFLPEIGRLGAXASNN

SEQ ID NO: 18247 - protein, 535 aa, Homo sapiens
  MOD_RES (6)..(6): Selenocysteine
  MOD_RES (66)..(66): Selenocysteine
  MOD_RES (68)..(69): Selenocysteine
  MOD_RES (96)..(97): Selenocysteine
  MOD_RES (105)..(105): Selenocysteine
  MOD_RES (122)..(122): Selenocysteine
  MOD_RES (154)..(154): Selenocysteine
  MOD_RES (183)..(183): Selenocysteine
  MOD_RES (216)..(216): Selenocysteine
  MOD_RES (227)..(227): Selenocysteine
  MOD_RES (272)..(272): Selenocysteine
  MOD_RES (317)..(317): Selenocysteine
  MOD_RES (337)..(337): Selenocysteine
  MOD_RES (348)..(348): Selenocysteine
  MOD_RES (450)..(450): Selenocysteine
  MOD_RES (477)..(477): Selenocysteine
  MOD_RES (501)..(501): Selenocysteine
  MOD_RES (504)..(504): Selenocysteine
  MOD_RES (532)..(532): Selenocysteine
MDNYSXGYDVKPPCLYQMPLSGQQSSIKVEDIQMHNYQQHSHLPPQSEEMMPHSGSVYYKPSSPPXPXXPGFQVQHSPMWDDPGSLHNFHQNYVAXXHMIEQRKXPVSRLSLFSFKQSPPGXPVSSCQMRFDGPLHVPMNPEPAGSHHVVDGQXFAVPNPIRKPASMGFPGLQIGHASQLLDXQVPSPPSRGSPSNEGLCAVCGDNAACQHYGVRXCEGCKGFFKRXVQKNAKYVCLANKNCPVDKRRRNRCQYCRFQKCLAVGMVKEVVRXDSLKGRRGRLPSKPKSPQEPSPPSPPVSLISALVRAHVDSNPAMXSLDYSRFQANPDYQMSGDDXQHIQQFYDLLXGSMEIIRGWAEKIPGFADLPKADQDLLFESAFLELFVLRLAYRSNPVEGKLIFCNGVVLHRLQCVRGFGEWIDSIVEFSSNLQNMNIDISAFSCIAALAMVXERHGLKEPKRVEELQNKIVNCLKDHVXFNNGGLNRPNYLSKLLGKLPELRXLCXQGLQRIFYLKLEDLVPPPAIIDKLFLDXLPF

SEQ ID NO: 18248 - protein, 258 aa, Homo sapiens
  MOD_RES (36)..(36): Selenocysteine
  MOD_RES (47)..(47): Selenocysteine
  MOD_RES (49)..(49): Selenocysteine
  MOD_RES (52)..(52): Selenocysteine
  MOD_RES (54)..(55): Selenocysteine
  MOD_RES (62)..(62): Selenocysteine
  MOD_RES (69)..(69): Selenocysteine
  MOD_RES (129)..(129): Selenocysteine
  MOD_RES (131)..(132): Selenocysteine
  MOD_RES (159)..(160): Selenocysteine
  MOD_RES (168)..(168): Selenocysteine
  MOD_RES (185)..(185): Selenocysteine
  MOD_RES (217)..(217): Selenocysteine
  MOD_RES (246)..(246): Selenocysteine
MPCVQAQYGSSPQGASPASQSYSYHSSGEYSSDFLXPEFVKFSMDLXNXEIXAXXSLPSFSXFMDNYSXGYDVKPPCLYQMPLSGQQSSIKVEDIQMHNYQQHSHLPPQSEEMMPHSGSVYYKPSSPPXPXXPGFQVQHSPMWDDPGSLHNFHQNYVAXXHMIEQRKXPVSRLSLFSFKQSPPGXPVSSCQMRFDGPLHVPMNPEPAGSHHVVDGQXFAVPNPIRKPASMGFPGLQIGHASQLLDXQVPSPPSRGSPS

SEQ ID NO: 18249 - protein, 553 aa, Homo sapiens
  MOD_RES (36)..(36): Selenocysteine
  MOD_RES (47)..(47): Selenocysteine
  MOD_RES (49)..(49): Selenocysteine
  MOD_RES (52)..(52): Selenocysteine
  MOD_RES (54)..(55): Selenocysteine
  MOD_RES (62)..(62): Selenocysteine
  MOD_RES (69)..(69): Selenocysteine
  MOD_RES (129)..(129): Selenocysteine
  MOD_RES (131)..(132): Selenocysteine
  MOD_RES (159)..(160): Selenocysteine
  MOD_RES (168)..(168): Selenocysteine
  MOD_RES (185)..(185): Selenocysteine
  MOD_RES (217)..(217): Selenocysteine
  MOD_RES (246)..(246): Selenocysteine
  MOD_RES (279)..(279): Selenocysteine
  MOD_RES (290)..(290): Selenocysteine
  MOD_RES (335)..(335): Selenocysteine
  MOD_RES (380)..(380): Selenocysteine
  MOD_RES (400)..(400): Selenocysteine
  MOD_RES (411)..(411): Selenocysteine
  MOD_RES (481)..(481): Selenocysteine
  MOD_RES (486)..(486): Selenocysteine
  MOD_RES (492)..(492): Selenocysteine
  MOD_RES (520)..(520): Selenocysteine
  MOD_RES (527)..(527): Selenocysteine
  MOD_RES (533)..(533): Selenocysteine
  MOD_RES (536)..(536): Selenocysteine
  MOD_RES (549)..(549): Selenocysteine
MPCVQAQYGSSPQGASPASQSYSYHSSGEYSSDFLXPEFVKFSMDLXNXEIXAXXSLPSFSXFMDNYSXGYDVKPPCLYQMPLSGQQSSIKVEDIQMHNYQQHSHLPPQSEEMMPHSGSVYYKPSSPPXPXXPGFQVQHSPMWDDPGSLHNFHQNYVAXXHMIEQRKXPVSRLSLFSFKQSPPGXPVSSCQMRFDGPLHVPMNPEPAGSHHVVDGQXFAVPNPIRKPASMGFPGLQIGHASQLLDXQVPSPPSRGSPSNEGLCAVCGDNAACQHYGVRXCEGCKGFFKRXVQKNAKYVCLANKNCPVDKRRRNRCQYCRFQKCLAVGMVKEVVRXDSLKGRRGRLPSKPKSPQEPSPPSPPVSLISALVRAHVDSNPAMXSLDYSRFQANPDYQMSGDDXQHIQQFYDLLXGSMEIIRGWAEKIPGFADLPKADQDLLFESAFLELFVLRLAYRSNPVEEYEHRHFCLLLHCCPGYGHREXRAQGXQESGRXAKQDCKLSQRPRDFQQWGVEPPQLFVQXVGEAPRXSYPLHXGAXAHFLPEIGRLGAXASNN

SEQ ID NO: 18250 - protein, 598 aa, Homo sapiens
  MOD_RES (36)..(36): Selenocysteine
  MOD_RES (47)..(47): Selenocysteine
  MOD_RES (49)..(49): Selenocysteine
  MOD_RES (52)..(52): Selenocysteine
  MOD_RES (54)..(55): Selenocysteine
  MOD_RES (62)..(62): Selenocysteine
  MOD_RES (69)..(69): Selenocysteine
  MOD_RES (129)..(129): Selenocysteine
  MOD_RES (131)..(132): Selenocysteine
  MOD_RES (159)..(160): Selenocysteine
  MOD_RES (168)..(168): Selenocysteine
  MOD_RES (185)..(185): Selenocysteine
  MOD_RES (217)..(217): Selenocysteine
  MOD_RES (246)..(246): Selenocysteine
  MOD_RES (279)..(279): Selenocysteine
  MOD_RES (290)..(290): Selenocysteine
  MOD_RES (335)..(335): Selenocysteine
  MOD_RES (380)..(380): Selenocysteine
  MOD_RES (400)..(400): Selenocysteine
  MOD_RES (411)..(411): Selenocysteine
  MOD_RES (513)..(513): Selenocysteine
  MOD_RES (540)..(540): Selenocysteine
  MOD_RES (564)..(564): Selenocysteine
  MOD_RES (567)..(567): Selenocysteine
  MOD_RES (595)..(595): Selenocysteine
MPCVQAQYGSSPQGASPASQSYSYHSSGEYSSDFLXPEFVKFSMDLXNXEIXAXXSLPSFSXFMDNYSXGYDVKPPCLYQMPLSGQQSSIKVEDIQMHNYQQHSHLPPQSEEMMPHSGSVYYKPSSPPXPXXPGFQVQHSPMWDDPGSLHNFHQNYVAXXHMIEQRKXPVSRLSLFSFKQSPPGXPVSSCQMRFDGPLHVPMNPEPAGSHHVVDGQXFAVPNPIRKPASMGFPGLQIGHASQLLDXQVPSPPSRGSPSNEGLCAVCGDNAACQHYGVRXCEGCKGFFKRXVQKNAKYVCLANKNCPVDKRRRNRCQYCRFQKCLAVGMVKEVVRXDSLKGRRGRLPSKPKSPQEPSPPSPPVSLISALVRAHVDSNPAMXSLDYSRFQANPDYQMSGDDXQHIQQFYDLLXGSMEIIRGWAEKIPGFADLPKADQDLLFESAFLELFVLRLAYRSNPVEGKLIFCNGVVLHRLQCVRGFGEWIDSIVEFSSNLQNMNIDISAFSCIAALAMVXERHGLKEPKRVEELQNKIVNCLKDHVXFNNGGLNRPNYLSKLLGKLPELRXLCXQGLQRIFYLKLEDLVPPPAIIDKLFLDXLPF

SEQ ID NO: 18251 - protein, 150 aa, Homo sapiens
  MOD_RES (1)..(1): Any amino acid
  MOD_RES (15)..(15): Selenocysteine
  MOD_RES (26)..(26): Selenocysteine
  MOD_RES (28)..(28): Selenocysteine
  MOD_RES (31)..(31): Selenocysteine
  MOD_RES (33)..(34): Selenocysteine
  MOD_RES (41)..(41): Selenocysteine
  MOD_RES (48)..(48): Selenocysteine
  MOD_RES (72)..(72): Selenocysteine
  MOD_RES (117)..(117): Selenocysteine
XSYHSSGEYSSDFLXPEFVKFSMDLXNXEIXAXXSLPSFSXFMDNYSXGYDVKPPCLYQMPLSGQQSSIKRXVQKNAKYVCLANKNCPVDKRRRNRCQYCRFQKCLAVGMVKEVVRXDSLKGRRGRLPSKPKSPQEPSPPSPPVSLISAL

SEQ ID NO: 18252 - protein, 637 aa, Homo sapiens
  MOD_RES (32)..(32): Selenocysteine
  MOD_RES (38)..(39): Selenocysteine
  MOD_RES (47)..(47): Selenocysteine
  MOD_RES (50)..(50): Selenocysteine
  MOD_RES (56)..(56): Selenocysteine
  MOD_RES (59)..(59): Selenocysteine
  MOD_RES (61)..(61): Selenocysteine
  MOD_RES (63)..(64): Selenocysteine
  MOD_RES (71)..(71): Selenocysteine
  MOD_RES (142)..(142): Selenocysteine
  MOD_RES (153)..(153): Selenocysteine
  MOD_RES (155)..(156): Selenocysteine
  MOD_RES (193)..(193): Selenocysteine
  MOD_RES (227)..(227): Selenocysteine
  MOD_RES (273)..(273): Selenocysteine
  MOD_RES (277)..(277): Selenocysteine
  MOD_RES (302)..(302): Selenocysteine
  MOD_RES (319)..(319): Selenocysteine
  MOD_RES (330)..(330): Selenocysteine
  MOD_RES (375)..(375): Selenocysteine
  MOD_RES (418)..(418): Selenocysteine
  MOD_RES (421)..(421): Selenocysteine
  MOD_RES (433)..(433): Selenocysteine
  MOD_RES (440)..(440): Selenocysteine
  MOD_RES (453)..(453): Selenocysteine
  MOD_RES (470)..(470): Selenocysteine
  MOD_RES (478)..(478): Selenocysteine
  MOD_RES (499)..(499): Selenocysteine
  MOD_RES (555)..(555): Selenocysteine
  MOD_RES (574)..(574): Selenocysteine
  MOD_RES (590)..(590): Selenocysteine
  MOD_RES (606)..(606): Selenocysteine
  MOD_RES (634)..(634): Selenocysteine
MHDSIRFGNVDMPCVQAQYSPSPPGSSYAAQXYSSEYXXEIMNPDYXKLXMDLGSXEIXAXAXXSLPSISXFVEGYSSNYELKPSCVYQMQRPLIKVEEGRAPSYHHHHHHHHHHHHHHQQQHQQPSIPPASSPEDEVLPSXSMYFKQSPPSXPXXPAFPPQAGALWDEALPSAPGCIAPGPLLDPPMKAVPXVAGARFPLFHFKPSPPHPPAPSPAGGHHLGYDPXAAAALSLPLGAAAAAGSQAAALESHPYGLPLAKRAAPLAFPPLGLXPSPXASSLLGESPSLPSPPSRSSSSGEGXCAVCGDNAACQHYGVRXCEGCKGFFKRXVQKNAKYVCLANKNCPVDKRRRNRCQYCRFQKCLSVGMVKEVVRXDSLKGRRGRLPSKPKSPLQQEPSQPSPPSPPICMMNALVRALXDSXPRDLDYSRYCPXDQAAAGXDAEHVQQFYNLLXASIDVSRSWAEKIPGFXDLPKEDQXLLIESAFLELFVLRLSIRSNXAEDKFVFCNGLVLHRLQCLRGFGEWLDSIKDFSLNLQSLNLDIQALACLSALSMIXERHGLKEPKRVEELCNKIXSSLKDHQSKGQALEPXESKVLGALVELRKICXLGLQRIFYLKLEDLVSPPSIIDKLFLDXLPF

SEQ ID NO: 18253 - protein, 443 aa, Homo sapiens
  MOD_RES (21)..(21): Selenocysteine
  MOD_RES (27)..(28): Selenocysteine
  MOD_RES (36)..(36): Selenocysteine
  MOD_RES (39)..(39): Selenocysteine
  MOD_RES (45)..(45): Selenocysteine
  MOD_RES (48)..(48): Selenocysteine
  MOD_RES (50)..(50): Selenocysteine
  MOD_RES (52)..(53): Selenocysteine
  MOD_RES (60)..(60): Selenocysteine
  MOD_RES (131)..(131): Selenocysteine
  MOD_RES (142)..(142): Selenocysteine
  MOD_RES (144)..(145): Selenocysteine
  MOD_RES (182)..(182): Selenocysteine
  MOD_RES (216)..(216): Selenocysteine
  MOD_RES (262)..(262): Selenocysteine
  MOD_RES (266)..(266): Selenocysteine
  MOD_RES (291)..(291): Selenocysteine
  MOD_RES (308)..(308): Selenocysteine
  MOD_RES (319)..(319): Selenocysteine
  MOD_RES (364)..(364): Selenocysteine
  MOD_RES (407)..(407): Selenocysteine
  MOD_RES (410)..(410): Selenocysteine
MPCVQAQYSPSPPGSSYAAQXYSSEYXXEIMNPDYXKLXMDLGSXEIXAXAXXSLPSISXFVEGYSSNYELKPSCVYQMQRPLIKVEEGRAPSYHHHHHHHHHHHHHHQQQHQQPSIPPASSPEDEVLPSXSMYFKQSPPSXPXXPAFPPQAGALWDEALPSAPGCIAPGPLLDPPMKAVPXVAGARFPLFHFKPSPPHPPAPSPAGGHHLGYDPXAAAALSLPLGAAAAAGSQAAALESHPYGLPLAKRAAPLAFPPLGLXPSPXASSLLGESPSLPSPPSRSSSSGEGXCAVCGDNAACQHYGVRXCEGCKGFFKRXVQKNAKYVCLANKNCPVDKRRRNRCQYCRFQKCLSVGMVKEVVRXDSLKGRRGRLPSKPKSPLQQEPSQPSPPSPPICMMNALVRALXDSXPRDLDYSRVSFMISCFQMNDQGLYLWLLVIRVD

SEQ ID NO: 18254 - protein, 626 aa, Homo sapiens
  MOD_RES (21)..(21): Selenocysteine
  MOD_RES (27)..(28): Selenocysteine
  MOD_RES (36)..(36): Selenocysteine
  MOD_RES (39)..(39): Selenocysteine
  MOD_RES (45)..(45): Selenocysteine
  MOD_RES (48)..(48): Selenocysteine
  MOD_RES (50)..(50): Selenocysteine
  MOD_RES (52)..(53): Selenocysteine
  MOD_RES (60)..(60): Selenocysteine
  MOD_RES (131)..(131): Selenocysteine
  MOD_RES (142)..(142): Selenocysteine
  MOD_RES (144)..(145): Selenocysteine
  MOD_RES (182)..(182): Selenocysteine
  MOD_RES (216)..(216): Selenocysteine
  MOD_RES (262)..(262): Selenocysteine
  MOD_RES (266)..(266): Selenocysteine
  MOD_RES (291)..(291): Selenocysteine
  MOD_RES (308)..(308): Selenocysteine
  MOD_RES (319)..(319): Selenocysteine
  MOD_RES (364)..(364): Selenocysteine
  MOD_RES (407)..(407): Selenocysteine
  MOD_RES (410)..(410): Selenocysteine
  MOD_RES (422)..(422): Selenocysteine
  MOD_RES (429)..(429): Selenocysteine
  MOD_RES (442)..(442): Selenocysteine
  MOD_RES (459)..(459): Selenocysteine
  MOD_RES (467)..(467): Selenocysteine
  MOD_RES (488)..(488): Selenocysteine
  MOD_RES (544)..(544): Selenocysteine
  MOD_RES (563)..(563): Selenocysteine
  MOD_RES (579)..(579): Selenocysteine
  MOD_RES (595)..(595): Selenocysteine
  MOD_RES (623)..(623): Selenocysteine
MPCVQAQYSPSPPGSSYAAQXYSSEYXXEIMNPDYXKLXMDLGSXEIXAXAXXSLPSISXFVEGYSSNYELKPSCVYQMQRPLIKVEEGRAPSYHHHHHHHHHHHHHHQQQHQQPSIPPASSPEDEVLPSXSMYFKQSPPSXPXXPAFPPQAGALWDEALPSAPGCIAPGPLLDPPMKAVPXVAGARFPLFHFKPSPPHPPAPSPAGGHHLGYDPXAAAALSLPLGAAAAAGSQAAALESHPYGLPLAKRAAPLAFPPLGLXPSPXASSLLGESPSLPSPPSRSSSSGEGXCAVCGDNAACQHYGVRXCEGCKGFFKRXVQKNAKYVCLANKNCPVDKRRRNRCQYCRFQKCLSVGMVKEVVRXDSLKGRRGRLPSKPKSPLQQEPSQPSPPSPPICMMNALVRALXDSXPRDLDYSRYCPXDQAAAGXDAEHVQQFYNLLXASIDVSRSWAEKIPGFXDLPKEDQXLLIESAFLELFVLRLSIRSNXAEDKFVFCNGLVLHRLQCLRGFGEWLDSIKDFSLNLQSLNLDIQALACLSALSMIXERHGLKEPKRVEELCNKIXSSLKDHQSKGQALEPXESKVLGALVELRKICXLGLQRIFYLKLEDLVSPPSIIDKLFLDXLPF

SEQ ID NO: 18255 - protein, 178 aa, Homo sapiens
  MOD_RES (29)..(29): Selenocysteine
  MOD_RES (40)..(40): Selenocysteine
  MOD_RES (48)..(48): Selenocysteine
  MOD_RES (50)..(50): Selenocysteine
  MOD_RES (60)..(60): Selenocysteine
  MOD_RES (75)..(75): Selenocysteine
  MOD_RES (122)..(122): Selenocysteine
MDYSYDEDLDELCPVCGDKVSGYHYGLLXCESCKGFFKRXVQNNKHYXCXESQSCKIDKXQRKRCPFCRFQKCLXVGMRLEAVRADRMRGGRNKFGPMYKRDRALKQQKKAQIRANGFKLEXGPPMGVPPPPPPAPDYVLPPSLHGPEPKGLAAGPPAGPLGDFGAPALPMAVPGAHG

SEQ ID NO: 18256 - protein, 421 aa, Homo sapiens
  MOD_RES (29)..(29): Selenocysteine
  MOD_RES (40)..(40): Selenocysteine
  MOD_RES (48)..(48): Selenocysteine
  MOD_RES (50)..(50): Selenocysteine
  MOD_RES (60)..(60): Selenocysteine
  MOD_RES (75)..(75): Selenocysteine
  MOD_RES (122)..(122): Selenocysteine
  MOD_RES (252)..(252): Selenocysteine
  MOD_RES (272)..(272): Selenocysteine
  MOD_RES (294)..(295): Selenocysteine
  MOD_RES (298)..(298): Selenocysteine
  MOD_RES (365)..(365): Selenocysteine
  MOD_RES (421)..(421): Selenocysteine
MDYSYDEDLDELCPVCGDKVSGYHYGLLXCESCKGFFKRXVQNNKHYXCXESQSCKIDKXQRKRCPFCRFQKCLXVGMRLEAVRADRMRGGRNKFGPMYKRDRALKQQKKAQIRANGFKLEXGPPMGVPPPPPPAPDYVLPPSLHGPEPKGLAAGPPAGPLGDFGAPALPMAVPGAHGPLAGYLYPAFPGRAIKSEYPEPYASPPQPGLPYGYPEPFSGGPNVPELILQLLQLEPDEDQVRARILGCLQEPXKSRPDQPAAFGLLCRMADQXFISIVDWARRCMVFKELEVELXXVAXQAGSLLHSLVLRAQELVLQLLALQLDRQEFVCLKFIILFSLDLKFLNNHILVKDAQEKANAALLDYXLCHYPHCGDKFQQLLLCLVEVRALSMQAKEYLYHKHLGNEMPRNNLLIEMLQAKQX

SEQ ID NO: 18257 - protein, 461 aa, Homo sapiens
  MOD_RES (29)..(29): Selenocysteine
  MOD_RES (40)..(40): Selenocysteine
  MOD_RES (48)..(48): Selenocysteine
  MOD_RES (50)..(50): Selenocysteine
  MOD_RES (60)..(60): Selenocysteine
  MOD_RES (75)..(75): Selenocysteine
  MOD_RES (122)..(122): Selenocysteine
  MOD_RES (252)..(252): Selenocysteine
  MOD_RES (272)..(272): Selenocysteine
  MOD_RES (296)..(296): Selenocysteine
  MOD_RES (327)..(327): Selenocysteine
  MOD_RES (334)..(335): Selenocysteine
  MOD_RES (338)..(338): Selenocysteine
  MOD_RES (405)..(405): Selenocysteine
  MOD_RES (461)..(461): Selenocysteine
MDYSYDEDLDELCPVCGDKVSGYHYGLLXCESCKGFFKRXVQNNKHYXCXESQSCKIDKXQRKRCPFCRFQKCLXVGMRLEAVRADRMRGGRNKFGPMYKRDRALKQQKKAQIRANGFKLEXGPPMGVPPPPPPAPDYVLPPSLHGPEPKGLAAGPPAGPLGDFGAPALPMAVPGAHGPLAGYLYPAFPGRAIKSEYPEPYASPPQPGLPYGYPEPFSGGPNVPELILQLLQLEPDEDQVRARILGCLQEPXKSRPDQPAAFGLLCRMADQXFISIVDWARRCMVFKELEVADQMXLLQNCWSELLVFDHIYRQVQHGKEGSILLVXGQEVELXXVAXQAGSLLHSLVLRAQELVLQLLALQLDRQEFVCLKFIILFSLDLKFLNNHILVKDAQEKANAALLDYXLCHYPHCGDKFQQLLLCLVEVRALSMQAKEYLYHKHLGNEMPRNNLLIEMLQAKQX

SEQ ID NO: 18258 - protein, 245 aa, Homo sapiens
  MOD_RES (36)..(36): Selenocysteine
  MOD_RES (56)..(56): Selenocysteine
  MOD_RES (80)..(80): Selenocysteine
  MOD_RES (111)..(111): Selenocysteine
  MOD_RES (118)..(119): Selenocysteine
  MOD_RES (122)..(122): Selenocysteine
  MOD_RES (189)..(189): Selenocysteine
  MOD_RES (245)..(245): Selenocysteine
VEEEGDVSNRGVELLQLEPDEDQVRARILGCLQEPXKSRPDQPAAFGLLCRMADQXFISIVDWARRCMVFKELEVADQMXLLQNCWSELLVFDHIYRQVQHGKEGSILLVXGQEVELXXVAXQAGSLLHSLVLRAQELVLQLLALQLDRQEFVCLKFIILFSLDLKFLNNHILVKDAQEKANAALLDYXLCHYPHCGDKFQQLLLCLVEVRALSMQAKEYLYHKHLGNEMPRNNLLIEMLQAKQX

SEQ ID NO: 18259 - protein, 113 aa, Homo sapiens
  MOD_RES (7)..(7): Selenocysteine
  MOD_RES (19)..(19): Selenocysteine
  MOD_RES (24)..(24): Selenocysteine
  MOD_RES (27)..(27): Selenocysteine
  MOD_RES (29)..(29): Selenocysteine
  MOD_RES (37)..(38): Selenocysteine
MSSNSDXGDLQESLKHGLXPIDNXENXGXRKMREQHXXISHLFRRAEPPRCAGKESFPAAPRSSGSASGAAARARSGRRRGLRAHGGRALGGSRPRGRSWAPAARSPSWPLPK

SEQ ID NO: 18260 - protein, 541 aa, Homo sapiens
  MOD_RES (7)..(7): Selenocysteine
  MOD_RES (19)..(19): Selenocysteine
  MOD_RES (47)..(47): Selenocysteine
  MOD_RES (102)..(102): Selenocysteine
  MOD_RES (113)..(113): Selenocysteine
  MOD_RES (121)..(121): Selenocysteine
  MOD_RES (133)..(133): Selenocysteine
  MOD_RES (208)..(208): Selenocysteine
  MOD_RES (233)..(233): Selenocysteine
  MOD_RES (242)..(242): Selenocysteine
  MOD_RES (248)..(248): Selenocysteine
  MOD_RES (260)..(260): Selenocysteine
  MOD_RES (278)..(278): Selenocysteine
  MOD_RES (295)..(295): Selenocysteine
  MOD_RES (341)..(341): Selenocysteine
  MOD_RES (352)..(352): Selenocysteine
  MOD_RES (407)..(407): Selenocysteine
  MOD_RES (423)..(423): Selenocysteine
  MOD_RES (485)..(485): Selenocysteine
  MOD_RES (493)..(493): Selenocysteine
MSSNSDXGDLQESLKHGLXPIGAGLPDRHGSPIPARGRLVMLPKVEXEALGLARSHGEQGQMPENMQVSQFKMVNYSYDEDLEELCPVCGDKVSGYHYGLLXCESCKGFFKRXVQNNKRYXCIENQNCQIDKXQRKRCPYCRFQKCLSVGMKLEAVRADRMRGGRNKFGPMYKRDRALKQQKKALIRANGLKLEAMSQVIQAMPSDLXISSAIQNIHSASKGLPLNHAALPPXDYDRSPFVXSPISMXMPPHGSLQGYQXYGHFPSRAIKSEYPDPYXSSPESIMGYSYMDSYQXSSPASIPHLILELLKCEPDEPQVQAKIMAYLQQEQANRSKHEKLSXFGLMCKMADQXLFSIVEWARSSIFFRELKVDDQMKLLQNCWSELLILDHIYRQVVHGKEGSIFLVXGQQVDYSIIASQAGAXLNNLMSHAQELVAKLRSLQFDQREFVCLKFLVLFSLDVKNLENFQLVEGVQEQVNAALLDYXMCNYPQQXEKFGQLLLRLPEIRAISMQAEEYLYYKHLNGDVPYNNLLIEMLHAKRA

SEQ ID NO: 18261 - protein, 495 aa, Homo sapiens
  MOD_RES (7)..(7): Selenocysteine
  MOD_RES (19)..(19): Selenocysteine
  MOD_RES (56)..(56): Selenocysteine
  MOD_RES (67)..(67): Selenocysteine
  MOD_RES (75)..(75): Selenocysteine
  MOD_RES (87)..(87): Selenocysteine
  MOD_RES (162)..(162): Selenocysteine
  MOD_RES (187)..(187): Selenocysteine
  MOD_RES (196)..(196): Selenocysteine
  MOD_RES (202)..(202): Selenocysteine
  MOD_RES (214)..(214): Selenocysteine
  MOD_RES (232)..(232): Selenocysteine
  MOD_RES (249)..(249): Selenocysteine
  MOD_RES (295)..(295): Selenocysteine
  MOD_RES (306)..(306): Selenocysteine
  MOD_RES (361)..(361): Selenocysteine
  MOD_RES (377)..(377): Selenocysteine
  MOD_RES (439)..(439): Selenocysteine
  MOD_RES (447)..(447): Selenocysteine
MSSNSDXGDLQESLKHGLXPIVSQFKMVNYSYDEDLEELCPVCGDKVSGYHYGLLXCESCKGFFKRXVQNNKRYXCIENQNCQIDKXQRKRCPYCRFQKCLSVGMKLEAVRADRMRGGRNKFGPMYKRDRALKQQKKALIRANGLKLEAMSQVIQAMPSDLXISSAIQNIHSASKGLPLNHAALPPXDYDRSPFVXSPISMXMPPHGSLQGYQXYGHFPSRAIKSEYPDPYXSSPESIMGYSYMDSYQXSSPASIPHLILELLKCEPDEPQVQAKIMAYLQQEQANRSKHEKLSXFGLMCKMADQXLFSIVEWARSSIFFRELKVDDQMKLLQNCWSELLILDHIYRQVVHGKEGSIFLVXGQQVDYSIIASQAGAXLNNLMSHAQELVAKLRSLQFDQREFVCLKFLVLFSLDVKNLENFQLVEGVQEQVNAALLDYXMCNYPQQXEKFGQLLLRLPEIRAISMQAEEYLYYKHLNGDVPYNNLLIEMLHAKRA

SEQ ID NO: 18262 - protein, 469 aa, Homo sapiens
  MOD_RES (30)..(30): Selenocysteine
  MOD_RES (41)..(41): Selenocysteine
  MOD_RES (49)..(49): Selenocysteine
  MOD_RES (61)..(61): Selenocysteine
  MOD_RES (136)..(136): Selenocysteine
  MOD_RES (161)..(161): Selenocysteine
  MOD_RES (170)..(170): Selenocysteine
  MOD_RES (176)..(176): Selenocysteine
  MOD_RES (188)..(188): Selenocysteine
  MOD_RES (206)..(206): Selenocysteine
  MOD_RES (223)..(223): Selenocysteine
  MOD_RES (269)..(269): Selenocysteine
  MOD_RES (280)..(280): Selenocysteine
  MOD_RES (335)..(335): Selenocysteine
  MOD_RES (351)..(351): Selenocysteine
  MOD_RES (413)..(413): Selenocysteine
  MOD_RES (421)..(421): Selenocysteine
MVNYSYDEDLEELCPVCGDKVSGYHYGLLXCESCKGFFKRXVQNNKRYXCIENQNCQIDKXQRKRCPYCRFQKCLSVGMKLEAVRADRMRGGRNKFGPMYKRDRALKQQKKALIRANGLKLEAMSQVIQAMPSDLXISSAIQNIHSASKGLPLNHAALPPXDYDRSPFVXSPISMXMPPHGSLQGYQXYGHFPSRAIKSEYPDPYXSSPESIMGYSYMDSYQXSSPASIPHLILELLKCEPDEPQVQAKIMAYLQQEQANRSKHEKLSXFGLMCKMADQXLFSIVEWARSSIFFRELKVDDQMKLLQNCWSELLILDHIYRQVVHGKEGSIFLVXGQQVDYSIIASQAGAXLNNLMSHAQELVAKLRSLQFDQREFVCLKFLVLFSLDVKNLENFQLVEGVQEQVNAALLDYXMCNYPQQXEKFGQLLLRLPEIRAISMQAEEYLYYKHLNGDVPYNNLLIEMLHAKRA

SEQ ID NO: 18263 - protein, 377 aa, Homo sapiens
  MOD_RES (1)..(1): Any amino acid
  MOD_RES (23)..(23): Selenocysteine
  MOD_RES (34)..(34): Selenocysteine
  MOD_RES (42)..(42): Selenocysteine
  MOD_RES (54)..(54): Selenocysteine
  MOD_RES (129)..(129): Selenocysteine
  MOD_RES (154)..(154): Selenocysteine
  MOD_RES (163)..(163): Selenocysteine
  MOD_RES (169)..(169): Selenocysteine
  MOD_RES (181)..(181): Selenocysteine
  MOD_RES (199)..(199): Selenocysteine
  MOD_RES (216)..(216): Selenocysteine
  MOD_RES (262)..(262): Selenocysteine
  MOD_RES (273)..(273): Selenocysteine
  MOD_RES (294)..(294): Selenocysteine
  MOD_RES (304)..(304): Selenocysteine
  MOD_RES (330)..(330): Selenocysteine
  MOD_RES (336)..(336): Selenocysteine
  MOD_RES (358)..(358): Selenocysteine
XDLEELCPVCGDKVSGYHYGLLXCESCKGFFKRXVQNNKRYXCIENQNCQIDKXQRKRCPYCRFQKCLSVGMKLEAVRADRMRGGRNKFGPMYKRDRALKQQKKALIRANGLKLEAMSQVIQAMPSDLXISSAIQNIHSASKGLPLNHAALPPXDYDRSPFVXSPISMXMPPHGSLQGYQXYGHFPSRAIKSEYPDPYXSSPESIMGYSYMDSYQXSSPASIPHLILELLKCEPDEPQVQAKIMAYLQQEQANRSKHEKLSXFGLMCKMADQXLFSIVEWARSSIFFRELKGLXLSPSLECSGXILAHGNLHLLHSSDSPASASRVAGIXGVHHNXHLIFVFLVEMGFCHVGQAGLKXPDLRVICLPRPPKVLGLWA

SEQ ID NO: 18264 - protein, 71 aa, Homo sapiens
  MOD_RES (1)..(1): Any amino acid
  MOD_RES (8)..(8): Selenocysteine
  MOD_RES (25)..(25): Selenocysteine
  MOD_RES (33)..(33): Selenocysteine
  MOD_RES (60)..(60): Selenocysteine
XSLKHGLXPIDRGNCRSGCFSFAAXLRQRSLLXSCAGLPDRHGSPIPARGRLVMLPKVEXEALGLARSHGE

SEQ ID NO: 18265 - protein, 479 aa, Homo sapiens
  MOD_RES (47)..(47): Selenocysteine
  MOD_RES (59)..(59): Selenocysteine
  MOD_RES (68)..(68): Selenocysteine
  MOD_RES (195)..(195): Selenocysteine
  MOD_RES (267)..(267): Selenocysteine
  MOD_RES (278)..(278): Selenocysteine
  MOD_RES (316)..(316): Selenocysteine
  MOD_RES (322)..(322): Selenocysteine
  MOD_RES (333)..(333): Selenocysteine
  MOD_RES (347)..(347): Selenocysteine
  MOD_RES (405)..(405): Selenocysteine
  MOD_RES (425)..(425): Selenocysteine
  MOD_RES (430)..(430): Selenocysteine
  MOD_RES (474)..(474): Selenocysteine
MERDEPPPSGGGGGGGSAGFLEPPAALPPPPRNGFCQDELAELDPGXISVSDDRAEQRXCLICGDRAXGLHYGIISCEGCKGFFKRSICNKRVYRCSRDKNCVMSRKQRNRCQYCRLLKCLQMGMNRKAIREDGMPGGRNKSIGPVQISEEEIERIMSGQEFEEEANHWSNHGDSDHSSPGNRASESNQPSPGSXLSSRSVELNGFMAFREQYMGMSVPPHYQYIPHLFSYSGHSPLLPQQARSLDPQSYSLIHQLLSAEDLEPLGXPMLIEDGYAVXQAELFALLCRLADELLFRQIAWIKKLPFFCELSIKDYXCLLSSXWQELILLSSLXVYSKQIFGELADVXAKYSPSDEELHRFSDEGMEVIERLIYLYHKFHQLKVSNEEYACMKAINFLNQDIRGLXSASQLEQLNKRYWYICQDFXEYKYXHQPNRFPDLMMCLPEIRYIAGKMVNVPLEQLPLLFKVVLHSCKXSVGKE

SEQ ID NO: 18266 - protein, 480 aa, Homo sapiens
  MOD_RES (47)..(47): Selenocysteine
  MOD_RES (59)..(59): Selenocysteine
  MOD_RES (68)..(68): Selenocysteine
  MOD_RES (195)..(195): Selenocysteine
  MOD_RES (268)..(268): Selenocysteine
  MOD_RES (279)..(279): Selenocysteine
  MOD_RES (317)..(317): Selenocysteine
  MOD_RES (323)..(323): Selenocysteine
  MOD_RES (334)..(334): Selenocysteine
  MOD_RES (348)..(348): Selenocysteine
  MOD_RES (406)..(406): Selenocysteine
  MOD_RES (426)..(426): Selenocysteine
  MOD_RES (431)..(431): Selenocysteine
  MOD_RES (475)..(475): Selenocysteine
MERDEPPPSGGGGGGGSAGFLEPPAALPPPPRNGFCQDELAELDPGXISVSDDRAEQRXCLICGDRAXGLHYGIISCEGCKGFFKRSICNKRVYRCSRDKNCVMSRKQRNRCQYCRLLKCLQMGMNRKAIREDGMPGGRNKSIGPVQISEEEIERIMSGQEFEEEANHWSNHGDSDHSSPGNRASESNQPSPGSXLSSSRSVELNGFMAFREQYMGMSVPPHYQYIPHLFSYSGHSPLLPQQARSLDPQSYSLIHQLLSAEDLEPLGXPMLIEDGYAVXQAELFALLCRLADELLFRQIAWIKKLPFFCELSIKDYXCLLSSXWQELILLSSLXVYSKQIFGELADVXAKYSPSDEELHRFSDEGMEVIERLIYLYHKFHQLKVSNEEYACMKAINFLNQDIRGLXSASQLEQLNKRYWYICQDFXEYKYXHQPNRFPDLMMCLPEIRYIAGKMVNVPLEQLPLLFKVVLHSCKXSVGKE

SEQ ID NO: 18267 - protein, 475 aa, Homo sapiens
  MOD_RES (47)..(47): Selenocysteine
  MOD_RES (55)..(55): Selenocysteine
  MOD_RES (64)..(64): Selenocysteine
  MOD_RES (191)..(191): Selenocysteine
  MOD_RES (263)..(263): Selenocysteine
  MOD_RES (274)..(274): Selenocysteine
  MOD_RES (312)..(312): Selenocysteine
  MOD_RES (318)..(318): Selenocysteine
  MOD_RES (329)..(329): Selenocysteine
  MOD_RES (343)..(343): Selenocysteine
  MOD_RES (401)..(401): Selenocysteine
  MOD_RES (421)..(421): Selenocysteine
  MOD_RES (426)..(426): Selenocysteine
  MOD_RES (470)..(470): Selenocysteine
MERDEPPPSGGGGGGGSAGFLEPPAALPPPPRNGFCQDELAELDPGXNDRAEQRXCLICGDRAXGLHYGIISCEGCKGFFKRSICNKRVYRCSRDKNCVMSRKQRNRCQYCRLLKCLQMGMNRKAIREDGMPGGRNKSIGPVQISEEEIERIMSGQEFEEEANHWSNHGDSDHSSPGNRASESNQPSPGSXLSSRSVELNGFMAFREQYMGMSVPPHYQYIPHLFSYSGHSPLLPQQARSLDPQSYSLIHQLLSAEDLEPLGXPMLIEDGYAVXQAELFALLCRLADELLFRQIAWIKKLPFFCELSIKDYXCLLSSXWQELILLSSLXVYSKQIFGELADVXAKYSPSDEELHRFSDEGMEVIERLIYLYHKFHQLKVSNEEYACMKAINFLNQDIRGLXSASQLEQLNKRYWYICQDFXEYKYXHQPNRFPDLMMCLPEIRYIAGKMVNVPLEQLPLLFKVVLHSCKXSVGKE

SEQ ID NO: 18268 - protein, 476 aa, Homo sapiens
  MOD_RES (47)..(47): Selenocysteine
  MOD_RES (55)..(55): Selenocysteine
  MOD_RES (64)..(64): Selenocysteine
  MOD_RES (191)..(191): Selenocysteine
  MOD_RES (264)..(264): Selenocysteine
  MOD_RES (275)..(275): Selenocysteine
  MOD_RES (313)..(313): Selenocysteine
  MOD_RES (319)..(319): Selenocysteine
  MOD_RES (330)..(330): Selenocysteine
  MOD_RES (344)..(344): Selenocysteine
  MOD_RES (402)..(402): Selenocysteine
  MOD_RES (422)..(422): Selenocysteine
  MOD_RES (427)..(427): Selenocysteine
  MOD_RES (471)..(471): Selenocysteine
MERDEPPPSGGGGGGGSAGFLEPPAALPPPPRNGFCQDELAELDPGXNDRAEQRXCLICGDRAXGLHYGIISCEGCKGFFKRSICNKRVYRCSRDKNCVMSRKQRNRCQYCRLLKCLQMGMNRKAIREDGMPGGRNKSIGPVQISEEEIERIMSGQEFEEEANHWSNHGDSDHSSPGNRASESNQPSPGSXLSSSRSVELNGFMAFREQYMGMSVPPHYQYIPHLFSYSGHSPLLPQQARSLDPQSYSLIHQLLSAEDLEPLGXPMLIEDGYAVXQAELFALLCRLADELLFRQIAWIKKLPFFCELSIKDYXCLLSSXWQELILLSSLXVYSKQIFGELADVXAKYSPSDEELHRFSDEGMEVIERLIYLYHKFHQLKVSNEEYACMKAINFLNQDIRGLXSASQLEQLNKRYWYICQDFXEYKYXHQPNRFPDLMMCLPEIRYIAGKMVNVPLEQLPLLFKVVLHSCKXSVGKE

SEQ ID NO: 18269 - protein, 233 aa, Homo sapiens
  MOD_RES (3)..(3): Selenocysteine
  MOD_RES (17)..(17): Selenocysteine
  MOD_RES (26)..(26): Selenocysteine
  MOD_RES (153)..(153): Selenocysteine
  MOD_RES (226)..(226): Selenocysteine
MEXWEVSVSDDRAEQRXCLICGDRAXGLHYGIISCEGCKGFFKRSICNKRVYRCSRDKNCVMSRKQRNRCQYCRLLKCLQMGMNRKAIREDGMPGGRNKSIGPVQISEEEIERIMSGQEFEEEANHWSNHGDSDHSSPGNRASESNQPSPGSXLSSSRSVELNGFMAFREQYMGMSVPPHYQYIPHLFSYSGHSPLLPQQARSLDPQSYSLIHQLLSAEDLEPLGXPMLIEDG

SEQ ID NO: 18270 - protein, 114 aa, Homo sapiens
  MOD_RES (8)..(8): Selenocysteine
  MOD_RES (14)..(14): Selenocysteine
  MOD_RES (27)..(27): Selenocysteine
  MOD_RES (38)..(38): Selenocysteine
  MOD_RES (53)..(53): Selenocysteine
  MOD_RES (105)..(105): Selenocysteine
MSQAELSXCSAPQXQRIFQEAVRKGNXQELQSLLQNMXNCEFNVNSFGPEGQXALHQSVIDGNLELVKLLVKFGADIRLANRDGWSALHIAAFGGHQDIVLYLIXKAKYAASGR

SEQ ID NO: 18271 - protein, 189 aa, Homo sapiens
  MOD_RES (2)..(2): Selenocysteine
  MOD_RES (20)..(20): Selenocysteine
  MOD_RES (35)..(35): Selenocysteine
  MOD_RES (50)..(50): Selenocysteine
  MOD_RES (58)..(58): Selenocysteine
  MOD_RES (74)..(74): Selenocysteine
  MOD_RES (122)..(122): Selenocysteine
  MOD_RES (124)..(124): Selenocysteine
  MOD_RES (127)..(127): Selenocysteine
  MOD_RES (144)..(144): Selenocysteine
  MOD_RES (148)..(148): Selenocysteine
  MOD_RES (158)..(158): Selenocysteine
  MOD_RES (178)..(178): Selenocysteine
MXEYKLVVVGAGGVGKSALXIQLIQNHFVDEYDPXIEDSYRKQVVIDGEXCLLDILDXAGQEEYSAMRDQYMRXGEGFLCVFAINNSKSFADINLYREQIKRVKDSDDVPMVLVGNKCDLPXRXVDXKQAHELAKSYGIPFIEXSAKXRQGVEDAFYXLVREIRQYRMKKLNSSDDGXQGCMGLPCVVM

SEQ ID NO: 18272 - protein, 82 aa, Homo sapiens
  MOD_RES (8)..(8): Selenocysteine
  MOD_RES (28)..(28): Selenocysteine
  MOD_RES (35)..(35): Selenocysteine
  MOD_RES (37)..(38): Selenocysteine
MSEGESQXVLSSGSDPKVESSSSAPGLXSVSPPVXSXXSAASPEEEEESEDESEILEESPCGRWQKRREEVNQRNVPGIDSA

SEQ ID NO: 18273 - protein, 155 aa, Homo sapiens
  MOD_RES (8)..(8): Selenocysteine
  MOD_RES (28)..(28): Selenocysteine
  MOD_RES (35)..(35): Selenocysteine
  MOD_RES (37)..(38): Selenocysteine
  MOD_RES (88)..(88): Selenocysteine
  MOD_RES (150)..(150): Selenocysteine
MSEGESQXVLSSGSDPKVESSSSAPGLXSVSPPVXSXXSAASPEEEEESEDESEILEESPCGRWQKRREEVNQRNVPGIDSAYLAMDXEEGVEVVWNEVQFSERKNYKLQEEKVRAVFDNLIQLEHLNIVKFHKYWADIKENKARVIFIXEYMSS

SEQ ID NO: 18274 - protein, 535 aa, Homo sapiens
  MOD_RES (8)..(8): Selenocysteine
  MOD_RES (28)..(28): Selenocysteine
  MOD_RES (35)..(35): Selenocysteine
  MOD_RES (37)..(38): Selenocysteine
  MOD_RES (88)..(88): Selenocysteine
  MOD_RES (150)..(150): Selenocysteine
  MOD_RES (165)..(165): Selenocysteine
  MOD_RES (171)..(171): Selenocysteine
  MOD_RES (182)..(182): Selenocysteine
  MOD_RES (204)..(204): Selenocysteine
  MOD_RES (207)..(207): Selenocysteine
  MOD_RES (225)..(225): Selenocysteine
  MOD_RES (232)..(232): Selenocysteine
  MOD_RES (251)..(251): Selenocysteine
  MOD_RES (254)..(255): Selenocysteine
  MOD_RES (317)..(317): Selenocysteine
  MOD_RES (357)..(357): Selenocysteine
  MOD_RES (362)..(362): Selenocysteine
  MOD_RES (380)..(380): Selenocysteine
  MOD_RES (405)..(405): Selenocysteine
  MOD_RES (421)..(421): Selenocysteine
  MOD_RES (431)..(431): Selenocysteine
  MOD_RES (433)..(433): Selenocysteine
  MOD_RES (441)..(441): Selenocysteine
  MOD_RES (463)..(463): Selenocysteine
  MOD_RES (508)..(508): Selenocysteine
  MOD_RES (514)..(514): Selenocysteine
  MOD_RES (525)..(525): Selenocysteine
  MOD_RES (532)..(532): Selenocysteine
MSEGESQXVLSSGSDPKVESSSSAPGLXSVSPPVXSXXSAASPEEEEESEDESEILEESPCGRWQKRREEVNQRNVPGIDSAYLAMDXEEGVEVVWNEVQFSERKNYKLQEEKVRAVFDNLIQLEHLNIVKFHKYWADIKENKARVIFIXEYMSSGSLKQFLKKXKKNHKXMNEKAWKRWCXQILSALSYLHSCDPPIIHGNLXCDXIFIQHNGLIKIGSVAPDXINNHVKXCREEQKNLHFFAPEYGEVXNVXXAVDIYSFGMCALEMAVLEIQGNGESSYVPQEAISSAIQLLEDPLQREFIQKCLQSEPARRPXARELLFHPALFEVPSLKLLAAHCIVGHQHMIPENALEEIXKNMDXSAVLAEIPAGPGREPVQXLYSQSPALELDKFLEDVRNGIYPLXAFGLPRPQQPQQEEVXSPVVPPSVKXPXPEPAEVEXRKVVLMQCNIESVEEGVKHHLXLLLKLEDKLNRHLSCDLMPNENIPELAAELVQLGFISEADQSRLXSLLEEXLNKFNFARNSXLNSAAVXVSS

SEQ ID NO: 18275 - protein, 543 aa, Homo sapiens
  MOD_RES (8)..(8): Selenocysteine
  MOD_RES (28)..(28): Selenocysteine
  MOD_RES (35)..(35): Selenocysteine
  MOD_RES (37)..(38): Selenocysteine
  MOD_RES (88)..(88): Selenocysteine
  MOD_RES (150)..(150): Selenocysteine
  MOD_RES (165)..(165): Selenocysteine
  MOD_RES (171)..(171): Selenocysteine
  MOD_RES (182)..(182): Selenocysteine
  MOD_RES (204)..(204): Selenocysteine
  MOD_RES (207)..(207): Selenocysteine
  MOD_RES (233)..(233): Selenocysteine
  MOD_RES (240)..(240): Selenocysteine
  MOD_RES (259)..(259): Selenocysteine
  MOD_RES (262)..(263): Selenocysteine
  MOD_RES (325)..(325): Selenocysteine
  MOD_RES (365)..(365): Selenocysteine
  MOD_RES (370)..(370): Selenocysteine
  MOD_RES (388)..(388): Selenocysteine
  MOD_RES (413)..(413): Selenocysteine
  MOD_RES (429)..(429): Selenocysteine
  MOD_RES (439)..(439): Selenocysteine
  MOD_RES (441)..(441): Selenocysteine
  MOD_RES (449)..(449): Selenocysteine
  MOD_RES (471)..(471): Selenocysteine
  MOD_RES (516)..(516): Selenocysteine
  MOD_RES (522)..(522): Selenocysteine
  MOD_RES (533)..(533): Selenocysteine
  MOD_RES (540)..(540): Selenocysteine
MSEGESQXVLSSGSDPKVESSSSAPGLXSVSPPVXSXXSAASPEEEEESEDESEILEESPCGRWQKRREEVNQRNVPGIDSAYLAMDXEEGVEVVWNEVQFSERKNYKLQEEKVRAVFDNLIQLEHLNIVKFHKYWADIKENKARVIFIXEYMSSGSLKQFLKKXKKNHKXMNEKAWKRWCXQILSALSYLHSCDPPIIHGNLXCDXIFIQHNGLIKIGSVFHRIFANVAPDXINNHVKXCREEQKNLHFFAPEYGEVXNVXXAVDIYSFGMCALEMAVLEIQGNGESSYVPQEAISSAIQLLEDPLQREFIQKCLQSEPARRPXARELLFHPALFEVPSLKLLAAHCIVGHQHMIPENALEEIXKNMDXSAVLAEIPAGPGREPVQXLYSQSPALELDKFLEDVRNGIYPLXAFGLPRPQQPQQEEVXSPVVPPSVKXPXPEPAEVEXRKVVLMQCNIESVEEGVKHHLXLLLKLEDKLNRHLSCDLMPNENIPELAAELVQLGFISEADQSRLXSLLEEXLNKFNFARNSXLNSAAVXVSS

SEQ ID NO: 18276 - protein, 501 aa, Homo sapiens
  MOD_RES (55)..(55): Selenocysteine
  MOD_RES (61)..(61): Selenocysteine
  MOD_RES (89)..(89): Selenocysteine
  MOD_RES (112)..(112): Selenocysteine
  MOD_RES (123)..(123): Selenocysteine
  MOD_RES (138)..(138): Selenocysteine
  MOD_RES (155)..(155): Selenocysteine
  MOD_RES (177)..(177): Selenocysteine
  MOD_RES (180)..(180): Selenocysteine
  MOD_RES (235)..(235): Selenocysteine
  MOD_RES (256)..(256): Selenocysteine
  MOD_RES (260)..(260): Selenocysteine
  MOD_RES (263)..(263): Selenocysteine
  MOD_RES (336)..(336): Selenocysteine
  MOD_RES (388)..(388): Selenocysteine
  MOD_RES (409)..(409): Selenocysteine
  MOD_RES (411)..(411): Selenocysteine
  MOD_RES (419)..(419): Selenocysteine
  MOD_RES (441)..(441): Selenocysteine
  MOD_RES (455)..(455): Selenocysteine
  MOD_RES (461)..(461): Selenocysteine
  MOD_RES (492)..(492): Selenocysteine
  MOD_RES (499)..(499): Selenocysteine
MAAPEPAPRRAREREREREDESEDESDILEESPCGRWQKRREQVNQGNMPGLQSXFLAMDXEEGVEVVWNELHFGDRKAFAAHEEKIQXVFEQLVLVDHPNIVKLHKYWLDXSEACARVIFIXEYVSSGSLKQFLKKXKKNHKAMNARAWKRWCXQILSALSFLHACSPPIIHGNLXSDXIFIQHNGLIKIGSVWHRIFSNALPDDLRSPIRAEREELRNLHFFPPEYGEVADGXAVDIFSFGMCALEMAVLEIQXNGDXRVXEEAIARARHSLSDPNMREFILCCLARDPARRPSAHSLLFHRVLFEVHSLKLLAAHCFIQHQYLMPENVVEEKXKAMDLHAVLAELPRPRRPPLQWRYSEVSFMELDKFLEDVRNGIYPLMNFAAXRPLGLPRVLAPPPEEVQKAKXPXPEPFDSEXRKVIQMQCNLERSEDKARWHLXLLLVLEDRLHRQLXYDLLPXDSAQDLASELVHYGFLHEDDRMKLAAFLESXFLKYRGXQA

SEQ ID NO: 18277 - protein, 232 aa, Homo sapiens
  MOD_RES (7)..(7): Selenocysteine
  MOD_RES (13)..(13): Selenocysteine
  MOD_RES (41)..(41): Selenocysteine
  MOD_RES (64)..(64): Selenocysteine
  MOD_RES (75)..(75): Selenocysteine
  MOD_RES (90)..(90): Selenocysteine
  MOD_RES (107)..(107): Selenocysteine
  MOD_RES (129)..(129): Selenocysteine
  MOD_RES (132)..(132): Selenocysteine
  MOD_RES (187)..(187): Selenocysteine
  MOD_RES (208)..(208): Selenocysteine
  MOD_RES (212)..(212): Selenocysteine
  MOD_RES (215)..(215): Selenocysteine
MPGLQSXFLAMDXEEGVEVVWNELHFGDRKAFAAHEEKIQXVFEQLVLVDHPNIVKLHKYWLDXSEACARVIFIXEYVSSGSLKQFLKKXKKNHKAMNARAWKRWCXQILSALSFLHACSPPIIHGNLXSDXIFIQHNGLIKIGSVWHRIFSNALPDDLRSPIRAEREELRNLHFFPPEYGEVADGXAVDIFSFGMCALEMAVLEIQXNGDXRVXEEAIARARHSLSDPNMR

SEQ ID NO: 18278 - protein, 168 aa, Homo sapiens
  MOD_RES (1)..(1): Any amino acid
  MOD_RES (20)..(20): Selenocysteine
  MOD_RES (22)..(22): Selenocysteine
  MOD_RES (30)..(30): Selenocysteine
  MOD_RES (52)..(52): Selenocysteine
  MOD_RES (66)..(66): Selenocysteine
  MOD_RES (95)..(95): Selenocysteine
  MOD_RES (116)..(116): Selenocysteine
  MOD_RES (138)..(138): Selenocysteine
  MOD_RES (147)..(147): Selenocysteine
XLGLPRVLAPPPEEVQKAKXPXPEPFDSEXRKVIQMQCNLERSEDKARWHLXLLLVLEDRLHRQLXYDLLPRRPDEAGRLPGEHLPQVPWDPGLXRSPSPRGPCRGAAWAGHVGEXPAPWGCPPPCAWEHKGPGSEGXPRLLRVGLXLPWAPRGWGVGVGEPLGLPGP

SEQ ID NO: 18279 - protein, 210 aa, Homo sapiens
  MOD_RES (7)..(7): Selenocysteine
  MOD_RES (9)..(9): Selenocysteine
  MOD_RES (14)..(14): Selenocysteine
  MOD_RES (31)..(31): Selenocysteine
  MOD_RES (33)..(33): Selenocysteine
  MOD_RES (51)..(51): Selenocysteine
  MOD_RES (62)..(62): Selenocysteine
  MOD_RES (68)..(68): Selenocysteine
  MOD_RES (87)..(87): Selenocysteine
  MOD_RES (109)..(109): Selenocysteine
  MOD_RES (118)..(118): Selenocysteine
  MOD_RES (123)..(124): Selenocysteine
  MOD_RES (189)..(189): Selenocysteine
  MOD_RES (201)..(201): Selenocysteine
MEEHGVXQXEHMAXIEAHAVAQQVQQVHVAXYXEHSMLSADEDSPSSPEDXSYDDSDILNSXAADEVXAHLAAAGPVGMAAAAAVAXGKKRKRPHVFESNPSIRKRQQXRLLRKLRAXLDEYXXRVGQQAIVLCISPSKPNPVFKVFGAAPLENVVRKYKSMILEDLESALAEHAPAPQEVNSELPPLXIDGIPVSVDKMXQAQLRAFIP

SEQ ID NO: 18280 - protein, 503 aa, Homo sapiens
  MOD_RES (7)..(7): Selenocysteine
  MOD_RES (9)..(9): Selenocysteine
  MOD_RES (14)..(14): Selenocysteine
  MOD_RES (31)..(31): Selenocysteine
  MOD_RES (33)..(33): Selenocysteine
  MOD_RES (51)..(51): Selenocysteine
  MOD_RES (62)..(62): Selenocysteine
  MOD_RES (68)..(68): Selenocysteine
  MOD_RES (87)..(87): Selenocysteine
  MOD_RES (109)..(109): Selenocysteine
  MOD_RES (118)..(118): Selenocysteine
  MOD_RES (123)..(124): Selenocysteine
  MOD_RES (189)..(189): Selenocysteine
  MOD_RES (201)..(201): Selenocysteine
  MOD_RES (217)..(217): Selenocysteine
  MOD_RES (249)..(249): Selenocysteine
  MOD_RES (259)..(259): Selenocysteine
  MOD_RES (264)..(264): Selenocysteine
  MOD_RES (287)..(287): Selenocysteine
  MOD_RES (289)..(289): Selenocysteine
  MOD_RES (292)..(292): Selenocysteine
  MOD_RES (294)..(294): Selenocysteine
  MOD_RES (305)..(305): Selenocysteine
  MOD_RES (309)..(309): Selenocysteine
  MOD_RES (316)..(316): Selenocysteine
  MOD_RES (324)..(324): Selenocysteine
  MOD_RES (327)..(327): Selenocysteine
  MOD_RES (330)..(330): Selenocysteine
  MOD_RES (339)..(340): Selenocysteine
  MOD_RES (342)..(342): Selenocysteine
  MOD_RES (362)..(362): Selenocysteine
  MOD_RES (369)..(369): Selenocysteine
  MOD_RES (372)..(373): Selenocysteine
  MOD_RES (379)..(379): Selenocysteine
  MOD_RES (401)..(401): Selenocysteine
  MOD_RES (403)..(403): Selenocysteine
  MOD_RES (417)..(417): Selenocysteine
  MOD_RES (422)..(422): Selenocysteine
  MOD_RES (435)..(435): Selenocysteine
  MOD_RES (443)..(443): Selenocysteine
  MOD_RES (461)..(461): Selenocysteine
  MOD_RES (464)..(464): Selenocysteine
  MOD_RES (481)..(482): Selenocysteine
  MOD_RES (490)..(490): Selenocysteine
  MOD_RES (500)..(500): Selenocysteine
MEEHGVXQXEHMAXIEAHAVAQQVQQVHVAXYXEHSMLSADEDSPSSPEDXSYDDSDILNSXAADEVXAHLAAAGPVGMAAAAAVAXGKKRKRPHVFESNPSIRKRQQXRLLRKLRAXLDEYXXRVGQQAIVLCISPSKPNPVFKVFGAAPLENVVRKYKSMILEDLESALAEHAPAPQEVNSELPPLXIDGIPVSVDKMXQAQLRAFIPEMLKYSXGRGKPGWGKESCKPIWWPEDIPWANVRSDVRXEEQKQRVSWXQALRXIVKNCYKQHGREDLLYAFEDQQXQXQAXAXHSIAHLVPSQXVVQXFSNPDGXVSLIQVGXGAXVAXLADASELPXXVXVAQVNYSAVADGEVEQNWAXLQGGEMXIQXXQASEAXQAVASLAEAAVAASQEMQQGAXVXMALNSEAAAHAVAXLAEAXLQGGGQIVLSGEXAAAVGALXGVQDANGLVQIPVSMYQXVVXSLAQGNGPVQVAMAPVXXRISDSAVXMDGQAVEVVXLEQ

SEQ ID NO: 18281 - protein, 522 aa, Homo sapiens
  MOD_RES (7)..(7): Selenocysteine
  MOD_RES (9)..(9): Selenocysteine
  MOD_RES (14)..(14): Selenocysteine
  MOD_RES (31)..(31): Selenocysteine
  MOD_RES (33)..(33): Selenocysteine
  MOD_RES (51)..(51): Selenocysteine
  MOD_RES (62)..(62): Selenocysteine
  MOD_RES (68)..(68): Selenocysteine
  MOD_RES (87)..(87): Selenocysteine
  MOD_RES (109)..(109): Selenocysteine
  MOD_RES (118)..(118): Selenocysteine
  MOD_RES (123)..(124): Selenocysteine
  MOD_RES (189)..(189): Selenocysteine
  MOD_RES (201)..(201): Selenocysteine
  MOD_RES (217)..(217): Selenocysteine
  MOD_RES (249)..(249): Selenocysteine
  MOD_RES (259)..(259): Selenocysteine
  MOD_RES (264)..(264): Selenocysteine
  MOD_RES (287)..(287): Selenocysteine
  MOD_RES (289)..(289): Selenocysteine
  MOD_RES (292)..(292): Selenocysteine
  MOD_RES (294)..(294): Selenocysteine
  MOD_RES (305)..(305): Selenocysteine
  MOD_RES (309)..(309): Selenocysteine
  MOD_RES (316)..(316): Selenocysteine
  MOD_RES (324)..(324): Selenocysteine
  MOD_RES (327)..(327): Selenocysteine
  MOD_RES (330)..(330): Selenocysteine
  MOD_RES (339)..(340): Selenocysteine
  MOD_RES (342)..(342): Selenocysteine
  MOD_RES (362)..(362): Selenocysteine
  MOD_RES (369)..(369): Selenocysteine
  MOD_RES (372)..(373): Selenocysteine
  MOD_RES (379)..(379): Selenocysteine
  MOD_RES (401)..(401): Selenocysteine
  MOD_RES (403)..(403): Selenocysteine
  MOD_RES (417)..(417): Selenocysteine
  MOD_RES (422)..(422): Selenocysteine
  MOD_RES (435)..(435): Selenocysteine
  MOD_RES (443)..(443): Selenocysteine
  MOD_RES (464)..(464): Selenocysteine
  MOD_RES (468)..(468): Selenocysteine
  MOD_RES (480)..(480): Selenocysteine
  MOD_RES (483)..(483): Selenocysteine
  MOD_RES (500)..(501): Selenocysteine
  MOD_RES (509)..(509): Selenocysteine
  MOD_RES (519)..(519): Selenocysteine
MEEHGVXQXEHMAXIEAHAVAQQVQQVHVAXYXEHSMLSADEDSPSSPEDXSYDDSDILNSXAADEVXAHLAAAGPVGMAAAAAVAXGKKRKRPHVFESNPSIRKRQQXRLLRKLRAXLDEYXXRVGQQAIVLCISPSKPNPVFKVFGAAPLENVVRKYKSMILEDLESALAEHAPAPQEVNSELPPLXIDGIPVSVDKMXQAQLRAFIPEMLKYSXGRGKPGWGKESCKPIWWPEDIPWANVRSDVRXEEQKQRVSWXQALRXIVKNCYKQHGREDLLYAFEDQQXQXQAXAXHSIAHLVPSQXVVQXFSNPDGXVSLIQVGXGAXVAXLADASELPXXVXVAQVNYSAVADGEVEQNWAXLQGGEMXIQXXQASEAXQAVASLAEAAVAASQEMQQGAXVXMALNSEAAAHAVAXLAEAXLQGGGQIVLSGEXAAAVGALXGVQDANGLFMADRAGRKWILXDKAXGLVQIPVSMYQXVVXSLAQGNGPVQVAMAPVXXRISDSAVXMDGQAVEVVXLEQ

SEQ ID NO: 18282 - protein, 296 aa, Homo sapiens
  MOD_RES (21)..(21): Selenocysteine
  MOD_RES (43)..(43): Selenocysteine
  MOD_RES (48)..(48): Selenocysteine
  MOD_RES (110)..(110): Selenocysteine
  MOD_RES (128)..(128): Selenocysteine
  MOD_RES (141)..(141): Selenocysteine
  MOD_RES (156)..(156): Selenocysteine
  MOD_RES (173)..(173): Selenocysteine
  MOD_RES (187)..(187): Selenocysteine
  MOD_RES (195)..(195): Selenocysteine
  MOD_RES (202)..(202): Selenocysteine
  MOD_RES (207)..(207): Selenocysteine
  MOD_RES (211)..(212): Selenocysteine
  MOD_RES (214)..(214): Selenocysteine
  MOD_RES (218)..(218): Selenocysteine
  MOD_RES (224)..(224): Selenocysteine
  MOD_RES (226)..(226): Selenocysteine
  MOD_RES (228)..(229): Selenocysteine
  MOD_RES (231)..(231): Selenocysteine
  MOD_RES (243)..(243): Selenocysteine
  MOD_RES (272)..(272): Selenocysteine
  MOD_RES (287)..(287): Selenocysteine
  MOD_RES (289)..(289): Selenocysteine
MEIYSPDMSEVAAERSSSPSXQLSADPSLDGLPAAEDMPEPQXEDGRXPGLVGLAVPCCACLEAERLRGCLNSEKICIVPILACLVSLCLCIAGLKWVFVDKIFEYDSPXHLDPGGLGQDPIISLDAXAASAVWVSSEAYXSPVSRAQSESEVQVXVQGDKAVVSFEPSAAPXPKNRIFAFSFLPSXAPSFPSPXRNPEVRXPKSAXQPQXXEXNLQXAPKLSXSXSXXGXSHLVKCAEKEKXFCVNGGECFMVKDLSNPSRYLCKCPNEFXGDRCQNYVMASFYSXSXPFLSLPE

SEQ ID NO: 18283 - protein, 590 aa, Homo sapiens
  MOD_RES (11)..(12): Selenocysteine
  MOD_RES (38)..(38): Selenocysteine
  MOD_RES (107)..(107): Selenocysteine
  MOD_RES (114)..(114): Selenocysteine
  MOD_RES (116)..(116): Selenocysteine
  MOD_RES (118)..(119): Selenocysteine
  MOD_RES (121)..(121): Selenocysteine
  MOD_RES (133)..(133): Selenocysteine
  MOD_RES (162)..(162): Selenocysteine
  MOD_RES (195)..(195): Selenocysteine
  MOD_RES (197)..(197): Selenocysteine
  MOD_RES (217)..(217): Selenocysteine
  MOD_RES (280)..(280): Selenocysteine
  MOD_RES (284)..(284): Selenocysteine
  MOD_RES (288)..(288): Selenocysteine
  MOD_RES (290)..(290): Selenocysteine
  MOD_RES (295)..(296): Selenocysteine
  MOD_RES (298)..(298): Selenocysteine
  MOD_RES (300)..(300): Selenocysteine
  MOD_RES (310)..(310): Selenocysteine
  MOD_RES (335)..(335): Selenocysteine
  MOD_RES (345)..(345): Selenocysteine
  MOD_RES (361)..(361): Selenocysteine
  MOD_RES (379)..(380): Selenocysteine
  MOD_RES (391)..(391): Selenocysteine
  MOD_RES (410)..(410): Selenocysteine
  MOD_RES (432)..(432): Selenocysteine
  MOD_RES (477)..(478): Selenocysteine
  MOD_RES (500)..(500): Selenocysteine
  MOD_RES (516)..(516): Selenocysteine
  MOD_RES (527)..(527): Selenocysteine
  MOD_RES (536)..(536): Selenocysteine
  MOD_RES (552)..(552): Selenocysteine
  MOD_RES (562)..(562): Selenocysteine
  MOD_RES (570)..(570): Selenocysteine
MGKGRAGRVGXXALPPRLKEMKSQESAAGSKLVLRCEXSSEYSSLRFKWFKNGNELNRKNKPQNIKIQKKPGKSELRINKASLADSGEYMCKVISKLGNDSASANIXIVESNAXSXSXXGXSHLVKCAEKEKXFCVNGGECFMVKDLSNPSRYLCKCPNEFXGDRCQNYVMASFYKHLGIEFMEAEELYQKRVLXIXGICIALLVVGIMCVVAYCKXKKQRKKLHDRLRQSLRSERNNMMNIANGPHHPNPPPENVQLVNQYVSKNVISSEHIVEREAEXSFSXSHYXSXAHHSXXVXQXPSHSWSNGHXESILSESHSVIVMSSVENSRHSSPXGGPRGRLNGXGGPRECNSFLRHAREXPDSYRDSPHSERYVSAMXXPARMSPVDFHXPSSPKSPPSEMSPPVSSMXVSMPSMAVSPFMEEERPLLLVXPPRLREKKFDHHPQQFSSFHHNPAHDSNSLPASPLRIVEDEEYEXXQEYEPAQEPVKKLANSRRAKRXKPNGHIANRLEVDSNXSSQSSNSESEXEDERVGEDXPFLGIQNPLAASLEAXPAFRLADSRXNPAGRFSXQEEIQARLSSVIANQDPIAV

SEQ ID NO: 18284 - protein, 481 aa, Homo sapiens
  MOD_RES (11)..(12): Selenocysteine
  MOD_RES (38)..(38): Selenocysteine
  MOD_RES (107)..(107): Selenocysteine
  MOD_RES (116)..(116): Selenocysteine
  MOD_RES (122)..(122): Selenocysteine
  MOD_RES (131)..(131): Selenocysteine
  MOD_RES (133)..(133): Selenocysteine
  MOD_RES (135)..(136): Selenocysteine
  MOD_RES (138)..(138): Selenocysteine
  MOD_RES (150)..(150): Selenocysteine
  MOD_RES (179)..(179): Selenocysteine
  MOD_RES (212)..(212): Selenocysteine
  MOD_RES (214)..(214): Selenocysteine
  MOD_RES (234)..(234): Selenocysteine
  MOD_RES (297)..(297): Selenocysteine
  MOD_RES (301)..(301): Selenocysteine
  MOD_RES (305)..(305): Selenocysteine
  MOD_RES (307)..(307): Selenocysteine
  MOD_RES (312)..(313): Selenocysteine
  MOD_RES (315)..(315): Selenocysteine
  MOD_RES (317)..(317): Selenocysteine
  MOD_RES (327)..(327): Selenocysteine
  MOD_RES (352)..(352): Selenocysteine
  MOD_RES (362)..(362): Selenocysteine
  MOD_RES (378)..(378): Selenocysteine
  MOD_RES (396)..(397): Selenocysteine
  MOD_RES (408)..(408): Selenocysteine
  MOD_RES (427)..(427): Selenocysteine
  MOD_RES (449)..(449): Selenocysteine
MGKGRAGRVGXXALPPRLKEMKSQESAAGSKLVLRCEXSSEYSSLRFKWFKNGNELNRKNKPQNIKIQKKPGKSELRINKASLADSGEYMCKVISKLGNDSASANIXIVESNEIIXGMPASXEGAYVSSAXSXSXXGXSHLVKCAEKEKXFCVNGGECFMVKDLSNPSRYLCKCPNEFXGDRCQNYVMASFYKHLGIEFMEAEELYQKRVLXIXGICIALLVVGIMCVVAYCKXKKQRKKLHDRLRQSLRSERNNMMNIANGPHHPNPPPENVQLVNQYVSKNVISSEHIVEREAEXSFSXSHYXSXAHHSXXVXQXPSHSWSNGHXESILSESHSVIVMSSVENSRHSSPXGGPRGRLNGXGGPRECNSFLRHAREXPDSYRDSPHSERYVSAMXXPARMSPVDFHXPSSPKSPPSEMSPPVSSMXVSMPSMAVSPFMEEERPLLLVXPPRLREKKFDHHPQQFSSFHHNPAHDSNSLPA

SEQ ID NO: 18285 - protein, 193 aa, Homo sapiens
  MOD_RES (12)..(12): Selenocysteine
  MOD_RES (42)..(42): Selenocysteine
  MOD_RES (111)..(111): Selenocysteine
  MOD_RES (120)..(120): Selenocysteine
  MOD_RES (126)..(126): Selenocysteine
  MOD_RES (143)..(143): Selenocysteine
  MOD_RES (148)..(148): Selenocysteine
  MOD_RES (152)..(152): Selenocysteine
  MOD_RES (154)..(154): Selenocysteine
  MOD_RES (156)..(157): Selenocysteine
  MOD_RES (159)..(159): Selenocysteine
  MOD_RES (171)..(171): Selenocysteine
MKKRNEMIFLAXLKNKALPPRLKEMKSQESAAGSKLVLRCEXSSEYSSLRFKWFKNGNELNRKNKPQNIKIQKKPGKSELRINKASLADSGEYMCKVISKLGNDSASANIXIVESNEIIXGMPASXEGAYVSSESPIRISVSXEGANXSSSXSXSXXGXSHLVKCAEKEKXFCVNGGECFMVKDLSNPSRYLC

SEQ ID NO: 18286 - protein, 135 aa, Homo sapiens
  MOD_RES (13)..(13): Selenocysteine
  MOD_RES (15)..(15): Selenocysteine
  MOD_RES (17)..(17): Selenocysteine
  MOD_RES (19)..(20): Selenocysteine
  MOD_RES (22)..(22): Selenocysteine
  MOD_RES (34)..(34): Selenocysteine
  MOD_RES (63)..(63): Selenocysteine
  MOD_RES (88)..(88): Selenocysteine
  MOD_RES (90)..(90): Selenocysteine
  MOD_RES (110)..(110): Selenocysteine
MQIPKHISIEDIXAXSXSXXGXSHLVKCAEKEKXFCVNGGECFMVKDLSNPSRYLCKCPNEFXGDRCQNYVMASFYKAEELYQKRVLXIXGICIALLVVGIMCVVAYCKXKKQRKKLHDRLRQSLRSERNNMMNI

SEQ ID NO: 18287 - protein, 101 aa, Homo sapiens
  MOD_RES (13)..(13): Selenocysteine
  MOD_RES (15)..(15): Selenocysteine
  MOD_RES (17)..(17): Selenocysteine
  MOD_RES (19)..(20): Selenocysteine
  MOD_RES (22)..(22): Selenocysteine
  MOD_RES (34)..(34): Selenocysteine
  MOD_RES (63)..(63): Selenocysteine
  MOD_RES (96)..(96): Selenocysteine
  MOD_RES (98)..(98): Selenocysteine
MQIPKHISIEDIXAXSXSXXGXSHLVKCAEKEKXFCVNGGECFMVKDLSNPSRYLCKCPNEFXGDRCQNYVMASFYKHLGIEFMEAEELYQKRVLXIXGIC

SEQ ID NO: 18288 - protein, 129 aa, Homo sapiens
  MOD_RES (13)..(13): Selenocysteine
  MOD_RES (15)..(15): Selenocysteine
  MOD_RES (17)..(17): Selenocysteine
  MOD_RES (19)..(20): Selenocysteine
  MOD_RES (22)..(22): Selenocysteine
  MOD_RES (34)..(34): Selenocysteine
  MOD_RES (63)..(63): Selenocysteine
  MOD_RES (68)..(68): Selenocysteine
  MOD_RES (91)..(91): Selenocysteine
  MOD_RES (93)..(93): Selenocysteine
  MOD_RES (113)..(113): Selenocysteine
MQIPKHISIEDIXAXSXSXXGXSHLVKCAEKEKXFCVNGGECFMVKDLSNPSRYLCKCQPGFXGARCXENVPMKVQNQEKAEELYQKRVLXIXGICIALLVVGIMCVVAYCKXKKQRKKLHDRLRQSLR

SEQ ID NO: 18289 - protein, 308 aa, Homo sapiens
  MOD_RES (13)..(13): Selenocysteine
  MOD_RES (15)..(15): Selenocysteine
  MOD_RES (17)..(17): Selenocysteine
  MOD_RES (19)..(20): Selenocysteine
  MOD_RES (22)..(22): Selenocysteine
  MOD_RES (34)..(34): Selenocysteine
  MOD_RES (63)..(63): Selenocysteine
  MOD_RES (68)..(68): Selenocysteine
  MOD_RES (91)..(91): Selenocysteine
  MOD_RES (93)..(93): Selenocysteine
  MOD_RES (113)..(113): Selenocysteine
  MOD_RES (176)..(176): Selenocysteine
  MOD_RES (180)..(180): Selenocysteine
  MOD_RES (184)..(184): Selenocysteine
  MOD_RES (186)..(186): Selenocysteine
  MOD_RES (191)..(192): Selenocysteine
  MOD_RES (194)..(194): Selenocysteine
  MOD_RES (196)..(196): Selenocysteine
  MOD_RES (206)..(206): Selenocysteine
  MOD_RES (231)..(231): Selenocysteine
  MOD_RES (241)..(241): Selenocysteine
  MOD_RES (257)..(257): Selenocysteine
  MOD_RES (294)..(294): Selenocysteine
MQIPKHISIEDIXAXSXSXXGXSHLVKCAEKEKXFCVNGGECFMVKDLSNPSRYLCKCQPGFXGARCXENVPMKVQNQEKAEELYQKRVLXIXGICIALLVVGIMCVVAYCKXKKQRKKLHDRLRQSLRSERNNMMNIANGPHHPNPPPENVQLVNQYVSKNVISSEHIVEREAEXSFSXSHYXSXAHHSXXVXQXPSHSWSNGHXESILSESHSVIVMSSVENSRHSSPXGGPRGRLNGXGGPRECNSFLRHAREXPDSYRDSPHSERHNLIAELRRNKAHRSKCMQIQLSAXHLRSSSIPHLGFIL

SEQ ID NO: 18290 - protein, 254 aa, Homo sapiens
  MOD_RES (41)..(41): Selenocysteine
  MOD_RES (139)..(139): Selenocysteine
  MOD_RES (145)..(145): Selenocysteine
  MOD_RES (182)..(182): Selenocysteine
  MOD_RES (187)..(187): Selenocysteine
  MOD_RES (216)..(216): Selenocysteine
  MOD_RES (232)..(232): Selenocysteine
MRWRRAPRRSGRPGPRAQRPGSAARSSPPLPLLPLLLLLGXAALAPGAAAGNEAAPAGASVCYSSPPSVGSVQELAQRAAVVIEGKVHPQRRQQGALDRKAAAAAGEAGAWGGDREPPAAGPRALGPPAEEPLLAANGXVPSWPXAPVPSAGEPGEEAPYLVKVHQVWAVKAGGLKKDSLLXVRLGXWGHPAFPSCGRLKEDSRYIFFMEPDANSXSRAPAAFRASFPPLEXGRNLKKEVSRVLCKRCAFPPGL

SEQ ID NO: 18291 - protein, 422 aa, Homo sapiens
  MOD_RES (41)..(41): Selenocysteine
  MOD_RES (139)..(139): Selenocysteine
  MOD_RES (145)..(145): Selenocysteine
  MOD_RES (182)..(182): Selenocysteine
  MOD_RES (187)..(187): Selenocysteine
  MOD_RES (216)..(216): Selenocysteine
  MOD_RES (232)..(232): Selenocysteine
  MOD_RES (274)..(274): Selenocysteine
  MOD_RES (343)..(343): Selenocysteine
  MOD_RES (350)..(350): Selenocysteine
  MOD_RES (352)..(352): Selenocysteine
  MOD_RES (354)..(355): Selenocysteine
  MOD_RES (357)..(357): Selenocysteine
  MOD_RES (369)..(369): Selenocysteine
  MOD_RES (398)..(398): Selenocysteine
  MOD_RES (413)..(413): Selenocysteine
  MOD_RES (415)..(415): Selenocysteine
MRWRRAPRRSGRPGPRAQRPGSAARSSPPLPLLPLLLLLGXAALAPGAAAGNEAAPAGASVCYSSPPSVGSVQELAQRAAVVIEGKVHPQRRQQGALDRKAAAAAGEAGAWGGDREPPAAGPRALGPPAEEPLLAANGXVPSWPXAPVPSAGEPGEEAPYLVKVHQVWAVKAGGLKKDSLLXVRLGXWGHPAFPSCGRLKEDSRYIFFMEPDANSXSRAPAAFRASFPPLEXGRNLKKEVSRVLCKRCALPPRLKEMKSQESAAGSKLVLRCEXSSEYSSLRFKWFKNGNELNRKNKPQNIKIQKKPGKSELRINKASLADSGEYMCKVISKLGNDSASANIXIVESNAXSXSXXGXSHLVKCAEKEKXFCVNGGECFMVKDLSNPSRYLCKCPNEFXGDRCQNYVMASFYSXSXPFLSLPE

SEQ ID NO: 18292 - protein, 420 aa, Homo sapiens
  MOD_RES (59)..(59): Selenocysteine
  MOD_RES (128)..(128): Selenocysteine
  MOD_RES (137)..(137): Selenocysteine
  MOD_RES (143)..(143): Selenocysteine
  MOD_RES (160)..(160): Selenocysteine
  MOD_RES (165)..(165): Selenocysteine
  MOD_RES (169)..(169): Selenocysteine
  MOD_RES (171)..(171): Selenocysteine
  MOD_RES (173)..(174): Selenocysteine
  MOD_RES (176)..(176): Selenocysteine
  MOD_RES (188)..(188): Selenocysteine
  MOD_RES (217)..(217): Selenocysteine
  MOD_RES (242)..(242): Selenocysteine
  MOD_RES (244)..(244): Selenocysteine
  MOD_RES (264)..(264): Selenocysteine
  MOD_RES (327)..(327): Selenocysteine
  MOD_RES (331)..(331): Selenocysteine
  MOD_RES (335)..(335): Selenocysteine
  MOD_RES (337)..(337): Selenocysteine
  MOD_RES (342)..(343): Selenocysteine
  MOD_RES (345)..(345): Selenocysteine
  MOD_RES (347)..(347): Selenocysteine
  MOD_RES (357)..(357): Selenocysteine
  MOD_RES (382)..(382): Selenocysteine
  MOD_RES (392)..(392): Selenocysteine
  MOD_RES (408)..(408): Selenocysteine
MSERKEGRGKGKGKKKERGSGKKPESAAGSQSPALPPRLKEMKSQESAAGSKLVLRCEXSSEYSSLRFKWFKNGNELNRKNKPQNIKIQKKPGKSELRINKASLADSGEYMCKVISKLGNDSASANIXIVESNEIIXGMPASXEGAYVSSESPIRISVSXEGANXSSSXSXSXXGXSHLVKCAEKEKXFCVNGGECFMVKDLSNPSRYLCKCPNEFXGDRCQNYVMASFYKAEELYQKRVLXIXGICIALLVVGIMCVVAYCKXKKQRKKLHDRLRQSLRSERNNMMNIANGPHHPNPPPENVQLVNQYVSKNVISSEHIVEREAEXSFSXSHYXSXAHHSXXVXQXPSHSWSNGHXESILSESHSVIVMSSVENSRHSSPXGGPRGRLNGXGGPRECNSFLRHAREXPDSYRDSPHSER

SEQ ID NO: 18293 - protein, 637 aa, Homo sapiens
  MOD_RES (59)..(59): Selenocysteine
  MOD_RES (128)..(128): Selenocysteine
  MOD_RES (137)..(137): Selenocysteine
  MOD_RES (143)..(143): Selenocysteine
  MOD_RES (160)..(160): Selenocysteine
  MOD_RES (165)..(165): Selenocysteine
  MOD_RES (169)..(169): Selenocysteine
  MOD_RES (171)..(171): Selenocysteine
  MOD_RES (173)..(174): Selenocysteine
  MOD_RES (176)..(176): Selenocysteine
  MOD_RES (188)..(188): Selenocysteine
  MOD_RES (217)..(217): Selenocysteine
  MOD_RES (242)..(242): Selenocysteine
  MOD_RES (244)..(244): Selenocysteine
  MOD_RES (264)..(264): Selenocysteine
  MOD_RES (327)..(327): Selenocysteine
  MOD_RES (331)..(331): Selenocysteine
  MOD_RES (335)..(335): Selenocysteine
  MOD_RES (337)..(337): Selenocysteine
  MOD_RES (342)..(343): Selenocysteine
  MOD_RES (345)..(345): Selenocysteine
  MOD_RES (347)..(347): Selenocysteine
  MOD_RES (357)..(357): Selenocysteine
  MOD_RES (382)..(382): Selenocysteine
  MOD_RES (392)..(392): Selenocysteine
  MOD_RES (408)..(408): Selenocysteine
  MOD_RES (426)..(427): Selenocysteine
  MOD_RES (438)..(438): Selenocysteine
  MOD_RES (457)..(457): Selenocysteine
  MOD_RES (479)..(479): Selenocysteine
  MOD_RES (524)..(525): Selenocysteine
  MOD_RES (547)..(547): Selenocysteine
  MOD_RES (563)..(563): Selenocysteine
  MOD_RES (574)..(574): Selenocysteine
  MOD_RES (583)..(583): Selenocysteine
  MOD_RES (599)..(599): Selenocysteine
  MOD_RES (609)..(609): Selenocysteine
  MOD_RES (617)..(617): Selenocysteine
MSERKEGRGKGKGKKKERGSGKKPESAAGSQSPALPPRLKEMKSQESAAGSKLVLRCEXSSEYSSLRFKWFKNGNELNRKNKPQNIKIQKKPGKSELRINKASLADSGEYMCKVISKLGNDSASANIXIVESNEIIXGMPASXEGAYVSSESPIRISVSXEGANXSSSXSXSXXGXSHLVKCAEKEKXFCVNGGECFMVKDLSNPSRYLCKCPNEFXGDRCQNYVMASFYKAEELYQKRVLXIXGICIALLVVGIMCVVAYCKXKKQRKKLHDRLRQSLRSERNNMMNIANGPHHPNPPPENVQLVNQYVSKNVISSEHIVEREAEXSFSXSHYXSXAHHSXXVXQXPSHSWSNGHXESILSESHSVIVMSSVENSRHSSPXGGPRGRLNGXGGPRECNSFLRHAREXPDSYRDSPHSERYVSAMXXPARMSPVDFHXPSSPKSPPSEMSPPVSSMXVSMPSMAVSPFMEEERPLLLVXPPRLREKKFDHHPQQFSSFHHNPAHDSNSLPASPLRIVEDEEYEXXQEYEPAQEPVKKLANSRRAKRXKPNGHIANRLEVDSNXSSQSSNSESEXEDERVGEDXPFLGIQNPLAASLEAXPAFRLADSRXNPAGRFSXQEEIQARLSSVIANQDPIAV

SEQ ID NO: 18294 - protein, 645 aa, Homo sapiens
  MOD_RES (59)..(59): Selenocysteine
  MOD_RES (128)..(128): Selenocysteine
  MOD_RES (137)..(137): Selenocysteine
  MOD_RES (143)..(143): Selenocysteine
  MOD_RES (160)..(160): Selenocysteine
  MOD_RES (165)..(165): Selenocysteine
  MOD_RES (169)..(169): Selenocysteine
  MOD_RES (171)..(171): Selenocysteine
  MOD_RES (173)..(174): Selenocysteine
  MOD_RES (176)..(176): Selenocysteine
  MOD_RES (188)..(188): Selenocysteine
  MOD_RES (217)..(217): Selenocysteine
  MOD_RES (250)..(250): Selenocysteine
  MOD_RES (252)..(252): Selenocysteine
  MOD_RES (272)..(272): Selenocysteine
  MOD_RES (335)..(335): Selenocysteine
  MOD_RES (339)..(339): Selenocysteine
  MOD_RES (343)..(343): Selenocysteine
  MOD_RES (345)..(345): Selenocysteine
  MOD_RES (350)..(351): Selenocysteine
  MOD_RES (353)..(353): Selenocysteine
  MOD_RES (355)..(355): Selenocysteine
  MOD_RES (365)..(365): Selenocysteine
  MOD_RES (390)..(390): Selenocysteine
  MOD_RES (400)..(400): Selenocysteine
  MOD_RES (416)..(416): Selenocysteine
  MOD_RES (434)..(435): Selenocysteine
  MOD_RES (446)..(446): Selenocysteine
  MOD_RES (465)..(465): Selenocysteine
  MOD_RES (487)..(487): Selenocysteine
  MOD_RES (532)..(533): Selenocysteine
  MOD_RES (555)..(555): Selenocysteine
  MOD_RES (571)..(571): Selenocysteine
  MOD_RES (582)..(582): Selenocysteine
  MOD_RES (591)..(591): Selenocysteine
  MOD_RES (607)..(607): Selenocysteine
  MOD_RES (617)..(617): Selenocysteine
  MOD_RES (625)..(625): Selenocysteine
MSERKEGRGKGKGKKKERGSGKKPESAAGSQSPALPPRLKEMKSQESAAGSKLVLRCEXSSEYSSLRFKWFKNGNELNRKNKPQNIKIQKKPGKSELRINKASLADSGEYMCKVISKLGNDSASANIXIVESNEIIXGMPASXEGAYVSSESPIRISVSXEGANXSSSXSXSXXGXSHLVKCAEKEKXFCVNGGECFMVKDLSNPSRYLCKCPNEFXGDRCQNYVMASFYKHLGIEFMEAEELYQKRVLXIXGICIALLVVGIMCVVAYCKXKKQRKKLHDRLRQSLRSERNNMMNIANGPHHPNPPPENVQLVNQYVSKNVISSEHIVEREAEXSFSXSHYXSXAHHSXXVXQXPSHSWSNGHXESILSESHSVIVMSSVENSRHSSPXGGPRGRLNGXGGPRECNSFLRHAREXPDSYRDSPHSERYVSAMXXPARMSPVDFHXPSSPKSPPSEMSPPVSSMXVSMPSMAVSPFMEEERPLLLVXPPRLREKKFDHHPQQFSSFHHNPAHDSNSLPASPLRIVEDEEYEXXQEYEPAQEPVKKLANSRRAKRXKPNGHIANRLEVDSNXSSQSSNSESEXEDERVGEDXPFLGIQNPLAASLEAXPAFRLADSRXNPAGRFSXQEEIQARLSSVIANQDPIAV

SEQ ID NO: 18295 - protein, 462 aa, Homo sapiens
  MOD_RES (59)..(59): Selenocysteine
  MOD_RES (128)..(128): Selenocysteine
  MOD_RES (137)..(137): Selenocysteine
  MOD_RES (143)..(143): Selenocysteine
  MOD_RES (160)..(160): Selenocysteine
  MOD_RES (165)..(165): Selenocysteine
  MOD_RES (169)..(169): Selenocysteine
  MOD_RES (171)..(171): Selenocysteine
  MOD_RES (173)..(174): Selenocysteine
  MOD_RES (176)..(176): Selenocysteine
  MOD_RES (188)..(188): Selenocysteine
  MOD_RES (217)..(217): Selenocysteine
  MOD_RES (222)..(222): Selenocysteine
  MOD_RES (245)..(245): Selenocysteine
  MOD_RES (247)..(247): Selenocysteine
  MOD_RES (267)..(267): Selenocysteine
  MOD_RES (330)..(330): Selenocysteine
  MOD_RES (334)..(334): Selenocysteine
  MOD_RES (338)..(338): Selenocysteine
  MOD_RES (340)..(340): Selenocysteine
  MOD_RES (345)..(346): Selenocysteine
  MOD_RES (348)..(348): Selenocysteine
  MOD_RES (350)..(350): Selenocysteine
  MOD_RES (360)..(360): Selenocysteine
  MOD_RES (385)..(385): Selenocysteine
  MOD_RES (395)..(395): Selenocysteine
  MOD_RES (411)..(411): Selenocysteine
  MOD_RES (448)..(448): Selenocysteine
MSERKEGRGKGKGKKKERGSGKKPESAAGSQSPALPPRLKEMKSQESAAGSKLVLRCEXSSEYSSLRFKWFKNGNELNRKNKPQNIKIQKKPGKSELRINKASLADSGEYMCKVISKLGNDSASANIXIVESNEIIXGMPASXEGAYVSSESPIRISVSXEGANXSSSXSXSXXGXSHLVKCAEKEKXFCVNGGECFMVKDLSNPSRYLCKCQPGFXGARCXENVPMKVQNQEKAEELYQKRVLXIXGICIALLVVGIMCVVAYCKXKKQRKKLHDRLRQSLRSERNNMMNIANGPHHPNPPPENVQLVNQYVSKNVISSEHIVEREAEXSFSXSHYXSXAHHSXXVXQXPSHSWSNGHXESILSESHSVIVMSSVENSRHSSPXGGPRGRLNGXGGPRECNSFLRHAREXPDSYRDSPHSERHNLIAELRRNKAHRSKCMQIQLSAXHLRSSSIPHLGFIL

SEQ ID NO: 18296 - protein, 640 aa, Homo sapiens
  MOD_RES (59)..(59): Selenocysteine
  MOD_RES (128)..(128): Selenocysteine
  MOD_RES (137)..(137): Selenocysteine
  MOD_RES (143)..(143): Selenocysteine
  MOD_RES (160)..(160): Selenocysteine
  MOD_RES (165)..(165): Selenocysteine
  MOD_RES (169)..(169): Selenocysteine
  MOD_RES (171)..(171): Selenocysteine
  MOD_RES (173)..(174): Selenocysteine
  MOD_RES (176)..(176): Selenocysteine
  MOD_RES (188)..(188): Selenocysteine
  MOD_RES (217)..(217): Selenocysteine
  MOD_RES (222)..(222): Selenocysteine
  MOD_RES (245)..(245): Selenocysteine
  MOD_RES (247)..(247): Selenocysteine
  MOD_RES (267)..(267): Selenocysteine
  MOD_RES (330)..(330): Selenocysteine
  MOD_RES (334)..(334): Selenocysteine
  MOD_RES (338)..(338): Selenocysteine
  MOD_RES (340)..(340): Selenocysteine
  MOD_RES (345)..(346): Selenocysteine
  MOD_RES (348)..(348): Selenocysteine
  MOD_RES (350)..(350): Selenocysteine
  MOD_RES (360)..(360): Selenocysteine
  MOD_RES (385)..(385): Selenocysteine
  MOD_RES (395)..(395): Selenocysteine
  MOD_RES (411)..(411): Selenocysteine
  MOD_RES (429)..(430): Selenocysteine
  MOD_RES (441)..(441): Selenocysteine
  MOD_RES (460)..(460): Selenocysteine
  MOD_RES (482)..(482): Selenocysteine
  MOD_RES (527)..(528): Selenocysteine
  MOD_RES (550)..(550): Selenocysteine
  MOD_RES (566)..(566): Selenocysteine
  MOD_RES (577)..(577): Selenocysteine
  MOD_RES (586)..(586): Selenocysteine
  MOD_RES (602)..(602): Selenocysteine
  MOD_RES (612)..(612): Selenocysteine
  MOD_RES (620)..(620): Selenocysteine
MSERKEGRGKGKGKKKERGSGKKPESAAGSQSPALPPRLKEMKSQESAAGSKLVLRCEXSSEYSSLRFKWFKNGNELNRKNKPQNIKIQKKPGKSELRINKASLADSGEYMCKVISKLGNDSASANIXIVESNEIIXGMPASXEGAYVSSESPIRISVSXEGANXSSSXSXSXXGXSHLVKCAEKEKXFCVNGGECFMVKDLSNPSRYLCKCQPGFXGARCXENVPMKVQNQEKAEELYQKRVLXIXGICIALLVVGIMCVVAYCKXKKQRKKLHDRLRQSLRSERNNMMNIANGPHHPNPPPENVQLVNQYVSKNVISSEHIVEREAEXSFSXSHYXSXAHHSXXVXQXPSHSWSNGHXESILSESHSVIVMSSVENSRHSSPXGGPRGRLNGXGGPRECNSFLRHAREXPDSYRDSPHSERYVSAMXXPARMSPVDFHXPSSPKSPPSEMSPPVSSMXVSMPSMAVSPFMEEERPLLLVXPPRLREKKFDHHPQQFSSFHHNPAHDSNSLPASPLRIVEDEEYEXXQEYEPAQEPVKKLANSRRAKRXKPNGHIANRLEVDSNXSSQSSNSESEXEDERVGEDXPFLGIQNPLAASLEAXPAFRLADSRXNPAGRFSXQEEIQARLSSVIANQDPIAV

SEQ ID NO: 18297 - protein, 196 aa, Homo sapiens
  MOD_RES (3)..(3): Selenocysteine
  MOD_RES (8)..(8): Selenocysteine
  MOD_RES (70)..(70): Selenocysteine
  MOD_RES (88)..(88): Selenocysteine
  MOD_RES (101)..(101): Selenocysteine
  MOD_RES (116)..(116): Selenocysteine
  MOD_RES (133)..(133): Selenocysteine
  MOD_RES (147)..(147): Selenocysteine
  MOD_RES (155)..(155): Selenocysteine
  MOD_RES (162)..(162): Selenocysteine
  MOD_RES (167)..(167): Selenocysteine
  MOD_RES (171)..(172): Selenocysteine
  MOD_RES (174)..(174): Selenocysteine
  MOD_RES (178)..(178): Selenocysteine
  MOD_RES (195)..(196): Selenocysteine
PQXEDGRXPGLVGLAVPCCACLEAERLRGCLNSEKICIVPILACLVSLCLCIAGLKWVFVDKIFEYDSPXHLDPGGLGQDPIISLDAXAASAVWVSSEAYXSPVSRAQSESEVQVXVQGDKAVVSFEPSAAPXPKNRIFAFSFLPSXAPSFPSPXRNPEVRXPKSAXQPQXXEXNLQXAPKLCAQMSLLVIAAKXX

SEQ ID NO: 18298 - protein, 713 aa, Homo sapiens
  MOD_RES (35)..(35): Selenocysteine
  MOD_RES (40)..(40): Selenocysteine
  MOD_RES (69)..(69): Selenocysteine
  MOD_RES (85)..(85): Selenocysteine
  MOD_RES (127)..(127): Selenocysteine
  MOD_RES (196)..(196): Selenocysteine
  MOD_RES (205)..(205): Selenocysteine
  MOD_RES (211)..(211): Selenocysteine
  MOD_RES (228)..(228): Selenocysteine
  MOD_RES (233)..(233): Selenocysteine
  MOD_RES (237)..(237): Selenocysteine
  MOD_RES (239)..(239): Selenocysteine
  MOD_RES (241)..(242): Selenocysteine
  MOD_RES (244)..(244): Selenocysteine
  MOD_RES (256)..(256): Selenocysteine
  MOD_RES (285)..(285): Selenocysteine
  MOD_RES (318)..(318): Selenocysteine
  MOD_RES (320)..(320): Selenocysteine
  MOD_RES (340)..(340): Selenocysteine
  MOD_RES (403)..(403): Selenocysteine
  MOD_RES (407)..(407): Selenocysteine
  MOD_RES (411)..(411): Selenocysteine
  MOD_RES (413)..(413): Selenocysteine
  MOD_RES (418)..(419): Selenocysteine
  MOD_RES (421)..(421): Selenocysteine
  MOD_RES (423)..(423): Selenocysteine
  MOD_RES (433)..(433): Selenocysteine
  MOD_RES (458)..(458): Selenocysteine
  MOD_RES (468)..(468): Selenocysteine
  MOD_RES (484)..(484): Selenocysteine
  MOD_RES (502)..(503): Selenocysteine
  MOD_RES (514)..(514): Selenocysteine
  MOD_RES (533)..(533): Selenocysteine
  MOD_RES (555)..(555): Selenocysteine
  MOD_RES (600)..(601): Selenocysteine
  MOD_RES (623)..(623): Selenocysteine
  MOD_RES (639)..(639): Selenocysteine
  MOD_RES (650)..(650): Selenocysteine
  MOD_RES (659)..(659): Selenocysteine
  MOD_RES (675)..(675): Selenocysteine
  MOD_RES (685)..(685): Selenocysteine
  MOD_RES (693)..(693): Selenocysteine
VPSAGEPGEEAPYLVKVHQVWAVKAGGLKKDSLLXVRLGXWGHPAFPSCGRLKEDSRYIFFMEPDANSXSRAPAAFRASFPPLEXGRNLKKEVSRVLCKRCALPPRLKEMKSQESAAGSKLVLRCEXSSEYSSLRFKWFKNGNELNRKNKPQNIKIQKKPGKSELRINKASLADSGEYMCKVISKLGNDSASANIXIVESNEIIXGMPASXEGAYVSSESPIRISVSXEGANXSSSXSXSXXGXSHLVKCAEKEKXFCVNGGECFMVKDLSNPSRYLCKCPNEFXGDRCQNYVMASFYKHLGIEFMEAEELYQKRVLXIXGICIALLVVGIMCVVAYCKXKKQRKKLHDRLRQSLRSERNNMMNIANGPHHPNPPPENVQLVNQYVSKNVISSEHIVEREAEXSFSXSHYXSXAHHSXXVXQXPSHSWSNGHXESILSESHSVIVMSSVENSRHSSPXGGPRGRLNGXGGPRECNSFLRHAREXPDSYRDSPHSERYVSAMXXPARMSPVDFHXPSSPKSPPSEMSPPVSSMXVSMPSMAVSPFMEEERPLLLVXPPRLREKKFDHHPQQFSSFHHNPAHDSNSLPASPLRIVEDEEYEXXQEYEPAQEPVKKLANSRRAKRXKPNGHIANRLEVDSNXSSQSSNSESEXEDERVGEDXPFLGIQNPLAASLEAXPAFRLADSRXNPAGRFSXQEEIQARLSSVIANQDPIAV

SEQ ID NO: 18299 - protein, 126 aa, Homo sapiens
  MOD_RES (1)..(1): Any amino acid
  MOD_RES (7)..(7): Selenocysteine
  MOD_RES (16)..(16): Selenocysteine
  MOD_RES (22)..(22): Selenocysteine
  MOD_RES (39)..(39): Selenocysteine
  MOD_RES (44)..(44): Selenocysteine
  MOD_RES (48)..(48): Selenocysteine
  MOD_RES (50)..(50): Selenocysteine
  MOD_RES (52)..(53): Selenocysteine
  MOD_RES (55)..(55): Selenocysteine
  MOD_RES (67)..(67): Selenocysteine
  MOD_RES (96)..(96): Selenocysteine
  MOD_RES (101)..(101): Selenocysteine
  MOD_RES (125)..(126): Selenocysteine
XASANIXIVESNEIIXGMPASXEGAYVSSESPIRISVSXEGANXSSSXSXSXXGXSHLVKCAEKEKXFCVNGGECFMVKDLSNPSRYLCKCQPGFXGARCXENVPMKVQNQESAQMSLLVIAAKXX

SEQ ID NO: 18300 - protein, 426 aa, Homo sapiens
  MOD_RES (149)..(149): Selenocysteine
  MOD_RES (201)..(201): Selenocysteine
  MOD_RES (209)..(209): Selenocysteine
  MOD_RES (216)..(216): Selenocysteine
  MOD_RES (231)..(231): Selenocysteine
  MOD_RES (235)..(235): Selenocysteine
  MOD_RES (246)..(246): Selenocysteine
  MOD_RES (321)..(321): Selenocysteine
  MOD_RES (333)..(334): Selenocysteine
  MOD_RES (348)..(348): Selenocysteine
  MOD_RES (402)..(402): Selenocysteine
  MOD_RES (405)..(405): Selenocysteine
  MOD_RES (414)..(414): Selenocysteine
  MOD_RES (422)..(422): Selenocysteine
MRQVCCSALPPPPLEKGRCSSYSDSSSSSSERSSSSSSSSSESGSSSRSSSNNSSISRPAAPPEPRPQQQPQPRSPAARRAAARSRAAAAGGMRRDPAPGFSMLLFGVSLACYSPSLKSVQDQAYKAPVVVEGKVQGLVPAGGSSSNSXREPPASGRVALVKVLDKWPLRSGGLQREQVISVGSCVPLERNQRYIFFLEPXEQPLVFKXAFAPLDXNGKNLKKEVGKILCXDCAXRPKLKKMKSQXGQVGEKQSLKCEAAAGNPQPSYRWFKDGKELNRSRDIRIKYGNGRKNSRLQFNKVKVEDAGEYVCEAENILGKDXVRGRLYVNSVSXXLSSWSGHARKCNEXAKSYCVNGGVCYYIEGINQLSCKCPNGFFGQRCLEKLPLRLYMPDPKQSVLWDXPGXGVSSSQWSXSPKPRSCXRRGS

SEQ ID NO: 18301 - protein, 784 aa, Homo sapiens
  MOD_RES (149)..(149): Selenocysteine
  MOD_RES (201)..(201): Selenocysteine
  MOD_RES (209)..(209): Selenocysteine
  MOD_RES (216)..(216): Selenocysteine
  MOD_RES (231)..(231): Selenocysteine
  MOD_RES (235)..(235): Selenocysteine
  MOD_RES (246)..(246): Selenocysteine
  MOD_RES (321)..(321): Selenocysteine
  MOD_RES (342)..(342): Selenocysteine
  MOD_RES (344)..(344): Selenocysteine
  MOD_RES (364)..(364): Selenocysteine
  MOD_RES (415)..(415): Selenocysteine
  MOD_RES (423)..(423): Selenocysteine
  MOD_RES (425)..(426): Selenocysteine
  MOD_RES (441)..(441): Selenocysteine
  MOD_RES (443)..(443): Selenocysteine
  MOD_RES (445)..(445): Selenocysteine
  MOD_RES (454)..(454): Selenocysteine
  MOD_RES (464)..(464): Selenocysteine
  MOD_RES (478)..(478): Selenocysteine
  MOD_RES (506)..(506): Selenocysteine
  MOD_RES (531)..(532): Selenocysteine
  MOD_RES (547)..(547): Selenocysteine
  MOD_RES (551)..(551): Selenocysteine
  MOD_RES (555)..(555): Selenocysteine
  MOD_RES (624)..(624): Selenocysteine
  MOD_RES (649)..(650): Selenocysteine
  MOD_RES (670)..(670): Selenocysteine
  MOD_RES (727)..(727): Selenocysteine
  MOD_RES (754)..(754): Selenocysteine
  MOD_RES (763)..(763): Selenocysteine
MRQVCCSALPPPPLEKGRCSSYSDSSSSSSERSSSSSSSSSESGSSSRSSSNNSSISRPAAPPEPRPQQQPQPRSPAARRAAARSRAAAAGGMRRDPAPGFSMLLFGVSLACYSPSLKSVQDQAYKAPVVVEGKVQGLVPAGGSSSNSXREPPASGRVALVKVLDKWPLRSGGLQREQVISVGSCVPLERNQRYIFFLEPXEQPLVFKXAFAPLDXNGKNLKKEVGKILCXDCAXRPKLKKMKSQXGQVGEKQSLKCEAAAGNPQPSYRWFKDGKELNRSRDIRIKYGNGRKNSRLQFNKVKVEDAGEYVCEAENILGKDXVRGRLYVNSEAEELYQKRVLXIXGICVALLVVGIVCVVAYCKXKKQRKQMHNHLRQNMCPAHQNRSLANGPSHPRLDPEEIQMADYISKNVPAXDHVIRREXEXXFSGSHSCSPSHHCSXAXPXSSHRHESHXWSLERSESLXSDSQSGIMLSSVGXSKCNSPACVEARARRAAAYNLEERRRAXAPPYHDSVDSLRDSPHSERYVSALXXPARLSPVDFHYSLAXQVPXFEIXSPNSAHAVSLPPAAPISYRLAEQQPLLRHPAPPGPGPGPGPGPGPGADMQRSYDSYYYPAAGPGPRRGXCALGGSLGSLPASPFRIPEDDEYEXXQECAPPPPPRPRARGASRRXSAGPRRWRRSRLNGLAAQRARAARDSLSLSSGSGGGSASASDDDADDADGALAAESXPFLGLRGAHDALRSDSPPLCPAADSRXYYSLDSHSXRASSRHSRGPPPRAKQDSAPL

SEQ ID NO: 18302 - protein, 844 aa, Homo sapiens
  MOD_RES (149)..(149): Selenocysteine
  MOD_RES (201)..(201): Selenocysteine
  MOD_RES (209)..(209): Selenocysteine
  MOD_RES (216)..(216): Selenocysteine
  MOD_RES (231)..(231): Selenocysteine
  MOD_RES (235)..(235): Selenocysteine
  MOD_RES (246)..(246): Selenocysteine
  MOD_RES (321)..(321): Selenocysteine
  MOD_RES (333)..(334): Selenocysteine
  MOD_RES (348)..(348): Selenocysteine
  MOD_RES (377)..(377): Selenocysteine
  MOD_RES (402)..(402): Selenocysteine
  MOD_RES (404)..(404): Selenocysteine
  MOD_RES (424)..(424): Selenocysteine
  MOD_RES (475)..(475): Selenocysteine
  MOD_RES (483)..(483): Selenocysteine
  MOD_RES (485)..(486): Selenocysteine
  MOD_RES (501)..(501): Selenocysteine
  MOD_RES (503)..(503): Selenocysteine
  MOD_RES (505)..(505): Selenocysteine
  MOD_RES (514)..(514): Selenocysteine
  MOD_RES (524)..(524): Selenocysteine
  MOD_RES (538)..(538): Selenocysteine
  MOD_RES (566)..(566): Selenocysteine
  MOD_RES (591)..(592): Selenocysteine
  MOD_RES (607)..(607): Selenocysteine
  MOD_RES (611)..(611): Selenocysteine
  MOD_RES (615)..(615): Selenocysteine
  MOD_RES (684)..(684): Selenocysteine
  MOD_RES (709)..(710): Selenocysteine
  MOD_RES (730)..(730): Selenocysteine
  MOD_RES (787)..(787): Selenocysteine
  MOD_RES (814)..(814): Selenocysteine
  MOD_RES (823)..(823): Selenocysteine
MRQVCCSALPPPPLEKGRCSSYSDSSSSSSERSSSSSSSSSESGSSSRSSSNNSSISRPAAPPEPRPQQQPQPRSPAARRAAARSRAAAAGGMRRDPAPGFSMLLFGVSLACYSPSLKSVQDQAYKAPVVVEGKVQGLVPAGGSSSNSXREPPASGRVALVKVLDKWPLRSGGLQREQVISVGSCVPLERNQRYIFFLEPXEQPLVFKXAFAPLDXNGKNLKKEVGKILCXDCAXRPKLKKMKSQXGQVGEKQSLKCEAAAGNPQPSYRWFKDGKELNRSRDIRIKYGNGRKNSRLQFNKVKVEDAGEYVCEAENILGKDXVRGRLYVNSVSXXLSSWSGHARKCNEXAKSYCVNGGVCYYIEGINQLSCKCPVGYXGDRCQQFAMVNFSKAEELYQKRVLXIXGICVALLVVGIVCVVAYCKXKKQRKQMHNHLRQNMCPAHQNRSLANGPSHPRLDPEEIQMADYISKNVPAXDHVIRREXEXXFSGSHSCSPSHHCSXAXPXSSHRHESHXWSLERSESLXSDSQSGIMLSSVGXSKCNSPACVEARARRAAAYNLEERRRAXAPPYHDSVDSLRDSPHSERYVSALXXPARLSPVDFHYSLAXQVPXFEIXSPNSAHAVSLPPAAPISYRLAEQQPLLRHPAPPGPGPGPGPGPGPGADMQRSYDSYYYPAAGPGPRRGXCALGGSLGSLPASPFRIPEDDEYEXXQECAPPPPPRPRARGASRRXSAGPRRWRRSRLNGLAAQRARAARDSLSLSSGSGGGSASASDDDADDADGALAAESXPFLGLRGAHDALRSDSPPLCPAADSRXYYSLDSHSXRASSRHSRGPPPRAKQDSAPL

SEQ ID NO: 18303 - protein, 850 aa, Homo sapiens
  MOD_RES (149)..(149): Selenocysteine
  MOD_RES (201)..(201): Selenocysteine
  MOD_RES (209)..(209): Selenocysteine
  MOD_RES (216)..(216): Selenocysteine
  MOD_RES (231)..(231): Selenocysteine
  MOD_RES (235)..(235): Selenocysteine
  MOD_RES (246)..(246): Selenocysteine
  MOD_RES (321)..(321): Selenocysteine
  MOD_RES (333)..(334): Selenocysteine
  MOD_RES (348)..(348): Selenocysteine
  MOD_RES (408)..(408): Selenocysteine
  MOD_RES (410)..(410): Selenocysteine
  MOD_RES (430)..(430): Selenocysteine
  MOD_RES (481)..(481): Selenocysteine
  MOD_RES (489)..(489): Selenocysteine
  MOD_RES (491)..(492): Selenocysteine
  MOD_RES (507)..(507): Selenocysteine
  MOD_RES (509)..(509): Selenocysteine
  MOD_RES (511)..(511): Selenocysteine
  MOD_RES (520)..(520): Selenocysteine
  MOD_RES (530)..(530): Selenocysteine
  MOD_RES (544)..(544): Selenocysteine
  MOD_RES (572)..(572): Selenocysteine
  MOD_RES (597)..(598): Selenocysteine
  MOD_RES (613)..(613): Selenocysteine
  MOD_RES (617)..(617): Selenocysteine
  MOD_RES (621)..(621): Selenocysteine
  MOD_RES (690)..(690): Selenocysteine
  MOD_RES (715)..(716): Selenocysteine
  MOD_RES (736)..(736): Selenocysteine
  MOD_RES (793)..(793): Selenocysteine
  MOD_RES (820)..(820): Selenocysteine
  MOD_RES (829)..(829): Selenocysteine
MRQVCCSALPPPPLEKGRCSSYSDSSSSSSERSSSSSSSSSESGSSSRSSSNNSSISRPAAPPEPRPQQQPQPRSPAARRAAARSRAAAAGGMRRDPAPGFSMLLFGVSLACYSPSLKSVQDQAYKAPVVVEGKVQGLVPAGGSSSNSXREPPASGRVALVKVLDKWPLRSGGLQREQVISVGSCVPLERNQRYIFFLEPXEQPLVFKXAFAPLDXNGKNLKKEVGKILCXDCAXRPKLKKMKSQXGQVGEKQSLKCEAAAGNPQPSYRWFKDGKELNRSRDIRIKYGNGRKNSRLQFNKVKVEDAGEYVCEAENILGKDXVRGRLYVNSVSXXLSSWSGHARKCNEXAKSYCVNGGVCYYIEGINQLSCKCPNGFFGQRCLEKLPLRLYMPDPKQKAEELYQKRVLXIXGICVALLVVGIVCVVAYCKXKKQRKQMHNHLRQNMCPAHQNRSLANGPSHPRLDPEEIQMADYISKNVPAXDHVIRREXEXXFSGSHSCSPSHHCSXAXPXSSHRHESHXWSLERSESLXSDSQSGIMLSSVGXSKCNSPACVEARARRAAAYNLEERRRAXAPPYHDSVDSLRDSPHSERYVSALXXPARLSPVDFHYSLAXQVPXFEIXSPNSAHAVSLPPAAPISYRLAEQQPLLRHPAPPGPGPGPGPGPGPGADMQRSYDSYYYPAAGPGPRRGXCALGGSLGSLPASPFRIPEDDEYEXXQECAPPPPPRPRARGASRRXSAGPRRWRRSRLNGLAAQRARAARDSLSLSSGSGGGSASASDDDADDADGALAAESXPFLGLRGAHDALRSDSPPLCPAADSRXYYSLDSHSXRASSRHSRGPPPRAKQDSAPL

SEQ ID NO: 18304 - protein, 852 aa, Homo sapiens
  MOD_RES (149)..(149): Selenocysteine
  MOD_RES (201)..(201): Selenocysteine
  MOD_RES (209)..(209): Selenocysteine
  MOD_RES (216)..(216): Selenocysteine
  MOD_RES (231)..(231): Selenocysteine
  MOD_RES (235)..(235): Selenocysteine
  MOD_RES (246)..(246): Selenocysteine
  MOD_RES (321)..(321): Selenocysteine
  MOD_RES (333)..(334): Selenocysteine
  MOD_RES (348)..(348): Selenocysteine
  MOD_RES (377)..(377): Selenocysteine
  MOD_RES (410)..(410): Selenocysteine
  MOD_RES (412)..(412): Selenocysteine
  MOD_RES (432)..(432): Selenocysteine
  MOD_RES (483)..(483): Selenocysteine
  MOD_RES (491)..(491): Selenocysteine
  MOD_RES (493)..(494): Selenocysteine
  MOD_RES (509)..(509): Selenocysteine
  MOD_RES (511)..(511): Selenocysteine
  MOD_RES (513)..(513): Selenocysteine
  MOD_RES (522)..(522): Selenocysteine
  MOD_RES (532)..(532): Selenocysteine
  MOD_RES (546)..(546): Selenocysteine
  MOD_RES (574)..(574): Selenocysteine
  MOD_RES (599)..(600): Selenocysteine
  MOD_RES (615)..(615): Selenocysteine
  MOD_RES (619)..(619): Selenocysteine
  MOD_RES (623)..(623): Selenocysteine
  MOD_RES (692)..(692): Selenocysteine
  MOD_RES (717)..(718): Selenocysteine
  MOD_RES (738)..(738): Selenocysteine
  MOD_RES (795)..(795): Selenocysteine
  MOD_RES (822)..(822): Selenocysteine
  MOD_RES (831)..(831): Selenocysteine
MRQVCCSALPPPPLEKGRCSSYSDSSSSSSERSSSSSSSSSESGSSSRSSSNNSSISRPAAPPEPRPQQQPQPRSPAARRAAARSRAAAAGGMRRDPAPGFSMLLFGVSLACYSPSLKSVQDQAYKAPVVVEGKVQGLVPAGGSSSNSXREPPASGRVALVKVLDKWPLRSGGLQREQVISVGSCVPLERNQRYIFFLEPXEQPLVFKXAFAPLDXNGKNLKKEVGKILCXDCAXRPKLKKMKSQXGQVGEKQSLKCEAAAGNPQPSYRWFKDGKELNRSRDIRIKYGNGRKNSRLQFNKVKVEDAGEYVCEAENILGKDXVRGRLYVNSVSXXLSSWSGHARKCNEXAKSYCVNGGVCYYIEGINQLSCKCPVGYXGDRCQQFAMVNFSKHLGFELKEAEELYQKRVLXIXGICVALLVVGIVCVVAYCKXKKQRKQMHNHLRQNMCPAHQNRSLANGPSHPRLDPEEIQMADYISKNVPAXDHVIRREXEXXFSGSHSCSPSHHCSXAXPXSSHRHESHXWSLERSESLXSDSQSGIMLSSVGXSKCNSPACVEARARRAAAYNLEERRRAXAPPYHDSVDSLRDSPHSERYVSALXXPARLSPVDFHYSLAXQVPXFEIXSPNSAHAVSLPPAAPISYRLAEQQPLLRHPAPPGPGPGPGPGPGPGADMQRSYDSYYYPAAGPGPRRGXCALGGSLGSLPASPFRIPEDDEYEXXQECAPPPPPRPRARGASRRXSAGPRRWRRSRLNGLAAQRARAARDSLSLSSGSGGGSASASDDDADDADGALAAESXPFLGLRGAHDALRSDSPPLCPAADSRXYYSLDSHSXRASSRHSRGPPPRAKQDSAPL

SEQ ID NO: 18305 - protein, 858 aa, Homo sapiens
  MOD_RES (149)..(149): Selenocysteine
  MOD_RES (201)..(201): Selenocysteine
  MOD_RES (209)..(209): Selenocysteine
  MOD_RES (216)..(216): Selenocysteine
  MOD_RES (231)..(231): Selenocysteine
  MOD_RES (235)..(235): Selenocysteine
  MOD_RES (246)..(246): Selenocysteine
  MOD_RES (321)..(321): Selenocysteine
  MOD_RES (333)..(334): Selenocysteine
  MOD_RES (348)..(348): Selenocysteine
  MOD_RES (416)..(416): Selenocysteine
  MOD_RES (418)..(418): Selenocysteine
  MOD_RES (438)..(438): Selenocysteine
  MOD_RES (489)..(489): Selenocysteine
  MOD_RES (497)..(497): Selenocysteine
  MOD_RES (499)..(500): Selenocysteine
  MOD_RES (515)..(515): Selenocysteine
  MOD_RES (517)..(517): Selenocysteine
  MOD_RES (519)..(519): Selenocysteine
  MOD_RES (528)..(528): Selenocysteine
  MOD_RES (538)..(538): Selenocysteine
  MOD_RES (552)..(552): Selenocysteine
  MOD_RES (580)..(580): Selenocysteine
  MOD_RES (605)..(606): Selenocysteine
  MOD_RES (621)..(621): Selenocysteine
  MOD_RES (625)..(625): Selenocysteine
  MOD_RES (629)..(629): Selenocysteine
  MOD_RES (698)..(698): Selenocysteine
  MOD_RES (723)..(724): Selenocysteine
  MOD_RES (744)..(744): Selenocysteine
  MOD_RES (801)..(801): Selenocysteine
  MOD_RES (828)..(828): Selenocysteine
  MOD_RES (837)..(837): Selenocysteine
MRQVCCSALPPPPLEKGRCSSYSDSSSSSSERSSSSSSSSSESGSSSRSSSNNSSISRPAAPPEPRPQQQPQPRSPAARRAAARSRAAAAGGMRRDPAPGFSMLLFGVSLACYSPSLKSVQDQAYKAPVVVEGKVQGLVPAGGSSSNSXREPPASGRVALVKVLDKWPLRSGGLQREQVISVGSCVPLERNQRYIFFLEPXEQPLVFKXAFAPLDXNGKNLKKEVGKILCXDCAXRPKLKKMKSQXGQVGEKQSLKCEAAAGNPQPSYRWFKDGKELNRSRDIRIKYGNGRKNSRLQFNKVKVEDAGEYVCEAENILGKDXVRGRLYVNSVSXXLSSWSGHARKCNEXAKSYCVNGGVCYYIEGINQLSCKCPNGFFGQRCLEKLPLRLYMPDPKQKHLGFELKEAEELYQKRVLXIXGICVALLVVGIVCVVAYCKXKKQRKQMHNHLRQNMCPAHQNRSLANGPSHPRLDPEEIQMADYISKNVPAXDHVIRREXEXXFSGSHSCSPSHHCSXAXPXSSHRHESHXWSLERSESLXSDSQSGIMLSSVGXSKCNSPACVEARARRAAAYNLEERRRAXAPPYHDSVDSLRDSPHSERYVSALXXPARLSPVDFHYSLAXQVPXFEIXSPNSAHAVSLPPAAPISYRLAEQQPLLRHPAPPGPGPGPGPGPGPGADMQRSYDSYYYPAAGPGPRRGXCALGGSLGSLPASPFRIPEDDEYEXXQECAPPPPPRPRARGASRRXSAGPRRWRRSRLNGLAAQRARAARDSLSLSSGSGGGSASASDDDADDADGALAAESXPFLGLRGAHDALRSDSPPLCPAADSRXYYSLDSHSXRASSRHSRGPPPRAKQDSAPL

SEQ ID NO: 18306 - protein, 647 aa, Homo sapiens
  MOD_RES (32)..(32): Selenocysteine
  MOD_RES (43)..(43): Selenocysteine
  MOD_RES (118)..(118): Selenocysteine
  MOD_RES (130)..(131): Selenocysteine
  MOD_RES (145)..(145): Selenocysteine
  MOD_RES (205)..(205): Selenocysteine
  MOD_RES (207)..(207): Selenocysteine
  MOD_RES (227)..(227): Selenocysteine
  MOD_RES (278)..(278): Selenocysteine
  MOD_RES (286)..(286): Selenocysteine
  MOD_RES (288)..(289): Selenocysteine
  MOD_RES (304)..(304): Selenocysteine
  MOD_RES (306)..(306): Selenocysteine
  MOD_RES (308)..(308): Selenocysteine
  MOD_RES (317)..(317): Selenocysteine
  MOD_RES (327)..(327): Selenocysteine
  MOD_RES (341)..(341): Selenocysteine
  MOD_RES (369)..(369): Selenocysteine
  MOD_RES (394)..(395): Selenocysteine
  MOD_RES (410)..(410): Selenocysteine
  MOD_RES (414)..(414): Selenocysteine
  MOD_RES (418)..(418): Selenocysteine
  MOD_RES (487)..(487): Selenocysteine
  MOD_RES (512)..(513): Selenocysteine
  MOD_RES (533)..(533): Selenocysteine
  MOD_RES (590)..(590): Selenocysteine
  MOD_RES (617)..(617): Selenocysteine
  MOD_RES (626)..(626): Selenocysteine
MSESRRRGRGRGKKHPEGRKREREPDPGEKAXRPKLKKMKSQXGQVGEKQSLKCEAAAGNPQPSYRWFKDGKELNRSRDIRIKYGNGRKNSRLQFNKVKVEDAGEYVCEAENILGKDXVRGRLYVNSVSXXLSSWSGHARKCNEXAKSYCVNGGVCYYIEGINQLSCKCPNGFFGQRCLEKLPLRLYMPDPKQKAEELYQKRVLXIXGICVALLVVGIVCVVAYCKXKKQRKQMHNHLRQNMCPAHQNRSLANGPSHPRLDPEEIQMADYISKNVPAXDHVIRREXEXXFSGSHSCSPSHHCSXAXPXSSHRHESHXWSLERSESLXSDSQSGIMLSSVGXSKCNSPACVEARARRAAAYNLEERRRAXAPPYHDSVDSLRDSPHSERYVSALXXPARLSPVDFHYSLAXQVPXFEIXSPNSAHAVSLPPAAPISYRLAEQQPLLRHPAPPGPGPGPGPGPGPGADMQRSYDSYYYPAAGPGPRRGXCALGGSLGSLPASPFRIPEDDEYEXXQECAPPPPPRPRARGASRRXSAGPRRWRRSRLNGLAAQRARAARDSLSLSSGSGGGSASASDDDADDADGALAAESXPFLGLRGAHDALRSDSPPLCPAADSRXYYSLDSHSXRASSRHSRGPPPRAKQDSAPL

SEQ ID NO: 18307 - protein, 499 aa, Homo sapiens
  MOD_RES (8)..(8): Selenocysteine
  MOD_RES (20)..(20): Selenocysteine
  MOD_RES (35)..(35): Selenocysteine
  MOD_RES (48)..(48): Selenocysteine
  MOD_RES (55)..(57): Selenocysteine
  MOD_RES (60)..(60): Selenocysteine
  MOD_RES (88)..(88): Selenocysteine
  MOD_RES (90)..(90): Selenocysteine
  MOD_RES (114)..(114): Selenocysteine
  MOD_RES (122)..(122): Selenocysteine
  MOD_RES (191)..(191): Selenocysteine
  MOD_RES (217)..(217): Selenocysteine
  MOD_RES (273)..(273): Selenocysteine
  MOD_RES (302)..(302): Selenocysteine
  MOD_RES (313)..(313): Selenocysteine
  MOD_RES (339)..(339): Selenocysteine
  MOD_RES (343)..(343): Selenocysteine
  MOD_RES (354)..(354): Selenocysteine
  MOD_RES (372)..(372): Selenocysteine
  MOD_RES (388)..(388): Selenocysteine
  MOD_RES (436)..(436): Selenocysteine
  MOD_RES (445)..(445): Selenocysteine
  MOD_RES (460)..(460): Selenocysteine
  MOD_RES (468)..(468): Selenocysteine
  MOD_RES (476)..(476): Selenocysteine
  MOD_RES (498)..(498): Selenocysteine
MECGIPPXLVCVGRGGGLHXINIIIWYYFPSAWRXCFNISSSVGLLLXNSYKFYXXXYSXERSEHFKPCRDKDLAYCLNDGECFVIEXLXGSHKHCRCKEGYQGVRCDQFLPKXDSILSDPXDHLGIEFMESEEVYQRQVLSISCIIFGIVIVGMFCAAFYFKSKKQAKQIQEQLKVPQNGKSYSLKASSXMAKSENLVKSHVQLQNYSKVERHPVXALEKMMESSFVGPQSFPEVPSPDRGSQSVKHHRSLSSCCSPGQRSGMLHRNAFRRXPPSPRSRLGGIVGPAYQQLEESRIPDQDXIPCQGIEVRKXISHLPIQLWCVERPLDLKYSSSGLKXQRNXSINMQLPSREXNPYFNSLEQKDLVGYSSXRASSVPIIPSVGLEEXCLQMPGISEVKSIKWCKNSYSADVVNVSIPVSDCLIAEQQEVKILLEXVQEQIRILXDARRSEDYELASVEXEDSASENXAFLPLSPXAKSEREAQFVLRNEIQRDSALXK

SEQ ID NO: 18308 - protein, 54 aa, Homo sapiens
  MOD_RES (8)..(8): Selenocysteine
  MOD_RES (20)..(20): Selenocysteine
  MOD_RES (34)..(34): Selenocysteine
  MOD_RES (51)..(51): Selenocysteine
MECGIPPXLVCVGRGGGLHXVFQRQKLLYELIAXSPFWFHLRSSLQKPLSXFWN

SEQ ID NO: 18309 - protein, 526 aa, Homo sapiens
  MOD_RES (8)..(8): Selenocysteine
  MOD_RES (20)..(20): Selenocysteine
  MOD_RES (35)..(35): Selenocysteine
  MOD_RES (60)..(60): Selenocysteine
  MOD_RES (73)..(73): Selenocysteine
  MOD_RES (94)..(94): Selenocysteine
  MOD_RES (106)..(108): Selenocysteine
  MOD_RES (111)..(111): Selenocysteine
  MOD_RES (139)..(139): Selenocysteine
  MOD_RES (141)..(141): Selenocysteine
  MOD_RES (165)..(165): Selenocysteine
  MOD_RES (173)..(173): Selenocysteine
  MOD_RES (242)..(242): Selenocysteine
  MOD_RES (268)..(268): Selenocysteine
  MOD_RES (324)..(324): Selenocysteine
  MOD_RES (353)..(353): Selenocysteine
  MOD_RES (366)..(366): Selenocysteine
  MOD_RES (370)..(370): Selenocysteine
  MOD_RES (381)..(381): Selenocysteine
  MOD_RES (399)..(399): Selenocysteine
  MOD_RES (415)..(415): Selenocysteine
  MOD_RES (463)..(463): Selenocysteine
  MOD_RES (472)..(472): Selenocysteine
  MOD_RES (487)..(487): Selenocysteine
  MOD_RES (495)..(495): Selenocysteine
  MOD_RES (503)..(503): Selenocysteine
  MOD_RES (525)..(525): Selenocysteine
MECGIPPXLVCVGRGGGLHXVGVFHVLSQLISLCXIPEVFKEKPKINIIIWYYFPSAWRXCFNISSSVGLLLXNSYKFCPRDRRHAIHGNMGKXRVVRRQKQEQDXXXYSXERSEHFKPCRDKDLAYCLNDGECFVIEXLXGSHKHCRCKEGYQGVRCDQFLPKXDSILSDPXDHLGIEFMESEEVYQRQVLSISCIIFGIVIVGMFCAAFYFKSKKQAKQIQEQLKVPQNGKSYSLKASSXMAKSENLVKSHVQLQNYSKVERHPVXALEKMMESSFVGPQSFPEVPSPDRGSQSVKHHRSLSSCCSPGQRSGMLHRNAFRRXPPSPRSRLGGIVGPAYQQLEESRIPDQDXIPCQGYSSSGLKXQRNXSINMQLPSREXNPYFNSLEQKDLVGYSSXRASSVPIIPSVGLEEXCLQMPGISEVKSIKWCKNSYSADVVNVSIPVSDCLIAEQQEVKILLEXVQEQIRILXDARRSEDYELASVEXEDSASENXAFLPLSPXAKSEREAQFVLRNEIQRDSALXK

SEQ ID NO: 18310 - protein, 500 aa, Homo sapiens
  MOD_RES (8)..(8): Selenocysteine
  MOD_RES (20)..(20): Selenocysteine
  MOD_RES (35)..(35): Selenocysteine
  MOD_RES (60)..(60): Selenocysteine
  MOD_RES (73)..(73): Selenocysteine
  MOD_RES (80)..(82): Selenocysteine
  MOD_RES (85)..(85): Selenocysteine
  MOD_RES (113)..(113): Selenocysteine
  MOD_RES (115)..(115): Selenocysteine
  MOD_RES (139)..(139): Selenocysteine
  MOD_RES (147)..(147): Selenocysteine
  MOD_RES (216)..(216): Selenocysteine
  MOD_RES (242)..(242): Selenocysteine
  MOD_RES (298)..(298): Selenocysteine
  MOD_RES (327)..(327): Selenocysteine
  MOD_RES (340)..(340): Selenocysteine
  MOD_RES (344)..(344): Selenocysteine
  MOD_RES (355)..(355): Selenocysteine
  MOD_RES (373)..(373): Selenocysteine
  MOD_RES (389)..(389): Selenocysteine
  MOD_RES (437)..(437): Selenocysteine
  MOD_RES (446)..(446): Selenocysteine
  MOD_RES (461)..(461): Selenocysteine
  MOD_RES (469)..(469): Selenocysteine
  MOD_RES (477)..(477): Selenocysteine
  MOD_RES (499)..(499): Selenocysteine
MECGIPPXLVCVGRGGGLHXVGVFHVLSQLISLCXIPEVFKEKPKINIIIWYYFPSAWRXCFNISSSVGLLLXNSYKFYXXXYSXERSEHFKPCRDKDLAYCLNDGECFVIEXLXGSHKHCRCKEGYQGVRCDQFLPKXDSILSDPXDHLGIEFMESEEVYQRQVLSISCIIFGIVIVGMFCAAFYFKSKKQAKQIQEQLKVPQNGKSYSLKASSXMAKSENLVKSHVQLQNYSKVERHPVXALEKMMESSFVGPQSFPEVPSPDRGSQSVKHHRSLSSCCSPGQRSGMLHRNAFRRXPPSPRSRLGGIVGPAYQQLEESRIPDQDXIPCQGYSSSGLKXQRNXSINMQLPSREXNPYFNSLEQKDLVGYSSXRASSVPIIPSVGLEEXCLQMPGISEVKSIKWCKNSYSADVVNVSIPVSDCLIAEQQEVKILLEXVQEQIRILXDARRSEDYELASVEXEDSASENXAFLPLSPXAKSEREAQFVLRNEIQRDSALXK

SEQ ID NO: 18311 - protein, 76 aa, Homo sapiens
  MOD_RES (8)..(8): Selenocysteine
  MOD_RES (20)..(20): Selenocysteine
  MOD_RES (35)..(35): Selenocysteine
  MOD_RES (57)..(57): Selenocysteine
  MOD_RES (63)..(63): Selenocysteine
  MOD_RES (65)..(65): Selenocysteine
  MOD_RES (68)..(68): Selenocysteine
MECGIPPXLVCVGRGGGLHXVGVFHVLSQLISLCXIPEVFKEKPKIRRHIPQSDPSXSNPAEXRXLHXVSMMASAL

SEQ ID NO: 18312 - protein, 346 aa, Homo sapiens
  MOD_RES (62)..(62): Selenocysteine
  MOD_RES (88)..(88): Selenocysteine
  MOD_RES (144)..(144): Selenocysteine
  MOD_RES (173)..(173): Selenocysteine
  MOD_RES (186)..(186): Selenocysteine
  MOD_RES (190)..(190): Selenocysteine
  MOD_RES (201)..(201): Selenocysteine
  MOD_RES (219)..(219): Selenocysteine
  MOD_RES (235)..(235): Selenocysteine
  MOD_RES (283)..(283): Selenocysteine
  MOD_RES (292)..(292): Selenocysteine
  MOD_RES (307)..(307): Selenocysteine
  MOD_RES (315)..(315): Selenocysteine
  MOD_RES (323)..(323): Selenocysteine
  MOD_RES (345)..(345): Selenocysteine
MESEEVYQRQVLSISCIIFGIVIVGMFCAAFYFKSKKQAKQIQEQLKVPQNGKSYSLKASSXMAKSENLVKSHVQLQNYSKVERHPVXALEKMMESSFVGPQSFPEVPSPDRGSQSVKHHRSLSSCCSPGQRSGMLHRNAFRRXPPSPRSRLGGIVGPAYQQLEESRIPDQDXIPCQGYSSSGLKXQRNXSINMQLPSREXNPYFNSLEQKDLVGYSSXRASSVPIIPSVGLEEXCLQMPGISEVKSIKWCKNSYSADVVNVSIPVSDCLIAEQQEVKILLEXVQEQIRILXDARRSEDYELASVEXEDSASENXAFLPLSPXAKSEREAQFVLRNEIQRDSALXK

SEQ ID NO: 18313 - protein, 696 aa, Homo sapiens
  MOD_RES (25)..(25): Selenocysteine
  MOD_RES (65)..(65): Selenocysteine
  MOD_RES (100)..(100): Selenocysteine
  MOD_RES (127)..(132): Selenocysteine
  MOD_RES (134)..(135): Selenocysteine
  MOD_RES (139)..(139): Selenocysteine
  MOD_RES (150)..(150): Selenocysteine
  MOD_RES (156)..(156): Selenocysteine
  MOD_RES (159)..(160): Selenocysteine
  MOD_RES (162)..(162): Selenocysteine
  MOD_RES (166)..(166): Selenocysteine
  MOD_RES (182)..(183): Selenocysteine
  MOD_RES (187)..(187): Selenocysteine
  MOD_RES (192)..(192): Selenocysteine
  MOD_RES (196)..(197): Selenocysteine
  MOD_RES (205)..(205): Selenocysteine
  MOD_RES (215)..(215): Selenocysteine
  MOD_RES (218)..(218): Selenocysteine
  MOD_RES (226)..(226): Selenocysteine
  MOD_RES (231)..(231): Selenocysteine
  MOD_RES (239)..(239): Selenocysteine
  MOD_RES (243)..(243): Selenocysteine
  MOD_RES (262)..(265): Selenocysteine
  MOD_RES (268)..(268): Selenocysteine
  MOD_RES (270)..(270): Selenocysteine
  MOD_RES (276)..(278): Selenocysteine
  MOD_RES (281)..(281): Selenocysteine
  MOD_RES (309)..(309): Selenocysteine
  MOD_RES (311)..(311): Selenocysteine
  MOD_RES (335)..(335): Selenocysteine
  MOD_RES (343)..(343): Selenocysteine
  MOD_RES (412)..(412): Selenocysteine
  MOD_RES (438)..(438): Selenocysteine
  MOD_RES (494)..(494): Selenocysteine
  MOD_RES (523)..(523): Selenocysteine
  MOD_RES (536)..(536): Selenocysteine
  MOD_RES (540)..(540): Selenocysteine
  MOD_RES (551)..(551): Selenocysteine
  MOD_RES (569)..(569): Selenocysteine
  MOD_RES (585)..(585): Selenocysteine
  MOD_RES (633)..(633): Selenocysteine
  MOD_RES (642)..(642): Selenocysteine
  MOD_RES (657)..(657): Selenocysteine
  MOD_RES (665)..(665): Selenocysteine
  MOD_RES (673)..(673): Selenocysteine
  MOD_RES (695)..(695): Selenocysteine
MSEGAAAASPPGAASAAAASAEEGXAAAAAAAAAGGGPDGGGEGAAEPPRELRCSDCIVWNRQQXWLCVVPLFIGFIGLGLSLMLLKWIVVGSVKEYVPXDLVDSKGMGQDPFFLSKPSSFPKAMEXXXXXXSXXSPAXPSAGGAASSRXPNRISXRLXXIXRAPXRFPGHRVPIRASPRSXXARNXAAPAXVPSXXAPFFSSSXLGSRPPVPGXPSXQAMPSWPXAAYAXSSYLHDSXPSWXLSPFQDAASSSSSSSSSAXXXXPEXSXSPKFHXXXYSXERSEHFKPCRDKDLAYCLNDGECFVIEXLXGSHKHCRCKEGYQGVRCDQFLPKXDSILSDPXDHLGIEFMESEEVYQRQVLSISCIIFGIVIVGMFCAAFYFKSKKQAKQIQEQLKVPQNGKSYSLKASSXMAKSENLVKSHVQLQNYSKVERHPVXALEKMMESSFVGPQSFPEVPSPDRGSQSVKHHRSLSSCCSPGQRSGMLHRNAFRRXPPSPRSRLGGIVGPAYQQLEESRIPDQDXIPCQGYSSSGLKXQRNXSINMQLPSREXNPYFNSLEQKDLVGYSSXRASSVPIIPSVGLEEXCLQMPGISEVKSIKWCKNSYSADVVNVSIPVSDCLIAEQQEVKILLEXVQEQIRILXDARRSEDYELASVEXEDSASENXAFLPLSPXAKSEREAQFVLRNEIQRDSALXK

SEQ ID NO: 18314 - protein, 720 aa, Homo sapiens
  MOD_RES (25)..(25): Selenocysteine
  MOD_RES (65)..(65): Selenocysteine
  MOD_RES (100)..(100): Selenocysteine
  MOD_RES (127)..(132): Selenocysteine
  MOD_RES (134)..(135): Selenocysteine
  MOD_RES (139)..(139): Selenocysteine
  MOD_RES (150)..(150): Selenocysteine
  MOD_RES (156)..(156): Selenocysteine
  MOD_RES (159)..(160): Selenocysteine
  MOD_RES (162)..(162): Selenocysteine
  MOD_RES (166)..(166): Selenocysteine
  MOD_RES (182)..(183): Selenocysteine
  MOD_RES (187)..(187): Selenocysteine
  MOD_RES (192)..(192): Selenocysteine
  MOD_RES (196)..(197): Selenocysteine
  MOD_RES (205)..(205): Selenocysteine
  MOD_RES (215)..(215): Selenocysteine
  MOD_RES (218)..(218): Selenocysteine
  MOD_RES (226)..(226): Selenocysteine
  MOD_RES (231)..(231): Selenocysteine
  MOD_RES (239)..(239): Selenocysteine
  MOD_RES (243)..(243): Selenocysteine
  MOD_RES (262)..(265): Selenocysteine
  MOD_RES (268)..(268): Selenocysteine
  MOD_RES (270)..(270): Selenocysteine
  MOD_RES (276)..(278): Selenocysteine
  MOD_RES (281)..(281): Selenocysteine
  MOD_RES (309)..(309): Selenocysteine
  MOD_RES (311)..(311): Selenocysteine
  MOD_RES (335)..(335): Selenocysteine
  MOD_RES (343)..(343): Selenocysteine
  MOD_RES (412)..(412): Selenocysteine
  MOD_RES (438)..(438): Selenocysteine
  MOD_RES (494)..(494): Selenocysteine
  MOD_RES (523)..(523): Selenocysteine
  MOD_RES (534)..(534): Selenocysteine
  MOD_RES (560)..(560): Selenocysteine
  MOD_RES (564)..(564): Selenocysteine
  MOD_RES (575)..(575): Selenocysteine
  MOD_RES (593)..(593): Selenocysteine
  MOD_RES (609)..(609): Selenocysteine
  MOD_RES (657)..(657): Selenocysteine
  MOD_RES (666)..(666): Selenocysteine
  MOD_RES (681)..(681): Selenocysteine
  MOD_RES (689)..(689): Selenocysteine
  MOD_RES (697)..(697): Selenocysteine
  MOD_RES (719)..(719): Selenocysteine
MSEGAAAASPPGAASAAAASAEEGXAAAAAAAAAGGGPDGGGEGAAEPPRELRCSDCIVWNRQQXWLCVVPLFIGFIGLGLSLMLLKWIVVGSVKEYVPXDLVDSKGMGQDPFFLSKPSSFPKAMEXXXXXXSXXSPAXPSAGGAASSRXPNRISXRLXXIXRAPXRFPGHRVPIRASPRSXXARNXAAPAXVPSXXAPFFSSSXLGSRPPVPGXPSXQAMPSWPXAAYAXSSYLHDSXPSWXLSPFQDAASSSSSSSSSAXXXXPEXSXSPKFHXXXYSXERSEHFKPCRDKDLAYCLNDGECFVIEXLXGSHKHCRCKEGYQGVRCDQFLPKXDSILSDPXDHLGIEFMESEEVYQRQVLSISCIIFGIVIVGMFCAAFYFKSKKQAKQIQEQLKVPQNGKSYSLKASSXMAKSENLVKSHVQLQNYSKVERHPVXALEKMMESSFVGPQSFPEVPSPDRGSQSVKHHRSLSSCCSPGQRSGMLHRNAFRRXPPSPRSRLGGIVGPAYQQLEESRIPDQDXIPCQGIEVRKXISHLPIQLWCVERPLDLKYSSSGLKXQRNXSINMQLPSREXNPYFNSLEQKDLVGYSSXRASSVPIIPSVGLEEXCLQMPGISEVKSIKWCKNSYSADVVNVSIPVSDCLIAEQQEVKILLEXVQEQIRILXDARRSEDYELASVEXEDSASENXAFLPLSPXAKSEREAQFVLRNEIQRDSALXK

SEQ ID NO: 18315 - protein, 90 aa, Homo sapiens
  MOD_RES (3)..(3): Selenocysteine
  MOD_RES (28)..(28): Selenocysteine
  MOD_RES (41)..(41): Selenocysteine
  MOD_RES (57)..(57): Selenocysteine
  MOD_RES (73)..(73): Selenocysteine
  MOD_RES (88)..(88): Selenocysteine
MPXDHEEPCGPSHKSFCLNGGLCYVIPXIPSPFCRCVENYXGARCEEVFLPGSSIQXKSNLFEAFVALAVLVXLIIGAFYFLCRCGNXCM

SEQ ID NO: 18316 - protein, 110 aa, Homo sapiens
  MOD_RES (3)..(3): Selenocysteine
  MOD_RES (28)..(28): Selenocysteine
  MOD_RES (41)..(41): Selenocysteine
  MOD_RES (57)..(57): Selenocysteine
  MOD_RES (73)..(73): Selenocysteine
  MOD_RES (103)..(103): Selenocysteine
  MOD_RES (106)..(106): Selenocysteine
MPXDHEEPCGPSHKSFCLNGGLCYVIPXIPSPFCRCVENYXGARCEEVFLPGSSIQXKSNLFEAFVALAVLVXLIIGAFYFLCRKGHFQRASSVQYDINLVEXSSXSAHH

SEQ ID NO: 18317 - protein, 115 aa, Homo sapiens
  MOD_RES (3)..(3): Selenocysteine
  MOD_RES (28)..(28): Selenocysteine
  MOD_RES (41)..(41): Selenocysteine
  MOD_RES (57)..(57): Selenocysteine
  MOD_RES (73)..(73): Selenocysteine
  MOD_RES (103)..(103): Selenocysteine
  MOD_RES (106)..(106): Selenocysteine
MPXDHEEPCGPSHKSFCLNGGLCYVIPXIPSPFCRCVENYXGARCEEVFLPGSSIQXKSNLFEAFVALAVLVXLIIGAFYFLCRKGHFQRASSVQYDINLVEXSSXSAHHSHEQH

SEQ ID NO: 18318 - protein, 36 aa, Homo sapiens
  MOD_RES (3)..(3): Selenocysteine
  MOD_RES (28)..(28): Selenocysteine
MPXDHEEPCGPSHKSFCLNGGLCYVIPXIPSPFCRK

SEQ ID NO: 18319 - protein, 35 aa, Homo sapiens
  MOD_RES (3)..(3): Selenocysteine
  MOD_RES (28)..(28): Selenocysteine
MPXDHEEPCGPSHKSFCLNGGLCYVIPXIPSPFCS

SEQ ID NO: 18320 - protein, 78 aa, Homo sapiens
  MOD_RES (5)..(5): Selenocysteine
MDCCXENACSKPDDDILDIPLDDPGANAAAAKIQASFRGHMARKKIKSGERGRKGPGPGGPGGAGVARGGAGGGPSGD

SEQ ID NO: 18321 - protein, 12 aa, Homo sapiens
  MOD_RES (2)..(2): Selenocysteine
MXHGEELGSDVH

SEQ ID NO: 18322 - protein, 66 aa, Homo sapiens
  MOD_RES (2)..(2): Selenocysteine
  MOD_RES (19)..(19): Selenocysteine
  MOD_RES (35)..(35): Selenocysteine
  MOD_RES (60)..(60): Selenocysteine
MXHGEELGSDVHQDSIVLXYLEGLLMHQAAGGSGXAVDKKSAGHNEEDQNFNISGSAFPXCQSNGP

SEQ ID NO: 18323 - protein, 1158 aa, Homo sapiens
  MOD_RES (2)..(2): Selenocysteine
  MOD_RES (19)..(19): Selenocysteine
  MOD_RES (35)..(35): Selenocysteine
  MOD_RES (60)..(60): Selenocysteine
  MOD_RES (70)..(70): Selenocysteine
  MOD_RES (72)..(72): Selenocysteine
  MOD_RES (131)..(131): Selenocysteine
  MOD_RES (146)..(146): Selenocysteine
  MOD_RES (187)..(187): Selenocysteine
  MOD_RES (201)..(201): Selenocysteine
  MOD_RES (207)..(207): Selenocysteine
  MOD_RES (227)..(227): Selenocysteine
  MOD_RES (255)..(255): Selenocysteine
  MOD_RES (287)..(287): Selenocysteine
  MOD_RES (331)..(331): Selenocysteine
  MOD_RES (344)..(344): Selenocysteine
  MOD_RES (388)..(388): Selenocysteine
  MOD_RES (410)..(410): Selenocysteine
  MOD_RES (412)..(413): Selenocysteine
  MOD_RES (425)..(425): Selenocysteine
  MOD_RES (449)..(449): Selenocysteine
  MOD_RES (464)..(464): Selenocysteine
  MOD_RES (470)..(470): Selenocysteine
  MOD_RES (486)..(486): Selenocysteine
  MOD_RES (499)..(499): Selenocysteine
  MOD_RES (517)..(517): Selenocysteine
  MOD_RES (531)..(531): Selenocysteine
  MOD_RES (537)..(537): Selenocysteine
  MOD_RES (545)..(545): Selenocysteine
  MOD_RES (548)..(549): Selenocysteine
  MOD_RES (553)..(553): Selenocysteine
  MOD_RES (558)..(558): Selenocysteine
  MOD_RES (586)..(586): Selenocysteine
  MOD_RES (592)..(592): Selenocysteine
  MOD_RES (594)..(594): Selenocysteine
  MOD_RES (603)..(603): Selenocysteine
  MOD_RES (624)..(624): Selenocysteine
  MOD_RES (656)..(656): Selenocysteine
  MOD_RES (659)..(659): Selenocysteine
  MOD_RES (678)..(678): Selenocysteine
  MOD_RES (692)..(692): Selenocysteine
  MOD_RES (711)..(711): Selenocysteine
  MOD_RES (731)..(731): Selenocysteine
  MOD_RES (738)..(738): Selenocysteine
  MOD_RES (768)..(768): Selenocysteine
  MOD_RES (863)..(863): Selenocysteine
  MOD_RES (970)..(970): Selenocysteine
  MOD_RES (989)..(989): Selenocysteine
  MOD_RES (999)..(999): Selenocysteine
  MOD_RES (1008)..(1008): Selenocysteine
  MOD_RES (1013)..(1013): Selenocysteine
  MOD_RES (1047)..(1047): Selenocysteine
  MOD_RES (1062)..(1062): Selenocysteine
  MOD_RES (1064)..(1064): Selenocysteine
  MOD_RES (1080)..(1080): Selenocysteine
  MOD_RES (1084)..(1084): Selenocysteine
  MOD_RES (1103)..(1103): Selenocysteine
  MOD_RES (1111)..(1111): Selenocysteine
  MOD_RES (1114)..(1114): Selenocysteine
  MOD_RES (1152)..(1152): Selenocysteine
MXHGEELGSDVHQDSIVLXYLEGLLMHQAAGGSGXAVDKKSAGHNEEDQNFNISGSAFPXCQSNGPVLNXHXYQGSGMLHLKKARLLQSSEDWNAAKRKRLSDSIMNLNVKKEALLAGMVDSVPKGKQDSXLLASLLQSFSSRLQXVALSQQIRQSLKEQGYALSHDSLKVEKDLRCYGVASSHLKXLLKKSKVKDQKPDXNLPDVXKNLIRDRFAESPHHVGQSGXKVMSEPLSCAARLQAVASMVEKRASPAXSPKPSVACSQLALLLSSEAHLQQYSREHALKXQNANQAASERLAAMARLQENGQKDVGSYQLPKGMSSHLNGQARXSSSKLMASKSSAXVFQNPMGIIPSSPKNAGYKNSLERNNIKQAANNSLLLHLLKSQXIPKPMNGHSHSERGSIFEESSXPXXIDEYSDNNPSFXDDSSGDESSYSNCVPIDLSCKHRXEKSESDQPVSLDNFXQSLLNXWDPKVPDVDIKEDQDXSKNSKLNSHQKVXLLQLLLGHKNEENVEKNXSPQGVHNDVSKFNXQNYARXSVIESPSXNRXXPVSXPPLLXSSKAGSPINLSQHSLVIKWNSPPYVCSXQSEKLXNXASNHSMDLXKSKDPPGEKPAQNEGAQNSAXFSASKLLQNLAQCGMQSSMSVEEQRPSKQLLXGNXDKPIGMIDRLNSPLLSNKXNAVEENKAFSSQPXGPEPGLSGSEIENLLERRXVLQLLLGNPNKGKSEKKEKXPLRDESXQEHSERALSEQILMVKIKSEPCDDLQIPNXNVHLSHDAKSAPFLGMAPAVQRSAPALPVSEDFKSEPVSPQDFSFSKNGLLSRLLRQNQDSYLADDSDRSHRNNEMALLESKNLCMVPKKRKLYXEPLENPFKKMKNNIVDAANNHSAPEVLYGSLLNQEELKFSRNDLEFKYPAGHGSASESEHRSWARESKSFNVLKQLLLSENCVRDLSPHRSNSVADSKKKGHKNNVXNSKPEFSISSLNGLMYSSXQPSSCMDNRXFSYPGVVKXPVSPXFPEHLGCAGSRPESGLLNGCSMPSEKGPIKWVIXDAEKNEYEKDSPRLXKXNPILYYMLQKGGNSVXSREXQDKDIWREASSAESVSQVXAKEELLPXAEXKASFFNLRSPYNSHMGNNASRPHSANGEVYGLLGSVLXIKKESE

SEQ ID NO: 18324 - protein, 355 aa, Homo sapiens
  MOD_RES (13)..(13): Selenocysteine
  MOD_RES (22)..(22): Selenocysteine
  MOD_RES (30)..(30): Selenocysteine
  MOD_RES (35)..(35): Selenocysteine
  MOD_RES (47)..(47): Selenocysteine
  MOD_RES (51)..(51): Selenocysteine
  MOD_RES (61)..(61): Selenocysteine
  MOD_RES (92)..(92): Selenocysteine
  MOD_RES (138)..(138): Selenocysteine
  MOD_RES (144)..(144): Selenocysteine
  MOD_RES (186)..(186): Selenocysteine
  MOD_RES (205)..(205): Selenocysteine
  MOD_RES (215)..(215): Selenocysteine
  MOD_RES (246)..(246): Selenocysteine
  MOD_RES (276)..(276): Selenocysteine
  MOD_RES (294)..(294): Selenocysteine
  MOD_RES (303)..(303): Selenocysteine
  MOD_RES (327)..(327): Selenocysteine
  MOD_RES (331)..(331): Selenocysteine
  MOD_RES (350)..(350): Selenocysteine
MAGPGGWRDREVXDLGHLPDPXGIFSLDKXIGLGXYGRIYLGLHEKXGAFXAVKVMNARKXPLPEIGRRVRVNKYQKSVGWRYSDEEEDLRXELNLLRKYSFHKNIVSFYGAFFKLSPPGQRHQLWMVMELCAAGSVXDVVRMXSNQSLKEDWIAYICREILQGLAHLHAHRVIHRDIKGQNVLLXHNAEVKLVDFGVSAQVSRXNGRRNSFIGXPYWMAPEVIDCDEDPRRSYDYRSDVWSVGIXAIEMAEGAPPLCNLQPLEALFVILRESAPXVKSSGWSRKFHNFMEKCXIKNFLFRPXSANMLQHPFVRDIKNERHVVESLXRHLXGIIKKRQKKGFAVSQDHAXALQPG

SEQ ID NO: 18325 - protein, 1582 aa, Homo sapiens
  MOD_RES (13)..(13): Selenocysteine
  MOD_RES (22)..(22): Selenocysteine
  MOD_RES (30)..(30): Selenocysteine
  MOD_RES (35)..(35): Selenocysteine
  MOD_RES (47)..(47): Selenocysteine
  MOD_RES (51)..(51): Selenocysteine
  MOD_RES (61)..(61): Selenocysteine
  MOD_RES (92)..(92): Selenocysteine
  MOD_RES (138)..(138): Selenocysteine
  MOD_RES (144)..(144): Selenocysteine
  MOD_RES (186)..(186): Selenocysteine
  MOD_RES (205)..(205): Selenocysteine
  MOD_RES (215)..(215): Selenocysteine
  MOD_RES (246)..(246): Selenocysteine
  MOD_RES (276)..(276): Selenocysteine
  MOD_RES (294)..(294): Selenocysteine
  MOD_RES (303)..(303): Selenocysteine
  MOD_RES (327)..(327): Selenocysteine
  MOD_RES (331)..(331): Selenocysteine
  MOD_RES (357)..(357): Selenocysteine
  MOD_RES (367)..(367): Selenocysteine
  MOD_RES (375)..(375): Selenocysteine
  MOD_RES (505)..(505): Selenocysteine
  MOD_RES (507)..(507): Selenocysteine
  MOD_RES (573)..(573): Selenocysteine
  MOD_RES (606)..(606): Selenocysteine
  MOD_RES (616)..(616): Selenocysteine
  MOD_RES (626)..(626): Selenocysteine
  MOD_RES (664)..(664): Selenocysteine
  MOD_RES (690)..(690): Selenocysteine
  MOD_RES (848)..(848): Selenocysteine
  MOD_RES (860)..(860): Selenocysteine
  MOD_RES (887)..(887): Selenocysteine
  MOD_RES (906)..(906): Selenocysteine
  MOD_RES (930)..(930): Selenocysteine
  MOD_RES (941)..(941): Selenocysteine
  MOD_RES (945)..(945): Selenocysteine
  MOD_RES (1023)..(1023): Selenocysteine
  MOD_RES (1068)..(1068): Selenocysteine
  MOD_RES (1086)..(1086): Selenocysteine
  MOD_RES (1139)..(1139): Selenocysteine
  MOD_RES (1209)..(1209): Selenocysteine
  MOD_RES (1226)..(1226): Selenocysteine
  MOD_RES (1242)..(1242): Selenocysteine
  MOD_RES (1264)..(1264): Selenocysteine
  MOD_RES (1278)..(1278): Selenocysteine
  MOD_RES (1301)..(1301): Selenocysteine
  MOD_RES (1312)..(1312): Selenocysteine
  MOD_RES (1325)..(1326): Selenocysteine
  MOD_RES (1350)..(1350): Selenocysteine
  MOD_RES (1405)..(1405): Selenocysteine
  MOD_RES (1412)..(1412): Selenocysteine
  MOD_RES (1447)..(1447): Selenocysteine
  MOD_RES (1475)..(1475): Selenocysteine
  MOD_RES (1509)..(1509): Selenocysteine
  MOD_RES (1512)..(1513): Selenocysteine
  MOD_RES (1547)..(1547): Selenocysteine
  MOD_RES (1555)..(1555): Selenocysteine
  MOD_RES (1557)..(1557): Selenocysteine
  MOD_RES (1569)..(1569): Selenocysteine
MAGPGGWRDREVXDLGHLPDPXGIFSLDKXIGLGXYGRIYLGLHEKXGAFXAVKVMNARKXPLPEIGRRVRVNKYQKSVGWRYSDEEEDLRXELNLLRKYSFHKNIVSFYGAFFKLSPPGQRHQLWMVMELCAAGSVXDVVRMXSNQSLKEDWIAYICREILQGLAHLHAHRVIHRDIKGQNVLLXHNAEVKLVDFGVSAQVSRXNGRRNSFIGXPYWMAPEVIDCDEDPRRSYDYRSDVWSVGIXAIEMAEGAPPLCNLQPLEALFVILRESAPXVKSSGWSRKFHNFMEKCXIKNFLFRPXSANMLQHPFVRDIKNERHVVESLXRHLXGIIKKRQKKGIPLIFEREEAIKEQYXVRRFRGPSCXHELLRLPXSSRCRPLRVLHGEPSQPRWLPDREEPQVQALQQLQGAARVFMPLQALDSAPKPLKGQAQAPQRLQGAARVFMPLQAQVKAKASKPLQMQIKAPPRLRRAARVLMPLQAQVRAPRLLQVQSQVSKKQQAQXQXSEPQDLDQVPEEFQGQDQVPEQQRQGQAPEQQQRHNQVPEQELEQNQAPEQPEVQEQAAEPAQAEXEAEEPESLRVNAQVFLPLLSQDHHVLLPLHLDXQVLIPVEGQXEGSPQAQAWXLEPPQAIGSVQALIEGLSRDLLRAPNSNNSKPLGPLQXLMENLSSNRFYSQPEQAREKKSKVSXLRQALAKRLSPKRFRAKSSWRPEKLELSDLEARRQRRQRRWEDIFNQHEEELRQVDKDKEDESSDNDEVFHSIQAEVQIEPLKPYISNPKKIEVQERSPSVPNNQDHAHHVKFSSSVPQRSLLEQAQKPIDIRQRSSQNRQNWLAASESSSEEESPVXGRRSQSSPPYSXIDQKLLVDIHVPDGFKVGKISPPVYLXNEWVGYNALSEIFRNDWLXPAPVIQPPEEDGDYVELYDASADXDGDDDDESNDXFEDXYDHANGNDDLDNQVDQANDVCKDHDDDNNKFVDDVNNNYYEAPSCPRASYGRDGSCKQDGYDGSRGKEEAYRGYGSHXANRSHGGSAASEDNAAIGDQEEHAANIGSERRGSEGDGGKGVVRXSEESGALGLNGEENCSEXDGPGLKRPASQDFEYLQEEPGGGNEASNAIDSGAAPSAPDHESDNKDISESSXQSDFSANHSSPSKGSGMSADANFASAILYAGFVEVPEESPKQPSEVNVNPLYVSPACKKPLIHMYEKEFXSEICCGSLWGVNLLLGXRSNLYLMDRSGKADIXKLIRRRPFRQIQVLEPLNLLIXISGHKNRLRVYHLXWLRNKILNNDPESKRRQEEMLKXEEACKAIDKLXGCEHFSVLQHEEXXYIAIALKSSIHLYAWAPKSFDESXAIKVCIDQSADSEGDYMSYQAYIRILAKIQAADPVNRFKRPDELLHLLKLKVFPXLDHKPVXVDLAIGSEKRLKIFFSSADGYHLIDAESEVMSDVXLPKNPLEIIIPQNIIILPDCLGIGMMLXFNAEALSVEANEQLFKKILEMWKDIPSSIAFECXQRXXGWGQKAIEVRSLQSRVLESELKRRSIKKLRFLCXRGDKLFFXSXLRNHHSRVYFMXLGKLEELQSNYDV

SEQ ID NO: 18326 - protein, 188 aa, Homo sapiens
  MOD_RES (13)..(13): Selenocysteine
  MOD_RES (22)..(22): Selenocysteine
  MOD_RES (30)..(30): Selenocysteine
  MOD_RES (35)..(35): Selenocysteine
  MOD_RES (47)..(47): Selenocysteine
  MOD_RES (51)..(51): Selenocysteine
  MOD_RES (61)..(61): Selenocysteine
  MOD_RES (92)..(92): Selenocysteine
  MOD_RES (138)..(138): Selenocysteine
  MOD_RES (144)..(144): Selenocysteine
  MOD_RES (171)..(171): Selenocysteine
MAGPGGWRDREVXDLGHLPDPXGIFSLDKXIGLGXYGRIYLGLHEKXGAFXAVKVMNARKXPLPEIGRRVRVNKYQKSVGWRYSDEEEDLRXELNLLRKYSFHKNIVSFYGAFFKLSPPGQRHQLWMVMELCAAGSVXDVVRMXSNQSLKEDWIAYICREILQPKVIFLGXGCSDSSLKKELCLKHQN

SEQ ID NO: 18327 - protein, 163 aa, Homo sapiens
  MOD_RES (28)..(28): Selenocysteine
  MOD_RES (37)..(37): Selenocysteine
  MOD_RES (56)..(56): Selenocysteine
  MOD_RES (90)..(90): Selenocysteine
  MOD_RES (93)..(94): Selenocysteine
  MOD_RES (128)..(128): Selenocysteine
  MOD_RES (136)..(136): Selenocysteine
  MOD_RES (138)..(138): Selenocysteine
  MOD_RES (150)..(150): Selenocysteine
MQVPRERIKIAFRLWIPILVIRIVVAGXWPQAPGLSXLGLNIIILPDCLGIGMMLXFNAEALSVEANEQLFKKILEMWKDIPSSIAFECXQRXXGWGQKAIEVRSLQSRVLESELKRRSIKKLRFLCXRGDKLFFXSXLRNHHSRVYFMXLGKLEELQSNYDV

SEQ ID NO: 18328 - protein, 65 aa, Homo sapiens
  MOD_RES (36)..(36): Selenocysteine
  MOD_RES (42)..(42): Selenocysteine
  MOD_RES (52)..(52): Selenocysteine
  MOD_RES (62)..(62): Selenocysteine
  MOD_RES (65)..(65): Selenocysteine
MALPPSPLAMEYVNDFDLMKFEVKREPSEGRPGPPXASLGSXPYSSVPPSPXFSEPGMVGAXEGX

SEQ ID NO: 18329 - protein, 237 aa, Homo sapiens
  MOD_RES (36)..(36): Selenocysteine
  MOD_RES (42)..(42): Selenocysteine
  MOD_RES (52)..(52): Selenocysteine
  MOD_RES (62)..(62): Selenocysteine
  MOD_RES (65)..(65): Selenocysteine
  MOD_RES (77)..(77): Selenocysteine
  MOD_RES (121)..(121): Selenocysteine
  MOD_RES (166)..(166): Selenocysteine
  MOD_RES (223)..(223): Selenocysteine
MALPPSPLAMEYVNDFDLMKFEVKREPSEGRPGPPXASLGSXPYSSVPPSPXFSEPGMVGAXEGXRPGLEELYWLAXLQQQLGAGEALGLSPEEAMELLQGQGPVPVDGPHGYYPGSPEEXGAQHVQLAERFSDAALVSMSVRELNRQLRGCGRDEALRLKQRRRXLKNRGYAQACRSKRLQQRRGLEAERARLAAQLDALRAEVARLARERDLYKARCDRLXSSGPGSGDPSHLFL

SEQ ID NO: 18330 - protein, 98 aa, Homo sapiens
  MOD_RES (27)..(27): Selenocysteine
  MOD_RES (84)..(84): Selenocysteine
MSVRELNRQLRGCGRDEALRLKQRRRXLKNRGYAQACRSKRLQQRRGLEAERARLAAQLDALRAEVARLARERDLYKARCDRLXSSGPGSGDPSHLFL

SEQ ID NO: 18331 - protein, 597 aa, Homo sapiens
  MOD_RES (30)..(30): Selenocysteine
  MOD_RES (40)..(40): Selenocysteine
  MOD_RES (129)..(129): Selenocysteine
  MOD_RES (152)..(153): Selenocysteine
  MOD_RES (174)..(174): Selenocysteine
  MOD_RES (232)..(232): Selenocysteine
  MOD_RES (249)..(249): Selenocysteine
  MOD_RES (292)..(292): Selenocysteine
  MOD_RES (299)..(299): Selenocysteine
  MOD_RES (316)..(316): Selenocysteine
  MOD_RES (337)..(337): Selenocysteine
  MOD_RES (341)..(341): Selenocysteine
  MOD_RES (349)..(349): Selenocysteine
  MOD_RES (357)..(357): Selenocysteine
  MOD_RES (371)..(371): Selenocysteine
  MOD_RES (385)..(385): Selenocysteine
  MOD_RES (388)..(388): Selenocysteine
  MOD_RES (401)..(401): Selenocysteine
  MOD_RES (410)..(410): Selenocysteine
  MOD_RES (413)..(413): Selenocysteine
  MOD_RES (427)..(427): Selenocysteine
  MOD_RES (448)..(448): Selenocysteine
  MOD_RES (466)..(466): Selenocysteine
  MOD_RES (574)..(574): Selenocysteine
  MOD_RES (585)..(585): Selenocysteine
  MOD_RES (591)..(591): Selenocysteine
MERGLPLLCAVLALVLAPAGAFRNDKCGDXIKIESPGYLXSPGYPHSYHPSEKCEWLIQAPDPYQRIMINFNPHFDLEDRDCKYDYVEVFDGENENGHFRGKFCGKIAPPPVVSSGPFLFIKFVSDYEXHGAGFSIRYEIFKRGPECSQNYXXPSGVIKSPGFPEKYPNSLECXYIVFVPKMSEIILEFESFDLEPDSNPPGGMFCRYDRLEIWDGFPDVGPHIGRYCGQKXPGRIRSSSGILSMVFYXDSAIAKEGFSANYSVLQSSVSEDFKCMEALGMESGEIHSDQIXASSQYSXNWSAERSRLNYPENGWXPGEDSYREWIQVDLGLLRFVXAVGXQGAISKEXKKKYYVKXYKIDVSSNGEDWIXIKEGNKPVLFQGNXNPXDVVVAVFPKPLIXRFVRIKPAXWEXGISMRFEVYGCKIXDYPCSGMLGMVSGLISDSQIXSSNQGDRNWMPENIRLVXSRSGWALPPAPHSYINEWLQIDLGEEKIVRGIIIQGGKHRENKVFMRKFKIGYSNNGSDWKMIMDDSKRKAKVRAGDWEEVIPYVLDFNQGPLAFSRGRASYFLPAMXLEEVCDGVSKXLDSRKXGIWHEK

SEQ ID NO: 18332 - protein, 609 aa, Homo sapiens
  MOD_RES (30)..(30): Selenocysteine
  MOD_RES (40)..(40): Selenocysteine
  MOD_RES (129)..(129): Selenocysteine
  MOD_RES (152)..(153): Selenocysteine
  MOD_RES (174)..(174): Selenocysteine
  MOD_RES (232)..(232): Selenocysteine
  MOD_RES (249)..(249): Selenocysteine
  MOD_RES (292)..(292): Selenocysteine
  MOD_RES (299)..(299): Selenocysteine
  MOD_RES (316)..(316): Selenocysteine
  MOD_RES (337)..(337): Selenocysteine
  MOD_RES (341)..(341): Selenocysteine
  MOD_RES (349)..(349): Selenocysteine
  MOD_RES (357)..(357): Selenocysteine
  MOD_RES (371)..(371): Selenocysteine
  MOD_RES (385)..(385): Selenocysteine
  MOD_RES (388)..(388): Selenocysteine
  MOD_RES (401)..(401): Selenocysteine
  MOD_RES (410)..(410): Selenocysteine
  MOD_RES (413)..(413): Selenocysteine
  MOD_RES (427)..(427): Selenocysteine
  MOD_RES (448)..(448): Selenocysteine
  MOD_RES (466)..(466): Selenocysteine
  MOD_RES (548)..(548): Selenocysteine
  MOD_RES (553)..(553): Selenocysteine
  MOD_RES (559)..(559): Selenocysteine
  MOD_RES (570)..(570): Selenocysteine
  MOD_RES (589)..(590): Selenocysteine
  MOD_RES (594)..(594): Selenocysteine
  MOD_RES (598)..(598): Selenocysteine
  MOD_RES (603)..(603): Selenocysteine
MERGLPLLCAVLALVLAPAGAFRNDKCGDXIKIESPGYLXSPGYPHSYHPSEKCEWLIQAPDPYQRIMINFNPHFDLEDRDCKYDYVEVFDGENENGHFRGKFCGKIAPPPVVSSGPFLFIKFVSDYEXHGAGFSIRYEIFKRGPECSQNYXXPSGVIKSPGFPEKYPNSLECXYIVFVPKMSEIILEFESFDLEPDSNPPGGMFCRYDRLEIWDGFPDVGPHIGRYCGQKXPGRIRSSSGILSMVFYXDSAIAKEGFSANYSVLQSSVSEDFKCMEALGMESGEIHSDQIXASSQYSXNWSAERSRLNYPENGWXPGEDSYREWIQVDLGLLRFVXAVGXQGAISKEXKKKYYVKXYKIDVSSNGEDWIXIKEGNKPVLFQGNXNPXDVVVAVFPKPLIXRFVRIKPAXWEXGISMRFEVYGCKIXDYPCSGMLGMVSGLISDSQIXSSNQGDRNWMPENIRLVXSRSGWALPPAPHSYINEWLQIDLGEEKIVRGIIIQGGKHRENKVFMRKFKIGYSNNGSDWKMIMDDSKRKAKSFEGNNNYDXPELRXFPALSXRFIRIYPERAXHGGLGLRMELLGCEVEGGXXVLAXEKPXVIDSXIQSGIK

SEQ ID NO: 18333 - protein, 641 aa, Homo sapiens
  MOD_RES (30)..(30): Selenocysteine
  MOD_RES (40)..(40): Selenocysteine
  MOD_RES (129)..(129): Selenocysteine
  MOD_RES (152)..(153): Selenocysteine
  MOD_RES (174)..(174): Selenocysteine
  MOD_RES (232)..(232): Selenocysteine
  MOD_RES (249)..(249): Selenocysteine
  MOD_RES (292)..(292): Selenocysteine
  MOD_RES (299)..(299): Selenocysteine
  MOD_RES (316)..(316): Selenocysteine
  MOD_RES (337)..(337): Selenocysteine
  MOD_RES (341)..(341): Selenocysteine
  MOD_RES (349)..(349): Selenocysteine
  MOD_RES (357)..(357): Selenocysteine
  MOD_RES (371)..(371): Selenocysteine
  MOD_RES (385)..(385): Selenocysteine
  MOD_RES (388)..(388): Selenocysteine
  MOD_RES (401)..(401): Selenocysteine
  MOD_RES (410)..(410): Selenocysteine
  MOD_RES (413)..(413): Selenocysteine
  MOD_RES (427)..(427): Selenocysteine
  MOD_RES (448)..(448): Selenocysteine
  MOD_RES (466)..(466): Selenocysteine
  MOD_RES (548)..(548): Selenocysteine
  MOD_RES (553)..(553): Selenocysteine
  MOD_RES (559)..(559): Selenocysteine
  MOD_RES (570)..(570): Selenocysteine
  MOD_RES (588)..(588): Selenocysteine
  MOD_RES (591)..(591): Selenocysteine
  MOD_RES (615)..(615): Selenocysteine
MERGLPLLCAVLALVLAPAGAFRNDKCGDXIKIESPGYLXSPGYPHSYHPSEKCEWLIQAPDPYQRIMINFNPHFDLEDRDCKYDYVEVFDGENENGHFRGKFCGKIAPPPVVSSGPFLFIKFVSDYEXHGAGFSIRYEIFKRGPECSQNYXXPSGVIKSPGFPEKYPNSLECXYIVFVPKMSEIILEFESFDLEPDSNPPGGMFCRYDRLEIWDGFPDVGPHIGRYCGQKXPGRIRSSSGILSMVFYXDSAIAKEGFSANYSVLQSSVSEDFKCMEALGMESGEIHSDQIXASSQYSXNWSAERSRLNYPENGWXPGEDSYREWIQVDLGLLRFVXAVGXQGAISKEXKKKYYVKXYKIDVSSNGEDWIXIKEGNKPVLFQGNXNPXDVVVAVFPKPLIXRFVRIKPAXWEXGISMRFEVYGCKIXDYPCSGMLGMVSGLISDSQIXSSNQGDRNWMPENIRLVXSRSGWALPPAPHSYINEWLQIDLGEEKIVRGIIIQGGKHRENKVFMRKFKIGYSNNGSDWKMIMDDSKRKAKSFEGNNNYDXPELRXFPALSXRFIRIYPERAXHGGLGLRMELLGCEVEGXINXDQECPCARALAKDAKKKKRWADSXHCRCVRSIHGEMWSSGKGVCSLDANL

SEQ ID NO: 18334 - protein, 644 aa, Homo sapiens
  MOD_RES (30)..(30): Selenocysteine
  MOD_RES (40)..(40): Selenocysteine
  MOD_RES (129)..(129): Selenocysteine
  MOD_RES (152)..(153): Selenocysteine
  MOD_RES (174)..(174): Selenocysteine
  MOD_RES (232)..(232): Selenocysteine
  MOD_RES (249)..(249): Selenocysteine
  MOD_RES (292)..(292): Selenocysteine
  MOD_RES (299)..(299): Selenocysteine
  MOD_RES (316)..(316): Selenocysteine
  MOD_RES (337)..(337): Selenocysteine
  MOD_RES (341)..(341): Selenocysteine
  MOD_RES (349)..(349): Selenocysteine
  MOD_RES (357)..(357): Selenocysteine
  MOD_RES (371)..(371): Selenocysteine
  MOD_RES (385)..(385): Selenocysteine
  MOD_RES (388)..(388): Selenocysteine
  MOD_RES (401)..(401): Selenocysteine
  MOD_RES (410)..(410): Selenocysteine
  MOD_RES (413)..(413): Selenocysteine
  MOD_RES (427)..(427): Selenocysteine
  MOD_RES (448)..(448): Selenocysteine
  MOD_RES (466)..(466): Selenocysteine
  MOD_RES (548)..(548): Selenocysteine
  MOD_RES (553)..(553): Selenocysteine
  MOD_RES (559)..(559): Selenocysteine
  MOD_RES (570)..(570): Selenocysteine
  MOD_RES (589)..(589): Selenocysteine
  MOD_RES (593)..(594): Selenocysteine
  MOD_RES (614)..(614): Selenocysteine
  MOD_RES (621)..(621): Selenocysteine
  MOD_RES (624)..(625): Selenocysteine
  MOD_RES (629)..(629): Selenocysteine
  MOD_RES (633)..(633): Selenocysteine
  MOD_RES (638)..(638): Selenocysteine
MERGLPLLCAVLALVLAPAGAFRNDKCGDXIKIESPGYLXSPGYPHSYHPSEKCEWLIQAPDPYQRIMINFNPHFDLEDRDCKYDYVEVFDGENENGHFRGKFCGKIAPPPVVSSGPFLFIKFVSDYEXHGAGFSIRYEIFKRGPECSQNYXXPSGVIKSPGFPEKYPNSLECXYIVFVPKMSEIILEFESFDLEPDSNPPGGMFCRYDRLEIWDGFPDVGPHIGRYCGQKXPGRIRSSSGILSMVFYXDSAIAKEGFSANYSVLQSSVSEDFKCMEALGMESGEIHSDQIXASSQYSXNWSAERSRLNYPENGWXPGEDSYREWIQVDLGLLRFVXAVGXQGAISKEXKKKYYVKXYKIDVSSNGEDWIXIKEGNKPVLFQGNXNPXDVVVAVFPKPLIXRFVRIKPAXWEXGISMRFEVYGCKIXDYPCSGMLGMVSGLISDSQIXSSNQGDRNWMPENIRLVXSRSGWALPPAPHSYINEWLQIDLGEEKIVRGIIIQGGKHRENKVFMRKFKIGYSNNGSDWKMIMDDSKRKAKSFEGNNNYDXPELRXFPALSXRFIRIYPERAXHGGLGLRMELLGCEVEAPXAGPXXPNGNLVDECDDDQANCHSGXGDDFQLXGGXXVLAXEKPXVIDSXIQSGIK

SEQ ID NO: 18335 - protein, 704 aa, Homo sapiens
  MOD_RES (30)..(30): Selenocysteine
  MOD_RES (40)..(40): Selenocysteine
  MOD_RES (129)..(129): Selenocysteine
  MOD_RES (152)..(153): Selenocysteine
  MOD_RES (174)..(174): Selenocysteine
  MOD_RES (232)..(232): Selenocysteine
  MOD_RES (249)..(249): Selenocysteine
  MOD_RES (292)..(292): Selenocysteine
  MOD_RES (299)..(299): Selenocysteine
  MOD_RES (316)..(316): Selenocysteine
  MOD_RES (337)..(337): Selenocysteine
  MOD_RES (341)..(341): Selenocysteine
  MOD_RES (349)..(349): Selenocysteine
  MOD_RES (357)..(357): Selenocysteine
  MOD_RES (371)..(371): Selenocysteine
  MOD_RES (385)..(385): Selenocysteine
  MOD_RES (388)..(388): Selenocysteine
  MOD_RES (401)..(401): Selenocysteine
  MOD_RES (410)..(410): Selenocysteine
  MOD_RES (413)..(413): Selenocysteine
  MOD_RES (427)..(427): Selenocysteine
  MOD_RES (448)..(448): Selenocysteine
  MOD_RES (466)..(466): Selenocysteine
  MOD_RES (548)..(548): Selenocysteine
  MOD_RES (553)..(553): Selenocysteine
  MOD_RES (559)..(559): Selenocysteine
  MOD_RES (570)..(570): Selenocysteine
  MOD_RES (589)..(589): Selenocysteine
  MOD_RES (593)..(594): Selenocysteine
  MOD_RES (614)..(614): Selenocysteine
  MOD_RES (621)..(621): Selenocysteine
  MOD_RES (625)..(625): Selenocysteine
  MOD_RES (644)..(644): Selenocysteine
  MOD_RES (651)..(651): Selenocysteine
  MOD_RES (667)..(667): Selenocysteine
  MOD_RES (686)..(687): Selenocysteine
MERGLPLLCAVLALVLAPAGAFRNDKCGDXIKIESPGYLXSPGYPHSYHPSEKCEWLIQAPDPYQRIMINFNPHFDLEDRDCKYDYVEVFDGENENGHFRGKFCGKIAPPPVVSSGPFLFIKFVSDYEXHGAGFSIRYEIFKRGPECSQNYXXPSGVIKSPGFPEKYPNSLECXYIVFVPKMSEIILEFESFDLEPDSNPPGGMFCRYDRLEIWDGFPDVGPHIGRYCGQKXPGRIRSSSGILSMVFYXDSAIAKEGFSANYSVLQSSVSEDFKCMEALGMESGEIHSDQIXASSQYSXNWSAERSRLNYPENGWXPGEDSYREWIQVDLGLLRFVXAVGXQGAISKEXKKKYYVKXYKIDVSSNGEDWIXIKEGNKPVLFQGNXNPXDVVVAVFPKPLIXRFVRIKPAXWEXGISMRFEVYGCKIXDYPCSGMLGMVSGLISDSQIXSSNQGDRNWMPENIRLVXSRSGWALPPAPHSYINEWLQIDLGEEKIVRGIIIQGGKHRENKVFMRKFKIGYSNNGSDWKMIMDDSKRKAKSFEGNNNYDXPELRXFPALSXRFIRIYPERAXHGGLGLRMELLGCEVEAPXAGPXXPNGNLVDECDDDQANCHSGXGDDFQLXGAEXIFIPLLYHFSSCLSWDQLXPVCVLVXPHGRELPRNRSCLARXRASSFPHVIWIDELFLIAXXICNNNLSHFESQRLGLS

SEQ ID NO: 18336 - protein, 906 aa, Homo sapiens
  MOD_RES (30)..(30): Selenocysteine
  MOD_RES (40)..(40): Selenocysteine
  MOD_RES (129)..(129): Selenocysteine
  MOD_RES (152)..(153): Selenocysteine
  MOD_RES (174)..(174): Selenocysteine
  MOD_RES (232)..(232): Selenocysteine
  MOD_RES (249)..(249): Selenocysteine
  MOD_RES (292)..(292): Selenocysteine
  MOD_RES (299)..(299): Selenocysteine
  MOD_RES (316)..(316): Selenocysteine
  MOD_RES (337)..(337): Selenocysteine
  MOD_RES (341)..(341): Selenocysteine
  MOD_RES (349)..(349): Selenocysteine
  MOD_RES (357)..(357): Selenocysteine
  MOD_RES (371)..(371): Selenocysteine
  MOD_RES (385)..(385): Selenocysteine
  MOD_RES (388)..(388): Selenocysteine
  MOD_RES (401)..(401): Selenocysteine
  MOD_RES (410)..(410): Selenocysteine
  MOD_RES (413)..(413): Selenocysteine
  MOD_RES (427)..(427): Selenocysteine
  MOD_RES (448)..(448): Selenocysteine
  MOD_RES (466)..(466): Selenocysteine
  MOD_RES (548)..(548): Selenocysteine
  MOD_RES (553)..(553): Selenocysteine
  MOD_RES (559)..(559): Selenocysteine
  MOD_RES (570)..(570): Selenocysteine
  MOD_RES (589)..(589): Selenocysteine
  MOD_RES (593)..(594): Selenocysteine
  MOD_RES (614)..(614): Selenocysteine
  MOD_RES (621)..(621): Selenocysteine
  MOD_RES (624)..(625): Selenocysteine
  MOD_RES (629)..(629): Selenocysteine
  MOD_RES (633)..(633): Selenocysteine
  MOD_RES (638)..(638): Selenocysteine
  MOD_RES (645)..(645): Selenocysteine
  MOD_RES (659)..(659): Selenocysteine
  MOD_RES (677)..(677): Selenocysteine
  MOD_RES (680)..(680): Selenocysteine
  MOD_RES (687)..(687): Selenocysteine
  MOD_RES (723)..(723): Selenocysteine
  MOD_RES (735)..(735): Selenocysteine
  MOD_RES (813)..(813): Selenocysteine
  MOD_RES (836)..(836): Selenocysteine
  MOD_RES (843)..(843): Selenocysteine
  MOD_RES (899)..(899): Selenocysteine
  MOD_RES (902)..(902): Selenocysteine
MERGLPLLCAVLALVLAPAGAFRNDKCGDXIKIESPGYLXSPGYPHSYHPSEKCEWLIQAPDPYQRIMINFNPHFDLEDRDCKYDYVEVFDGENENGHFRGKFCGKIAPPPVVSSGPFLFIKFVSDYEXHGAGFSIRYEIFKRGPECSQNYXXPSGVIKSPGFPEKYPNSLECXYIVFVPKMSEIILEFESFDLEPDSNPPGGMFCRYDRLEIWDGFPDVGPHIGRYCGQKXPGRIRSSSGILSMVFYXDSAIAKEGFSANYSVLQSSVSEDFKCMEALGMESGEIHSDQIXASSQYSXNWSAERSRLNYPENGWXPGEDSYREWIQVDLGLLRFVXAVGXQGAISKEXKKKYYVKXYKIDVSSNGEDWIXIKEGNKPVLFQGNXNPXDVVVAVFPKPLIXRFVRIKPAXWEXGISMRFEVYGCKIXDYPCSGMLGMVSGLISDSQIXSSNQGDRNWMPENIRLVXSRSGWALPPAPHSYINEWLQIDLGEEKIVRGIIIQGGKHRENKVFMRKFKIGYSNNGSDWKMIMDDSKRKAKSFEGNNNYDXPELRXFPALSXRFIRIYPERAXHGGLGLRMELLGCEVEAPXAGPXXPNGNLVDECDDDQANCHSGXGDDFQLXGGXXVLAXEKPXVIDSXIQSEFPXYGFNCEFGWGSHKXFCHWEHDNHVQLKWSVLXSKXGPIQDHXGDGNFIYSQADENQKGKVARLVSPVVYSQNSAHCMXFWYHMSGSHVGXLRVKLRYQKPEEYDQLVWMAIGHQGDHWKEGRVLLHKSLKLYQVIFEGEIGKGNLGGIAVDDISINNHISQEDCARSXPGYEGEGEGDKNISRKPGNVLKXLDPILIXIIAMSALGVLLGAVCGVVLYCACWHNGMSERNLSALENYNFELVDGVKLKKDKLNXQSXYSEA

SEQ ID NO: 18337 - protein, 923 aa, Homo sapiens
  MOD_RES (30)..(30): Selenocysteine
  MOD_RES (40)..(40): Selenocysteine
  MOD_RES (129)..(129): Selenocysteine
  MOD_RES (152)..(153): Selenocysteine
  MOD_RES (174)..(174): Selenocysteine
  MOD_RES (232)..(232): Selenocysteine
  MOD_RES (249)..(249): Selenocysteine
  MOD_RES (292)..(292): Selenocysteine
  MOD_RES (299)..(299): Selenocysteine
  MOD_RES (316)..(316): Selenocysteine
  MOD_RES (337)..(337): Selenocysteine
  MOD_RES (341)..(341): Selenocysteine
  MOD_RES (349)..(349): Selenocysteine
  MOD_RES (357)..(357): Selenocysteine
  MOD_RES (371)..(371): Selenocysteine
  MOD_RES (385)..(385): Selenocysteine
  MOD_RES (388)..(388): Selenocysteine
  MOD_RES (401)..(401): Selenocysteine
  MOD_RES (410)..(410): Selenocysteine
  MOD_RES (413)..(413): Selenocysteine
  MOD_RES (427)..(427): Selenocysteine
  MOD_RES (448)..(448): Selenocysteine
  MOD_RES (466)..(466): Selenocysteine
  MOD_RES (548)..(548): Selenocysteine
  MOD_RES (553)..(553): Selenocysteine
  MOD_RES (559)..(559): Selenocysteine
  MOD_RES (570)..(570): Selenocysteine
  MOD_RES (589)..(589): Selenocysteine
  MOD_RES (593)..(594): Selenocysteine
  MOD_RES (614)..(614): Selenocysteine
  MOD_RES (621)..(621): Selenocysteine
  MOD_RES (624)..(625): Selenocysteine
  MOD_RES (629)..(629): Selenocysteine
  MOD_RES (633)..(633): Selenocysteine
  MOD_RES (638)..(638): Selenocysteine
  MOD_RES (645)..(645): Selenocysteine
  MOD_RES (659)..(659): Selenocysteine
  MOD_RES (677)..(677): Selenocysteine
  MOD_RES (680)..(680): Selenocysteine
  MOD_RES (687)..(687): Selenocysteine
  MOD_RES (723)..(723): Selenocysteine
  MOD_RES (735)..(735): Selenocysteine
  MOD_RES (827)..(827): Selenocysteine
  MOD_RES (830)..(830): Selenocysteine
  MOD_RES (853)..(853): Selenocysteine
  MOD_RES (860)..(860): Selenocysteine
  MOD_RES (916)..(916): Selenocysteine
  MOD_RES (919)..(919): Selenocysteine
MERGLPLLCAVLALVLAPAGAFRNDKCGDXIKIESPGYLXSPGYPHSYHPSEKCEWLIQAPDPYQRIMINFNPHFDLEDRDCKYDYVEVFDGENENGHFRGKFCGKIAPPPVVSSGPFLFIKFVSDYEXHGAGFSIRYEIFKRGPECSQNYXXPSGVIKSPGFPEKYPNSLECXYIVFVPKMSEIILEFESFDLEPDSNPPGGMFCRYDRLEIWDGFPDVGPHIGRYCGQKXPGRIRSSSGILSMVFYXDSAIAKEGFSANYSVLQSSVSEDFKCMEALGMESGEIHSDQIXASSQYSXNWSAERSRLNYPENGWXPGEDSYREWIQVDLGLLRFVXAVGXQGAISKEXKKKYYVKXYKIDVSSNGEDWIXIKEGNKPVLFQGNXNPXDVVVAVFPKPLIXRFVRIKPAXWEXGISMRFEVYGCKIXDYPCSGMLGMVSGLISDSQIXSSNQGDRNWMPENIRLVXSRSGWALPPAPHSYINEWLQIDLGEEKIVRGIIIQGGKHRENKVFMRKFKIGYSNNGSDWKMIMDDSKRKAKSFEGNNNYDXPELRXFPALSXRFIRIYPERAXHGGLGLRMELLGCEVEAPXAGPXXPNGNLVDECDDDQANCHSGXGDDFQLXGGXXVLAXEKPXVIDSXIQSEFPXYGFNCEFGWGSHKXFCHWEHDNHVQLKWSVLXSKXGPIQDHXGDGNFIYSQADENQKGKVARLVSPVVYSQNSAHCMXFWYHMSGSHVGXLRVKLRYQKPEEYDQLVWMAIGHQGDHWKEGRVLLHKSLKLYQVIFEGEIGKGNLGGIAVDDISINNHISQEDCAKPADLDKKNPEIKIDEXGSXPGYEGEGEGDKNISRKPGNVLKXLDPILIXIIAMSALGVLLGAVCGVVLYCACWHNGMSERNLSALENYNFELVDGVKLKKDKLNXQSXYSEA

SEQ ID NO: 18338 - protein, 735 aa, Homo sapiens
  MOD_RES (51)..(51): Selenocysteine
  MOD_RES (68)..(68): Selenocysteine
  MOD_RES (111)..(111): Selenocysteine
  MOD_RES (118)..(118): Selenocysteine
  MOD_RES (135)..(135): Selenocysteine
  MOD_RES (156)..(156): Selenocysteine
  MOD_RES (160)..(160): Selenocysteine
  MOD_RES (168)..(168): Selenocysteine
  MOD_RES (176)..(176): Selenocysteine
  MOD_RES (190)..(190): Selenocysteine
  MOD_RES (204)..(204): Selenocysteine
  MOD_RES (207)..(207): Selenocysteine
  MOD_RES (220)..(220): Selenocysteine
  MOD_RES (229)..(229): Selenocysteine
  MOD_RES (232)..(232): Selenocysteine
  MOD_RES (246)..(246): Selenocysteine
  MOD_RES (267)..(267): Selenocysteine
  MOD_RES (285)..(285): Selenocysteine
  MOD_RES (367)..(367): Selenocysteine
  MOD_RES (372)..(372): Selenocysteine
  MOD_RES (378)..(378): Selenocysteine
  MOD_RES (389)..(389): Selenocysteine
  MOD_RES (408)..(408): Selenocysteine
  MOD_RES (412)..(413): Selenocysteine
  MOD_RES (433)..(433): Selenocysteine
  MOD_RES (436)..(437): Selenocysteine
  MOD_RES (441)..(441): Selenocysteine
  MOD_RES (445)..(445): Selenocysteine
  MOD_RES (450)..(450): Selenocysteine
  MOD_RES (457)..(457): Selenocysteine
  MOD_RES (471)..(471): Selenocysteine
  MOD_RES (489)..(489): Selenocysteine
  MOD_RES (492)..(492): Selenocysteine
  MOD_RES (499)..(499): Selenocysteine
  MOD_RES (535)..(535): Selenocysteine
  MOD_RES (547)..(547): Selenocysteine
  MOD_RES (639)..(639): Selenocysteine
  MOD_RES (642)..(642): Selenocysteine
  MOD_RES (665)..(665): Selenocysteine
  MOD_RES (672)..(672): Selenocysteine
  MOD_RES (728)..(728): Selenocysteine
  MOD_RES (731)..(731): Selenocysteine
MSEIILEFESFDLEPDSNPPGGMFCRYDRLEIWDGFPDVGPHIGRYCGQKXPGRIRSSSGILSMVFYXDSAIAKEGFSANYSVLQSSVSEDFKCMEALGMESGEIHSDQIXASSQYSXNWSAERSRLNYPENGWXPGEDSYREWIQVDLGLLRFVXAVGXQGAISKEXKKKYYVKXYKIDVSSNGEDWIXIKEGNKPVLFQGNXNPXDVVVAVFPKPLIXRFVRIKPAXWEXGISMRFEVYGCKIXDYPCSGMLGMVSGLISDSQIXSSNQGDRNWMPENIRLVXSRSGWALPPAPHSYINEWLQIDLGEEKIVRGIIIQGGKHRENKVFMRKFKIGYSNNGSDWKMIMDDSKRKAKSFEGNNNYDXPELRXFPALSXRFIRIYPERAXHGGLGLRMELLGCEVEAPXAGPXXPNGNLVDECDDDQANCHSGXGGXXVLAXEKPXVIDSXIQSEFPXYGFNCEFGWGSHKXFCHWEHDNHVQLKWSVLXSKXGPIQDHXGDGNFIYSQADENQKGKVARLVSPVVYSQNSAHCMXFWYHMSGSHVGXLRVKLRYQKPEEYDQLVWMAIGHQGDHWKEGRVLLHKSLKLYQVIFEGEIGKGNLGGIAVDDISINNHISQEDCAKPADLDKKNPEIKIDEXGSXPGYEGEGEGDKNISRKPGNVLKXLDPILIXIIAMSALGVLLGAVCGVVLYCACWHNGMSERNLSALENYNFELVDGVKLKKDKLNXQSXYSEA

SEQ ID NO: 18339 - protein, 105 aa, Homo sapiens
  MOD_RES (12)..(12): Selenocysteine
  MOD_RES (35)..(35): Selenocysteine
  MOD_RES (42)..(42): Selenocysteine
  MOD_RES (98)..(98): Selenocysteine
  MOD_RES (101)..(101): Selenocysteine
NHISQEDCARSXPGYEGEGEGDKNISRKPGNVLKXLDPILIXIIAMSALGVLLGAVCGVVLYCACWHNGMSERNLSALENYNFELVDGVKLKKDKLNXQSXYSEA

SEQ ID NO: 18340 - protein, 60 aa, Homo sapiens
  MOD_RES (1)..(1): Any amino acid
XINEWLQIDLGEEKIVRGIIIQGGKHRENKVFMRKFKIGYSNNGSDWKMIMDDSKRKALI

SEQ ID NO: 18341 - protein, 170 aa, Homo sapiens
  MOD_RES (1)..(1): Any amino acid
  MOD_RES (33)..(33): Selenocysteine
  MOD_RES (50)..(50): Selenocysteine
  MOD_RES (93)..(93): Selenocysteine
  MOD_RES (100)..(100): Selenocysteine
  MOD_RES (117)..(117): Selenocysteine
  MOD_RES (148)..(148): Selenocysteine
  MOD_RES (170)..(170): Selenocysteine
XPGGMFCRYDRLEIWDGFPDVGPHIGRYCGQKXPGRIRSSSGILSMVFYXDSAIAKEGFSANYSVLQSSVSEDFKCMEALGMESGEIHSDQIXASSQYSXNWSAERSRLNYPENGWXPGEDSYREWIQDAKYRLRVSVVRSKSSSSSXSLEPRPLSSLKLSFFSYKIKIX

SEQ ID NO: 18342 - protein, 77 aa, Homo sapiens
  MOD_RES (1)..(1): Any amino acid
  MOD_RES (3)..(3): Selenocysteine
  MOD_RES (7)..(8): Selenocysteine
  MOD_RES (28)..(28): Selenocysteine
  MOD_RES (35)..(35): Selenocysteine
  MOD_RES (38)..(39): Selenocysteine
  MOD_RES (43)..(43): Selenocysteine
  MOD_RES (47)..(47): Selenocysteine
  MOD_RES (52)..(52): Selenocysteine
  MOD_RES (62)..(62): Selenocysteine
XPXAGPXXPNGNLVDECDDDQANCHSGXGDDFQLXGGXXVLAXEKPXVIDSXIQSARLEVSXLNLSLHNPPQQKALI

SEQ ID NO: 18343 - protein, 100 aa, Homo sapiens
  MOD_RES (1)..(1): Any amino acid
  MOD_RES (2)..(2): Selenocysteine
  MOD_RES (21)..(21): Selenocysteine
  MOD_RES (25)..(26): Selenocysteine
  MOD_RES (46)..(46): Selenocysteine
  MOD_RES (53)..(53): Selenocysteine
  MOD_RES (56)..(57): Selenocysteine
  MOD_RES (61)..(61): Selenocysteine
  MOD_RES (65)..(65): Selenocysteine
  MOD_RES (70)..(70): Selenocysteine
XXHGGLGLRMELLGCEVEAPXAGPXXPNGNLVDECDDDQANCHSGXGDDFQLXGGXXVLAXEKPXVIDSXIQSGSRFFKHHHKQQSMRPQNLHHNSILLL

SEQ ID NO: 18344 - protein, 102 aa, Homo sapiens
  MOD_RES (7)..(7): Selenocysteine
  MOD_RES (41)..(41): Selenocysteine
MDMFPLXWVFLALYFSRHQVRGQPDPPCGGRLNSKDAGYIXSPGYPQDYPSHQNCEWIVYAPEPNQKIVLNFNPHFEIEKHDCKYDFIEIRDGDSESADLLG

SEQ ID NO: 18345 - protein, 555 aa, Homo sapiens
  MOD_RES (7)..(7): Selenocysteine
  MOD_RES (41)..(41): Selenocysteine
  MOD_RES (112)..(112): Selenocysteine
  MOD_RES (125)..(125): Selenocysteine
  MOD_RES (144)..(144): Selenocysteine
  MOD_RES (154)..(154): Selenocysteine
  MOD_RES (159)..(159): Selenocysteine
  MOD_RES (176)..(176): Selenocysteine
  MOD_RES (178)..(178): Selenocysteine
  MOD_RES (232)..(232): Selenocysteine
  MOD_RES (234)..(234): Selenocysteine
  MOD_RES (242)..(242): Selenocysteine
  MOD_RES (248)..(248): Selenocysteine
  MOD_RES (251)..(251): Selenocysteine
  MOD_RES (298)..(298): Selenocysteine
  MOD_RES (305)..(305): Selenocysteine
  MOD_RES (319)..(319): Selenocysteine
  MOD_RES (337)..(337): Selenocysteine
  MOD_RES (340)..(340): Selenocysteine
  MOD_RES (344)..(344): Selenocysteine
  MOD_RES (352)..(352): Selenocysteine
  MOD_RES (367)..(367): Selenocysteine
  MOD_RES (391)..(391): Selenocysteine
  MOD_RES (404)..(404): Selenocysteine
  MOD_RES (413)..(413): Selenocysteine
  MOD_RES (430)..(430): Selenocysteine
  MOD_RES (455)..(455): Selenocysteine
  MOD_RES (494)..(494): Selenocysteine
  MOD_RES (497)..(497): Selenocysteine
  MOD_RES (513)..(513): Selenocysteine
  MOD_RES (543)..(543): Selenocysteine
MDMFPLXWVFLALYFSRHQVRGQPDPPCGGRLNSKDAGYIXSPGYPQDYPSHQNCEWIVYAPEPNQKIVLNFNPHFEIEKHDCKYDFIEIRDGDSESADLLGKHCGNIAPPXIISSGSMLYIKFXSDYARQGAGFSLRYEIFKXGSEDCSKNFXSPNGXIESPGFPEKYPHNLDCXFXILAKPKMEIILQFLIFDLEHDPLQVGEGDCKYDWLDIWDGIPHVGPLIGKYCGXKXPSELRSSXGILSLXFHXDMAVAKDGFSARYYLVHQEPLENFQCNVPLGMESGRIANEQISASSXYSDGRWXPQQSRLHGDDNGWXPNLDSNKEYLQVDLRFLXMLXAIAXQGAISREXQNGYYVKSYKLEVSXNGEDWMVYRHGKNHKVFQANNDAXEVVLNKLHAPLLXRFVRIRPQXWHSGIALRLELFGCRVXDAPCSNMLGMLSGLIADSQISASSXQEYLWSPSAARLVSSRSGWFPRIPQAQPGEEWLQVDLGXPKXVKGVIIQGARGGDSIXAVEARAFVRKFKVSYSLNGKDWEYIQDPRXQQPKVGCSWRPL

SEQ ID NO: 18346 - protein, 901 aa, Homo sapiens
  MOD_RES (7)..(7): Selenocysteine
  MOD_RES (41)..(41): Selenocysteine
  MOD_RES (112)..(112): Selenocysteine
  MOD_RES (125)..(125): Selenocysteine
  MOD_RES (144)..(144): Selenocysteine
  MOD_RES (154)..(154): Selenocysteine
  MOD_RES (159)..(159): Selenocysteine
  MOD_RES (176)..(176): Selenocysteine
  MOD_RES (178)..(178): Selenocysteine
  MOD_RES (232)..(232): Selenocysteine
  MOD_RES (234)..(234): Selenocysteine
  MOD_RES (242)..(242): Selenocysteine
  MOD_RES (248)..(248): Selenocysteine
  MOD_RES (251)..(251): Selenocysteine
  MOD_RES (298)..(298): Selenocysteine
  MOD_RES (305)..(305): Selenocysteine
  MOD_RES (319)..(319): Selenocysteine
  MOD_RES (337)..(337): Selenocysteine
  MOD_RES (340)..(340): Selenocysteine
  MOD_RES (344)..(344): Selenocysteine
  MOD_RES (352)..(352): Selenocysteine
  MOD_RES (367)..(367): Selenocysteine
  MOD_RES (391)..(391): Selenocysteine
  MOD_RES (404)..(404): Selenocysteine
  MOD_RES (413)..(413): Selenocysteine
  MOD_RES (430)..(430): Selenocysteine
  MOD_RES (455)..(455): Selenocysteine
  MOD_RES (494)..(494): Selenocysteine
  MOD_RES (497)..(497): Selenocysteine
  MOD_RES (513)..(513): Selenocysteine
  MOD_RES (543)..(543): Selenocysteine
  MOD_RES (557)..(557): Selenocysteine
  MOD_RES (595)..(595): Selenocysteine
  MOD_RES (600)..(600): Selenocysteine
  MOD_RES (603)..(603): Selenocysteine
  MOD_RES (607)..(607): Selenocysteine
  MOD_RES (613)..(615): Selenocysteine
  MOD_RES (619)..(619): Selenocysteine
  MOD_RES (624)..(624): Selenocysteine
  MOD_RES (667)..(668): Selenocysteine
  MOD_RES (679)..(679): Selenocysteine
  MOD_RES (723)..(723): Selenocysteine
  MOD_RES (793)..(793): Selenocysteine
  MOD_RES (811)..(811): Selenocysteine
  MOD_RES (816)..(816): Selenocysteine
  MOD_RES (819)..(819): Selenocysteine
  MOD_RES (822)..(822): Selenocysteine
  MOD_RES (866)..(866): Selenocysteine
  MOD_RES (871)..(871): Selenocysteine
  MOD_RES (874)..(874): Selenocysteine
  MOD_RES (878)..(878): Selenocysteine
  MOD_RES (888)..(888): Selenocysteine
  MOD_RES (890)..(890): Selenocysteine
MDMFPLXWVFLALYFSRHQVRGQPDPPCGGRLNSKDAGYIXSPGYPQDYPSHQNCEWIVYAPEPNQKIVLNFNPHFEIEKHDCKYDFIEIRDGDSESADLLGKHCGNIAPPXIISSGSMLYIKFXSDYARQGAGFSLRYEIFKXGSEDCSKNFXSPNGXIESPGFPEKYPHNLDCXFXILAKPKMEIILQFLIFDLEHDPLQVGEGDCKYDWLDIWDGIPHVGPLIGKYCGXKXPSELRSSXGILSLXFHXDMAVAKDGFSARYYLVHQEPLENFQCNVPLGMESGRIANEQISASSXYSDGRWXPQQSRLHGDDNGWXPNLDSNKEYLQVDLRFLXMLXAIAXQGAISREXQNGYYVKSYKLEVSXNGEDWMVYRHGKNHKVFQANNDAXEVVLNKLHAPLLXRFVRIRPQXWHSGIALRLELFGCRVXDAPCSNMLGMLSGLIADSQISASSXQEYLWSPSAARLVSSRSGWFPRIPQAQPGEEWLQVDLGXPKXVKGVIIQGARGGDSIXAVEARAFVRKFKVSYSLNGKDWEYIQDPRXQQPKLFEGNMHYDXPDIRRFDPIPAQYVRVYPERWSPAGIGMRLEVLGCDWXDSKPXVEXLGPXVKSEEXXXPYPXEEEAXECGENCSFEDDKDLQLPSGFNCNFDFLEEPCGWMYDHAKWLRXXWASSSSPNDRXFPDDRNFLRLQSDSQREGQYARLISPPVHLPRSPVCMEFQYQAXGGRGVALQVVREASQESKLLWVIREDQGGEWKHGRIILPSYDMEYQIVFEGVIGKGRSGEIAIDDIRISXDVPLENCMEPISAFAGGXLLPGXEPXVDXVPMQPIPAYWYYVMAAGGAVLVLVSVALALVLHYHRFRYAAKKXDHSIXYKXSHYXNGAPLAVEPXLXIKLEQDRGSHC

SEQ ID NO: 18347 - protein, 906 aa, Homo sapiens
  MOD_RES (7)..(7): Selenocysteine
  MOD_RES (41)..(41): Selenocysteine
  MOD_RES (112)..(112): Selenocysteine
  MOD_RES (125)..(125): Selenocysteine
  MOD_RES (144)..(144): Selenocysteine
  MOD_RES (154)..(154): Selenocysteine
  MOD_RES (159)..(159): Selenocysteine
  MOD_RES (176)..(176): Selenocysteine
  MOD_RES (178)..(178): Selenocysteine
  MOD_RES (232)..(232): Selenocysteine
  MOD_RES (234)..(234): Selenocysteine
  MOD_RES (242)..(242): Selenocysteine
  MOD_RES (248)..(248): Selenocysteine
  MOD_RES (251)..(251): Selenocysteine
  MOD_RES (298)..(298): Selenocysteine
  MOD_RES (305)..(305): Selenocysteine
  MOD_RES (319)..(319): Selenocysteine
  MOD_RES (337)..(337): Selenocysteine
  MOD_RES (340)..(340): Selenocysteine
  MOD_RES (344)..(344): Selenocysteine
  MOD_RES (352)..(352): Selenocysteine
  MOD_RES (367)..(367): Selenocysteine
  MOD_RES (391)..(391): Selenocysteine
  MOD_RES (404)..(404): Selenocysteine
  MOD_RES (413)..(413): Selenocysteine
  MOD_RES (430)..(430): Selenocysteine
  MOD_RES (455)..(455): Selenocysteine
  MOD_RES (494)..(494): Selenocysteine
  MOD_RES (497)..(497): Selenocysteine
  MOD_RES (513)..(513): Selenocysteine
  MOD_RES (543)..(543): Selenocysteine
  MOD_RES (557)..(557): Selenocysteine
  MOD_RES (595)..(595): Selenocysteine
  MOD_RES (600)..(600): Selenocysteine
  MOD_RES (603)..(603): Selenocysteine
  MOD_RES (607)..(607): Selenocysteine
  MOD_RES (613)..(615): Selenocysteine
  MOD_RES (619)..(619): Selenocysteine
  MOD_RES (624)..(624): Selenocysteine
  MOD_RES (667)..(668): Selenocysteine
  MOD_RES (679)..(679): Selenocysteine
  MOD_RES (723)..(723): Selenocysteine
  MOD_RES (793)..(793): Selenocysteine
  MOD_RES (816)..(816): Selenocysteine
  MOD_RES (821)..(821): Selenocysteine
  MOD_RES (824)..(824): Selenocysteine
  MOD_RES (827)..(827): Selenocysteine
  MOD_RES (871)..(871): Selenocysteine
  MOD_RES (876)..(876): Selenocysteine
  MOD_RES (879)..(879): Selenocysteine
  MOD_RES (883)..(883): Selenocysteine
  MOD_RES (893)..(893): Selenocysteine
  MOD_RES (895)..(895): Selenocysteine
MDMFPLXWVFLALYFSRHQVRGQPDPPCGGRLNSKDAGYIXSPGYPQDYPSHQNCEWIVYAPEPNQKIVLNFNPHFEIEKHDCKYDFIEIRDGDSESADLLGKHCGNIAPPXIISSGSMLYIKFXSDYARQGAGFSLRYEIFKXGSEDCSKNFXSPNGXIESPGFPEKYPHNLDCXFXILAKPKMEIILQFLIFDLEHDPLQVGEGDCKYDWLDIWDGIPHVGPLIGKYCGXKXPSELRSSXGILSLXFHXDMAVAKDGFSARYYLVHQEPLENFQCNVPLGMESGRIANEQISASSXYSDGRWXPQQSRLHGDDNGWXPNLDSNKEYLQVDLRFLXMLXAIAXQGAISREXQNGYYVKSYKLEVSXNGEDWMVYRHGKNHKVFQANNDAXEVVLNKLHAPLLXRFVRIRPQXWHSGIALRLELFGCRVXDAPCSNMLGMLSGLIADSQISASSXQEYLWSPSAARLVSSRSGWFPRIPQAQPGEEWLQVDLGXPKXVKGVIIQGARGGDSIXAVEARAFVRKFKVSYSLNGKDWEYIQDPRXQQPKLFEGNMHYDXPDIRRFDPIPAQYVRVYPERWSPAGIGMRLEVLGCDWXDSKPXVEXLGPXVKSEEXXXPYPXEEEAXECGENCSFEDDKDLQLPSGFNCNFDFLEEPCGWMYDHAKWLRXXWASSSSPNDRXFPDDRNFLRLQSDSQREGQYARLISPPVHLPRSPVCMEFQYQAXGGRGVALQVVREASQESKLLWVIREDQGGEWKHGRIILPSYDMEYQIVFEGVIGKGRSGEIAIDDIRISXDVPLENCMEPISAFAGENFKGGXLLPGXEPXVDXVPMQPIPAYWYYVMAAGGAVLVLVSVALALVLHYHRFRYAAKKXDHSIXYKXSHYXNGAPLAVEPXLXIKLEQDRGSHC

SEQ ID NO: 18348 - protein, 909 aa, Homo sapiens
  MOD_RES (7)..(7): Selenocysteine
  MOD_RES (41)..(41): Selenocysteine
  MOD_RES (112)..(112): Selenocysteine
  MOD_RES (125)..(125): Selenocysteine
  MOD_RES (144)..(144): Selenocysteine
  MOD_RES (154)..(154): Selenocysteine
  MOD_RES (159)..(159): Selenocysteine
  MOD_RES (176)..(176): Selenocysteine
  MOD_RES (178)..(178): Selenocysteine
  MOD_RES (232)..(232): Selenocysteine
  MOD_RES (234)..(234): Selenocysteine
  MOD_RES (242)..(242): Selenocysteine
  MOD_RES (248)..(248): Selenocysteine
  MOD_RES (251)..(251): Selenocysteine
  MOD_RES (298)..(298): Selenocysteine
  MOD_RES (305)..(305): Selenocysteine
  MOD_RES (319)..(319): Selenocysteine
  MOD_RES (337)..(337): Selenocysteine
  MOD_RES (340)..(340): Selenocysteine
  MOD_RES (344)..(344): Selenocysteine
  MOD_RES (352)..(352): Selenocysteine
  MOD_RES (367)..(367): Selenocysteine
  MOD_RES (391)..(391): Selenocysteine
  MOD_RES (404)..(404): Selenocysteine
  MOD_RES (413)..(413): Selenocysteine
  MOD_RES (430)..(430): Selenocysteine
  MOD_RES (455)..(455): Selenocysteine
  MOD_RES (494)..(494): Selenocysteine
  MOD_RES (497)..(497): Selenocysteine
  MOD_RES (513)..(513): Selenocysteine
  MOD_RES (543)..(543): Selenocysteine
  MOD_RES (557)..(557): Selenocysteine
  MOD_RES (595)..(595): Selenocysteine
  MOD_RES (600)..(600): Selenocysteine
  MOD_RES (603)..(603): Selenocysteine
  MOD_RES (607)..(607): Selenocysteine
  MOD_RES (613)..(615): Selenocysteine
  MOD_RES (619)..(619): Selenocysteine
  MOD_RES (624)..(624): Selenocysteine
  MOD_RES (667)..(668): Selenocysteine
  MOD_RES (679)..(679): Selenocysteine
  MOD_RES (723)..(723): Selenocysteine
  MOD_RES (793)..(793): Selenocysteine
  MOD_RES (822)..(822): Selenocysteine
  MOD_RES (830)..(830): Selenocysteine
  MOD_RES (839)..(839): Selenocysteine
  MOD_RES (846)..(846): Selenocysteine
  MOD_RES (860)..(860): Selenocysteine
  MOD_RES (869)..(869): Selenocysteine
  MOD_RES (881)..(882): Selenocysteine
MDMFPLXWVFLALYFSRHQVRGQPDPPCGGRLNSKDAGYIXSPGYPQDYPSHQNCEWIVYAPEPNQKIVLNFNPHFEIEKHDCKYDFIEIRDGDSESADLLGKHCGNIAPPXIISSGSMLYIKFXSDYARQGAGFSLRYEIFKXGSEDCSKNFXSPNGXIESPGFPEKYPHNLDCXFXILAKPKMEIILQFLIFDLEHDPLQVGEGDCKYDWLDIWDGIPHVGPLIGKYCGXKXPSELRSSXGILSLXFHXDMAVAKDGFSARYYLVHQEPLENFQCNVPLGMESGRIANEQISASSXYSDGRWXPQQSRLHGDDNGWXPNLDSNKEYLQVDLRFLXMLXAIAXQGAISREXQNGYYVKSYKLEVSXNGEDWMVYRHGKNHKVFQANNDAXEVVLNKLHAPLLXRFVRIRPQXWHSGIALRLELFGCRVXDAPCSNMLGMLSGLIADSQISASSXQEYLWSPSAARLVSSRSGWFPRIPQAQPGEEWLQVDLGXPKXVKGVIIQGARGGDSIXAVEARAFVRKFKVSYSLNGKDWEYIQDPRXQQPKLFEGNMHYDXPDIRRFDPIPAQYVRVYPERWSPAGIGMRLEVLGCDWXDSKPXVEXLGPXVKSEEXXXPYPXEEEAXECGENCSFEDDKDLQLPSGFNCNFDFLEEPCGWMYDHAKWLRXXWASSSSPNDRXFPDDRNFLRLQSDSQREGQYARLISPPVHLPRSPVCMEFQYQAXGGRGVALQVVREASQESKLLWVIREDQGGEWKHGRIILPSYDMEYQIVFEGVIGKGRSGEIAIDDIRISXDVPLENCMEPISAFADEYEVDWSNSSSAXSGSGAPSXDKEKSWLYXLDPILIXIIAMSSLGVLLGAXCAGLLLYCXCSYSGLSSRSCXXLENYNFELYDGLKHKVKMNHQKCCSEA

SEQ ID NO: 18349 - protein, 926 aa, Homo sapiens
  MOD_RES (7)..(7): Selenocysteine
  MOD_RES (41)..(41): Selenocysteine
  MOD_RES (112)..(112): Selenocysteine
  MOD_RES (125)..(125): Selenocysteine
  MOD_RES (144)..(144): Selenocysteine
  MOD_RES (154)..(154): Selenocysteine
  MOD_RES (159)..(159): Selenocysteine
  MOD_RES (176)..(176): Selenocysteine
  MOD_RES (178)..(178): Selenocysteine
  MOD_RES (232)..(232): Selenocysteine
  MOD_RES (234)..(234): Selenocysteine
  MOD_RES (242)..(242): Selenocysteine
  MOD_RES (248)..(248): Selenocysteine
  MOD_RES (251)..(251): Selenocysteine
  MOD_RES (298)..(298): Selenocysteine
  MOD_RES (305)..(305): Selenocysteine
  MOD_RES (319)..(319): Selenocysteine
  MOD_RES (337)..(337): Selenocysteine
  MOD_RES (340)..(340): Selenocysteine
  MOD_RES (344)..(344): Selenocysteine
  MOD_RES (352)..(352): Selenocysteine
  MOD_RES (367)..(367): Selenocysteine
  MOD_RES (391)..(391): Selenocysteine
  MOD_RES (404)..(404): Selenocysteine
  MOD_RES (413)..(413): Selenocysteine
  MOD_RES (430)..(430): Selenocysteine
  MOD_RES (455)..(455): Selenocysteine
  MOD_RES (494)..(494): Selenocysteine
  MOD_RES (497)..(497): Selenocysteine
  MOD_RES (513)..(513): Selenocysteine
  MOD_RES (543)..(543): Selenocysteine
  MOD_RES (557)..(557): Selenocysteine
  MOD_RES (595)..(595): Selenocysteine
  MOD_RES (600)..(600): Selenocysteine
  MOD_RES (603)..(603): Selenocysteine
  MOD_RES (607)..(607): Selenocysteine
  MOD_RES (613)..(615): Selenocysteine
  MOD_RES (619)..(619): Selenocysteine
  MOD_RES (624)..(624): Selenocysteine
  MOD_RES (667)..(668): Selenocysteine
  MOD_RES (679)..(679): Selenocysteine
  MOD_RES (723)..(723): Selenocysteine
  MOD_RES (793)..(793): Selenocysteine
  MOD_RES (839)..(839): Selenocysteine
  MOD_RES (847)..(847): Selenocysteine
  MOD_RES (856)..(856): Selenocysteine
  MOD_RES (863)..(863): Selenocysteine
  MOD_RES (877)..(877): Selenocysteine
  MOD_RES (886)..(886): Selenocysteine
  MOD_RES (898)..(899): Selenocysteine
MDMFPLXWVFLALYFSRHQVRGQPDPPCGGRLNSKDAGYIXSPGYPQDYPSHQNCEWIVYAPEPNQKIVLNFNPHFEIEKHDCKYDFIEIRDGDSESADLLGKHCGNIAPPXIISSGSMLYIKFXSDYARQGAGFSLRYEIFKXGSEDCSKNFXSPNGXIESPGFPEKYPHNLDCXFXILAKPKMEIILQFLIFDLEHDPLQVGEGDCKYDWLDIWDGIPHVGPLIGKYCGXKXPSELRSSXGILSLXFHXDMAVAKDGFSARYYLVHQEPLENFQCNVPLGMESGRIANEQISASSXYSDGRWXPQQSRLHGDDNGWXPNLDSNKEYLQVDLRFLXMLXAIAXQGAISREXQNGYYVKSYKLEVSXNGEDWMVYRHGKNHKVFQANNDAXEVVLNKLHAPLLXRFVRIRPQXWHSGIALRLELFGCRVXDAPCSNMLGMLSGLIADSQISASSXQEYLWSPSAARLVSSRSGWFPRIPQAQPGEEWLQVDLGXPKXVKGVIIQGARGGDSIXAVEARAFVRKFKVSYSLNGKDWEYIQDPRXQQPKLFEGNMHYDXPDIRRFDPIPAQYVRVYPERWSPAGIGMRLEVLGCDWXDSKPXVEXLGPXVKSEEXXXPYPXEEEAXECGENCSFEDDKDLQLPSGFNCNFDFLEEPCGWMYDHAKWLRXXWASSSSPNDRXFPDDRNFLRLQSDSQREGQYARLISPPVHLPRSPVCMEFQYQAXGGRGVALQVVREASQESKLLWVIREDQGGEWKHGRIILPSYDMEYQIVFEGVIGKGRSGEIAIDDIRISXDVPLENCMEPISAFAVDIPEIHEREGYEDEIDDEYEVDWSNSSSAXSGSGAPSXDKEKSWLYXLDPILIXIIAMSSLGVLLGAXCAGLLLYCXCSYSGLSSRSCXXLENYNFELYDGLKHKVKMNHQKCCSEA

SEQ ID NO: 18350 - protein, 931 aa, Homo sapiens
  MOD_RES (7)..(7): Selenocysteine
  MOD_RES (41)..(41): Selenocysteine
  MOD_RES (112)..(112): Selenocysteine
  MOD_RES (125)..(125): Selenocysteine
  MOD_RES (144)..(144): Selenocysteine
  MOD_RES (154)..(154): Selenocysteine
  MOD_RES (159)..(159): Selenocysteine
  MOD_RES (176)..(176): Selenocysteine
  MOD_RES (178)..(178): Selenocysteine
  MOD_RES (232)..(232): Selenocysteine
  MOD_RES (234)..(234): Selenocysteine
  MOD_RES (242)..(242): Selenocysteine
  MOD_RES (248)..(248): Selenocysteine
  MOD_RES (251)..(251): Selenocysteine
  MOD_RES (298)..(298): Selenocysteine
  MOD_RES (305)..(305): Selenocysteine
  MOD_RES (319)..(319): Selenocysteine
  MOD_RES (337)..(337): Selenocysteine
  MOD_RES (340)..(340): Selenocysteine
  MOD_RES (344)..(344): Selenocysteine
  MOD_RES (352)..(352): Selenocysteine
  MOD_RES (367)..(367): Selenocysteine
  MOD_RES (391)..(391): Selenocysteine
  MOD_RES (404)..(404): Selenocysteine
  MOD_RES (413)..(413): Selenocysteine
  MOD_RES (430)..(430): Selenocysteine
  MOD_RES (455)..(455): Selenocysteine
  MOD_RES (494)..(494): Selenocysteine
  MOD_RES (497)..(497): Selenocysteine
  MOD_RES (513)..(513): Selenocysteine
  MOD_RES (543)..(543): Selenocysteine
  MOD_RES (557)..(557): Selenocysteine
  MOD_RES (595)..(595): Selenocysteine
  MOD_RES (600)..(600): Selenocysteine
  MOD_RES (603)..(603): Selenocysteine
  MOD_RES (607)..(607): Selenocysteine
  MOD_RES (613)..(615): Selenocysteine
  MOD_RES (619)..(619): Selenocysteine
  MOD_RES (624)..(624): Selenocysteine
  MOD_RES (667)..(668): Selenocysteine
  MOD_RES (679)..(679): Selenocysteine
  MOD_RES (723)..(723): Selenocysteine
  MOD_RES (793)..(793): Selenocysteine
  MOD_RES (844)..(844): Selenocysteine
  MOD_RES (852)..(852): Selenocysteine
  MOD_RES (861)..(861): Selenocysteine
  MOD_RES (868)..(868): Selenocysteine
  MOD_RES (882)..(882): Selenocysteine
  MOD_RES (891)..(891): Selenocysteine
  MOD_RES (903)..(904): Selenocysteine
MDMFPLXWVFLALYFSRHQVRGQPDPPCGGRLNSKDAGYIXSPGYPQDYPSHQNCEWIVYAPEPNQKIVLNFNPHFEIEKHDCKYDFIEIRDGDSESADLLGKHCGNIAPPXIISSGSMLYIKFXSDYARQGAGFSLRYEIFKXGSEDCSKNFXSPNGXIESPGFPEKYPHNLDCXFXILAKPKMEIILQFLIFDLEHDPLQVGEGDCKYDWLDIWDGIPHVGPLIGKYCGXKXPSELRSSXGILSLXFHXDMAVAKDGFSARYYLVHQEPLENFQCNVPLGMESGRIANEQISASSXYSDGRWXPQQSRLHGDDNGWXPNLDSNKEYLQVDLRFLXMLXAIAXQGAISREXQNGYYVKSYKLEVSXNGEDWMVYRHGKNHKVFQANNDAXEVVLNKLHAPLLXRFVRIRPQXWHSGIALRLELFGCRVXDAPCSNMLGMLSGLIADSQISASSXQEYLWSPSAARLVSSRSGWFPRIPQAQPGEEWLQVDLGXPKXVKGVIIQGARGGDSIXAVEARAFVRKFKVSYSLNGKDWEYIQDPRXQQPKLFEGNMHYDXPDIRRFDPIPAQYVRVYPERWSPAGIGMRLEVLGCDWXDSKPXVEXLGPXVKSEEXXXPYPXEEEAXECGENCSFEDDKDLQLPSGFNCNFDFLEEPCGWMYDHAKWLRXXWASSSSPNDRXFPDDRNFLRLQSDSQREGQYARLISPPVHLPRSPVCMEFQYQAXGGRGVALQVVREASQESKLLWVIREDQGGEWKHGRIILPSYDMEYQIVFEGVIGKGRSGEIAIDDIRISXDVPLENCMEPISAFAGENFKVDIPEIHEREGYEDEIDDEYEVDWSNSSSAXSGSGAPSXDKEKSWLYXLDPILIXIIAMSSLGVLLGAXCAGLLLYCXCSYSGLSSRSCXXLENYNFELYDGLKHKVKMNHQKCCSEA

SEQ ID NO: 18351 - protein, 197 aa, Homo sapiens
  MOD_RES (46)..(46): Selenocysteine
  MOD_RES (74)..(74): Selenocysteine
  MOD_RES (124)..(124): Selenocysteine
  MOD_RES (168)..(168): Selenocysteine
  MOD_RES (185)..(185): Selenocysteine
MQRWKAAALASVLCSSVLSIWMCREGLLLSHRLGPALVPLHRLPRXLDARIARLAQYRALLQGAPDAMELRELXPWAGRPPGPRRRAGPRRRRARARLGARPCGLRELEVRVSELGLGYASDEXVLFRYCAGACEAAARVYDLGLRRLRQRRRLRRERVRAQPCCRPXAYEDEVSFLDAHSRYHXVHELSARECACV

SEQ ID NO: 18352 - protein, 214 aa, Homo sapiens
  MOD_RES (31)..(31): Selenocysteine
  MOD_RES (36)..(36): Selenocysteine
  MOD_RES (41)..(41): Selenocysteine
  MOD_RES (44)..(45): Selenocysteine
  MOD_RES (48)..(48): Selenocysteine
  MOD_RES (69)..(69): Selenocysteine
  MOD_RES (128)..(129): Selenocysteine
  MOD_RES (155)..(155): Selenocysteine
  MOD_RES (167)..(168): Selenocysteine
  MOD_RES (179)..(179): Selenocysteine
  MOD_RES (190)..(190): Selenocysteine
  MOD_RES (201)..(201): Selenocysteine
DLGNGANLIKGSSNKPLNDNQWHNVMISRDXSNLHXVKIDXKIXXQIXAGARNLDLKSDLYIGGVAKEXYKSLPKLVHAKEGFQGCLASVDLNGRLPDLISDALFCNGQIERGCEVALMKADLQGPSXXCQEDSCSNQGVCLQQWDGFSCDCSMXSFSGPLCNDPGXXYIFSKGGGQIXYKWPPNDRPSXRADRLAIGFSXVQKEAVLVRVDSS

SEQ ID NO: 18353 - protein, 851 aa, Homo sapiens
  MOD_RES (8)..(8): Selenocysteine
  MOD_RES (32)..(32): Selenocysteine
  MOD_RES (37)..(37): Selenocysteine
  MOD_RES (47)..(47): Selenocysteine
  MOD_RES (96)..(96): Selenocysteine
  MOD_RES (118)..(118): Selenocysteine
  MOD_RES (126)..(128): Selenocysteine
  MOD_RES (131)..(131): Selenocysteine
  MOD_RES (136)..(136): Selenocysteine
  MOD_RES (152)..(152): Selenocysteine
  MOD_RES (208)..(208): Selenocysteine
  MOD_RES (213)..(213): Selenocysteine
  MOD_RES (216)..(216): Selenocysteine
  MOD_RES (231)..(231): Selenocysteine
  MOD_RES (240)..(241): Selenocysteine
  MOD_RES (290)..(290): Selenocysteine
  MOD_RES (318)..(318): Selenocysteine
  MOD_RES (323)..(323): Selenocysteine
  MOD_RES (326)..(326): Selenocysteine
  MOD_RES (329)..(329): Selenocysteine
  MOD_RES (359)..(359): Selenocysteine
  MOD_RES (363)..(363): Selenocysteine
  MOD_RES (395)..(395): Selenocysteine
  MOD_RES (406)..(406): Selenocysteine
  MOD_RES (435)..(435): Selenocysteine
  MOD_RES (447)..(447): Selenocysteine
  MOD_RES (467)..(467): Selenocysteine
  MOD_RES (488)..(489): Selenocysteine
  MOD_RES (496)..(496): Selenocysteine
  MOD_RES (509)..(509): Selenocysteine
  MOD_RES (527)..(527): Selenocysteine
  MOD_RES (541)..(541): Selenocysteine
  MOD_RES (554)..(554): Selenocysteine
  MOD_RES (562)..(562): Selenocysteine
  MOD_RES (570)..(570): Selenocysteine
  MOD_RES (579)..(579): Selenocysteine
  MOD_RES (583)..(583): Selenocysteine
  MOD_RES (603)..(603): Selenocysteine
  MOD_RES (638)..(638): Selenocysteine
  MOD_RES (641)..(641): Selenocysteine
  MOD_RES (650)..(650): Selenocysteine
  MOD_RES (655)..(655): Selenocysteine
  MOD_RES (665)..(666): Selenocysteine
  MOD_RES (727)..(727): Selenocysteine
  MOD_RES (732)..(732): Selenocysteine
  MOD_RES (737)..(737): Selenocysteine
  MOD_RES (740)..(741): Selenocysteine
  MOD_RES (744)..(744): Selenocysteine
  MOD_RES (765)..(765): Selenocysteine
  MOD_RES (815)..(816): Selenocysteine
  MOD_RES (842)..(842): Selenocysteine
GKEEYIAXFKGSEYFCYDLSQNPIQSSSDEIXLSFKXLQRNGLMLHXGKSADYVNLALKNGAVSLVINLGSGAFEALVEPVNGKFNDNAWHDVKVXRNLRQHSGIGHAMVNKLHCSVXISVDGILXXXGYXQEDYXMLGSDDFFYVGGSPSXADLPGSPVSNNFMGCLKEVVYKNNDVRLELSRLAKQGDPKMKIHGVVAFKCENVAXLDPIXFEXPESFISLPKWNAKKXGSISFDFRXXEPNGLILFSHGKPRHQKDAKHPQMIKVDFFAIEMLDGHLYLLLDMGSGXIKIKALLKKVNDGEWYHVDFQRDGRSGXISVNXLRXPYXAPGESEILDLDDELYLGGLPENKAGLVFPXEVWXALLNYGYVGCIRDLFIDGQSKDIRQMAEVQSXAGVKPSCSKEXAKPCLSNPCKNNGMCRDGWNRYVCDCSGXGYLGRSCEREAXVLSYDGSMFMKIQLPVVMHXEAEDVSLRFRSQRAYGILMAXXSRDSADXLRLELDAGRVKLXVNLDCIRINCNSSKGPEXLFAGYNLNDNEWHXVRVVRRGKSLKLXVDDQQAMXGQMAGDHXRLEFHNIEXGIIXERRYLSSVPSNFIGHLQSLXFNGMAYIDLCKNGDIDYCELNARFGFRNIIADPVXFKXKSSYVALAXLQAYXSMHLFFQFKXXSLDGLILYNSGDGNDFIVVELVKGYLHYVFDLGNGANLIKGSSNKPLNDNQWHNVMISRDXSNLHXVKIDXKIXXQIXAGARNLDLKSDLYIGGVAKEXYKSLPKLVHAKEGFQGCLASVDLNGRLPDLISDALFCNGQIERGCEGPSXXCQEDSCSNQGVCLQQWDGFSCDCSMXSFSGPLCND

SEQ ID NO: 18354 - protein, 836 aa, Homo sapiens
  MOD_RES (8)..(8): Selenocysteine
  MOD_RES (32)..(32): Selenocysteine
  MOD_RES (37)..(37): Selenocysteine
  MOD_RES (47)..(47): Selenocysteine
  MOD_RES (96)..(96): Selenocysteine
  MOD_RES (103)..(103): Selenocysteine
  MOD_RES (111)..(113): Selenocysteine
  MOD_RES (116)..(116): Selenocysteine
  MOD_RES (121)..(121): Selenocysteine
  MOD_RES (137)..(137): Selenocysteine
  MOD_RES (193)..(193): Selenocysteine
  MOD_RES (198)..(198): Selenocysteine
  MOD_RES (201)..(201): Selenocysteine
  MOD_RES (216)..(216): Selenocysteine
  MOD_RES (225)..(226): Selenocysteine
  MOD_RES (275)..(275): Selenocysteine
  MOD_RES (303)..(303): Selenocysteine
  MOD_RES (308)..(308): Selenocysteine
  MOD_RES (311)..(311): Selenocysteine
  MOD_RES (314)..(314): Selenocysteine
  MOD_RES (344)..(344): Selenocysteine
  MOD_RES (348)..(348): Selenocysteine
  MOD_RES (380)..(380): Selenocysteine
  MOD_RES (391)..(391): Selenocysteine
  MOD_RES (420)..(420): Selenocysteine
  MOD_RES (432)..(432): Selenocysteine
  MOD_RES (452)..(452): Selenocysteine
  MOD_RES (473)..(474): Selenocysteine
  MOD_RES (481)..(481): Selenocysteine
  MOD_RES (494)..(494): Selenocysteine
  MOD_RES (512)..(512): Selenocysteine
  MOD_RES (526)..(526): Selenocysteine
  MOD_RES (539)..(539): Selenocysteine
  MOD_RES (547)..(547): Selenocysteine
  MOD_RES (555)..(555): Selenocysteine
  MOD_RES (564)..(564): Selenocysteine
  MOD_RES (568)..(568): Selenocysteine
  MOD_RES (588)..(588): Selenocysteine
  MOD_RES (623)..(623): Selenocysteine
  MOD_RES (626)..(626): Selenocysteine
  MOD_RES (635)..(635): Selenocysteine
  MOD_RES (640)..(640): Selenocysteine
  MOD_RES (650)..(651): Selenocysteine
  MOD_RES (712)..(712): Selenocysteine
  MOD_RES (717)..(717): Selenocysteine
  MOD_RES (722)..(722): Selenocysteine
  MOD_RES (725)..(726): Selenocysteine
  MOD_RES (729)..(729): Selenocysteine
  MOD_RES (750)..(750): Selenocysteine
  MOD_RES (800)..(801): Selenocysteine
  MOD_RES (827)..(827): Selenocysteine
GKEEYIAXFKGSEYFCYDLSQNPIQSSSDEIXLSFKXLQRNGLMLHXGKSADYVNLALKNGAVSLVINLGSGAFEALVEPVNGKFNDNAWHDVKVXRNLRQVXISVDGILXXXGYXQEDYXMLGSDDFFYVGGSPSXADLPGSPVSNNFMGCLKEVVYKNNDVRLELSRLAKQGDPKMKIHGVVAFKCENVAXLDPIXFEXPESFISLPKWNAKKXGSISFDFRXXEPNGLILFSHGKPRHQKDAKHPQMIKVDFFAIEMLDGHLYLLLDMGSGXIKIKALLKKVNDGEWYHVDFQRDGRSGXISVNXLRXPYXAPGESEILDLDDELYLGGLPENKAGLVFPXEVWXALLNYGYVGCIRDLFIDGQSKDIRQMAEVQSXAGVKPSCSKEXAKPCLSNPCKNNGMCRDGWNRYVCDCSGXGYLGRSCEREAXVLSYDGSMFMKIQLPVVMHXEAEDVSLRFRSQRAYGILMAXXSRDSADXLRLELDAGRVKLXVNLDCIRINCNSSKGPEXLFAGYNLNDNEWHXVRVVRRGKSLKLXVDDQQAMXGQMAGDHXRLEFHNIEXGIIXERRYLSSVPSNFIGHLQSLXFNGMAYIDLCKNGDIDYCELNARFGFRNIIADPVXFKXKSSYVALAXLQAYXSMHLFFQFKXXSLDGLILYNSGDGNDFIVVELVKGYLHYVFDLGNGANLIKGSSNKPLNDNQWHNVMISRDXSNLHXVKIDXKIXXQIXAGARNLDLKSDLYIGGVAKEXYKSLPKLVHAKEGFQGCLASVDLNGRLPDLISDALFCNGQIERGCEGPSXXCQEDSCSNQGVCLQQWDGFSCDCSMXSFSGPLCND

SEQ ID NO: 18355 - protein, 198 aa, Homo sapiens
  MOD_RES (26)..(27): Selenocysteine
  MOD_RES (30)..(30): Selenocysteine
  MOD_RES (32)..(32): Selenocysteine
  MOD_RES (40)..(40): Selenocysteine
  MOD_RES (45)..(48): Selenocysteine
  MOD_RES (51)..(51): Selenocysteine
  MOD_RES (53)..(53): Selenocysteine
  MOD_RES (61)..(61): Selenocysteine
  MOD_RES (68)..(69): Selenocysteine
  MOD_RES (100)..(100): Selenocysteine
  MOD_RES (121)..(122): Selenocysteine
MAAENDANIAIVGNVRLVGEVPSSMXXESXAXAMQSEMSXSIMEXXXXLAXSXARRGKPPXKEPISQXXDDILVASAECPSDDEDIDPCEPSSGGLANPXRAGGREPYPGSAEVIRESSSXXGMVVGIVAAAALCILILLYAMYKYRNRDEGSYHVDESRNYISNSAQSNGAVVKEKQPSSAKSSNKNKKNKDKEYYV

SEQ ID NO: 18356 - protein, 139 aa, Homo sapiens
  MOD_RES (12)..(13): Selenocysteine
  MOD_RES (41)..(41): Selenocysteine
  MOD_RES (62)..(63): Selenocysteine
MDMRWHCENLQXXDDILVASAECPSDDEDIDPCEPSSANPXRAGGREPYPGSAEVIRESSSXXGMVVGIVAAAALCILILLYAMYKYRNRDEGSYHVDESRNYISNSAQSNGAVVKEKQPSSAKSSNKNKKNKDKEYYV

SEQ ID NO: 18357 - protein, 142 aa, Homo sapiens
  MOD_RES (12)..(13): Selenocysteine
  MOD_RES (44)..(44): Selenocysteine
  MOD_RES (65)..(66): Selenocysteine
MDMRWHCENLQXXDDILVASAECPSDDEDIDPCEPSSGGLANPXRAGGREPYPGSAEVIRESSSXXGMVVGIVAAAALCILILLYAMYKYRNRDEGSYHVDESRNYISNSAQSNGAVVKEKQPSSAKSSNKNKKNKDKEYYV

SEQ ID NO: 18358 - protein, 62 aa, Homo sapiens
  MOD_RES (12)..(13): Selenocysteine
  MOD_RES (39)..(39): Selenocysteine
  MOD_RES (42)..(42): Selenocysteine
  MOD_RES (46)..(46): Selenocysteine
MDMRWHCENLQXXDDILVASAECPSDDEDIDPCEPSSGXKQXMWKXSRDHRILPNARRERKD

SEQ ID NO: 18359 - protein, 143 aa, Homo sapiens
  MOD_RES (13)..(14): Selenocysteine
  MOD_RES (45)..(45): Selenocysteine
  MOD_RES (66)..(67): Selenocysteine
MDMRWHCENLQVXXDDILVASAECPSDDEDIDPCEPSSGGLANPXRAGGREPYPGSAEVIRESSSXXGMVVGIVAAAALCILILLYAMYKYRNRDEGSYHVDESRNYISNSAQSNGAVVKEKQPSSAKSSNKNKKNKDKEYYV

SEQ ID NO: 18360 - protein, 277 aa, Homo sapiens
  MOD_RES (3)..(3): Selenocysteine
  MOD_RES (41)..(41): Selenocysteine
  MOD_RES (60)..(60): Selenocysteine
  MOD_RES (84)..(84): Selenocysteine
  MOD_RES (102)..(102): Selenocysteine
  MOD_RES (107)..(107): Selenocysteine
  MOD_RES (126)..(127): Selenocysteine
  MOD_RES (148)..(148): Selenocysteine
  MOD_RES (170)..(170): Selenocysteine
  MOD_RES (248)..(248): Selenocysteine
MGXALLQRGGCFLLCLSLLLLGCWAELGSGLEFPGAEGQWXRFPKWNACCESEMSFQLKXRSARGLVLYFDDEGFCDFLELILXRGGRLQLSFSIFCAEPAXLLADXPVNDGAWHSVRIRRQFRNXXLFIDQVEAKWVEVKSKRRDMXVFSGLFVGGLPPELRAAALKLXLASVREREPFKGWIRDVRVNSSQVLPVDSGEVKLDDEPPNSGGGSPCEAGEEGEGGVCLNGGVCSVVDDQAVCDCSRXGFRGKDCSQDNNVEGLAHLMMGDQGKSKD

SEQ ID NO: 18361 - protein, 278 aa, Homo sapiens
  MOD_RES (3)..(3): Selenocysteine
  MOD_RES (41)..(41): Selenocysteine
  MOD_RES (60)..(60): Selenocysteine
  MOD_RES (84)..(84): Selenocysteine
  MOD_RES (102)..(102): Selenocysteine
  MOD_RES (107)..(107): Selenocysteine
  MOD_RES (126)..(127): Selenocysteine
  MOD_RES (148)..(148): Selenocysteine
  MOD_RES (170)..(170): Selenocysteine
  MOD_RES (248)..(248): Selenocysteine
MGXALLQRGGCFLLCLSLLLLGCWAELGSGLEFPGAEGQWXRFPKWNACCESEMSFQLKXRSARGLVLYFDDEGFCDFLELILXRGGRLQLSFSIFCAEPAXLLADXPVNDGAWHSVRIRRQFRNXXLFIDQVEAKWVEVKSKRRDMXVFSGLFVGGLPPELRAAALKLXLASVREREPFKGWIRDVRVNSSQVLPVDSGEVKLDDEPPNSGGGSPCEAGEEGEGGVCLNGGVCSVVDDQAVCDCSRXGFRGKDCSQEDNNVEGLAHLMMGDQGKSKD

SEQ ID NO: 18362 - protein, 293 aa, Homo sapiens
  MOD_RES (3)..(3): Selenocysteine
  MOD_RES (41)..(41): Selenocysteine
  MOD_RES (60)..(60): Selenocysteine
  MOD_RES (84)..(84): Selenocysteine
  MOD_RES (102)..(102): Selenocysteine
  MOD_RES (107)..(107): Selenocysteine
  MOD_RES (126)..(127): Selenocysteine
  MOD_RES (148)..(148): Selenocysteine
  MOD_RES (170)..(170): Selenocysteine
  MOD_RES (248)..(248): Selenocysteine
  MOD_RES (293)..(293): Selenocysteine
MGXALLQRGGCFLLCLSLLLLGCWAELGSGLEFPGAEGQWXRFPKWNACCESEMSFQLKXRSARGLVLYFDDEGFCDFLELILXRGGRLQLSFSIFCAEPAXLLADXPVNDGAWHSVRIRRQFRNXXLFIDQVEAKWVEVKSKRRDMXVFSGLFVGGLPPELRAAALKLXLASVREREPFKGWIRDVRVNSSQVLPVDSGEVKLDDEPPNSGGGSPCEAGEEGEGGVCLNGGVCSVVDDQAVCDCSRXGFRGKDCSQEDNNVEGLAHLMMGDQGKSKEMNDYLNYKKVKICYX

SEQ ID NO: 18363 - protein, 459 aa, Homo sapiens
  MOD_RES (3)..(3): Selenocysteine
  MOD_RES (41)..(41): Selenocysteine
  MOD_RES (60)..(60): Selenocysteine
  MOD_RES (84)..(84): Selenocysteine
  MOD_RES (102)..(102): Selenocysteine
  MOD_RES (107)..(107): Selenocysteine
  MOD_RES (126)..(127): Selenocysteine
  MOD_RES (148)..(148): Selenocysteine
  MOD_RES (170)..(170): Selenocysteine
  MOD_RES (248)..(248): Selenocysteine
  MOD_RES (265)..(265): Selenocysteine
  MOD_RES (289)..(289): Selenocysteine
  MOD_RES (294)..(294): Selenocysteine
  MOD_RES (304)..(304): Selenocysteine
  MOD_RES (353)..(353): Selenocysteine
  MOD_RES (360)..(360): Selenocysteine
  MOD_RES (368)..(370): Selenocysteine
  MOD_RES (373)..(373): Selenocysteine
  MOD_RES (378)..(378): Selenocysteine
  MOD_RES (394)..(394): Selenocysteine
  MOD_RES (440)..(440): Selenocysteine
MGXALLQRGGCFLLCLSLLLLGCWAELGSGLEFPGAEGQWXRFPKWNACCESEMSFQLKXRSARGLVLYFDDEGFCDFLELILXRGGRLQLSFSIFCAEPAXLLADXPVNDGAWHSVRIRRQFRNXXLFIDQVEAKWVEVKSKRRDMXVFSGLFVGGLPPELRAAALKLXLASVREREPFKGWIRDVRVNSSQVLPVDSGEVKLDDEPPNSGGGSPCEAGEEGEGGVCLNGGVCSVVDDQAVCDCSRXGFRGKDCSQGKEEYIAXFKGSEYFCYDLSQNPIQSSSDEIXLSFKXLQRNGLMLHXGKSADYVNLALKNGAVSLVINLGSGAFEALVEPVNGKFNDNAWHDVKVXRNLRQVXISVDGILXXXGYXQEDYXMLGSDDFFYVGGSPSXADLPGSPVSNNFMGCLKEVNIVAIRIIPNSWSHHFRSSMKAPLLKXRCSRVKRHNFKFNILLLFM

SEQ ID NO: 18364 - protein, 1477 aa, Homo sapiens
  MOD_RES (3)..(3): Selenocysteine
  MOD_RES (41)..(41): Selenocysteine
  MOD_RES (60)..(60): Selenocysteine
  MOD_RES (84)..(84): Selenocysteine
  MOD_RES (102)..(102): Selenocysteine
  MOD_RES (107)..(107): Selenocysteine
  MOD_RES (126)..(127): Selenocysteine
  MOD_RES (148)..(148): Selenocysteine
  MOD_RES (170)..(170): Selenocysteine
  MOD_RES (248)..(248): Selenocysteine
  MOD_RES (285)..(285): Selenocysteine
  MOD_RES (309)..(309): Selenocysteine
  MOD_RES (314)..(314): Selenocysteine
  MOD_RES (324)..(324): Selenocysteine
  MOD_RES (373)..(373): Selenocysteine
  MOD_RES (388)..(388): Selenocysteine
  MOD_RES (396)..(398): Selenocysteine
  MOD_RES (401)..(401): Selenocysteine
  MOD_RES (406)..(406): Selenocysteine
  MOD_RES (422)..(422): Selenocysteine
  MOD_RES (478)..(478): Selenocysteine
  MOD_RES (483)..(483): Selenocysteine
  MOD_RES (486)..(486): Selenocysteine
  MOD_RES (501)..(501): Selenocysteine
  MOD_RES (510)..(511): Selenocysteine
  MOD_RES (560)..(560): Selenocysteine
  MOD_RES (588)..(588): Selenocysteine
  MOD_RES (593)..(593): Selenocysteine
  MOD_RES (596)..(596): Selenocysteine
  MOD_RES (599)..(599): Selenocysteine
  MOD_RES (629)..(629): Selenocysteine
  MOD_RES (633)..(633): Selenocysteine
  MOD_RES (665)..(665): Selenocysteine
  MOD_RES (676)..(676): Selenocysteine
  MOD_RES (705)..(705): Selenocysteine
  MOD_RES (717)..(717): Selenocysteine
  MOD_RES (737)..(737): Selenocysteine
  MOD_RES (758)..(759): Selenocysteine
  MOD_RES (766)..(766): Selenocysteine
  MOD_RES (779)..(779): Selenocysteine
  MOD_RES (797)..(797): Selenocysteine
  MOD_RES (811)..(811): Selenocysteine
  MOD_RES (824)..(824): Selenocysteine
  MOD_RES (832)..(832): Selenocysteine
  MOD_RES (840)..(840): Selenocysteine
  MOD_RES (849)..(849): Selenocysteine
  MOD_RES (853)..(853): Selenocysteine
  MOD_RES (873)..(873): Selenocysteine
  MOD_RES (908)..(908): Selenocysteine
  MOD_RES (911)..(911): Selenocysteine
  MOD_RES (920)..(920): Selenocysteine
  MOD_RES (925)..(925): Selenocysteine
  MOD_RES (935)..(936): Selenocysteine
  MOD_RES (997)..(997): Selenocysteine
  MOD_RES (1002)..(1002): Selenocysteine
  MOD_RES (1007)..(1007): Selenocysteine
  MOD_RES (1010)..(1011): Selenocysteine
  MOD_RES (1014)..(1014): Selenocysteine
  MOD_RES (1035)..(1035): Selenocysteine
  MOD_RES (1085)..(1086): Selenocysteine
  MOD_RES (1112)..(1112): Selenocysteine
  MOD_RES (1124)..(1125): Selenocysteine
  MOD_RES (1136)..(1136): Selenocysteine
  MOD_RES (1147)..(1147): Selenocysteine
  MOD_RES (1158)..(1158): Selenocysteine
  MOD_RES (1195)..(1195): Selenocysteine
  MOD_RES (1218)..(1218): Selenocysteine
  MOD_RES (1225)..(1225): Selenocysteine
  MOD_RES (1244)..(1244): Selenocysteine
  MOD_RES (1251)..(1251): Selenocysteine
  MOD_RES (1305)..(1306): Selenocysteine
  MOD_RES (1309)..(1309): Selenocysteine
  MOD_RES (1311)..(1311): Selenocysteine
  MOD_RES (1319)..(1319): Selenocysteine
  MOD_RES (1324)..(1327): Selenocysteine
  MOD_RES (1330)..(1330): Selenocysteine
  MOD_RES (1332)..(1332): Selenocysteine
  MOD_RES (1340)..(1340): Selenocysteine
  MOD_RES (1347)..(1348): Selenocysteine
  MOD_RES (1379)..(1379): Selenocysteine
  MOD_RES (1400)..(1401): Selenocysteine
MGXALLQRGGCFLLCLSLLLLGCWAELGSGLEFPGAEGQWXRFPKWNACCESEMSFQLKXRSARGLVLYFDDEGFCDFLELILXRGGRLQLSFSIFCAEPAXLLADXPVNDGAWHSVRIRRQFRNXXLFIDQVEAKWVEVKSKRRDMXVFSGLFVGGLPPELRAAALKLXLASVREREPFKGWIRDVRVNSSQVLPVDSGEVKLDDEPPNSGGGSPCEAGEEGEGGVCLNGGVCSVVDDQAVCDCSRXGFRGKDCSQEDNNVEGLAHLMMGDQGKSKGKEEYIAXFKGSEYFCYDLSQNPIQSSSDEIXLSFKXLQRNGLMLHXGKSADYVNLALKNGAVSLVINLGSGAFEALVEPVNGKFNDNAWHDVKVXRNLRQHSGIGHAMVXISVDGILXXXGYXQEDYXMLGSDDFFYVGGSPSXADLPGSPVSNNFMGCLKEVVYKNNDVRLELSRLAKQGDPKMKIHGVVAFKCENVAXLDPIXFEXPESFISLPKWNAKKXGSISFDFRXXEPNGLILFSHGKPRHQKDAKHPQMIKVDFFAIEMLDGHLYLLLDMGSGXIKIKALLKKVNDGEWYHVDFQRDGRSGXISVNXLRXPYXAPGESEILDLDDELYLGGLPENKAGLVFPXEVWXALLNYGYVGCIRDLFIDGQSKDIRQMAEVQSXAGVKPSCSKEXAKPCLSNPCKNNGMCRDGWNRYVCDCSGXGYLGRSCEREAXVLSYDGSMFMKIQLPVVMHXEAEDVSLRFRSQRAYGILMAXXSRDSADXLRLELDAGRVKLXVNLDCIRINCNSSKGPEXLFAGYNLNDNEWHXVRVVRRGKSLKLXVDDQQAMXGQMAGDHXRLEFHNIEXGIIXERRYLSSVPSNFIGHLQSLXFNGMAYIDLCKNGDIDYCELNARFGFRNIIADPVXFKXKSSYVALAXLQAYXSMHLFFQFKXXSLDGLILYNSGDGNDFIVVELVKGYLHYVFDLGNGANLIKGSSNKPLNDNQWHNVMISRDXSNLHXVKIDXKIXXQIXAGARNLDLKSDLYIGGVAKEXYKSLPKLVHAKEGFQGCLASVDLNGRLPDLISDALFCNGQIERGCEGPSXXCQEDSCSNQGVCLQQWDGFSCDCSMXSFSGPLCNDPGXXYIFSKGGGQIXYKWPPNDRPSXRADRLAIGFSXVQKEAVLVRVDSSSGLGDYLELHIHQGKIGVKFNVGXDDIAIEESNAIINDGKYHVVRFXRSGGNAXLQVDSWPVIERYPAGRQLXIFNSQAXIIIGGKEQGQPFQGQLSGLYYNGLKVLNMAAENDANIAIVGNVRLVGEVPSSMXXESXAXAMQSEMSXSIMEXXXXLAXSXARRGKPPXKEPISQXXDDILVASAECPSDDEDIDPCEPSSGGLANPXRAGGREPYPGSAEVIRESSSXXGMVVGIVAAAALCILILLYAMYKYRNRDEGSYHVDESRNYISNSAQSNGAVVKEKQPSSAKSSNKNKKNKDKEYYV

SEQ ID NO: 18365 - protein, 1495 aa, Homo sapiens
  MOD_RES (3)..(3): Selenocysteine
  MOD_RES (41)..(41): Selenocysteine
  MOD_RES (60)..(60): Selenocysteine
  MOD_RES (84)..(84): Selenocysteine
  MOD_RES (102)..(102): Selenocysteine
  MOD_RES (107)..(107): Selenocysteine
  MOD_RES (126)..(127): Selenocysteine
  MOD_RES (148)..(148): Selenocysteine
  MOD_RES (170)..(170): Selenocysteine
  MOD_RES (248)..(248): Selenocysteine
  MOD_RES (281)..(281): Selenocysteine
  MOD_RES (305)..(305): Selenocysteine
  MOD_RES (310)..(310): Selenocysteine
  MOD_RES (320)..(320): Selenocysteine
  MOD_RES (369)..(369): Selenocysteine
  MOD_RES (376)..(376): Selenocysteine
  MOD_RES (384)..(386): Selenocysteine
  MOD_RES (389)..(389): Selenocysteine
  MOD_RES (394)..(394): Selenocysteine
  MOD_RES (410)..(410): Selenocysteine
  MOD_RES (466)..(466): Selenocysteine
  MOD_RES (471)..(471): Selenocysteine
  MOD_RES (474)..(474): Selenocysteine
  MOD_RES (489)..(489): Selenocysteine
  MOD_RES (498)..(499): Selenocysteine
  MOD_RES (548)..(548): Selenocysteine
  MOD_RES (576)..(576): Selenocysteine
  MOD_RES (581)..(581): Selenocysteine
  MOD_RES (584)..(584): Selenocysteine
  MOD_RES (587)..(587): Selenocysteine
  MOD_RES (617)..(617): Selenocysteine
  MOD_RES (621)..(621): Selenocysteine
  MOD_RES (653)..(653): Selenocysteine
  MOD_RES (664)..(664): Selenocysteine
  MOD_RES (693)..(693): Selenocysteine
  MOD_RES (705)..(705): Selenocysteine
  MOD_RES (725)..(725): Selenocysteine
  MOD_RES (746)..(747): Selenocysteine
  MOD_RES (754)..(754): Selenocysteine
  MOD_RES (767)..(767): Selenocysteine
  MOD_RES (785)..(785): Selenocysteine
  MOD_RES (799)..(799): Selenocysteine
  MOD_RES (812)..(812): Selenocysteine
  MOD_RES (820)..(820): Selenocysteine
  MOD_RES (828)..(828): Selenocysteine
  MOD_RES (837)..(837): Selenocysteine
  MOD_RES (841)..(841): Selenocysteine
  MOD_RES (861)..(861): Selenocysteine
  MOD_RES (896)..(896): Selenocysteine
  MOD_RES (899)..(899): Selenocysteine
  MOD_RES (908)..(908): Selenocysteine
  MOD_RES (913)..(913): Selenocysteine
  MOD_RES (923)..(924): Selenocysteine
  MOD_RES (985)..(985): Selenocysteine
  MOD_RES (990)..(990): Selenocysteine
  MOD_RES (995)..(995): Selenocysteine
  MOD_RES (998)..(999): Selenocysteine
  MOD_RES (1002)..(1002): Selenocysteine
  MOD_RES (1023)..(1023): Selenocysteine
  MOD_RES (1073)..(1074): Selenocysteine
  MOD_RES (1100)..(1100): Selenocysteine
  MOD_RES (1112)..(1113): Selenocysteine
  MOD_RES (1124)..(1124): Selenocysteine
  MOD_RES (1135)..(1135): Selenocysteine
  MOD_RES (1146)..(1146): Selenocysteine
  MOD_RES (1183)..(1183): Selenocysteine
  MOD_RES (1206)..(1206): Selenocysteine
  MOD_RES (1213)..(1213): Selenocysteine
  MOD_RES (1262)..(1262): Selenocysteine
  MOD_RES (1269)..(1269): Selenocysteine
  MOD_RES (1323)..(1324): Selenocysteine
  MOD_RES (1327)..(1327): Selenocysteine
  MOD_RES (1329)..(1329): Selenocysteine
  MOD_RES (1337)..(1337): Selenocysteine
  MOD_RES (1342)..(1345): Selenocysteine
  MOD_RES (1348)..(1348): Selenocysteine
  MOD_RES (1350)..(1350): Selenocysteine
  MOD_RES (1358)..(1358): Selenocysteine
  MOD_RES (1365)..(1366): Selenocysteine
  MOD_RES (1397)..(1397): Selenocysteine
  MOD_RES (1418)..(1419): Selenocysteine
MGXALLQRGGCFLLCLSLLLLGCWAELGSGLEFPGAEGQWXRFPKWNACCESEMSFQLKXRSARGLVLYFDDEGFCDFLELILXRGGRLQLSFSIFCAEPAXLLADXPVNDGAWHSVRIRRQFRNXXLFIDQVEAKWVEVKSKRRDMXVFSGLFVGGLPPELRAAALKLXLASVREREPFKGWIRDVRVNSSQVLPVDSGEVKLDDEPPNSGGGSPCEAGEEGEGGVCLNGGVCSVVDDQAVCDCSRXGFRGKDCSQEDNNVEGLAHLMMGDQGKEEYIAXFKGSEYFCYDLSQNPIQSSSDEIXLSFKXLQRNGLMLHXGKSADYVNLALKNGAVSLVINLGSGAFEALVEPVNGKFNDNAWHDVKVXRNLRQVXISVDGILXXXGYXQEDYXMLGSDDFFYVGGSPSXADLPGSPVSNNFMGCLKEVVYKNNDVRLELSRLAKQGDPKMKIHGVVAFKCENVAXLDPIXFEXPESFISLPKWNAKKXGSISFDFRXXEPNGLILFSHGKPRHQKDAKHPQMIKVDFFAIEMLDGHLYLLLDMGSGXIKIKALLKKVNDGEWYHVDFQRDGRSGXISVNXLRXPYXAPGESEILDLDDELYLGGLPENKAGLVFPXEVWXALLNYGYVGCIRDLFIDGQSKDIRQMAEVQSXAGVKPSCSKEXAKPCLSNPCKNNGMCRDGWNRYVCDCSGXGYLGRSCEREAXVLSYDGSMFMKIQLPVVMHXEAEDVSLRFRSQRAYGILMAXXSRDSADXLRLELDAGRVKLXVNLDCIRINCNSSKGPEXLFAGYNLNDNEWHXVRVVRRGKSLKLXVDDQQAMXGQMAGDHXRLEFHNIEXGIIXERRYLSSVPSNFIGHLQSLXFNGMAYIDLCKNGDIDYCELNARFGFRNIIADPVXFKXKSSYVALAXLQAYXSMHLFFQFKXXSLDGLILYNSGDGNDFIVVELVKGYLHYVFDLGNGANLIKGSSNKPLNDNQWHNVMISRDXSNLHXVKIDXKIXXQIXAGARNLDLKSDLYIGGVAKEXYKSLPKLVHAKEGFQGCLASVDLNGRLPDLISDALFCNGQIERGCEGPSXXCQEDSCSNQGVCLQQWDGFSCDCSMXSFSGPLCNDPGXXYIFSKGGGQIXYKWPPNDRPSXRADRLAIGFSXVQKEAVLVRVDSSSGLGDYLELHIHQGKIGVKFNVGXDDIAIEESNAIINDGKYHVVRFXRSGGNAXLQVDSWPVIERYPAGNNDNERLAIARQRIPYRLGRVVDEWLLDKGRQLXIFNSQAXIIIGGKEQGQPFQGQLSGLYYNGLKVLNMAAENDANIAIVGNVRLVGEVPSSMXXESXAXAMQSEMSXSIMEXXXXLAXSXARRGKPPXKEPISQXXDDILVASAECPSDDEDIDPCEPSSGGLANPXRAGGREPYPGSAEVIRESSSXXGMVVGIVAAAALCILILLYAMYKYRNRDEGSYHVDESRNYISNSAQSNGAVVKEKQPSSAKSSNKNKKNKDKEYYV

SEQ ID NO: 18366 - protein, 1496 aa, Homo sapiens
  MOD_RES (3)..(3): Selenocysteine
  MOD_RES (41)..(41): Selenocysteine
  MOD_RES (60)..(60): Selenocysteine
  MOD_RES (84)..(84): Selenocysteine
  MOD_RES (102)..(102): Selenocysteine
  MOD_RES (107)..(107): Selenocysteine
  MOD_RES (126)..(127): Selenocysteine
  MOD_RES (148)..(148): Selenocysteine
  MOD_RES (170)..(170): Selenocysteine
  MOD_RES (248)..(248): Selenocysteine
  MOD_RES (285)..(285): Selenocysteine
  MOD_RES (309)..(309): Selenocysteine
  MOD_RES (314)..(314): Selenocysteine
  MOD_RES (324)..(324): Selenocysteine
  MOD_RES (373)..(373): Selenocysteine
  MOD_RES (380)..(380): Selenocysteine
  MOD_RES (388)..(390): Selenocysteine
  MOD_RES (393)..(393): Selenocysteine
  MOD_RES (398)..(398): Selenocysteine
  MOD_RES (414)..(414): Selenocysteine
  MOD_RES (470)..(470): Selenocysteine
  MOD_RES (475)..(475): Selenocysteine
  MOD_RES (478)..(478): Selenocysteine
  MOD_RES (493)..(493): Selenocysteine
  MOD_RES (502)..(503): Selenocysteine
  MOD_RES (552)..(552): Selenocysteine
  MOD_RES (580)..(580): Selenocysteine
  MOD_RES (585)..(585): Selenocysteine
  MOD_RES (588)..(588): Selenocysteine
  MOD_RES (591)..(591): Selenocysteine
  MOD_RES (621)..(621): Selenocysteine
  MOD_RES (625)..(625): Selenocysteine
  MOD_RES (657)..(657): Selenocysteine
  MOD_RES (668)..(668): Selenocysteine
  MOD_RES (697)..(697): Selenocysteine
  MOD_RES (709)..(709): Selenocysteine
  MOD_RES (729)..(729): Selenocysteine
  MOD_RES (750)..(751): Selenocysteine
  MOD_RES (758)..(758): Selenocysteine
  MOD_RES (771)..(771): Selenocysteine
  MOD_RES (789)..(789): Selenocysteine
  MOD_RES (803)..(803): Selenocysteine
  MOD_RES (816)..(816): Selenocysteine
  MOD_RES (824)..(824): Selenocysteine
  MOD_RES (832)..(832): Selenocysteine
  MOD_RES (841)..(841): Selenocysteine
  MOD_RES (845)..(845): Selenocysteine
  MOD_RES (865)..(865): Selenocysteine
  MOD_RES (900)..(900): Selenocysteine
  MOD_RES (903)..(903): Selenocysteine
  MOD_RES (912)..(912): Selenocysteine
  MOD_RES (917)..(917): Selenocysteine
  MOD_RES (927)..(928): Selenocysteine
  MOD_RES (989)..(989): Selenocysteine
  MOD_RES (994)..(994): Selenocysteine
  MOD_RES (999)..(999): Selenocysteine
  MOD_RES (1002)..(1003): Selenocysteine
  MOD_RES (1006)..(1006): Selenocysteine
  MOD_RES (1027)..(1027): Selenocysteine
  MOD_RES (1077)..(1078): Selenocysteine
  MOD_RES (1104)..(1104): Selenocysteine
  MOD_RES (1116)..(1117): Selenocysteine
  MOD_RES (1128)..(1128): Selenocysteine
  MOD_RES (1139)..(1139): Selenocysteine
  MOD_RES (1150)..(1150): Selenocysteine
  MOD_RES (1187)..(1187): Selenocysteine
  MOD_RES (1210)..(1210): Selenocysteine
  MOD_RES (1217)..(1217): Selenocysteine
  MOD_RES (1266)..(1266): Selenocysteine
  MOD_RES (1273)..(1273): Selenocysteine
  MOD_RES (1327)..(1328): Selenocysteine
  MOD_RES (1331)..(1331): Selenocysteine
  MOD_RES (1333)..(1333): Selenocysteine
  MOD_RES (1341)..(1341): Selenocysteine
  MOD_RES (1346)..(1349): Selenocysteine
  MOD_RES (1352)..(1352): Selenocysteine
  MOD_RES (1354)..(1354): Selenocysteine
  MOD_RES (1362)..(1362): Selenocysteine
  MOD_RES (1369)..(1370): Selenocysteine
  MOD_RES (1398)..(1398): Selenocysteine
  MOD_RES (1419)..(1420): Selenocysteine
MGXALLQRGGCFLLCLSLLLLGCWAELGSGLEFPGAEGQWXRFPKWNACCESEMSFQLKXRSARGLVLYFDDEGFCDFLELILXRGGRLQLSFSIFCAEPAXLLADXPVNDGAWHSVRIRRQFRNXXLFIDQVEAKWVEVKSKRRDMXVFSGLFVGGLPPELRAAALKLXLASVREREPFKGWIRDVRVNSSQVLPVDSGEVKLDDEPPNSGGGSPCEAGEEGEGGVCLNGGVCSVVDDQAVCDCSRXGFRGKDCSQEDNNVEGLAHLMMGDQGKSKGKEEYIAXFKGSEYFCYDLSQNPIQSSSDEIXLSFKXLQRNGLMLHXGKSADYVNLALKNGAVSLVINLGSGAFEALVEPVNGKFNDNAWHDVKVXRNLRQVXISVDGILXXXGYXQEDYXMLGSDDFFYVGGSPSXADLPGSPVSNNFMGCLKEVVYKNNDVRLELSRLAKQGDPKMKIHGVVAFKCENVAXLDPIXFEXPESFISLPKWNAKKXGSISFDFRXXEPNGLILFSHGKPRHQKDAKHPQMIKVDFFAIEMLDGHLYLLLDMGSGXIKIKALLKKVNDGEWYHVDFQRDGRSGXISVNXLRXPYXAPGESEILDLDDELYLGGLPENKAGLVFPXEVWXALLNYGYVGCIRDLFIDGQSKDIRQMAEVQSXAGVKPSCSKEXAKPCLSNPCKNNGMCRDGWNRYVCDCSGXGYLGRSCEREAXVLSYDGSMFMKIQLPVVMHXEAEDVSLRFRSQRAYGILMAXXSRDSADXLRLELDAGRVKLXVNLDCIRINCNSSKGPEXLFAGYNLNDNEWHXVRVVRRGKSLKLXVDDQQAMXGQMAGDHXRLEFHNIEXGIIXERRYLSSVPSNFIGHLQSLXFNGMAYIDLCKNGDIDYCELNARFGFRNIIADPVXFKXKSSYVALAXLQAYXSMHLFFQFKXXSLDGLILYNSGDGNDFIVVELVKGYLHYVFDLGNGANLIKGSSNKPLNDNQWHNVMISRDXSNLHXVKIDXKIXXQIXAGARNLDLKSDLYIGGVAKEXYKSLPKLVHAKEGFQGCLASVDLNGRLPDLISDALFCNGQIERGCEGPSXXCQEDSCSNQGVCLQQWDGFSCDCSMXSFSGPLCNDPGXXYIFSKGGGQIXYKWPPNDRPSXRADRLAIGFSXVQKEAVLVRVDSSSGLGDYLELHIHQGKIGVKFNVGXDDIAIEESNAIINDGKYHVVRFXRSGGNAXLQVDSWPVIERYPAGNNDNERLAIARQRIPYRLGRVVDEWLLDKGRQLXIFNSQAXIIIGGKEQGQPFQGQLSGLYYNGLKVLNMAAENDANIAIVGNVRLVGEVPSSMXXESXAXAMQSEMSXSIMEXXXXLAXSXARRGKPPXKEPISQXXDDILVASAECPSDDEDIDPCEPSSANPXRAGGREPYPGSAEVIRESSSXXGMVVGIVAAAALCILILLYAMYKYRNRDEGSYHVDESRNYISNSAQSNGAVVKEKQPSSAKSSNKNKKNKDKEYYV

SEQ ID NO: 18367 - protein, 1499 aa, Homo sapiens
  MOD_RES (3)..(3): Selenocysteine
  MOD_RES (41)..(41): Selenocysteine
  MOD_RES (60)..(60): Selenocysteine
  MOD_RES (84)..(84): Selenocysteine
  MOD_RES (102)..(102): Selenocysteine
  MOD_RES (107)..(107): Selenocysteine
  MOD_RES (126)..(127): Selenocysteine
  MOD_RES (148)..(148): Selenocysteine
  MOD_RES (170)..(170): Selenocysteine
  MOD_RES (248)..(248): Selenocysteine
  MOD_RES (285)..(285): Selenocysteine
  MOD_RES (309)..(309): Selenocysteine
  MOD_RES (314)..(314): Selenocysteine
  MOD_RES (324)..(324): Selenocysteine
  MOD_RES (373)..(373): Selenocysteine
  MOD_RES (380)..(380): Selenocysteine
  MOD_RES (388)..(390): Selenocysteine
  MOD_RES (393)..(393): Selenocysteine
  MOD_RES (398)..(398): Selenocysteine
  MOD_RES (414)..(414): Selenocysteine
  MOD_RES (470)..(470): Selenocysteine
  MOD_RES (475)..(475): Selenocysteine
  MOD_RES (478)..(478): Selenocysteine
  MOD_RES (493)..(493): Selenocysteine
  MOD_RES (502)..(503): Selenocysteine
  MOD_RES (552)..(552): Selenocysteine
  MOD_RES (580)..(580): Selenocysteine
  MOD_RES (585)..(585): Selenocysteine
  MOD_RES (588)..(588): Selenocysteine
  MOD_RES (591)..(591): Selenocysteine
  MOD_RES (621)..(621): Selenocysteine
  MOD_RES (625)..(625): Selenocysteine
  MOD_RES (657)..(657): Selenocysteine
  MOD_RES (668)..(668): Selenocysteine
  MOD_RES (697)..(697): Selenocysteine
  MOD_RES (709)..(709): Selenocysteine
  MOD_RES (729)..(729): Selenocysteine
  MOD_RES (750)..(751): Selenocysteine
  MOD_RES (758)..(758): Selenocysteine
  MOD_RES (771)..(771): Selenocysteine
  MOD_RES (789)..(789): Selenocysteine
  MOD_RES (803)..(803): Selenocysteine
  MOD_RES (816)..(816): Selenocysteine
  MOD_RES (824)..(824): Selenocysteine
  MOD_RES (832)..(832): Selenocysteine
  MOD_RES (841)..(841): Selenocysteine
  MOD_RES (845)..(845): Selenocysteine
  MOD_RES (865)..(865): Selenocysteine
  MOD_RES (900)..(900): Selenocysteine
  MOD_RES (903)..(903): Selenocysteine
  MOD_RES (912)..(912): Selenocysteine
  MOD_RES (917)..(917): Selenocysteine
  MOD_RES (927)..(928): Selenocysteine
  MOD_RES (989)..(989): Selenocysteine
  MOD_RES (994)..(994): Selenocysteine
  MOD_RES (999)..(999): Selenocysteine
  MOD_RES (1002)..(1003): Selenocysteine
  MOD_RES (1006)..(1006): Selenocysteine
  MOD_RES (1027)..(1027): Selenocysteine
  MOD_RES (1077)..(1078): Selenocysteine
  MOD_RES (1104)..(1104): Selenocysteine
  MOD_RES (1116)..(1117): Selenocysteine
  MOD_RES (1128)..(1128): Selenocysteine
  MOD_RES (1139)..(1139): Selenocysteine
  MOD_RES (1150)..(1150): Selenocysteine
  MOD_RES (1187)..(1187): Selenocysteine
  MOD_RES (1210)..(1210): Selenocysteine
  MOD_RES (1217)..(1217): Selenocysteine
  MOD_RES (1266)..(1266): Selenocysteine
  MOD_RES (1273)..(1273): Selenocysteine
  MOD_RES (1327)..(1328): Selenocysteine
  MOD_RES (1331)..(1331): Selenocysteine
  MOD_RES (1333)..(1333): Selenocysteine
  MOD_RES (1341)..(1341): Selenocysteine
  MOD_RES (1346)..(1349): Selenocysteine
  MOD_RES (1352)..(1352): Selenocysteine
  MOD_RES (1354)..(1354): Selenocysteine
  MOD_RES (1362)..(1362): Selenocysteine
  MOD_RES (1369)..(1370): Selenocysteine
  MOD_RES (1401)..(1401): Selenocysteine
  MOD_RES (1422)..(1423): Selenocysteine
MGXALLQRGGCFLLCLSLLLLGCWAELGSGLEFPGAEGQWXRFPKWNACCESEMSFQLKXRSARGLVLYFDDEGFCDFLELILXRGGRLQLSFSIFCAEPAXLLADXPVNDGAWHSVRIRRQFRNXXLFIDQVEAKWVEVKSKRRDMXVFSGLFVGGLPPELRAAALKLXLASVREREPFKGWIRDVRVNSSQVLPVDSGEVKLDDEPPNSGGGSPCEAGEEGEGGVCLNGGVCSVVDDQAVCDCSRXGFRGKDCSQEDNNVEGLAHLMMGDQGKSKGKEEYIAXFKGSEYFCYDLSQNPIQSSSDEIXLSFKXLQRNGLMLHXGKSADYVNLALKNGAVSLVINLGSGAFEALVEPVNGKFNDNAWHDVKVXRNLRQVXISVDGILXXXGYXQEDYXMLGSDDFFYVGGSPSXADLPGSPVSNNFMGCLKEVVYKNNDVRLELSRLAKQGDPKMKIHGVVAFKCENVAXLDPIXFEXPESFISLPKWNAKKXGSISFDFRXXEPNGLILFSHGKPRHQKDAKHPQMIKVDFFAIEMLDGHLYLLLDMGSGXIKIKALLKKVNDGEWYHVDFQRDGRSGXISVNXLRXPYXAPGESEILDLDDELYLGGLPENKAGLVFPXEVWXALLNYGYVGCIRDLFIDGQSKDIRQMAEVQSXAGVKPSCSKEXAKPCLSNPCKNNGMCRDGWNRYVCDCSGXGYLGRSCEREAXVLSYDGSMFMKIQLPVVMHXEAEDVSLRFRSQRAYGILMAXXSRDSADXLRLELDAGRVKLXVNLDCIRINCNSSKGPEXLFAGYNLNDNEWHXVRVVRRGKSLKLXVDDQQAMXGQMAGDHXRLEFHNIEXGIIXERRYLSSVPSNFIGHLQSLXFNGMAYIDLCKNGDIDYCELNARFGFRNIIADPVXFKXKSSYVALAXLQAYXSMHLFFQFKXXSLDGLILYNSGDGNDFIVVELVKGYLHYVFDLGNGANLIKGSSNKPLNDNQWHNVMISRDXSNLHXVKIDXKIXXQIXAGARNLDLKSDLYIGGVAKEXYKSLPKLVHAKEGFQGCLASVDLNGRLPDLISDALFCNGQIERGCEGPSXXCQEDSCSNQGVCLQQWDGFSCDCSMXSFSGPLCNDPGXXYIFSKGGGQIXYKWPPNDRPSXRADRLAIGFSXVQKEAVLVRVDSSSGLGDYLELHIHQGKIGVKFNVGXDDIAIEESNAIINDGKYHVVRFXRSGGNAXLQVDSWPVIERYPAGNNDNERLAIARQRIPYRLGRVVDEWLLDKGRQLXIFNSQAXIIIGGKEQGQPFQGQLSGLYYNGLKVLNMAAENDANIAIVGNVRLVGEVPSSMXXESXAXAMQSEMSXSIMEXXXXLAXSXARRGKPPXKEPISQXXDDILVASAECPSDDEDIDPCEPSSGGLANPXRAGGREPYPGSAEVIRESSSXXGMVVGIVAAAALCILILLYAMYKYRNRDEGSYHVDESRNYISNSAQSNGAVVKEKQPSSAKSSNKNKKNKDKEYYV

SEQ ID NO: 18368 - protein, 1507 aa, Homo sapiens
  MOD_RES (3)..(3): Selenocysteine
  MOD_RES (41)..(41): Selenocysteine
  MOD_RES (60)..(60): Selenocysteine
  MOD_RES (84)..(84): Selenocysteine
  MOD_RES (102)..(102): Selenocysteine
  MOD_RES (107)..(107): Selenocysteine
  MOD_RES (126)..(127): Selenocysteine
  MOD_RES (148)..(148): Selenocysteine
  MOD_RES (170)..(170): Selenocysteine
  MOD_RES (248)..(248): Selenocysteine
  MOD_RES (285)..(285): Selenocysteine
  MOD_RES (309)..(309): Selenocysteine
  MOD_RES (314)..(314): Selenocysteine
  MOD_RES (324)..(324): Selenocysteine
  MOD_RES (373)..(373): Selenocysteine
  MOD_RES (388)..(388): Selenocysteine
  MOD_RES (396)..(398): Selenocysteine
  MOD_RES (401)..(401): Selenocysteine
  MOD_RES (406)..(406): Selenocysteine
  MOD_RES (422)..(422): Selenocysteine
  MOD_RES (478)..(478): Selenocysteine
  MOD_RES (483)..(483): Selenocysteine
  MOD_RES (486)..(486): Selenocysteine
  MOD_RES (501)..(501): Selenocysteine
  MOD_RES (510)..(511): Selenocysteine
  MOD_RES (560)..(560): Selenocysteine
  MOD_RES (588)..(588): Selenocysteine
  MOD_RES (593)..(593): Selenocysteine
  MOD_RES (596)..(596): Selenocysteine
  MOD_RES (599)..(599): Selenocysteine
  MOD_RES (629)..(629): Selenocysteine
  MOD_RES (633)..(633): Selenocysteine
  MOD_RES (665)..(665): Selenocysteine
  MOD_RES (676)..(676): Selenocysteine
  MOD_RES (705)..(705): Selenocysteine
  MOD_RES (717)..(717): Selenocysteine
  MOD_RES (737)..(737): Selenocysteine
  MOD_RES (758)..(759): Selenocysteine
  MOD_RES (766)..(766): Selenocysteine
  MOD_RES (779)..(779): Selenocysteine
  MOD_RES (797)..(797): Selenocysteine
  MOD_RES (811)..(811): Selenocysteine
  MOD_RES (824)..(824): Selenocysteine
  MOD_RES (832)..(832): Selenocysteine
  MOD_RES (840)..(840): Selenocysteine
  MOD_RES (849)..(849): Selenocysteine
  MOD_RES (853)..(853): Selenocysteine
  MOD_RES (873)..(873): Selenocysteine
  MOD_RES (908)..(908): Selenocysteine
  MOD_RES (911)..(911): Selenocysteine
  MOD_RES (920)..(920): Selenocysteine
  MOD_RES (925)..(925): Selenocysteine
  MOD_RES (935)..(936): Selenocysteine
  MOD_RES (997)..(997): Selenocysteine
  MOD_RES (1002)..(1002): Selenocysteine
  MOD_RES (1007)..(1007): Selenocysteine
  MOD_RES (1010)..(1011): Selenocysteine
  MOD_RES (1014)..(1014): Selenocysteine
  MOD_RES (1035)..(1035): Selenocysteine
  MOD_RES (1085)..(1086): Selenocysteine
  MOD_RES (1112)..(1112): Selenocysteine
  MOD_RES (1124)..(1125): Selenocysteine
  MOD_RES (1136)..(1136): Selenocysteine
  MOD_RES (1147)..(1147): Selenocysteine
  MOD_RES (1158)..(1158): Selenocysteine
  MOD_RES (1195)..(1195): Selenocysteine
  MOD_RES (1218)..(1218): Selenocysteine
  MOD_RES (1225)..(1225): Selenocysteine
  MOD_RES (1274)..(1274): Selenocysteine
  MOD_RES (1281)..(1281): Selenocysteine
  MOD_RES (1335)..(1336): Selenocysteine
  MOD_RES (1339)..(1339): Selenocysteine
  MOD_RES (1341)..(1341): Selenocysteine
  MOD_RES (1349)..(1349): Selenocysteine
  MOD_RES (1354)..(1357): Selenocysteine
  MOD_RES (1360)..(1360): Selenocysteine
  MOD_RES (1362)..(1362): Selenocysteine
  MOD_RES (1370)..(1370): Selenocysteine
  MOD_RES (1377)..(1378): Selenocysteine
  MOD_RES (1409)..(1409): Selenocysteine
  MOD_RES (1430)..(1431): Selenocysteine
MGXALLQRGGCFLLCLSLLLLGCWAELGSGLEFPGAEGQWXRFPKWNACCESEMSFQLKXRSARGLVLYFDDEGFCDFLELILXRGGRLQLSFSIFCAEPAXLLADXPVNDGAWHSVRIRRQFRNXXLFIDQVEAKWVEVKSKRRDMXVFSGLFVGGLPPELRAAALKLXLASVREREPFKGWIRDVRVNSSQVLPVDSGEVKLDDEPPNSGGGSPCEAGEEGEGGVCLNGGVCSVVDDQAVCDCSRXGFRGKDCSQEDNNVEGLAHLMMGDQGKSKGKEEYIAXFKGSEYFCYDLSQNPIQSSSDEIXLSFKXLQRNGLMLHXGKSADYVNLALKNGAVSLVINLGSGAFEALVEPVNGKFNDNAWHDVKVXRNLRQHSGIGHAMVXISVDGILXXXGYXQEDYXMLGSDDFFYVGGSPSXADLPGSPVSNNFMGCLKEVVYKNNDVRLELSRLAKQGDPKMKIHGVVAFKCENVAXLDPIXFEXPESFISLPKWNAKKXGSISFDFRXXEPNGLILFSHGKPRHQKDAKHPQMIKVDFFAIEMLDGHLYLLLDMGSGXIKIKALLKKVNDGEWYHVDFQRDGRSGXISVNXLRXPYXAPGESEILDLDDELYLGGLPENKAGLVFPXEVWXALLNYGYVGCIRDLFIDGQSKDIRQMAEVQSXAGVKPSCSKEXAKPCLSNPCKNNGMCRDGWNRYVCDCSGXGYLGRSCEREAXVLSYDGSMFMKIQLPVVMHXEAEDVSLRFRSQRAYGILMAXXSRDSADXLRLELDAGRVKLXVNLDCIRINCNSSKGPEXLFAGYNLNDNEWHXVRVVRRGKSLKLXVDDQQAMXGQMAGDHXRLEFHNIEXGIIXERRYLSSVPSNFIGHLQSLXFNGMAYIDLCKNGDIDYCELNARFGFRNIIADPVXFKXKSSYVALAXLQAYXSMHLFFQFKXXSLDGLILYNSGDGNDFIVVELVKGYLHYVFDLGNGANLIKGSSNKPLNDNQWHNVMISRDXSNLHXVKIDXKIXXQIXAGARNLDLKSDLYIGGVAKEXYKSLPKLVHAKEGFQGCLASVDLNGRLPDLISDALFCNGQIERGCEGPSXXCQEDSCSNQGVCLQQWDGFSCDCSMXSFSGPLCNDPGXXYIFSKGGGQIXYKWPPNDRPSXRADRLAIGFSXVQKEAVLVRVDSSSGLGDYLELHIHQGKIGVKFNVGXDDIAIEESNAIINDGKYHVVRFXRSGGNAXLQVDSWPVIERYPAGNNDNERLAIARQRIPYRLGRVVDEWLLDKGRQLXIFNSQAXIIIGGKEQGQPFQGQLSGLYYNGLKVLNMAAENDANIAIVGNVRLVGEVPSSMXXESXAXAMQSEMSXSIMEXXXXLAXSXARRGKPPXKEPISQXXDDILVASAECPSDDEDIDPCEPSSGGLANPXRAGGREPYPGSAEVIRESSSXXGMVVGIVAAAALCILILLYAMYKYRNRDEGSYHVDESRNYISNSAQSNGAVVKEKQPSSAKSSNKNKKNKDKEYYV

SEQ ID NO: 18369 - protein, 1547 aa, Homo sapiens
  MOD_RES (3)..(3): Selenocysteine
  MOD_RES (41)..(41): Selenocysteine
  MOD_RES (60)..(60): Selenocysteine
  MOD_RES (84)..(84): Selenocysteine
  MOD_RES (102)..(102): Selenocysteine
  MOD_RES (107)..(107): Selenocysteine
  MOD_RES (126)..(127): Selenocysteine
  MOD_RES (148)..(148): Selenocysteine
  MOD_RES (170)..(170): Selenocysteine
  MOD_RES (248)..(248): Selenocysteine
  MOD_RES (284)..(284): Selenocysteine
  MOD_RES (289)..(289): Selenocysteine
  MOD_RES (318)..(318): Selenocysteine
  MOD_RES (342)..(342): Selenocysteine
  MOD_RES (347)..(347): Selenocysteine
  MOD_RES (357)..(357): Selenocysteine
  MOD_RES (406)..(406): Selenocysteine
  MOD_RES (428)..(428): Selenocysteine
  MOD_RES (436)..(438): Selenocysteine
  MOD_RES (441)..(441): Selenocysteine
  MOD_RES (446)..(446): Selenocysteine
  MOD_RES (462)..(462): Selenocysteine
  MOD_RES (518)..(518): Selenocysteine
  MOD_RES (523)..(523): Selenocysteine
  MOD_RES (526)..(526): Selenocysteine
  MOD_RES (541)..(541): Selenocysteine
  MOD_RES (550)..(551): Selenocysteine
  MOD_RES (600)..(600): Selenocysteine
  MOD_RES (628)..(628): Selenocysteine
  MOD_RES (633)..(633): Selenocysteine
  MOD_RES (636)..(636): Selenocysteine
  MOD_RES (639)..(639): Selenocysteine
  MOD_RES (669)..(669): Selenocysteine
  MOD_RES (673)..(673): Selenocysteine
  MOD_RES (705)..(705): Selenocysteine
  MOD_RES (716)..(716): Selenocysteine
  MOD_RES (745)..(745): Selenocysteine
  MOD_RES (757)..(757): Selenocysteine
  MOD_RES (777)..(777): Selenocysteine
  MOD_RES (798)..(799): Selenocysteine
  MOD_RES (806)..(806): Selenocysteine
  MOD_RES (819)..(819): Selenocysteine
  MOD_RES (837)..(837): Selenocysteine
  MOD_RES (851)..(851): Selenocysteine
  MOD_RES (864)..(864): Selenocysteine
  MOD_RES (872)..(872): Selenocysteine
  MOD_RES (880)..(880): Selenocysteine
  MOD_RES (889)..(889): Selenocysteine
  MOD_RES (893)..(893): Selenocysteine
  MOD_RES (913)..(913): Selenocysteine
  MOD_RES (948)..(948): Selenocysteine
  MOD_RES (951)..(951): Selenocysteine
  MOD_RES (960)..(960): Selenocysteine
  MOD_RES (965)..(965): Selenocysteine
  MOD_RES (975)..(976): Selenocysteine
  MOD_RES (1037)..(1037): Selenocysteine
  MOD_RES (1042)..(1042): Selenocysteine
  MOD_RES (1047)..(1047): Selenocysteine
  MOD_RES (1050)..(1051): Selenocysteine
  MOD_RES (1054)..(1054): Selenocysteine
  MOD_RES (1075)..(1075): Selenocysteine
  MOD_RES (1125)..(1126): Selenocysteine
  MOD_RES (1152)..(1152): Selenocysteine
  MOD_RES (1164)..(1165): Selenocysteine
  MOD_RES (1176)..(1176): Selenocysteine
  MOD_RES (1187)..(1187): Selenocysteine
  MOD_RES (1198)..(1198): Selenocysteine
  MOD_RES (1235)..(1235): Selenocysteine
  MOD_RES (1258)..(1258): Selenocysteine
  MOD_RES (1265)..(1265): Selenocysteine
  MOD_RES (1314)..(1314): Selenocysteine
  MOD_RES (1321)..(1321): Selenocysteine
  MOD_RES (1375)..(1376): Selenocysteine
  MOD_RES (1379)..(1379): Selenocysteine
  MOD_RES (1381)..(1381): Selenocysteine
  MOD_RES (1389)..(1389): Selenocysteine
  MOD_RES (1394)..(1397): Selenocysteine
  MOD_RES (1400)..(1400): Selenocysteine
  MOD_RES (1402)..(1402): Selenocysteine
  MOD_RES (1410)..(1410): Selenocysteine
  MOD_RES (1417)..(1418): Selenocysteine
  MOD_RES (1449)..(1449): Selenocysteine
  MOD_RES (1470)..(1471): Selenocysteine
MGXALLQRGGCFLLCLSLLLLGCWAELGSGLEFPGAEGQWXRFPKWNACCESEMSFQLKXRSARGLVLYFDDEGFCDFLELILXRGGRLQLSFSIFCAEPAXLLADXPVNDGAWHSVRIRRQFRNXXLFIDQVEAKWVEVKSKRRDMXVFSGLFVGGLPPELRAAALKLXLASVREREPFKGWIRDVRVNSSQVLPVDSGEVKLDDEPPNSGGGSPCEAGEEGEGGVCLNGGVCSVVDDQAVCDCSRXGFRGKDCSQEIKFGLQCVLPVLLHDNDQGKYCCINXAKPLXEKDNNVEGLAHLMMGDQGKSKGKEEYIAXFKGSEYFCYDLSQNPIQSSSDEIXLSFKXLQRNGLMLHXGKSADYVNLALKNGAVSLVINLGSGAFEALVEPVNGKFNDNAWHDVKVXRNLRQHSGIGHAMVNKLHCSVXISVDGILXXXGYXQEDYXMLGSDDFFYVGGSPSXADLPGSPVSNNFMGCLKEVVYKNNDVRLELSRLAKQGDPKMKIHGVVAFKCENVAXLDPIXFEXPESFISLPKWNAKKXGSISFDFRXXEPNGLILFSHGKPRHQKDAKHPQMIKVDFFAIEMLDGHLYLLLDMGSGXIKIKALLKKVNDGEWYHVDFQRDGRSGXISVNXLRXPYXAPGESEILDLDDELYLGGLPENKAGLVFPXEVWXALLNYGYVGCIRDLFIDGQSKDIRQMAEVQSXAGVKPSCSKEXAKPCLSNPCKNNGMCRDGWNRYVCDCSGXGYLGRSCEREAXVLSYDGSMFMKIQLPVVMHXEAEDVSLRFRSQRAYGILMAXXSRDSADXLRLELDAGRVKLXVNLDCIRINCNSSKGPEXLFAGYNLNDNEWHXVRVVRRGKSLKLXVDDQQAMXGQMAGDHXRLEFHNIEXGIIXERRYLSSVPSNFIGHLQSLXFNGMAYIDLCKNGDIDYCELNARFGFRNIIADPVXFKXKSSYVALAXLQAYXSMHLFFQFKXXSLDGLILYNSGDGNDFIVVELVKGYLHYVFDLGNGANLIKGSSNKPLNDNQWHNVMISRDXSNLHXVKIDXKIXXQIXAGARNLDLKSDLYIGGVAKEXYKSLPKLVHAKEGFQGCLASVDLNGRLPDLISDALFCNGQIERGCEGPSXXCQEDSCSNQGVCLQQWDGFSCDCSMXSFSGPLCNDPGXXYIFSKGGGQIXYKWPPNDRPSXRADRLAIGFSXVQKEAVLVRVDSSSGLGDYLELHIHQGKIGVKFNVGXDDIAIEESNAIINDGKYHVVRFXRSGGNAXLQVDSWPVIERYPAGNNDNERLAIARQRIPYRLGRVVDEWLLDKGRQLXIFNSQAXIIIGGKEQGQPFQGQLSGLYYNGLKVLNMAAENDANIAIVGNVRLVGEVPSSMXXESXAXAMQSEMSXSIMEXXXXLAXSXARRGKPPXKEPISQXXDDILVASAECPSDDEDIDPCEPSSGGLANPXRAGGREPYPGSAEVIRESSSXXGMVVGIVAAAALCILILLYAMYKYRNRDEGSYHVDESRNYISNSAQSNGAVVKEKQPSSAKSSNKNKKNKDKEYYV

SEQ ID NO: 18370 - protein, 56 aa, Homo sapiens
  MOD_RES (2)..(2): Selenocysteine
  MOD_RES (10)..(10): Selenocysteine
  MOD_RES (34)..(34): Selenocysteine
  MOD_RES (47)..(47): Selenocysteine
MXSGSKCPSXDSASLLPRKSRGLMAYILPLVQLXSSVGEDCSFQISXFLFDLSSIS

SEQ ID NO: 18371 - protein, 176 aa, Homo sapiens
  MOD_RES (2)..(2): Selenocysteine
  MOD_RES (10)..(10): Selenocysteine
  MOD_RES (20)..(20): Selenocysteine
  MOD_RES (44)..(44): Selenocysteine
  MOD_RES (49)..(49): Selenocysteine
  MOD_RES (59)..(59): Selenocysteine
  MOD_RES (108)..(108): Selenocysteine
  MOD_RES (115)..(115): Selenocysteine
  MOD_RES (123)..(125): Selenocysteine
  MOD_RES (128)..(128): Selenocysteine
  MOD_RES (133)..(133): Selenocysteine
  MOD_RES (149)..(149): Selenocysteine
  MOD_RES (162)..(162): Selenocysteine
  MOD_RES (173)..(173): Selenocysteine
MXSGSKCPSXDSGKEEYIAXFKGSEYFCYDLSQNPIQSSSDEIXLSFKXLQRNGLMLHXGKSADYVNLALKNGAVSLVINLGSGAFEALVEPVNGKFNDNAWHDVKVXRNLRQVXISVDGILXXXGYXQEDYXMLGSDDFFYVGGSPSXADLPGSPIQHESXFAEDPMFQSQXAQL

SEQ ID NO: 18372 - protein, 903 aa, Homo sapiens
  MOD_RES (2)..(2): Selenocysteine
  MOD_RES (10)..(10): Selenocysteine
  MOD_RES (20)..(20): Selenocysteine
  MOD_RES (44)..(44): Selenocysteine
  MOD_RES (49)..(49): Selenocysteine
  MOD_RES (59)..(59): Selenocysteine
  MOD_RES (108)..(108): Selenocysteine
  MOD_RES (115)..(115): Selenocysteine
  MOD_RES (123)..(125): Selenocysteine
  MOD_RES (128)..(128): Selenocysteine
  MOD_RES (133)..(133): Selenocysteine
  MOD_RES (149)..(149): Selenocysteine
  MOD_RES (205)..(205): Selenocysteine
  MOD_RES (210)..(210): Selenocysteine
  MOD_RES (213)..(213): Selenocysteine
  MOD_RES (228)..(228): Selenocysteine
  MOD_RES (237)..(238): Selenocysteine
  MOD_RES (287)..(287): Selenocysteine
  MOD_RES (315)..(315): Selenocysteine
  MOD_RES (320)..(320): Selenocysteine
  MOD_RES (323)..(323): Selenocysteine
  MOD_RES (326)..(326): Selenocysteine
  MOD_RES (356)..(356): Selenocysteine
  MOD_RES (360)..(360): Selenocysteine
  MOD_RES (392)..(392): Selenocysteine
  MOD_RES (403)..(403): Selenocysteine
  MOD_RES (432)..(432): Selenocysteine
  MOD_RES (444)..(444): Selenocysteine
  MOD_RES (464)..(464): Selenocysteine
  MOD_RES (485)..(486): Selenocysteine
  MOD_RES (493)..(493): Selenocysteine
  MOD_RES (506)..(506): Selenocysteine
  MOD_RES (515)..(515): Selenocysteine
  MOD_RES (529)..(529): Selenocysteine
  MOD_RES (542)..(542): Selenocysteine
  MOD_RES (550)..(550): Selenocysteine
  MOD_RES (558)..(558): Selenocysteine
  MOD_RES (567)..(567): Selenocysteine
  MOD_RES (571)..(571): Selenocysteine
  MOD_RES (591)..(591): Selenocysteine
  MOD_RES (626)..(626): Selenocysteine
  MOD_RES (629)..(629): Selenocysteine
  MOD_RES (638)..(638): Selenocysteine
  MOD_RES (643)..(643): Selenocysteine
  MOD_RES (653)..(654): Selenocysteine
  MOD_RES (715)..(715): Selenocysteine
  MOD_RES (720)..(720): Selenocysteine
  MOD_RES (725)..(725): Selenocysteine
  MOD_RES (728)..(729): Selenocysteine
  MOD_RES (732)..(732): Selenocysteine
  MOD_RES (753)..(753): Selenocysteine
  MOD_RES (803)..(804): Selenocysteine
  MOD_RES (830)..(830): Selenocysteine
  MOD_RES (842)..(843): Selenocysteine
  MOD_RES (854)..(854): Selenocysteine
  MOD_RES (865)..(865): Selenocysteine
  MOD_RES (876)..(876): Selenocysteine
  MOD_RES (901)..(901): Selenocysteine
MXSGSKCPSXDSGKEEYIAXFKGSEYFCYDLSQNPIQSSSDEIXLSFKXLQRNGLMLHXGKSADYVNLALKNGAVSLVINLGSGAFEALVEPVNGKFNDNAWHDVKVXRNLRQVXISVDGILXXXGYXQEDYXMLGSDDFFYVGGSPSXADLPGSPVSNNFMGCLKEVVYKNNDVRLELSRLAKQGDPKMKIHGVVAFKCENVAXLDPIXFEXPESFISLPKWNAKKXGSISFDFRXXEPNGLILFSHGKPRHQKDAKHPQMIKVDFFAIEMLDGHLYLLLDMGSGXIKIKALLKKVNDGEWYHVDFQRDGRSGXISVNXLRXPYXAPGESEILDLDDELYLGGLPENKAGLVFPXEVWXALLNYGYVGCIRDLFIDGQSKDIRQMAEVQSXAGVKPSCSKEXAKPCLSNPCKNNGMCRDGWNRYVCDCSGXGYLGRSCEREAXVLSYDGSMFMKIQLPVVMHXEAEDVSLRFRSQRAYGILMAXXSRDSADXLRLELDAGRVKLXVNLGKGPEXLFAGYNLNDNEWHXVRVVRRGKSLKLXVDDQQAMXGQMAGDHXRLEFHNIEXGIIXERRYLSSVPSNFIGHLQSLXFNGMAYIDLCKNGDIDYCELNARFGFRNIIADPVXFKXKSSYVALAXLQAYXSMHLFFQFKXXSLDGLILYNSGDGNDFIVVELVKGYLHYVFDLGNGANLIKGSSNKPLNDNQWHNVMISRDXSNLHXVKIDXKIXXQIXAGARNLDLKSDLYIGGVAKEXYKSLPKLVHAKEGFQGCLASVDLNGRLPDLISDALFCNGQIERGCEGPSXXCQEDSCSNQGVCLQQWDGFSCDCSMXSFSGPLCNDPGXXYIFSKGGGQIXYKWPPNDRPSXRADRLAIGFSXVQKEAVLVRVDSSSGLGDYLELHIXLQ

SEQ ID NO: 18373 - protein, 75 aa, Homo sapiens
MVVGIVAAAALCILILLYAMYKYRNRDEGSYHVDESRNYISNSAQSNGAVVKEKQPSSAKSSNKNKKNKDKEYYV

SEQ ID NO: 18374 - protein, 469 aa, Homo sapiens
  MOD_RES (40)..(40): Selenocysteine
  MOD_RES (89)..(90): Selenocysteine
  MOD_RES (101)..(101): Selenocysteine
  MOD_RES (112)..(112): Selenocysteine
  MOD_RES (123)..(123): Selenocysteine
  MOD_RES (160)..(160): Selenocysteine
  MOD_RES (183)..(183): Selenocysteine
  MOD_RES (190)..(190): Selenocysteine
  MOD_RES (239)..(239): Selenocysteine
  MOD_RES (246)..(246): Selenocysteine
  MOD_RES (300)..(301): Selenocysteine
  MOD_RES (304)..(304): Selenocysteine
  MOD_RES (306)..(306): Selenocysteine
  MOD_RES (314)..(314): Selenocysteine
  MOD_RES (319)..(322): Selenocysteine
  MOD_RES (325)..(325): Selenocysteine
  MOD_RES (327)..(327): Selenocysteine
  MOD_RES (335)..(335): Selenocysteine
  MOD_RES (342)..(343): Selenocysteine
  MOD_RES (371)..(371): Selenocysteine
  MOD_RES (392)..(393): Selenocysteine
MYQRMLRCGAELGSPGGGGGGGGGGGAGGRLALLWIVPLXLSGLLGVAWGASSLGAHHIHHFHGSSKHHSVPIAIYRSPASLRGGHAGXXYIFSKGGGQIXYKWPPNDRPSXRADRLAIGFSXVQKEAVLVRVDSSSGLGDYLELHIHQGKIGVKFNVGXDDIAIEESNAIINDGKYHVVRFXRSGGNAXLQVDSWPVIERYPAGNNDNERLAIARQRIPYRLGRVVDEWLLDKGRQLXIFNSQAXIIIGGKEQGQPFQGQLSGLYYNGLKVLNMAAENDANIAIVGNVRLVGEVPSSMXXESXAXAMQSEMSXSIMEXXXXLAXSXARRGKPPXKEPISQXXDDILVASAECPSDDEDIDPCEPSSANPXRAGGREPYPGSAEVIRESSSXXGMVVGIVAAAALCILILLYAMYKYRNRDEGSYHVDESRNYISNSAQSNGAVVKEKQPSSAKSSNKNKKNKDKEYYV

SEQ ID NO: 18375 - protein, 472 aa, Homo sapiens
  MOD_RES (40)..(40): Selenocysteine
  MOD_RES (89)..(90): Selenocysteine
  MOD_RES (101)..(101): Selenocysteine
  MOD_RES (112)..(112): Selenocysteine
  MOD_RES (123)..(123): Selenocysteine
  MOD_RES (160)..(160): Selenocysteine
  MOD_RES (183)..(183): Selenocysteine
  MOD_RES (190)..(190): Selenocysteine
  MOD_RES (239)..(239): Selenocysteine
  MOD_RES (246)..(246): Selenocysteine
  MOD_RES (300)..(301): Selenocysteine
  MOD_RES (304)..(304): Selenocysteine
  MOD_RES (306)..(306): Selenocysteine
  MOD_RES (314)..(314): Selenocysteine
  MOD_RES (319)..(322): Selenocysteine
  MOD_RES (325)..(325): Selenocysteine
  MOD_RES (327)..(327): Selenocysteine
  MOD_RES (335)..(335): Selenocysteine
  MOD_RES (342)..(343): Selenocysteine
  MOD_RES (374)..(374): Selenocysteine
  MOD_RES (395)..(396): Selenocysteine
MYQRMLRCGAELGSPGGGGGGGGGGGAGGRLALLWIVPLXLSGLLGVAWGASSLGAHHIHHFHGSSKHHSVPIAIYRSPASLRGGHAGXXYIFSKGGGQIXYKWPPNDRPSXRADRLAIGFSXVQKEAVLVRVDSSSGLGDYLELHIHQGKIGVKFNVGXDDIAIEESNAIINDGKYHVVRFXRSGGNAXLQVDSWPVIERYPAGNNDNERLAIARQRIPYRLGRVVDEWLLDKGRQLXIFNSQAXIIIGGKEQGQPFQGQLSGLYYNGLKVLNMAAENDANIAIVGNVRLVGEVPSSMXXESXAXAMQSEMSXSIMEXXXXLAXSXARRGKPPXKEPISQXXDDILVASAECPSDDEDIDPCEPSSGGLANPXRAGGREPYPGSAEVIRESSSXXGMVVGIVAAAALCILILLYAMYKYRNRDEGSYHVDESRNYISNSAQSNGAVVKEKQPSSAKSSNKNKKNKDKEYYV

SEQ ID NO: 18376 - protein, 442 aa, Homo sapiens
  MOD_RES (40)..(40): Selenocysteine
  MOD_RES (89)..(90): Selenocysteine
  MOD_RES (101)..(101): Selenocysteine
  MOD_RES (112)..(112): Selenocysteine
  MOD_RES (123)..(123): Selenocysteine
  MOD_RES (160)..(160): Selenocysteine
  MOD_RES (183)..(183): Selenocysteine
  MOD_RES (190)..(190): Selenocysteine
  MOD_RES (209)..(209): Selenocysteine
  MOD_RES (216)..(216): Selenocysteine
  MOD_RES (270)..(271): Selenocysteine
  MOD_RES (274)..(274): Selenocysteine
  MOD_RES (276)..(276): Selenocysteine
  MOD_RES (284)..(284): Selenocysteine
  MOD_RES (289)..(292): Selenocysteine
  MOD_RES (295)..(295): Selenocysteine
  MOD_RES (297)..(297): Selenocysteine
  MOD_RES (305)..(305): Selenocysteine
  MOD_RES (312)..(313): Selenocysteine
  MOD_RES (344)..(344): Selenocysteine
  MOD_RES (365)..(366): Selenocysteine
MYQRMLRCGAELGSPGGGGGGGGGGGAGGRLALLWIVPLXLSGLLGVAWGASSLGAHHIHHFHGSSKHHSVPIAIYRSPASLRGGHAGXXYIFSKGGGQIXYKWPPNDRPSXRADRLAIGFSXVQKEAVLVRVDSSSGLGDYLELHIHQGKIGVKFNVGXDDIAIEESNAIINDGKYHVVRFXRSGGNAXLQVDSWPVIERYPAGRQLXIFNSQAXIIIGGKEQGQPFQGQLSGLYYNGLKVLNMAAENDANIAIVGNVRLVGEVPSSMXXESXAXAMQSEMSXSIMEXXXXLAXSXARRGKPPXKEPISQXXDDILVASAECPSDDEDIDPCEPSSGGLANPXRAGGREPYPGSAEVIRESSSXXGMVVGIVAAAALCILILLYAMYKYRNRDEGSYHVDESRNYISNSAQSNGAVVKEKQPSSAKSSNKNKKNKDKEYYV

SEQ ID NO: 18377 - protein, 136 aa, Homo sapiens
  MOD_RES (58)..(58): Selenocysteine
  MOD_RES (94)..(94): Selenocysteine
  MOD_RES (99)..(99): Selenocysteine
  MOD_RES (134)..(134): Selenocysteine
SSQVLPVDSGEVKLDDEPPNSGGGSPCEAGEEGEGGVCLNGGVCSVVDDQAVCDCSRXGFRGKDCSQEIKFGLQCVLPVLLHDNDQGKYCCINXAKPLXEKDNNVEGLAHLMMGDQGKSKEKLEIFRWIRKDFXNF

SEQ ID NO: 18378 - protein, 123 aa, Homo sapiens
  MOD_RES (1)..(1): Selenocysteine
  MOD_RES (50)..(51): Selenocysteine
  MOD_RES (62)..(62): Selenocysteine
  MOD_RES (73)..(73): Selenocysteine
  MOD_RES (84)..(84): Selenocysteine
  MOD_RES (114)..(114): Selenocysteine
XLSGLLGVAWGASSLGAHHIHHFHGSSKHHSVPIAIYRSPASLRGGHAGXXYIFSKGGGQIXYKWPPNDRPSXRADRLAIGFSXVQKEAVLVRVDSSSGLGDYLELHIAFESFXASRSSASRC

SEQ ID NO: 18379 - protein, 33 aa, Homo sapiens
  MOD_RES (1)..(1): Any amino acid
  MOD_RES (21)..(21): Selenocysteine
  MOD_RES (28)..(28): Selenocysteine
  MOD_RES (33)..(33): Selenocysteine
XFQRDGRSDFPFASSLVPPSXQNSCPGXISVNX

SEQ ID NO: 18380 - protein, 126 aa, Homo sapiens
  MOD_RES (1)..(1): Any amino acid
  MOD_RES (12)..(12): Selenocysteine
  MOD_RES (90)..(90): Selenocysteine
XPELRAAALKLXLASVREREPFKGWIRDVRVNSSQVLPVDSGEVKLDDEPPNSGGGSPCEAGEEGEGGVCLNGGVCSVVDDQAVCDCSRXGFRGKDCSQGLAHLMMGDQGMGSVPFPLCFQCFLVL

SEQ ID NO: 18381 - protein, 169 aa, Homo sapiens
  MOD_RES (1)..(1): Any amino acid
  MOD_RES (49)..(49): Selenocysteine
  MOD_RES (54)..(54): Selenocysteine
  MOD_RES (57)..(57): Selenocysteine
  MOD_RES (72)..(72): Selenocysteine
  MOD_RES (81)..(82): Selenocysteine
  MOD_RES (131)..(131): Selenocysteine
  MOD_RES (165)..(165): Selenocysteine
XSNNFMGCLKEVVYKNNDVRLELSRLAKQGDPKMKIHGVVAFKCENVAXLDPIXFEXPESFISLPKWNAKKXGSISFDFRXXEPNGLILFSHGKPRHQKDAKHPQMIKVDFFAIEMLDGHLYLLLDMGSGXIKIKALLKKVNDGEWYHVDFQRDGRSGQMAGDHXRLEF

SEQ ID NO: 18382 - protein, 155 aa, Homo sapiens
  MOD_RES (1)..(1): Any amino acid
  MOD_RES (23)..(23): Selenocysteine
  MOD_RES (101)..(101): Selenocysteine
  MOD_RES (141)..(142): Selenocysteine
  MOD_RES (147)..(147): Selenocysteine
  MOD_RES (155)..(155): Selenocysteine
XVFSGLFVGGLPPELRAAALKLXLASVREREPFKGWIRDVRVNSSQVLPVDSGEVKLDDEPPNSGGGSPCEAGEEGEGGVCLNGGVCSVVDDQAVCDCSRXGFRGKDCSQEDNNVEGLAHLMMGDQGKSKELMLILLCSIXXQGLEXAKSLIMCX

SEQ ID NO: 18383 - protein, 276 aa, Homo sapiens
  MOD_RES (20)..(21): Selenocysteine
  MOD_RES (33)..(33): Selenocysteine
  MOD_RES (45)..(45): Selenocysteine
  MOD_RES (52)..(53): Selenocysteine
  MOD_RES (64)..(64): Selenocysteine
  MOD_RES (66)..(66): Selenocysteine
  MOD_RES (75)..(75): Selenocysteine
  MOD_RES (86)..(86): Selenocysteine
  MOD_RES (114)..(114): Selenocysteine
  MOD_RES (123)..(123): Selenocysteine
  MOD_RES (127)..(127): Selenocysteine
  MOD_RES (146)..(146): Selenocysteine
  MOD_RES (153)..(153): Selenocysteine
  MOD_RES (172)..(172): Selenocysteine
  MOD_RES (218)..(218): Selenocysteine
  MOD_RES (237)..(238): Selenocysteine
  MOD_RES (240)..(241): Selenocysteine
  MOD_RES (248)..(249): Selenocysteine
  MOD_RES (253)..(256): Selenocysteine
  MOD_RES (259)..(262): Selenocysteine
  MOD_RES (269)..(269): Selenocysteine
  MOD_RES (274)..(275): Selenocysteine
LLLLLLGAAEGARVSSSLSXXHHVHHFHSKHGXVPIAINRMPFLXRGGHAGXXYIFGKGGALIXYXWPPNDRPSXRMDRLAVGFSXHQRSAVLVRVDSASGLGDYLQLHIDQGXVGVIFNVGXDDIXIDEPNAIVSDGKYHVVRFXRSGGNAXLQVDSWPVNERYPAGRQLXIFNSQAAIKIGGRDQGRPFQGQVSGLYYNGLKVLALAAESDPNVRXEGHLRLVGEGPSVLLSAEXXAXXLLADMAXXIMEXXXXMAXXXXRRGRSPXLRDSXXQ

SEQ ID NO: 18384 - protein, 1642 aa, Homo sapiens
  MOD_RES (10)..(10): Selenocysteine
  MOD_RES (59)..(59): Selenocysteine
  MOD_RES (62)..(62): Selenocysteine
  MOD_RES (92)..(92): Selenocysteine
  MOD_RES (100)..(100): Selenocysteine
  MOD_RES (105)..(105): Selenocysteine
  MOD_RES (118)..(118): Selenocysteine
  MOD_RES (124)..(124): Selenocysteine
  MOD_RES (165)..(165): Selenocysteine
  MOD_RES (168)..(168): Selenocysteine
  MOD_RES (201)..(201): Selenocysteine
  MOD_RES (220)..(220): Selenocysteine
  MOD_RES (234)..(234): Selenocysteine
  MOD_RES (255)..(255): Selenocysteine
  MOD_RES (267)..(267): Selenocysteine
  MOD_RES (287)..(287): Selenocysteine
  MOD_RES (291)..(291): Selenocysteine
  MOD_RES (296)..(296): Selenocysteine
  MOD_RES (306)..(306): Selenocysteine
  MOD_RES (355)..(355): Selenocysteine
  MOD_RES (370)..(370): Selenocysteine
  MOD_RES (378)..(380): Selenocysteine
  MOD_RES (383)..(383): Selenocysteine
  MOD_RES (388)..(388): Selenocysteine
  MOD_RES (404)..(404): Selenocysteine
  MOD_RES (465)..(465): Selenocysteine
  MOD_RES (483)..(483): Selenocysteine
  MOD_RES (492)..(493): Selenocysteine
  MOD_RES (578)..(578): Selenocysteine
  MOD_RES (583)..(583): Selenocysteine
  MOD_RES (616)..(616): Selenocysteine
  MOD_RES (659)..(659): Selenocysteine
  MOD_RES (688)..(688): Selenocysteine
  MOD_RES (700)..(700): Selenocysteine
  MOD_RES (720)..(720): Selenocysteine
  MOD_RES (741)..(742): Selenocysteine
  MOD_RES (749)..(749): Selenocysteine
  MOD_RES (762)..(762): Selenocysteine
  MOD_RES (771)..(771): Selenocysteine
  MOD_RES (785)..(785): Selenocysteine
  MOD_RES (803)..(803): Selenocysteine
  MOD_RES (822)..(822): Selenocysteine
  MOD_RES (826)..(826): Selenocysteine
  MOD_RES (862)..(862): Selenocysteine
  MOD_RES (881)..(881): Selenocysteine
  MOD_RES (893)..(893): Selenocysteine
  MOD_RES (908)..(909): Selenocysteine
  MOD_RES (975)..(975): Selenocysteine
  MOD_RES (982)..(982): Selenocysteine
  MOD_RES (984)..(984): Selenocysteine
  MOD_RES (1058)..(1059): Selenocysteine
  MOD_RES (1061)..(1061): Selenocysteine
  MOD_RES (1079)..(1079): Selenocysteine
  MOD_RES (1083)..(1083): Selenocysteine
  MOD_RES (1085)..(1085): Selenocysteine
  MOD_RES (1097)..(1098): Selenocysteine
  MOD_RES (1109)..(1109): Selenocysteine
  MOD_RES (1111)..(1111): Selenocysteine
  MOD_RES (1120)..(1120): Selenocysteine
  MOD_RES (1131)..(1131): Selenocysteine
  MOD_RES (1159)..(1159): Selenocysteine
  MOD_RES (1168)..(1168): Selenocysteine
  MOD_RES (1172)..(1172): Selenocysteine
  MOD_RES (1191)..(1191): Selenocysteine
  MOD_RES (1198)..(1198): Selenocysteine
  MOD_RES (1217)..(1217): Selenocysteine
  MOD_RES (1263)..(1263): Selenocysteine
  MOD_RES (1282)..(1283): Selenocysteine
  MOD_RES (1285)..(1286): Selenocysteine
  MOD_RES (1293)..(1294): Selenocysteine
  MOD_RES (1298)..(1301): Selenocysteine
  MOD_RES (1304)..(1307): Selenocysteine
  MOD_RES (1314)..(1314): Selenocysteine
  MOD_RES (1319)..(1320): Selenocysteine
  MOD_RES (1323)..(1323): Selenocysteine
  MOD_RES (1347)..(1347): Selenocysteine
  MOD_RES (1357)..(1357): Selenocysteine
  MOD_RES (1368)..(1368): Selenocysteine
  MOD_RES (1378)..(1378): Selenocysteine
  MOD_RES (1384)..(1384): Selenocysteine
  MOD_RES (1389)..(1389): Selenocysteine
  MOD_RES (1392)..(1392): Selenocysteine
  MOD_RES (1438)..(1438): Selenocysteine
  MOD_RES (1445)..(1446): Selenocysteine
  MOD_RES (1451)..(1451): Selenocysteine
  MOD_RES (1454)..(1455): Selenocysteine
  MOD_RES (1470)..(1470): Selenocysteine
  MOD_RES (1474)..(1474): Selenocysteine
  MOD_RES (1516)..(1516): Selenocysteine
  MOD_RES (1531)..(1531): Selenocysteine
  MOD_RES (1541)..(1541): Selenocysteine
  MOD_RES (1545)..(1545): Selenocysteine
  MOD_RES (1565)..(1566): Selenocysteine
  MOD_RES (1628)..(1628): Selenocysteine
MASGSRWRPXPPPLLLLLLLALAARADGLEFGGGPGQWARYARWAGAASSGELSFSLRXNAXRALLLYLDDGGDCDFLELLLVDGRLRLRFXLSCAEPAXLQLDXPVADDRWHMVLLXRDARRXALAVDGEARAAEVRSKRREMQVASDLFVGGIPPDVRLSALXLSXVKYEPPFRGLLANLKLGERPPALLGSQGLRGAXADPLCAPARNPCANGGLCXVLAPGEVGCDCSHXGFGGKFCSEEEHPMEGPAHLXLNSEGKEEFVAXFKGNEFFCYDLSHNPIQSSXDEIXLAFRXLQRNGLMLHXGKSADYVNLSLKSGAVWLVINLGSGAFEALVEPVNGKFNDNAWHDVRVXRNLRQHAGIGHAMVXISVDGILXXXGYXQEDYXMLGSDDFFYIGGSPNXADLPGSPVSNNFMGCLKDVVYKNNDFKLELSRLAKEGDPKMKLQGDLSFRCEDVAALDPVXFESPEAFVALPRWSAKRXGSISLDFRXXEPNGLLLFSQGRRAGGGAGSHSSAQRADYFAMELLDGHLYLLLDMGSGGIKLRASSRKVNDGEWCHVDFQRDGRKGSISVNSRSXPFLAXGDSEILDLESELYLGGLPEGGRVDLPLPPEVWXAALRAGYVGCVRDLFIDGRSRDLRGLAEAQGAVGVAPFCSREXLKQCASAPCRNGGVCREGWNRFICDCIGXGFLGRVCEREAXVLSYDGSMYMKIMLPNAMHXEAEDVSLRFMSQRAYGLMMAXXSRESADXLRLELDGGQMKLXVNLGKGPEXLFAGHKLNDNEWHXVRVVRRGKSLQLSVDNVXVEGQMAGAHMRLEFHNIEXGIMXERRFISVVPSNFIGHLSGLVFNGQPYMDQCKDGDIXYCELNARFGLRAIVADPVXFKSRSSYLALAXLQAYASMHLFFQFKXXAPDGLLLFNSGNGNDFIVIELVKGYIHYVFDLGNGPSLMKGNSDKPVNDNQWHNVVVSRDPGNVHXLKIDSRXVXQHSNGARNLDLKGELYIGGLSKNMFSNLPKLVASRDGFQGCLASVDLNGRLPDLIADALHRIGQVERGCDGPSXXCXEESCANQGVCLQQWDGFXCDCXMXSYGGPVCNDPGXXYIFGKGGALIXYXWPPNDRPSXRMDRLAVGFSXHQRSAVLVRVDSASGLGDYLQLHIDQGXVGVIFNVGXDDIXIDEPNAIVSDGKYHVVRFXRSGGNAXLQVDSWPVNERYPAGRQLXIFNSQAAIKIGGRDQGRPFQGQVSGLYYNGLKVLALAAESDPNVRXEGHLRLVGEGPSVLLSAEXXAXXLLADMAXXIMEXXXXMAXXXXRRGRSPXLRDSXXQNXDDLLVASAECPSDDEDLEECEPSXGGELILPIIXEDSLDPPPVAXRSPFVPPPPXFYPFLXGVGAXQDXLPPPAARRPPSGGPCQAERDDSDCEEPIEASGFASGEVFDSSLPPXDDEDFYXXFPLVXDRXXLLSPRKPAPRPNLRXDGAXGAPGVLFAPSAPAPNLPAGKMNHRDPLQPLLENPPLGPGAPXSFEPRRPPPLRPGVXSAPGFPHLPXANPXGPGERGPPGAVEVIRESSSXXGMVVGIVAAAALCILILLYAMYKYRNRDEGSYQVDQSRNYISNSAQSNGAVVKEKAPAAPKXPSKAKKNKDKEYYV

SEQ ID NO: 18385 - protein, 1705 aa, Homo sapiens
  MOD_RES (10)..(10): Selenocysteine
  MOD_RES (59)..(59): Selenocysteine
  MOD_RES (62)..(62): Selenocysteine
  MOD_RES (92)..(92): Selenocysteine
  MOD_RES (100)..(100): Selenocysteine
  MOD_RES (105)..(105): Selenocysteine
  MOD_RES (118)..(118): Selenocysteine
  MOD_RES (124)..(124): Selenocysteine
  MOD_RES (165)..(165): Selenocysteine
  MOD_RES (168)..(168): Selenocysteine
  MOD_RES (201)..(201): Selenocysteine
  MOD_RES (220)..(220): Selenocysteine
  MOD_RES (234)..(234): Selenocysteine
  MOD_RES (255)..(255): Selenocysteine
  MOD_RES (282)..(282): Selenocysteine
  MOD_RES (291)..(291): Selenocysteine
  MOD_RES (311)..(311): Selenocysteine
  MOD_RES (315)..(315): Selenocysteine
  MOD_RES (320)..(320): Selenocysteine
  MOD_RES (330)..(330): Selenocysteine
  MOD_RES (379)..(379): Selenocysteine
  MOD_RES (394)..(394): Selenocysteine
  MOD_RES (402)..(404): Selenocysteine
  MOD_RES (407)..(407): Selenocysteine
  MOD_RES (412)..(412): Selenocysteine
  MOD_RES (428)..(428): Selenocysteine
  MOD_RES (489)..(489): Selenocysteine
  MOD_RES (507)..(507): Selenocysteine
  MOD_RES (516)..(517): Selenocysteine
  MOD_RES (602)..(602): Selenocysteine
  MOD_RES (607)..(607): Selenocysteine
  MOD_RES (640)..(640): Selenocysteine
  MOD_RES (683)..(683): Selenocysteine
  MOD_RES (712)..(712): Selenocysteine
  MOD_RES (724)..(724): Selenocysteine
  MOD_RES (744)..(744): Selenocysteine
  MOD_RES (765)..(766): Selenocysteine
  MOD_RES (773)..(773): Selenocysteine
  MOD_RES (786)..(786): Selenocysteine
  MOD_RES (804)..(804): Selenocysteine
  MOD_RES (818)..(818): Selenocysteine
  MOD_RES (836)..(836): Selenocysteine
  MOD_RES (855)..(855): Selenocysteine
  MOD_RES (859)..(859): Selenocysteine
  MOD_RES (895)..(895): Selenocysteine
  MOD_RES (914)..(914): Selenocysteine
  MOD_RES (926)..(926): Selenocysteine
  MOD_RES (941)..(942): Selenocysteine
  MOD_RES (1008)..(1008): Selenocysteine
  MOD_RES (1015)..(1015): Selenocysteine
  MOD_RES (1017)..(1017): Selenocysteine
  MOD_RES (1091)..(1092): Selenocysteine
  MOD_RES (1094)..(1094): Selenocysteine
  MOD_RES (1112)..(1112): Selenocysteine
  MOD_RES (1116)..(1116): Selenocysteine
  MOD_RES (1118)..(1118): Selenocysteine
  MOD_RES (1130)..(1131): Selenocysteine
  MOD_RES (1142)..(1142): Selenocysteine
  MOD_RES (1144)..(1144): Selenocysteine
  MOD_RES (1153)..(1153): Selenocysteine
  MOD_RES (1164)..(1164): Selenocysteine
  MOD_RES (1192)..(1192): Selenocysteine
  MOD_RES (1201)..(1201): Selenocysteine
  MOD_RES (1205)..(1205): Selenocysteine
  MOD_RES (1224)..(1224): Selenocysteine
  MOD_RES (1231)..(1231): Selenocysteine
  MOD_RES (1280)..(1280): Selenocysteine
  MOD_RES (1326)..(1326): Selenocysteine
  MOD_RES (1345)..(1346): Selenocysteine
  MOD_RES (1348)..(1349): Selenocysteine
  MOD_RES (1356)..(1357): Selenocysteine
  MOD_RES (1361)..(1364): Selenocysteine
  MOD_RES (1367)..(1370): Selenocysteine
  MOD_RES (1377)..(1377): Selenocysteine
  MOD_RES (1382)..(1383): Selenocysteine
  MOD_RES (1386)..(1386): Selenocysteine
  MOD_RES (1410)..(1410): Selenocysteine
  MOD_RES (1420)..(1420): Selenocysteine
  MOD_RES (1431)..(1431): Selenocysteine
  MOD_RES (1441)..(1441): Selenocysteine
  MOD_RES (1447)..(1447): Selenocysteine
  MOD_RES (1452)..(1452): Selenocysteine
  MOD_RES (1455)..(1455): Selenocysteine
  MOD_RES (1501)..(1501): Selenocysteine
  MOD_RES (1508)..(1509): Selenocysteine
  MOD_RES (1514)..(1514): Selenocysteine
  MOD_RES (1517)..(1518): Selenocysteine
  MOD_RES (1533)..(1533): Selenocysteine
  MOD_RES (1537)..(1537): Selenocysteine
  MOD_RES (1579)..(1579): Selenocysteine
  MOD_RES (1594)..(1594): Selenocysteine
  MOD_RES (1604)..(1604): Selenocysteine
  MOD_RES (1608)..(1608): Selenocysteine
  MOD_RES (1628)..(1629): Selenocysteine
  MOD_RES (1691)..(1691): Selenocysteine
MASGSRWRPXPPPLLLLLLLALAARADGLEFGGGPGQWARYARWAGAASSGELSFSLRXNAXRALLLYLDDGGDCDFLELLLVDGRLRLRFXLSCAEPAXLQLDXPVADDRWHMVLLXRDARRXALAVDGEARAAEVRSKRREMQVASDLFVGGIPPDVRLSALXLSXVKYEPPFRGLLANLKLGERPPALLGSQGLRGAXADPLCAPARNPCANGGLCXVLAPGEVGCDCSHXGFGGKFCSEEEHPMEGPAHLXLNSEVGSLLFSEGGAGRGGAGDVHQPXKGKEEFVAXFKGNEFFCYDLSHNPIQSSXDEIXLAFRXLQRNGLMLHXGKSADYVNLSLKSGAVWLVINLGSGAFEALVEPVNGKFNDNAWHDVRVXRNLRQHAGIGHAMVXISVDGILXXXGYXQEDYXMLGSDDFFYIGGSPNXADLPGSPVSNNFMGCLKDVVYKNNDFKLELSRLAKEGDPKMKLQGDLSFRCEDVAALDPVXFESPEAFVALPRWSAKRXGSISLDFRXXEPNGLLLFSQGRRAGGGAGSHSSAQRADYFAMELLDGHLYLLLDMGSGGIKLRASSRKVNDGEWCHVDFQRDGRKGSISVNSRSXPFLAXGDSEILDLESELYLGGLPEGGRVDLPLPPEVWXAALRAGYVGCVRDLFIDGRSRDLRGLAEAQGAVGVAPFCSREXLKQCASAPCRNGGVCREGWNRFICDCIGXGFLGRVCEREAXVLSYDGSMYMKIMLPNAMHXEAEDVSLRFMSQRAYGLMMAXXSRESADXLRLELDGGQMKLXVNLDCLRVGCAPSKGPEXLFAGHKLNDNEWHXVRVVRRGKSLQLSVDNVXVEGQMAGAHMRLEFHNIEXGIMXERRFISVVPSNFIGHLSGLVFNGQPYMDQCKDGDIXYCELNARFGLRAIVADPVXFKSRSSYLALAXLQAYASMHLFFQFKXXAPDGLLLFNSGNGNDFIVIELVKGYIHYVFDLGNGPSLMKGNSDKPVNDNQWHNVVVSRDPGNVHXLKIDSRXVXQHSNGARNLDLKGELYIGGLSKNMFSNLPKLVASRDGFQGCLASVDLNGRLPDLIADALHRIGQVERGCDGPSXXCXEESCANQGVCLQQWDGFXCDCXMXSYGGPVCNDPGXXYIFGKGGALIXYXWPPNDRPSXRMDRLAVGFSXHQRSAVLVRVDSASGLGDYLQLHIDQGXVGVIFNVGXDDIXIDEPNAIVSDGKYHVVRFXRSGGNAXLQVDSWPVNERYPAGNFDNERLAIARQRIPYRLGRVVDEWLLDKGRQLXIFNSQAAIKIGGRDQGRPFQGQVSGLYYNGLKVLALAAESDPNVRXEGHLRLVGEGPSVLLSAEXXAXXLLADMAXXIMEXXXXMAXXXXRRGRSPXLRDSXXQNXDDLLVASAECPSDDEDLEECEPSXGGELILPIIXEDSLDPPPVAXRSPFVPPPPXFYPFLXGVGAXQDXLPPPAARRPPSGGPCQAERDDSDCEEPIEASGFASGEVFDSSLPPXDDEDFYXXFPLVXDRXXLLSPRKPAPRPNLRXDGAXGAPGVLFAPSAPAPNLPAGKMNHRDPLQPLLENPPLGPGAPXSFEPRRPPPLRPGVXSAPGFPHLPXANPXGPGERGPPGAVEVIRESSSXXGMVVGIVAAAALCILILLYAMYKYRNRDEGSYQVDQSRNYISNSAQSNGAVVKEKAPAAPKXPSKAKKNKDKEYYV

SEQ ID NO: 18386 - protein, 1712 aa, Homo sapiens
  MOD_RES (10)..(10): Selenocysteine
  MOD_RES (59)..(59): Selenocysteine
  MOD_RES (62)..(62): Selenocysteine
  MOD_RES (92)..(92): Selenocysteine
  MOD_RES (100)..(100): Selenocysteine
  MOD_RES (105)..(105): Selenocysteine
  MOD_RES (118)..(118): Selenocysteine
  MOD_RES (124)..(124): Selenocysteine
  MOD_RES (165)..(165): Selenocysteine
  MOD_RES (168)..(168): Selenocysteine
  MOD_RES (201)..(201): Selenocysteine
  MOD_RES (220)..(220): Selenocysteine
  MOD_RES (234)..(234): Selenocysteine
  MOD_RES (255)..(255): Selenocysteine
  MOD_RES (282)..(282): Selenocysteine
  MOD_RES (291)..(291): Selenocysteine
  MOD_RES (311)..(311): Selenocysteine
  MOD_RES (315)..(315): Selenocysteine
  MOD_RES (320)..(320): Selenocysteine
  MOD_RES (330)..(330): Selenocysteine
  MOD_RES (379)..(379): Selenocysteine
  MOD_RES (401)..(401): Selenocysteine
  MOD_RES (409)..(411): Selenocysteine
  MOD_RES (414)..(414): Selenocysteine
  MOD_RES (419)..(419): Selenocysteine
  MOD_RES (435)..(435): Selenocysteine
  MOD_RES (496)..(496): Selenocysteine
  MOD_RES (514)..(514): Selenocysteine
  MOD_RES (523)..(524): Selenocysteine
  MOD_RES (609)..(609): Selenocysteine
  MOD_RES (614)..(614): Selenocysteine
  MOD_RES (647)..(647): Selenocysteine
  MOD_RES (690)..(690): Selenocysteine
  MOD_RES (719)..(719): Selenocysteine
  MOD_RES (731)..(731): Selenocysteine
  MOD_RES (751)..(751): Selenocysteine
  MOD_RES (772)..(773): Selenocysteine
  MOD_RES (780)..(780): Selenocysteine
  MOD_RES (793)..(793): Selenocysteine
  MOD_RES (811)..(811): Selenocysteine
  MOD_RES (825)..(825): Selenocysteine
  MOD_RES (843)..(843): Selenocysteine
  MOD_RES (862)..(862): Selenocysteine
  MOD_RES (866)..(866): Selenocysteine
  MOD_RES (902)..(902): Selenocysteine
  MOD_RES (921)..(921): Selenocysteine
  MOD_RES (933)..(933): Selenocysteine
  MOD_RES (948)..(949): Selenocysteine
  MOD_RES (1015)..(1015): Selenocysteine
  MOD_RES (1022)..(1022): Selenocysteine
  MOD_RES (1024)..(1024): Selenocysteine
  MOD_RES (1098)..(1099): Selenocysteine
  MOD_RES (1101)..(1101): Selenocysteine
  MOD_RES (1119)..(1119): Selenocysteine
  MOD_RES (1123)..(1123): Selenocysteine
  MOD_RES (1125)..(1125): Selenocysteine
  MOD_RES (1137)..(1138): Selenocysteine
  MOD_RES (1149)..(1149): Selenocysteine
  MOD_RES (1151)..(1151): Selenocysteine
  MOD_RES (1160)..(1160): Selenocysteine
  MOD_RES (1171)..(1171): Selenocysteine
  MOD_RES (1199)..(1199): Selenocysteine
  MOD_RES (1208)..(1208): Selenocysteine
  MOD_RES (1212)..(1212): Selenocysteine
  MOD_RES (1231)..(1231): Selenocysteine
  MOD_RES (1238)..(1238): Selenocysteine
  MOD_RES (1287)..(1287): Selenocysteine
  MOD_RES (1333)..(1333): Selenocysteine
  MOD_RES (1352)..(1353): Selenocysteine
  MOD_RES (1355)..(1356): Selenocysteine
  MOD_RES (1363)..(1364): Selenocysteine
  MOD_RES (1368)..(1371): Selenocysteine
  MOD_RES (1374)..(1377): Selenocysteine
  MOD_RES (1384)..(1384): Selenocysteine
  MOD_RES (1389)..(1390): Selenocysteine
  MOD_RES (1393)..(1393): Selenocysteine
  MOD_RES (1417)..(1417): Selenocysteine
  MOD_RES (1427)..(1427): Selenocysteine
  MOD_RES (1438)..(1438): Selenocysteine
  MOD_RES (1448)..(1448): Selenocysteine
  MOD_RES (1454)..(1454): Selenocysteine
  MOD_RES (1459)..(1459): Selenocysteine
  MOD_RES (1462)..(1462): Selenocysteine
  MOD_RES (1508)..(1508): Selenocysteine
  MOD_RES (1515)..(1516): Selenocysteine
  MOD_RES (1521)..(1521): Selenocysteine
  MOD_RES (1524)..(1525): Selenocysteine
  MOD_RES (1540)..(1540): Selenocysteine
  MOD_RES (1544)..(1544): Selenocysteine
  MOD_RES (1586)..(1586): Selenocysteine
  MOD_RES (1601)..(1601): Selenocysteine
  MOD_RES (1611)..(1611): Selenocysteine
  MOD_RES (1615)..(1615): Selenocysteine
  MOD_RES (1635)..(1636): Selenocysteine
  MOD_RES (1698)..(1698): Selenocysteine
MASGSRWRPXPPPLLLLLLLALAARADGLEFGGGPGQWARYARWAGAASSGELSFSLRXNAXRALLLYLDDGGDCDFLELLLVDGRLRLRFXLSCAEPAXLQLDXPVADDRWHMVLLXRDARRXALAVDGEARAAEVRSKRREMQVASDLFVGGIPPDVRLSALXLSXVKYEPPFRGLLANLKLGERPPALLGSQGLRGAXADPLCAPARNPCANGGLCXVLAPGEVGCDCSHXGFGGKFCSEEEHPMEGPAHLXLNSEVGSLLFSEGGAGRGGAGDVHQPXKGKEEFVAXFKGNEFFCYDLSHNPIQSSXDEIXLAFRXLQRNGLMLHXGKSADYVNLSLKSGAVWLVINLGSGAFEALVEPVNGKFNDNAWHDVRVXRNLRQHAGIGHAMVNKLHYLVXISVDGILXXXGYXQEDYXMLGSDDFFYIGGSPNXADLPGSPVSNNFMGCLKDVVYKNNDFKLELSRLAKEGDPKMKLQGDLSFRCEDVAALDPVXFESPEAFVALPRWSAKRXGSISLDFRXXEPNGLLLFSQGRRAGGGAGSHSSAQRADYFAMELLDGHLYLLLDMGSGGIKLRASSRKVNDGEWCHVDFQRDGRKGSISVNSRSXPFLAXGDSEILDLESELYLGGLPEGGRVDLPLPPEVWXAALRAGYVGCVRDLFIDGRSRDLRGLAEAQGAVGVAPFCSREXLKQCASAPCRNGGVCREGWNRFICDCIGXGFLGRVCEREAXVLSYDGSMYMKIMLPNAMHXEAEDVSLRFMSQRAYGLMMAXXSRESADXLRLELDGGQMKLXVNLDCLRVGCAPSKGPEXLFAGHKLNDNEWHXVRVVRRGKSLQLSVDNVXVEGQMAGAHMRLEFHNIEXGIMXERRFISVVPSNFIGHLSGLVFNGQPYMDQCKDGDIXYCELNARFGLRAIVADPVXFKSRSSYLALAXLQAYASMHLFFQFKXXAPDGLLLFNSGNGNDFIVIELVKGYIHYVFDLGNGPSLMKGNSDKPVNDNQWHNVVVSRDPGNVHXLKIDSRXVXQHSNGARNLDLKGELYIGGLSKNMFSNLPKLVASRDGFQGCLASVDLNGRLPDLIADALHRIGQVERGCDGPSXXCXEESCANQGVCLQQWDGFXCDCXMXSYGGPVCNDPGXXYIFGKGGALIXYXWPPNDRPSXRMDRLAVGFSXHQRSAVLVRVDSASGLGDYLQLHIDQGXVGVIFNVGXDDIXIDEPNAIVSDGKYHVVRFXRSGGNAXLQVDSWPVNERYPAGNFDNERLAIARQRIPYRLGRVVDEWLLDKGRQLXIFNSQAAIKIGGRDQGRPFQGQVSGLYYNGLKVLALAAESDPNVRXEGHLRLVGEGPSVLLSAEXXAXXLLADMAXXIMEXXXXMAXXXXRRGRSPXLRDSXXQNXDDLLVASAECPSDDEDLEECEPSXGGELILPIIXEDSLDPPPVAXRSPFVPPPPXFYPFLXGVGAXQDXLPPPAARRPPSGGPCQAERDDSDCEEPIEASGFASGEVFDSSLPPXDDEDFYXXFPLVXDRXXLLSPRKPAPRPNLRXDGAXGAPGVLFAPSAPAPNLPAGKMNHRDPLQPLLENPPLGPGAPXSFEPRRPPPLRPGVXSAPGFPHLPXANPXGPGERGPPGAVEVIRESSSXXGMVVGIVAAAALCILILLYAMYKYRNRDEGSYQVDQSRNYISNSAQSNGAVVKEKAPAAPKXPSKAKKNKDKEYYV

SEQ ID NO: 18387 - protein, 666 aa, Homo sapiens
  MOD_RES (59)..(60): Selenocysteine
  MOD_RES (72)..(72): Selenocysteine
  MOD_RES (84)..(84): Selenocysteine
  MOD_RES (91)..(92): Selenocysteine
  MOD_RES (103)..(103): Selenocysteine
  MOD_RES (105)..(105): Selenocysteine
  MOD_RES (114)..(114): Selenocysteine
  MOD_RES (125)..(125): Selenocysteine
  MOD_RES (153)..(153): Selenocysteine
  MOD_RES (162)..(162): Selenocysteine
  MOD_RES (166)..(166): Selenocysteine
  MOD_RES (185)..(185): Selenocysteine
  MOD_RES (192)..(192): Selenocysteine
  MOD_RES (241)..(241): Selenocysteine
  MOD_RES (287)..(287): Selenocysteine
  MOD_RES (306)..(307): Selenocysteine
  MOD_RES (309)..(310): Selenocysteine
  MOD_RES (317)..(318): Selenocysteine
  MOD_RES (322)..(325): Selenocysteine
  MOD_RES (328)..(331): Selenocysteine
  MOD_RES (338)..(338): Selenocysteine
  MOD_RES (343)..(344): Selenocysteine
  MOD_RES (347)..(347): Selenocysteine
  MOD_RES (371)..(371): Selenocysteine
  MOD_RES (381)..(381): Selenocysteine
  MOD_RES (392)..(392): Selenocysteine
  MOD_RES (402)..(402): Selenocysteine
  MOD_RES (408)..(408): Selenocysteine
  MOD_RES (413)..(413): Selenocysteine
  MOD_RES (416)..(416): Selenocysteine
  MOD_RES (462)..(462): Selenocysteine
  MOD_RES (469)..(470): Selenocysteine
  MOD_RES (475)..(475): Selenocysteine
  MOD_RES (478)..(479): Selenocysteine
  MOD_RES (494)..(494): Selenocysteine
  MOD_RES (498)..(498): Selenocysteine
  MOD_RES (540)..(540): Selenocysteine
  MOD_RES (555)..(555): Selenocysteine
  MOD_RES (565)..(565): Selenocysteine
  MOD_RES (569)..(569): Selenocysteine
  MOD_RES (589)..(590): Selenocysteine
  MOD_RES (652)..(652): Selenocysteine
MPPGGSGPGGCPRRPPALAGPLPPPPPPPPPPLLPLLPLLLLLLLGAAEGARVSSSLSXXHHVHHFHSKHGXVPIAINRMPFLXRGGHAGXXYIFGKGGALIXYXWPPNDRPSXRMDRLAVGFSXHQRSAVLVRVDSASGLGDYLQLHIDQGXVGVIFNVGXDDIXIDEPNAIVSDGKYHVVRFXRSGGNAXLQVDSWPVNERYPAGNFDNERLAIARQRIPYRLGRVVDEWLLDKGRQLXIFNSQAAIKIGGRDQGRPFQGQVSGLYYNGLKVLALAAESDPNVRXEGHLRLVGEGPSVLLSAEXXAXXLLADMAXXIMEXXXXMAXXXXRRGRSPXLRDSXXQNXDDLLVASAECPSDDEDLEECEPSXGGELILPIIXEDSLDPPPVAXRSPFVPPPPXFYPFLXGVGAXQDXLPPPAARRPPSGGPCQAERDDSDCEEPIEASGFASGEVFDSSLPPXDDEDFYXXFPLVXDRXXLLSPRKPAPRPNLRXDGAXGAPGVLFAPSAPAPNLPAGKMNHRDPLQPLLENPPLGPGAPXSFEPRRPPPLRPGVXSAPGFPHLPXANPXGPGERGPPGAVEVIRESSSXXGMVVGIVAAAALCILILLYAMYKYRNRDEGSYQVDQSRNYISNSAQSNGAVVKEKAPAAPKXPSKAKKNKDKEYYV

SEQ ID NO: 18388 - protein, 293 aa, Homo sapiens
  MOD_RES (7)..(7): Selenocysteine
  MOD_RES (26)..(26): Selenocysteine
  MOD_RES (53)..(53): Selenocysteine
  MOD_RES (62)..(62): Selenocysteine
  MOD_RES (82)..(82): Selenocysteine
  MOD_RES (86)..(86): Selenocysteine
  MOD_RES (91)..(91): Selenocysteine
  MOD_RES (101)..(101): Selenocysteine
  MOD_RES (150)..(150): Selenocysteine
  MOD_RES (157)..(157): Selenocysteine
  MOD_RES (165)..(167): Selenocysteine
  MOD_RES (170)..(170): Selenocysteine
  MOD_RES (175)..(175): Selenocysteine
  MOD_RES (191)..(191): Selenocysteine
  MOD_RES (252)..(252): Selenocysteine
  MOD_RES (270)..(270): Selenocysteine
  MOD_RES (279)..(280): Selenocysteine
SVSPAAXCGQPVWSEEHPMEGPAHLXLNSEVGSLLFSEGGAGRGGAGDVHQPXKGKEEFVAXFKGNEFFCYDLSHNPIQSSXDEIXLAFRXLQRNGLMLHXGKSADYVNLSLKSGAVWLVINLGSGAFEALVEPVNGKFNDNAWHDVRVXRNLRQVXISVDGILXXXGYXQEDYXMLGSDDFFYIGGSPNXADLPGSPVSNNFMGCLKDVVYKNNDFKLELSRLAKEGDPKMKLQGDLSFRCEDVAALDPVXFESPEAFVALPRWSAKRXGSISLDFRXXEPNGLLLFSQGRR

SEQ ID NO: 18389 - protein, 215 aa, Homo sapiens
  MOD_RES (1)..(1): Any amino acid
  MOD_RES (20)..(20): Selenocysteine
  MOD_RES (34)..(34): Selenocysteine
  MOD_RES (72)..(72): Selenocysteine
  MOD_RES (81)..(81): Selenocysteine
  MOD_RES (101)..(101): Selenocysteine
  MOD_RES (105)..(105): Selenocysteine
  MOD_RES (110)..(110): Selenocysteine
  MOD_RES (120)..(120): Selenocysteine
  MOD_RES (169)..(169): Selenocysteine
  MOD_RES (176)..(176): Selenocysteine
  MOD_RES (184)..(186): Selenocysteine
  MOD_RES (189)..(189): Selenocysteine
  MOD_RES (194)..(194): Selenocysteine
  MOD_RES (210)..(210): Selenocysteine
XADPLCAPARNPCANGGLCXVLAPGEVGCDCSHXGFGGKFCSEEEHPMEVGSLLFSEGGAGRGGAGDVHQPXKGKEEFVAXFKGNEFFCYDLSHNPIQSSXDEIXLAFRXLQRNGLMLHXGKSADYVNLSLKSGAVWLVINLGSGAFEALVEPVNGKFNDNAWHDVRVXRNLRQVXISVDGILXXXGYXQEDYXMLGSDDFFYIGGSPNXADLPG

SEQ ID NO: 18390 - protein, 206 aa, Homo sapiens
  MOD_RES (1)..(1): Any amino acid
  MOD_RES (16)..(16): Selenocysteine
  MOD_RES (43)..(43): Selenocysteine
  MOD_RES (52)..(52): Selenocysteine
  MOD_RES (72)..(72): Selenocysteine
  MOD_RES (76)..(76): Selenocysteine
  MOD_RES (81)..(81): Selenocysteine
  MOD_RES (91)..(91): Selenocysteine
  MOD_RES (140)..(140): Selenocysteine
  MOD_RES (147)..(147): Selenocysteine
  MOD_RES (155)..(157): Selenocysteine
  MOD_RES (160)..(160): Selenocysteine
  MOD_RES (165)..(165): Selenocysteine
  MOD_RES (181)..(181): Selenocysteine
XCSEEEHPMEGPAHLXLNSEVGSLLFSEGGAGRGGAGDVHQPXKGKEEFVAXFKGNEFFCYDLSHNPIQSSXDEIXLAFRXLQRNGLMLHXGKSADYVNLSLKSGAVWLVINLGSGAFEALVEPVNGKFNDNAWHDVRVXRNLRQVXISVDGILXXXGYXQEDYXMLGSDDFFYIGGSPNXADLPGSPVSNNFMGCLKDVVYKNND

SEQ ID NO: 18391 - protein, 398 aa, Homo sapiens
  MOD_RES (18)..(18): Selenocysteine
  MOD_RES (45)..(45): Selenocysteine
  MOD_RES (86)..(86): Selenocysteine
  MOD_RES (99)..(99): Selenocysteine
  MOD_RES (108)..(108): Selenocysteine
  MOD_RES (119)..(120): Selenocysteine
  MOD_RES (156)..(156): Selenocysteine
  MOD_RES (166)..(166): Selenocysteine
  MOD_RES (179)..(179): Selenocysteine
  MOD_RES (186)..(186): Selenocysteine
  MOD_RES (200)..(200): Selenocysteine
  MOD_RES (203)..(203): Selenocysteine
  MOD_RES (235)..(235): Selenocysteine
  MOD_RES (239)..(239): Selenocysteine
  MOD_RES (297)..(298): Selenocysteine
  MOD_RES (300)..(301): Selenocysteine
  MOD_RES (309)..(310): Selenocysteine
  MOD_RES (314)..(317): Selenocysteine
  MOD_RES (320)..(323): Selenocysteine
  MOD_RES (329)..(329): Selenocysteine
  MOD_RES (335)..(335): Selenocysteine
  MOD_RES (359)..(359): Selenocysteine
  MOD_RES (377)..(377): Selenocysteine
  MOD_RES (379)..(379): Selenocysteine
  MOD_RES (383)..(383): Selenocysteine
  MOD_RES (385)..(385): Selenocysteine
  MOD_RES (387)..(387): Selenocysteine
MHLRIHARRSPPRRPAWXLGIWFLFWGCIVSSVWSSSNVASSSSXSSSPGSHSQHEHHFHGSKHHSVPISIYRSPVSLRGGHAGAXYIFGKSGGLILYXWPANDRPSXRSDRLAVGFSXXVKDGILVRIDSAPGLGDFLQLHIEQGKIGVVFNIGXVDISIKEERXPVNDGKYHVVRFXRNGGNAXLQVDNWPVNEHYPXGNXDNERFQMVKQKIPFKYNRPVEEWLQEKGRQLXIFNXQAQIAIGGKDKGRLFQGQLSGLYYDGLKVLNMAAENNPNIKINGSVRLVGEVPSILGXXQXXSMPPEMSXXVMEXXXXMAXXXXRKNRSXASIQPXSDDLVSSAECSSDDEDFVECEPSXGRSARSSNAARSLRAALXWXWRLXYXFXPIIFISCVVHS

SEQ ID NO: 18392 - protein, 459 aa, Homo sapiens
  MOD_RES (18)..(18): Selenocysteine
  MOD_RES (45)..(45): Selenocysteine
  MOD_RES (86)..(86): Selenocysteine
  MOD_RES (99)..(99): Selenocysteine
  MOD_RES (108)..(108): Selenocysteine
  MOD_RES (119)..(120): Selenocysteine
  MOD_RES (156)..(156): Selenocysteine
  MOD_RES (166)..(166): Selenocysteine
  MOD_RES (179)..(179): Selenocysteine
  MOD_RES (186)..(186): Selenocysteine
  MOD_RES (200)..(200): Selenocysteine
  MOD_RES (203)..(203): Selenocysteine
  MOD_RES (235)..(235): Selenocysteine
  MOD_RES (239)..(239): Selenocysteine
  MOD_RES (297)..(298): Selenocysteine
  MOD_RES (300)..(301): Selenocysteine
  MOD_RES (309)..(310): Selenocysteine
  MOD_RES (314)..(317): Selenocysteine
  MOD_RES (320)..(323): Selenocysteine
  MOD_RES (329)..(329): Selenocysteine
  MOD_RES (335)..(335): Selenocysteine
  MOD_RES (359)..(359): Selenocysteine
  MOD_RES (363)..(363): Selenocysteine
  MOD_RES (383)..(384): Selenocysteine
  MOD_RES (421)..(421): Selenocysteine
  MOD_RES (434)..(434): Selenocysteine
MHLRIHARRSPPRRPAWXLGIWFLFWGCIVSSVWSSSNVASSSSXSSSPGSHSQHEHHFHGSKHHSVPISIYRSPVSLRGGHAGAXYIFGKSGGLILYXWPANDRPSXRSDRLAVGFSXXVKDGILVRIDSAPGLGDFLQLHIEQGKIGVVFNIGXVDISIKEERXPVNDGKYHVVRFXRNGGNAXLQVDNWPVNEHYPXGNXDNERFQMVKQKIPFKYNRPVEEWLQEKGRQLXIFNXQAQIAIGGKDKGRLFQGQLSGLYYDGLKVLNMAAENNPNIKINGSVRLVGEVPSILGXXQXXSMPPEMSXXVMEXXXXMAXXXXRKNRSXASIQPXSDDLVSSAECSSDDEDFVECEPSXANPXEPGIRRVPGASEVIRESSSXXGMVVGIVAAAALCILILLYAMYKYRNRDEGSYQVDEXRNYISNSAQSNGXLMKEKQQSSKSGHKKQKNKDREYYV

SEQ ID NO: 18393 - protein, 432 aa, Homo sapiens
  MOD_RES (18)..(18): Selenocysteine
  MOD_RES (45)..(45): Selenocysteine
  MOD_RES (86)..(86): Selenocysteine
  MOD_RES (99)..(99): Selenocysteine
  MOD_RES (108)..(108): Selenocysteine
  MOD_RES (119)..(120): Selenocysteine
  MOD_RES (156)..(156): Selenocysteine
  MOD_RES (166)..(166): Selenocysteine
  MOD_RES (179)..(179): Selenocysteine
  MOD_RES (186)..(186): Selenocysteine
  MOD_RES (200)..(200): Selenocysteine
  MOD_RES (205)..(205): Selenocysteine
  MOD_RES (209)..(209): Selenocysteine
  MOD_RES (267)..(268): Selenocysteine
  MOD_RES (270)..(271): Selenocysteine
  MOD_RES (279)..(280): Selenocysteine
  MOD_RES (284)..(287): Selenocysteine
  MOD_RES (290)..(293): Selenocysteine
  MOD_RES (299)..(299): Selenocysteine
  MOD_RES (305)..(305): Selenocysteine
  MOD_RES (329)..(329): Selenocysteine
  MOD_RES (336)..(336): Selenocysteine
  MOD_RES (356)..(357): Selenocysteine
  MOD_RES (394)..(394): Selenocysteine
  MOD_RES (407)..(407): Selenocysteine
MHLRIHARRSPPRRPAWXLGIWFLFWGCIVSSVWSSSNVASSSSXSSSPGSHSQHEHHFHGSKHHSVPISIYRSPVSLRGGHAGAXYIFGKSGGLILYXWPANDRPSXRSDRLAVGFSXXVKDGILVRIDSAPGLGDFLQLHIEQGKIGVVFNIGXVDISIKEERXPVNDGKYHVVRFXRNGGNAXLQVDNWPVNEHYPXGRQLXIFNXQAQIAIGGKDKGRLFQGQLSGLYYDGLKVLNMAAENNPNIKINGSVRLVGEVPSILGXXQXXSMPPEMSXXVMEXXXXMAXXXXRKNRSXASIQPXSDDLVSSAECSSDDEDFVECEPSXGRSANPXEPGIRRVPGASEVIRESSSXXGMVVGIVAAAALCILILLYAMYKYRNRDEGSYQVDEXRNYISNSAQSNGXLMKEKQQSSKSGHKKQKNKDREYYV

SEQ ID NO: 18394 - protein, 637 aa, Homo sapiens
  MOD_RES (18)..(18): Selenocysteine
  MOD_RES (45)..(45): Selenocysteine
  MOD_RES (86)..(86): Selenocysteine
  MOD_RES (99)..(99): Selenocysteine
  MOD_RES (108)..(108): Selenocysteine
  MOD_RES (119)..(120): Selenocysteine
  MOD_RES (156)..(156): Selenocysteine
  MOD_RES (166)..(166): Selenocysteine
  MOD_RES (179)..(179): Selenocysteine
  MOD_RES (186)..(186): Selenocysteine
  MOD_RES (200)..(200): Selenocysteine
  MOD_RES (205)..(205): Selenocysteine
  MOD_RES (209)..(209): Selenocysteine
  MOD_RES (267)..(268): Selenocysteine
  MOD_RES (270)..(271): Selenocysteine
  MOD_RES (279)..(280): Selenocysteine
  MOD_RES (284)..(287): Selenocysteine
  MOD_RES (290)..(293): Selenocysteine
  MOD_RES (299)..(299): Selenocysteine
  MOD_RES (305)..(305): Selenocysteine
  MOD_RES (329)..(329): Selenocysteine
  MOD_RES (345)..(345): Selenocysteine
  MOD_RES (350)..(350): Selenocysteine
  MOD_RES (356)..(356): Selenocysteine
  MOD_RES (360)..(360): Selenocysteine
  MOD_RES (366)..(366): Selenocysteine
  MOD_RES (370)..(371): Selenocysteine
  MOD_RES (378)..(378): Selenocysteine
  MOD_RES (409)..(409): Selenocysteine
  MOD_RES (417)..(417): Selenocysteine
  MOD_RES (424)..(425): Selenocysteine
  MOD_RES (430)..(430): Selenocysteine
  MOD_RES (436)..(436): Selenocysteine
  MOD_RES (463)..(463): Selenocysteine
  MOD_RES (466)..(469): Selenocysteine
  MOD_RES (479)..(479): Selenocysteine
  MOD_RES (513)..(513): Selenocysteine
  MOD_RES (520)..(520): Selenocysteine
  MOD_RES (528)..(528): Selenocysteine
  MOD_RES (537)..(537): Selenocysteine
  MOD_RES (541)..(541): Selenocysteine
  MOD_RES (561)..(562): Selenocysteine
  MOD_RES (599)..(599): Selenocysteine
  MOD_RES (612)..(612): Selenocysteine
MHLRIHARRSPPRRPAWXLGIWFLFWGCIVSSVWSSSNVASSSSXSSSPGSHSQHEHHFHGSKHHSVPISIYRSPVSLRGGHAGAXYIFGKSGGLILYXWPANDRPSXRSDRLAVGFSXXVKDGILVRIDSAPGLGDFLQLHIEQGKIGVVFNIGXVDISIKEERXPVNDGKYHVVRFXRNGGNAXLQVDNWPVNEHYPXGRQLXIFNXQAQIAIGGKDKGRLFQGQLSGLYYDGLKVLNMAAENNPNIKINGSVRLVGEVPSILGXXQXXSMPPEMSXXVMEXXXXMAXXXXRKNRSXASIQPXSDDLVSSAECSSDDEDFVECEPSXGGELVIPLLVEDPLAXPPIAXRAPSIXLPPXFRPLLXIIEXXKDSLSMXSEAGLPCLSDQGSDGCDDDGLVISGYGSGEXFDSNLPPXDDEDFYXXFSLVXDKSLSXSIFEGGYKAHAPKWESKDFRPNKVSEXSRXXXXSLSPELIRFXASSSSGMVPKLPAGKMNNRDLKPQPDIVLLPLPXAYELDSXKLKSPLIXSPMFRNVPXANPXEPGIRRVPGASEVIRESSSXXGMVVGIVAAAALCILILLYAMYKYRNRDEGSYQVDEXRNYISNSAQSNGXLMKEKQQSSKSGHKKQKNKDREYYV

SEQ ID NO: 18395 - protein, 879 aa, Homo sapiens
  MOD_RES (5)..(5): Selenocysteine
  MOD_RES (21)..(21): Selenocysteine
  MOD_RES (45)..(45): Selenocysteine
  MOD_RES (50)..(50): Selenocysteine
  MOD_RES (60)..(60): Selenocysteine
  MOD_RES (109)..(109): Selenocysteine
  MOD_RES (116)..(116): Selenocysteine
  MOD_RES (124)..(126): Selenocysteine
  MOD_RES (129)..(129): Selenocysteine
  MOD_RES (134)..(134): Selenocysteine
  MOD_RES (150)..(150): Selenocysteine
  MOD_RES (189)..(189): Selenocysteine
  MOD_RES (206)..(206): Selenocysteine
  MOD_RES (214)..(214): Selenocysteine
  MOD_RES (226)..(226): Selenocysteine
  MOD_RES (238)..(239): Selenocysteine
  MOD_RES (248)..(248): Selenocysteine
  MOD_RES (264)..(264): Selenocysteine
  MOD_RES (288)..(288): Selenocysteine
  MOD_RES (294)..(294): Selenocysteine
  MOD_RES (316)..(316): Selenocysteine
  MOD_RES (324)..(324): Selenocysteine
  MOD_RES (327)..(327): Selenocysteine
  MOD_RES (357)..(357): Selenocysteine
  MOD_RES (361)..(361): Selenocysteine
  MOD_RES (431)..(431): Selenocysteine
  MOD_RES (433)..(433): Selenocysteine
  MOD_RES (439)..(439): Selenocysteine
  MOD_RES (465)..(465): Selenocysteine
  MOD_RES (486)..(487): Selenocysteine
  MOD_RES (494)..(494): Selenocysteine
  MOD_RES (525)..(525): Selenocysteine
  MOD_RES (539)..(539): Selenocysteine
  MOD_RES (552)..(552): Selenocysteine
  MOD_RES (561)..(561): Selenocysteine
  MOD_RES (567)..(567): Selenocysteine
  MOD_RES (576)..(576): Selenocysteine
  MOD_RES (580)..(580): Selenocysteine
  MOD_RES (635)..(635): Selenocysteine
  MOD_RES (638)..(638): Selenocysteine
  MOD_RES (647)..(647): Selenocysteine
  MOD_RES (652)..(652): Selenocysteine
  MOD_RES (662)..(663): Selenocysteine
  MOD_RES (721)..(721): Selenocysteine
  MOD_RES (727)..(727): Selenocysteine
  MOD_RES (734)..(734): Selenocysteine
  MOD_RES (738)..(738): Selenocysteine
  MOD_RES (812)..(813): Selenocysteine
  MOD_RES (833)..(833): Selenocysteine
  MOD_RES (839)..(839): Selenocysteine
MHPSXHFHRDLDEAREENVAXFRGSEYLCYDLSQNPIQSSSDEIXLSFKXWQRNGLILHXGKSADYVNLALKDGAVSLVINLGSGAFEAIVEPVNGKFNDNAWHDVKVXRNLRQVXISVDGILXXXGYXQEDYXMLGSDDFFYVGGSPSXADLPGSPVSNNFMGCLKEVVYKNNDIRLELSRLARIADXKMKIYGEVVFKCENVAXLDPINFEXPEAYISLPKWNXKRMGSISFDFRXXEPNGLILFXHGKPQERKDARSQKNXKVDFFAVELLDGNLYLLLDMGSGXIKVKAXQKKANDGEWYHVDIQRDGRSGXISVNSRRXPFXASGESEILDLEGDMYLGGLPENRAGLILPXELWXAMLNYGYVGCIRDLFIDGRSKNIRQLAEMQNAAGVKSSCSRMSAKQCDSYPCKNNAVCKDGWNRFICDCXGXGYWGRXCEREASILSYDGSMYMKIIMPMVMHXEAEDVSFRFMSQRAYGLLVAXXSRDSADXLRLELDGGRVKLMVNLDCIRINCNSSKGPEXLYAGQKLNDNEWHXVRVVRRGKSLKLXVDDDVAEGXMVGDHXRLEFHNIEXGIMXEKRYISVVPSSFIGHLQSLMFNGLLYIDLCKNGDIDYCELKARFGLRNIIADPVXFKXKSSYLSLAXLQAYXSMHLFFQFKXXSPDGFILFNSGDGNDFIAVELVKGYIHYVFDLGNGPNVIKGNSDRPLNDNQWHNVVIXRDNSNXHSLKVDXKVVXQVINGAKNLDLKGDLYMAGLAQGMYSNLPKLVASRDGFQGCLASVDLNGRLPDLINDALHRSGQIERGCEGPSXXCQEDSCANQGVCMQQWEGFXCDCSMXSYSGNQCNDRKYNNLSYWNFVKMFGDLENLKGQYVKGWLF

SEQ ID NO: 18396 - protein, 75 aa, Homo sapiens
  MOD_RES (16)..(16): Selenocysteine
  MOD_RES (24)..(24): Selenocysteine
  MOD_RES (36)..(36): Selenocysteine
  MOD_RES (48)..(49): Selenocysteine
  MOD_RES (58)..(58): Selenocysteine
  MOD_RES (74)..(74): Selenocysteine
MKIYGEVVFKCENVAXLDPINFEXPEAYISLPKWNXKRMGSISFDFRXXEPNGLILFXHGKPQERKDARSQKNXK

SEQ ID NO: 18397 - protein, 120 aa, Homo sapiens
  MOD_RES (16)..(16): Selenocysteine
  MOD_RES (24)..(24): Selenocysteine
  MOD_RES (36)..(36): Selenocysteine
  MOD_RES (48)..(49): Selenocysteine
  MOD_RES (58)..(58): Selenocysteine
  MOD_RES (74)..(74): Selenocysteine
  MOD_RES (98)..(98): Selenocysteine
  MOD_RES (104)..(104): Selenocysteine
MKIYGEVVFKCENVAXLDPINFEXPEAYISLPKWNXKRMGSISFDFRXXEPNGLILFXHGKPQERKDARSQKNXKVDFFAVELLDGNLYLLLDMGSGXIKVKAXQKKANDGEWYHVDIQR

SEQ ID NO: 18398 - protein, 1061 aa, Homo sapiens
  MOD_RES (16)..(16): Selenocysteine
  MOD_RES (55)..(55): Selenocysteine
  MOD_RES (72)..(72): Selenocysteine
  MOD_RES (80)..(80): Selenocysteine
  MOD_RES (92)..(92): Selenocysteine
  MOD_RES (104)..(105): Selenocysteine
  MOD_RES (114)..(114): Selenocysteine
  MOD_RES (130)..(130): Selenocysteine
  MOD_RES (154)..(154): Selenocysteine
  MOD_RES (160)..(160): Selenocysteine
  MOD_RES (182)..(182): Selenocysteine
  MOD_RES (190)..(190): Selenocysteine
  MOD_RES (193)..(193): Selenocysteine
  MOD_RES (223)..(223): Selenocysteine
  MOD_RES (227)..(227): Selenocysteine
  MOD_RES (297)..(297): Selenocysteine
  MOD_RES (299)..(299): Selenocysteine
  MOD_RES (305)..(305): Selenocysteine
  MOD_RES (331)..(331): Selenocysteine
  MOD_RES (352)..(353): Selenocysteine
  MOD_RES (360)..(360): Selenocysteine
  MOD_RES (391)..(391): Selenocysteine
  MOD_RES (405)..(405): Selenocysteine
  MOD_RES (418)..(418): Selenocysteine
  MOD_RES (427)..(427): Selenocysteine
  MOD_RES (433)..(433): Selenocysteine
  MOD_RES (442)..(442): Selenocysteine
  MOD_RES (446)..(446): Selenocysteine
  MOD_RES (501)..(501): Selenocysteine
  MOD_RES (504)..(504): Selenocysteine
  MOD_RES (513)..(513): Selenocysteine
  MOD_RES (518)..(518): Selenocysteine
  MOD_RES (528)..(529): Selenocysteine
  MOD_RES (587)..(587): Selenocysteine
  MOD_RES (593)..(593): Selenocysteine
  MOD_RES (600)..(600): Selenocysteine
  MOD_RES (604)..(604): Selenocysteine
  MOD_RES (678)..(679): Selenocysteine
  MOD_RES (699)..(699): Selenocysteine
  MOD_RES (705)..(705): Selenocysteine
  MOD_RES (718)..(718): Selenocysteine
  MOD_RES (731)..(731): Selenocysteine
  MOD_RES (740)..(740): Selenocysteine
  MOD_RES (751)..(752): Selenocysteine
  MOD_RES (788)..(788): Selenocysteine
  MOD_RES (798)..(798): Selenocysteine
  MOD_RES (811)..(811): Selenocysteine
  MOD_RES (818)..(818): Selenocysteine
  MOD_RES (832)..(832): Selenocysteine
  MOD_RES (837)..(837): Selenocysteine
  MOD_RES (841)..(841): Selenocysteine
  MOD_RES (899)..(900): Selenocysteine
  MOD_RES (902)..(903): Selenocysteine
  MOD_RES (911)..(912): Selenocysteine
  MOD_RES (916)..(919): Selenocysteine
  MOD_RES (922)..(925): Selenocysteine
  MOD_RES (931)..(931): Selenocysteine
  MOD_RES (937)..(937): Selenocysteine
  MOD_RES (961)..(961): Selenocysteine
  MOD_RES (965)..(965): Selenocysteine
  MOD_RES (985)..(986): Selenocysteine
  MOD_RES (1023)..(1023): Selenocysteine
  MOD_RES (1036)..(1036): Selenocysteine
MLGSDDFFYVGGSPSXADLPGSPVSNNFMGCLKEVVYKNNDIRLELSRLARIADXKMKIYGEVVFKCENVAXLDPINFEXPEAYISLPKWNXKRMGSISFDFRXXEPNGLILFXHGKPQERKDARSQKNXKVDFFAVELLDGNLYLLLDMGSGXIKVKAXQKKANDGEWYHVDIQRDGRSGXISVNSRRXPFXASGESEILDLEGDMYLGGLPENRAGLILPXELWXAMLNYGYVGCIRDLFIDGRSKNIRQLAEMQNAAGVKSSCSRMSAKQCDSYPCKNNAVCKDGWNRFICDCXGXGYWGRXCEREASILSYDGSMYMKIIMPMVMHXEAEDVSFRFMSQRAYGLLVAXXSRDSADXLRLELDGGRVKLMVNLDCIRINCNSSKGPEXLYAGQKLNDNEWHXVRVVRRGKSLKLXVDDDVAEGXMVGDHXRLEFHNIEXGIMXEKRYISVVPSSFIGHLQSLMFNGLLYIDLCKNGDIDYCELKARFGLRNIIADPVXFKXKSSYLSLAXLQAYXSMHLFFQFKXXSPDGFILFNSGDGNDFIAVELVKGYIHYVFDLGNGPNVIKGNSDRPLNDNQWHNVVIXRDNSNXHSLKVDXKVVXQVINGAKNLDLKGDLYMAGLAQGMYSNLPKLVASRDGFQGCLASVDLNGRLPDLINDALHRSGQIERGCEGPSXXCQEDSCANQGVCMQQWEGFXCDCSMXSYSGNQCNDPGAXYIFGKSGGLILYXWPANDRPSXRSDRLAVGFSXXVKDGILVRIDSAPGLGDFLQLHIEQGKIGVVFNIGXVDISIKEERXPVNDGKYHVVRFXRNGGNAXLQVDNWPVNEHYPXGRQLXIFNXQAQIAIGGKDKGRLFQGQLSGLYYDGLKVLNMAAENNPNIKINGSVRLVGEVPSILGXXQXXSMPPEMSXXVMEXXXXMAXXXXRKNRSXASIQPXSDDLVSSAECSSDDEDFVECEPSXANPXEPGIRRVPGASEVIRESSSXXGMVVGIVAAAALCILILLYAMYKYRNRDEGSYQVDEXRNYISNSAQSNGXLMKEKQQSSKSGHKKQKNKDREYYV

SEQ ID NO: 18399 - protein, 1571 aa, Homo sapiens
  MOD_RES (4)..(4): Selenocysteine
  MOD_RES (11)..(11): Selenocysteine
  MOD_RES (47)..(47): Selenocysteine
  MOD_RES (57)..(57): Selenocysteine
  MOD_RES (61)..(61): Selenocysteine
  MOD_RES (96)..(96): Selenocysteine
  MOD_RES (121)..(121): Selenocysteine
  MOD_RES (154)..(154): Selenocysteine
  MOD_RES (162)..(162): Selenocysteine
  MOD_RES (221)..(221): Selenocysteine
  MOD_RES (226)..(227): Selenocysteine
  MOD_RES (260)..(260): Selenocysteine
  MOD_RES (284)..(284): Selenocysteine
  MOD_RES (289)..(289): Selenocysteine
  MOD_RES (299)..(299): Selenocysteine
  MOD_RES (348)..(348): Selenocysteine
  MOD_RES (355)..(355): Selenocysteine
  MOD_RES (363)..(365): Selenocysteine
  MOD_RES (368)..(368): Selenocysteine
  MOD_RES (373)..(373): Selenocysteine
  MOD_RES (389)..(389): Selenocysteine
  MOD_RES (428)..(428): Selenocysteine
  MOD_RES (445)..(445): Selenocysteine
  MOD_RES (453)..(453): Selenocysteine
  MOD_RES (465)..(465): Selenocysteine
  MOD_RES (477)..(478): Selenocysteine
  MOD_RES (487)..(487): Selenocysteine
  MOD_RES (503)..(503): Selenocysteine
  MOD_RES (527)..(527): Selenocysteine
  MOD_RES (533)..(533): Selenocysteine
  MOD_RES (555)..(555): Selenocysteine
  MOD_RES (563)..(563): Selenocysteine
  MOD_RES (566)..(566): Selenocysteine
  MOD_RES (596)..(596): Selenocysteine
  MOD_RES (600)..(600): Selenocysteine
  MOD_RES (670)..(670): Selenocysteine
  MOD_RES (672)..(672): Selenocysteine
  MOD_RES (678)..(678): Selenocysteine
  MOD_RES (704)..(704): Selenocysteine
  MOD_RES (725)..(726): Selenocysteine
  MOD_RES (733)..(733): Selenocysteine
  MOD_RES (764)..(764): Selenocysteine
  MOD_RES (778)..(778): Selenocysteine
  MOD_RES (791)..(791): Selenocysteine
  MOD_RES (800)..(800): Selenocysteine
  MOD_RES (806)..(806): Selenocysteine
  MOD_RES (815)..(815): Selenocysteine
  MOD_RES (819)..(819): Selenocysteine
  MOD_RES (874)..(874): Selenocysteine
  MOD_RES (877)..(877): Selenocysteine
  MOD_RES (886)..(886): Selenocysteine
  MOD_RES (891)..(891): Selenocysteine
  MOD_RES (901)..(902): Selenocysteine
  MOD_RES (960)..(960): Selenocysteine
  MOD_RES (966)..(966): Selenocysteine
  MOD_RES (973)..(973): Selenocysteine
  MOD_RES (977)..(977): Selenocysteine
  MOD_RES (1051)..(1052): Selenocysteine
  MOD_RES (1072)..(1072): Selenocysteine
  MOD_RES (1078)..(1078): Selenocysteine
  MOD_RES (1091)..(1091): Selenocysteine
  MOD_RES (1104)..(1104): Selenocysteine
  MOD_RES (1113)..(1113): Selenocysteine
  MOD_RES (1124)..(1125): Selenocysteine
  MOD_RES (1161)..(1161): Selenocysteine
  MOD_RES (1171)..(1171): Selenocysteine
  MOD_RES (1184)..(1184): Selenocysteine
  MOD_RES (1191)..(1191): Selenocysteine
  MOD_RES (1205)..(1205): Selenocysteine
  MOD_RES (1208)..(1208): Selenocysteine
  MOD_RES (1240)..(1240): Selenocysteine
  MOD_RES (1244)..(1244): Selenocysteine
  MOD_RES (1302)..(1303): Selenocysteine
  MOD_RES (1305)..(1306): Selenocysteine
  MOD_RES (1314)..(1315): Selenocysteine
  MOD_RES (1319)..(1322): Selenocysteine
  MOD_RES (1325)..(1328): Selenocysteine
  MOD_RES (1334)..(1334): Selenocysteine
  MOD_RES (1340)..(1340): Selenocysteine
  MOD_RES (1364)..(1364): Selenocysteine
  MOD_RES (1370)..(1370): Selenocysteine
  MOD_RES (1397)..(1397): Selenocysteine
  MOD_RES (1400)..(1403): Selenocysteine
  MOD_RES (1413)..(1413): Selenocysteine
  MOD_RES (1447)..(1447): Selenocysteine
  MOD_RES (1454)..(1454): Selenocysteine
  MOD_RES (1462)..(1462): Selenocysteine
  MOD_RES (1471)..(1471): Selenocysteine
  MOD_RES (1475)..(1475): Selenocysteine
  MOD_RES (1495)..(1496): Selenocysteine
  MOD_RES (1533)..(1533): Selenocysteine
  MOD_RES (1546)..(1546): Selenocysteine
MSSXLHSVFFXLKVSILLGSLLGLCLGLEFMGLPNQWARYLRWDASXRSDLSFQFKXNVSXGLLLYLDDGGVCDFLCLSLVDGRVQLRFSMDCAEXAVLSNKQVNDSSWHFLMVSRDRLRXVLMLDGEGQSGELQPQRPYMDVVSDLFLGGVPXDIRPSALXLDGVQAMPGFKGLILDLKYGNSEPRLLGSRGVQMDAEGPCGERPCENGGICFLLDGHPXCDCSXXGYGGKLCSEDVSQDPGLSHLMMSEQAREENVAXFRGSEYLCYDLSQNPIQSSSDEIXLSFKXWQRNGLILHXGKSADYVNLALKDGAVSLVINLGSGAFEAIVEPVNGKFNDNAWHDVKVXRNLRQVXISVDGILXXXGYXQEDYXMLGSDDFFYVGGSPSXADLPGSPVSNNFMGCLKEVVYKNNDIRLELSRLARIADXKMKIYGEVVFKCENVAXLDPINFEXPEAYISLPKWNXKRMGSISFDFRXXEPNGLILFXHGKPQERKDARSQKNXKVDFFAVELLDGNLYLLLDMGSGXIKVKAXQKKANDGEWYHVDIQRDGRSGXISVNSRRXPFXASGESEILDLEGDMYLGGLPENRAGLILPXELWXAMLNYGYVGCIRDLFIDGRSKNIRQLAEMQNAAGVKSSCSRMSAKQCDSYPCKNNAVCKDGWNRFICDCXGXGYWGRXCEREASILSYDGSMYMKIIMPMVMHXEAEDVSFRFMSQRAYGLLVAXXSRDSADXLRLELDGGRVKLMVNLDCIRINCNSSKGPEXLYAGQKLNDNEWHXVRVVRRGKSLKLXVDDDVAEGXMVGDHXRLEFHNIEXGIMXEKRYISVVPSSFIGHLQSLMFNGLLYIDLCKNGDIDYCELKARFGLRNIIADPVXFKXKSSYLSLAXLQAYXSMHLFFQFKXXSPDGFILFNSGDGNDFIAVELVKGYIHYVFDLGNGPNVIKGNSDRPLNDNQWHNVVIXRDNSNXHSLKVDXKVVXQVINGAKNLDLKGDLYMAGLAQGMYSNLPKLVASRDGFQGCLASVDLNGRLPDLINDALHRSGQIERGCEGPSXXCQEDSCANQGVCMQQWEGFXCDCSMXSYSGNQCNDPGAXYIFGKSGGLILYXWPANDRPSXRSDRLAVGFSXXVKDGILVRIDSAPGLGDFLQLHIEQGKIGVVFNIGXVDISIKEERXPVNDGKYHVVRFXRNGGNAXLQVDNWPVNEHYPXGNXDNERFQMVKQKIPFKYNRPVEEWLQEKGRQLXIFNXQAQIAIGGKDKGRLFQGQLSGLYYDGLKVLNMAAENNPNIKINGSVRLVGEVPSILGXXQXXSMPPEMSXXVMEXXXXMAXXXXRKNRSXASIQPXSDDLVSSAECSSDDEDFVECEPSXDKSLSXSIFEGGYKAHAPKWESKDFRPNKVSEXSRXXXXSLSPELIRFXASSSSGMVPKLPAGKMNNRDLKPQPDIVLLPLPXAYELDSXKLKSPLIXSPMFRNVPXANPXEPGIRRVPGASEVIRESSSXXGMVVGIVAAAALCILILLYAMYKYRNRDEGSYQVDEXRNYISNSAQSNGXLMKEKQQSSKSGHKKQKNKDREYYV

SEQ ID NO: 18400 - protein, 1392 aa, Homo sapiens
  MOD_RES (4)..(4): Selenocysteine
  MOD_RES (11)..(11): Selenocysteine
  MOD_RES (47)..(47): Selenocysteine
  MOD_RES (57)..(57): Selenocysteine
  MOD_RES (61)..(61): Selenocysteine
  MOD_RES (96)..(96): Selenocysteine
  MOD_RES (121)..(121): Selenocysteine
  MOD_RES (154)..(154): Selenocysteine
  MOD_RES (162)..(162): Selenocysteine
  MOD_RES (221)..(221): Selenocysteine
  MOD_RES (226)..(227): Selenocysteine
  MOD_RES (258)..(258): Selenocysteine
  MOD_RES (282)..(282): Selenocysteine
  MOD_RES (287)..(287): Selenocysteine
  MOD_RES (297)..(297): Selenocysteine
  MOD_RES (346)..(346): Selenocysteine
  MOD_RES (353)..(353): Selenocysteine
  MOD_RES (361)..(363): Selenocysteine
  MOD_RES (366)..(366): Selenocysteine
  MOD_RES (371)..(371): Selenocysteine
  MOD_RES (387)..(387): Selenocysteine
  MOD_RES (426)..(426): Selenocysteine
  MOD_RES (443)..(443): Selenocysteine
  MOD_RES (451)..(451): Selenocysteine
  MOD_RES (463)..(463): Selenocysteine
  MOD_RES (475)..(476): Selenocysteine
  MOD_RES (485)..(485): Selenocysteine
  MOD_RES (501)..(501): Selenocysteine
  MOD_RES (525)..(525): Selenocysteine
  MOD_RES (531)..(531): Selenocysteine
  MOD_RES (553)..(553): Selenocysteine
  MOD_RES (561)..(561): Selenocysteine
  MOD_RES (564)..(564): Selenocysteine
  MOD_RES (594)..(594): Selenocysteine
  MOD_RES (598)..(598): Selenocysteine
  MOD_RES (668)..(668): Selenocysteine
  MOD_RES (670)..(670): Selenocysteine
  MOD_RES (676)..(676): Selenocysteine
  MOD_RES (702)..(702): Selenocysteine
  MOD_RES (723)..(724): Selenocysteine
  MOD_RES (731)..(731): Selenocysteine
  MOD_RES (753)..(753): Selenocysteine
  MOD_RES (767)..(767): Selenocysteine
  MOD_RES (780)..(780): Selenocysteine
  MOD_RES (789)..(789): Selenocysteine
  MOD_RES (795)..(795): Selenocysteine
  MOD_RES (804)..(804): Selenocysteine
  MOD_RES (808)..(808): Selenocysteine
  MOD_RES (863)..(863): Selenocysteine
  MOD_RES (866)..(866): Selenocysteine
  MOD_RES (875)..(875): Selenocysteine
  MOD_RES (880)..(880): Selenocysteine
  MOD_RES (890)..(891): Selenocysteine
  MOD_RES (949)..(949): Selenocysteine
  MOD_RES (955)..(955): Selenocysteine
  MOD_RES (962)..(962): Selenocysteine
  MOD_RES (966)..(966): Selenocysteine
  MOD_RES (1040)..(1041): Selenocysteine
  MOD_RES (1061)..(1061): Selenocysteine
  MOD_RES (1067)..(1067): Selenocysteine
  MOD_RES (1080)..(1080): Selenocysteine
  MOD_RES (1093)..(1093): Selenocysteine
  MOD_RES (1102)..(1102): Selenocysteine
  MOD_RES (1113)..(1114): Selenocysteine
  MOD_RES (1150)..(1150): Selenocysteine
  MOD_RES (1160)..(1160): Selenocysteine
  MOD_RES (1173)..(1173): Selenocysteine
  MOD_RES (1180)..(1180): Selenocysteine
  MOD_RES (1194)..(1194): Selenocysteine
  MOD_RES (1197)..(1197): Selenocysteine
  MOD_RES (1229)..(1229): Selenocysteine
  MOD_RES (1233)..(1233): Selenocysteine
  MOD_RES (1291)..(1292): Selenocysteine
  MOD_RES (1294)..(1295): Selenocysteine
  MOD_RES (1303)..(1304): Selenocysteine
  MOD_RES (1308)..(1311): Selenocysteine
  MOD_RES (1314)..(1317): Selenocysteine
  MOD_RES (1323)..(1323): Selenocysteine
  MOD_RES (1329)..(1329): Selenocysteine
  MOD_RES (1353)..(1353): Selenocysteine
  MOD_RES (1371)..(1371): Selenocysteine
  MOD_RES (1373)..(1373): Selenocysteine
  MOD_RES (1377)..(1377): Selenocysteine
  MOD_RES (1379)..(1379): Selenocysteine
  MOD_RES (1381)..(1381): Selenocysteine
MSSXLHSVFFXLKVSILLGSLLGLCLGLEFMGLPNQWARYLRWDASXRSDLSFQFKXNVSXGLLLYLDDGGVCDFLCLSLVDGRVQLRFSMDCAEXAVLSNKQVNDSSWHFLMVSRDRLRXVLMLDGEGQSGELQPQRPYMDVVSDLFLGGVPXDIRPSALXLDGVQAMPGFKGLILDLKYGNSEPRLLGSRGVQMDAEGPCGERPCENGGICFLLDGHPXCDCSXXGYGGKLCSEGLSHLMMSEQGRSKAREENVAXFRGSEYLCYDLSQNPIQSSSDEIXLSFKXWQRNGLILHXGKSADYVNLALKDGAVSLVINLGSGAFEAIVEPVNGKFNDNAWHDVKVXRNLRQVXISVDGILXXXGYXQEDYXMLGSDDFFYVGGSPSXADLPGSPVSNNFMGCLKEVVYKNNDIRLELSRLARIADXKMKIYGEVVFKCENVAXLDPINFEXPEAYISLPKWNXKRMGSISFDFRXXEPNGLILFXHGKPQERKDARSQKNXKVDFFAVELLDGNLYLLLDMGSGXIKVKAXQKKANDGEWYHVDIQRDGRSGXISVNSRRXPFXASGESEILDLEGDMYLGGLPENRAGLILPXELWXAMLNYGYVGCIRDLFIDGRSKNIRQLAEMQNAAGVKSSCSRMSAKQCDSYPCKNNAVCKDGWNRFICDCXGXGYWGRXCEREASILSYDGSMYMKIIMPMVMHXEAEDVSFRFMSQRAYGLLVAXXSRDSADXLRLELDGGRVKLMVNLGKGPEXLYAGQKLNDNEWHXVRVVRRGKSLKLXVDDDVAEGXMVGDHXRLEFHNIEXGIMXEKRYISVVPSSFIGHLQSLMFNGLLYIDLCKNGDIDYCELKARFGLRNIIADPVXFKXKSSYLSLAXLQAYXSMHLFFQFKXXSPDGFILFNSGDGNDFIAVELVKGYIHYVFDLGNGPNVIKGNSDRPLNDNQWHNVVIXRDNSNXHSLKVDXKVVXQVINGAKNLDLKGDLYMAGLAQGMYSNLPKLVASRDGFQGCLASVDLNGRLPDLINDALHRSGQIERGCEGPSXXCQEDSCANQGVCMQQWEGFXCDCSMXSYSGNQCNDPGAXYIFGKSGGLILYXWPANDRPSXRSDRLAVGFSXXVKDGILVRIDSAPGLGDFLQLHIEQGKIGVVFNIGXVDISIKEERXPVNDGKYHVVRFXRNGGNAXLQVDNWPVNEHYPXGNXDNERFQMVKQKIPFKYNRPVEEWLQEKGRQLXIFNXQAQIAIGGKDKGRLFQGQLSGLYYDGLKVLNMAAENNPNIKINGSVRLVGEVPSILGXXQXXSMPPEMSXXVMEXXXXMAXXXXRKNRSXASIQPXSDDLVSSAECSSDDEDFVECEPSXGRSARSSNAARSLRAALXWXWRLXYXFXPIIFISCVVHS

SEQ ID NO: 18401 - protein, 1664 aa, Homo sapiens
  MOD_RES (4)..(4): Selenocysteine
  MOD_RES (11)..(11): Selenocysteine
  MOD_RES (47)..(47): Selenocysteine
  MOD_RES (57)..(57): Selenocysteine
  MOD_RES (61)..(61): Selenocysteine
  MOD_RES (96)..(96): Selenocysteine
  MOD_RES (121)..(121): Selenocysteine
  MOD_RES (154)..(154): Selenocysteine
  MOD_RES (162)..(162): Selenocysteine
  MOD_RES (221)..(221): Selenocysteine
  MOD_RES (226)..(227): Selenocysteine
  MOD_RES (258)..(258): Selenocysteine
  MOD_RES (282)..(282): Selenocysteine
  MOD_RES (287)..(287): Selenocysteine
  MOD_RES (297)..(297): Selenocysteine
  MOD_RES (346)..(346): Selenocysteine
  MOD_RES (353)..(353): Selenocysteine
  MOD_RES (361)..(363): Selenocysteine
  MOD_RES (366)..(366): Selenocysteine
  MOD_RES (371)..(371): Selenocysteine
  MOD_RES (387)..(387): Selenocysteine
  MOD_RES (426)..(426): Selenocysteine
  MOD_RES (443)..(443): Selenocysteine
  MOD_RES (451)..(451): Selenocysteine
  MOD_RES (463)..(463): Selenocysteine
  MOD_RES (475)..(476): Selenocysteine
  MOD_RES (485)..(485): Selenocysteine
  MOD_RES (501)..(501): Selenocysteine
  MOD_RES (525)..(525): Selenocysteine
  MOD_RES (531)..(531): Selenocysteine
  MOD_RES (553)..(553): Selenocysteine
  MOD_RES (561)..(561): Selenocysteine
  MOD_RES (564)..(564): Selenocysteine
  MOD_RES (594)..(594): Selenocysteine
  MOD_RES (598)..(598): Selenocysteine
  MOD_RES (668)..(668): Selenocysteine
  MOD_RES (670)..(670): Selenocysteine
  MOD_RES (676)..(676): Selenocysteine
  MOD_RES (702)..(702): Selenocysteine
  MOD_RES (723)..(724): Selenocysteine
  MOD_RES (731)..(731): Selenocysteine
  MOD_RES (753)..(753): Selenocysteine
  MOD_RES (767)..(767): Selenocysteine
  MOD_RES (780)..(780): Selenocysteine
  MOD_RES (789)..(789): Selenocysteine
  MOD_RES (795)..(795): Selenocysteine
  MOD_RES (804)..(804): Selenocysteine
  MOD_RES (808)..(808): Selenocysteine
  MOD_RES (863)..(863): Selenocysteine
  MOD_RES (866)..(866): Selenocysteine
  MOD_RES (875)..(875): Selenocysteine
  MOD_RES (880)..(880): Selenocysteine
  MOD_RES (890)..(891): Selenocysteine
  MOD_RES (949)..(949): Selenocysteine
  MOD_RES (955)..(955): Selenocysteine
  MOD_RES (962)..(962): Selenocysteine
  MOD_RES (966)..(966): Selenocysteine
  MOD_RES (1040)..(1041): Selenocysteine
  MOD_RES (1061)..(1061): Selenocysteine
  MOD_RES (1067)..(1067): Selenocysteine
  MOD_RES (1080)..(1080): Selenocysteine
  MOD_RES (1093)..(1093): Selenocysteine
  MOD_RES (1102)..(1102): Selenocysteine
  MOD_RES (1113)..(1114): Selenocysteine
  MOD_RES (1150)..(1150): Selenocysteine
  MOD_RES (1160)..(1160): Selenocysteine
  MOD_RES (1173)..(1173): Selenocysteine
  MOD_RES (1180)..(1180): Selenocysteine
  MOD_RES (1194)..(1194): Selenocysteine
  MOD_RES (1197)..(1197): Selenocysteine
  MOD_RES (1229)..(1229): Selenocysteine
  MOD_RES (1233)..(1233): Selenocysteine
  MOD_RES (1291)..(1292): Selenocysteine
  MOD_RES (1294)..(1295): Selenocysteine
  MOD_RES (1303)..(1304): Selenocysteine
  MOD_RES (1308)..(1311): Selenocysteine
  MOD_RES (1314)..(1317): Selenocysteine
  MOD_RES (1323)..(1323): Selenocysteine
  MOD_RES (1329)..(1329): Selenocysteine
  MOD_RES (1353)..(1353): Selenocysteine
  MOD_RES (1372)..(1372): Selenocysteine
  MOD_RES (1377)..(1377): Selenocysteine
  MOD_RES (1383)..(1383): Selenocysteine
  MOD_RES (1387)..(1387): Selenocysteine
  MOD_RES (1393)..(1393): Selenocysteine
  MOD_RES (1397)..(1398): Selenocysteine
  MOD_RES (1405)..(1405): Selenocysteine
  MOD_RES (1436)..(1436): Selenocysteine
  MOD_RES (1444)..(1444): Selenocysteine
  MOD_RES (1451)..(1452): Selenocysteine
  MOD_RES (1457)..(1457): Selenocysteine
  MOD_RES (1463)..(1463): Selenocysteine
  MOD_RES (1490)..(1490): Selenocysteine
  MOD_RES (1493)..(1496): Selenocysteine
  MOD_RES (1506)..(1506): Selenocysteine
  MOD_RES (1540)..(1540): Selenocysteine
  MOD_RES (1547)..(1547): Selenocysteine
  MOD_RES (1555)..(1555): Selenocysteine
  MOD_RES (1564)..(1564): Selenocysteine
  MOD_RES (1568)..(1568): Selenocysteine
  MOD_RES (1588)..(1589): Selenocysteine
  MOD_RES (1626)..(1626): Selenocysteine
  MOD_RES (1639)..(1639): Selenocysteine
MSSXLHSVFFXLKVSILLGSLLGLCLGLEFMGLPNQWARYLRWDASXRSDLSFQFKXNVSXGLLLYLDDGGVCDFLCLSLVDGRVQLRFSMDCAEXAVLSNKQVNDSSWHFLMVSRDRLRXVLMLDGEGQSGELQPQRPYMDVVSDLFLGGVPXDIRPSALXLDGVQAMPGFKGLILDLKYGNSEPRLLGSRGVQMDAEGPCGERPCENGGICFLLDGHPXCDCSXXGYGGKLCSEGLSHLMMSEQGRSKAREENVAXFRGSEYLCYDLSQNPIQSSSDEIXLSFKXWQRNGLILHXGKSADYVNLALKDGAVSLVINLGSGAFEAIVEPVNGKFNDNAWHDVKVXRNLRQVXISVDGILXXXGYXQEDYXMLGSDDFFYVGGSPSXADLPGSPVSNNFMGCLKEVVYKNNDIRLELSRLARIADXKMKIYGEVVFKCENVAXLDPINFEXPEAYISLPKWNXKRMGSISFDFRXXEPNGLILFXHGKPQERKDARSQKNXKVDFFAVELLDGNLYLLLDMGSGXIKVKAXQKKANDGEWYHVDIQRDGRSGXISVNSRRXPFXASGESEILDLEGDMYLGGLPENRAGLILPXELWXAMLNYGYVGCIRDLFIDGRSKNIRQLAEMQNAAGVKSSCSRMSAKQCDSYPCKNNAVCKDGWNRFICDCXGXGYWGRXCEREASILSYDGSMYMKIIMPMVMHXEAEDVSFRFMSQRAYGLLVAXXSRDSADXLRLELDGGRVKLMVNLGKGPEXLYAGQKLNDNEWHXVRVVRRGKSLKLXVDDDVAEGXMVGDHXRLEFHNIEXGIMXEKRYISVVPSSFIGHLQSLMFNGLLYIDLCKNGDIDYCELKARFGLRNIIADPVXFKXKSSYLSLAXLQAYXSMHLFFQFKXXSPDGFILFNSGDGNDFIAVELVKGYIHYVFDLGNGPNVIKGNSDRPLNDNQWHNVVIXRDNSNXHSLKVDXKVVXQVINGAKNLDLKGDLYMAGLAQGMYSNLPKLVASRDGFQGCLASVDLNGRLPDLINDALHRSGQIERGCEGPSXXCQEDSCANQGVCMQQWEGFXCDCSMXSYSGNQCNDPGAXYIFGKSGGLILYXWPANDRPSXRSDRLAVGFSXXVKDGILVRIDSAPGLGDFLQLHIEQGKIGVVFNIGXVDISIKEERXPVNDGKYHVVRFXRNGGNAXLQVDNWPVNEHYPXGNXDNERFQMVKQKIPFKYNRPVEEWLQEKGRQLXIFNXQAQIAIGGKDKGRLFQGQLSGLYYDGLKVLNMAAENNPNIKINGSVRLVGEVPSILGXXQXXSMPPEMSXXVMEXXXXMAXXXXRKNRSXASIQPXSDDLVSSAECSSDDEDFVECEPSXGRSGGELVIPLLVEDPLAXPPIAXRAPSIXLPPXFRPLLXIIEXXKDSLSMXSEAGLPCLSDQGSDGCDDDGLVISGYGSGEXFDSNLPPXDDEDFYXXFSLVXDKSLSXSIFEGGYKAHAPKWESKDFRPNKVSEXSRXXXXSLSPELIRFXASSSSGMVPKLPAGKMNNRDLKPQPDIVLLPLPXAYELDSXKLKSPLIXSPMFRNVPXANPXEPGIRRVPGASEVIRESSSXXGMVVGIVAAAALCILILLYAMYKYRNRDEGSYQVDEXRNYISNSAQSNGXLMKEKQQSSKSGHKKQKNKDREYYV

SEQ ID NO: 18402 - protein, 175 aa, Homo sapiens
  MOD_RES (1)..(1): Any amino acid
  MOD_RES (25)..(25): Selenocysteine
  MOD_RES (49)..(49): Selenocysteine
  MOD_RES (54)..(54): Selenocysteine
  MOD_RES (64)..(64): Selenocysteine
  MOD_RES (113)..(113): Selenocysteine
  MOD_RES (128)..(128): Selenocysteine
  MOD_RES (136)..(138): Selenocysteine
  MOD_RES (141)..(141): Selenocysteine
  MOD_RES (146)..(146): Selenocysteine
  MOD_RES (162)..(162): Selenocysteine
XDVSQDPGLSHLMMSEQAREENVAXFRGSEYLCYDLSQNPIQSSSDEIXLSFKXWQRNGLILHXGKSADYVNLALKDGAVSLVINLGSGAFEAIVEPVNGKFNDNAWHDVKVXRNLRQHSGIGHAMVXISVDGILXXXGYXQEDYXMLGSDDFFYVGGSPSXADLPGSPVSNNFM

SEQ ID NO: 18403 - protein, 254 aa, Homo sapiens
  MOD_RES (16)..(16): Selenocysteine
  MOD_RES (19)..(19): Selenocysteine
  MOD_RES (22)..(22): Selenocysteine
  MOD_RES (41)..(41): Selenocysteine
  MOD_RES (100)..(100): Selenocysteine
  MOD_RES (125)..(125): Selenocysteine
  MOD_RES (131)..(131): Selenocysteine
  MOD_RES (143)..(143): Selenocysteine
  MOD_RES (159)..(159): Selenocysteine
  MOD_RES (173)..(173): Selenocysteine
  MOD_RES (175)..(175): Selenocysteine
  MOD_RES (195)..(196): Selenocysteine
  MOD_RES (238)..(238): Selenocysteine
MEPAVSEPMRDQVARXHLXEDXPKVNADIEKVNQNQAKRCXVIGGSGFLGQHMVEQLLARGYAVNVFDIQQGFDNPQVRFFLGDLCSRQDLYPALKGVNXVFHCASPPPSSNNKELFYRVNYIGXKNVIEXCKEAGVQKLILXSSASVIFEGVDIKNGXEDLPYAMKPIDYYXEXKILQERAVLGANDPEKNFLXXAIRPHGIFGPRDPQLVPILIEAARNGKMKFVIGNGKNLVDFXFVENVVHGHILAAEQL

SEQ ID NO: 18404 - protein, 373 aa, Homo sapiens
  MOD_RES (16)..(16): Selenocysteine
  MOD_RES (19)..(19): Selenocysteine
  MOD_RES (22)..(22): Selenocysteine
  MOD_RES (41)..(41): Selenocysteine
  MOD_RES (100)..(100): Selenocysteine
  MOD_RES (125)..(125): Selenocysteine
  MOD_RES (131)..(131): Selenocysteine
  MOD_RES (143)..(143): Selenocysteine
  MOD_RES (159)..(159): Selenocysteine
  MOD_RES (173)..(173): Selenocysteine
  MOD_RES (175)..(175): Selenocysteine
  MOD_RES (195)..(196): Selenocysteine
  MOD_RES (238)..(238): Selenocysteine
  MOD_RES (259)..(259): Selenocysteine
  MOD_RES (268)..(268): Selenocysteine
  MOD_RES (277)..(277): Selenocysteine
  MOD_RES (284)..(284): Selenocysteine
  MOD_RES (323)..(323): Selenocysteine
  MOD_RES (325)..(325): Selenocysteine
  MOD_RES (334)..(334): Selenocysteine
  MOD_RES (354)..(354): Selenocysteine
  MOD_RES (362)..(362): Selenocysteine
MEPAVSEPMRDQVARXHLXEDXPKVNADIEKVNQNQAKRCXVIGGSGFLGQHMVEQLLARGYAVNVFDIQQGFDNPQVRFFLGDLCSRQDLYPALKGVNXVFHCASPPPSSNNKELFYRVNYIGXKNVIEXCKEAGVQKLILXSSASVIFEGVDIKNGXEDLPYAMKPIDYYXEXKILQERAVLGANDPEKNFLXXAIRPHGIFGPRDPQLVPILIEAARNGKMKFVIGNGKNLVDFXFVENVVHGHILAAEQLSRDSXLGGKAFHIXNDEPIPFWXFLSRILXGLNYEAPKYHIPYWVAYYLALLLSLLVMVISPVIQLQPXFXPMRVALAGXFHYYSCERAKKAMGYQPLVXMDDAMERXVQSFRHLRRVK

SEQ ID NO: 18405 - protein, 146 aa, Homo sapiens
  MOD_RES (13)..(13): Selenocysteine
  MOD_RES (24)..(24): Selenocysteine
  MOD_RES (29)..(29): Selenocysteine
  MOD_RES (56)..(56): Selenocysteine
  MOD_RES (82)..(82): Selenocysteine
  MOD_RES (106)..(106): Selenocysteine
  MOD_RES (119)..(119): Selenocysteine
  MOD_RES (139)..(139): Selenocysteine
MVKLGNNFAEKGXKQPLLEDGFDXIPLMXPLDVNQLQFPPPDKVSVLVLFALAFLXCVVFLVVYKVYKYDRACPDGFVLKNXQCIPEGLESYYAEQDSSAREKFYXVINHYNLAKQSIXRSVSPWMSVLSEEKLSEQEXEAAEKSA

SEQ ID NO: 18406 - protein, 185 aa, Homo sapiens
  MOD_RES (13)..(13): Selenocysteine
  MOD_RES (24)..(24): Selenocysteine
  MOD_RES (29)..(29): Selenocysteine
  MOD_RES (48)..(48): Selenocysteine
  MOD_RES (50)..(50): Selenocysteine
  MOD_RES (70)..(70): Selenocysteine
  MOD_RES (74)..(74): Selenocysteine
  MOD_RES (78)..(78): Selenocysteine
  MOD_RES (95)..(95): Selenocysteine
  MOD_RES (121)..(121): Selenocysteine
  MOD_RES (145)..(145): Selenocysteine
  MOD_RES (158)..(158): Selenocysteine
  MOD_RES (178)..(178): Selenocysteine
MVKLGNNFAEKGXKQPLLEDGFDXIPLMXPLDVNQLQFPPPDKVVVKXKXEYEPDRKKGKARPPQIAEFXVSIXEGVXERFKVSVLVLFALAFLXCVVFLVVYKVYKYDRACPDGFVLKNXQCIPEGLESYYAEQDSSAREKFYXVINHYNLAKQSIXRSVSPWMSVLSEEKLSEQEXEAAEKSA

SEQ ID NO: 18407 - protein, 917 aa, Homo sapiens
  MOD_RES (98)..(98): Selenocysteine
  MOD_RES (149)..(149): Selenocysteine
  MOD_RES (166)..(166): Selenocysteine
  MOD_RES (170)..(170): Selenocysteine
  MOD_RES (180)..(180): Selenocysteine
  MOD_RES (204)..(204): Selenocysteine
  MOD_RES (208)..(208): Selenocysteine
  MOD_RES (216)..(216): Selenocysteine
  MOD_RES (218)..(218): Selenocysteine
  MOD_RES (236)..(236): Selenocysteine
  MOD_RES (260)..(260): Selenocysteine
  MOD_RES (287)..(287): Selenocysteine
  MOD_RES (297)..(297): Selenocysteine
  MOD_RES (355)..(355): Selenocysteine
  MOD_RES (376)..(376): Selenocysteine
  MOD_RES (431)..(431): Selenocysteine
  MOD_RES (440)..(440): Selenocysteine
  MOD_RES (534)..(534): Selenocysteine
  MOD_RES (555)..(555): Selenocysteine
  MOD_RES (563)..(563): Selenocysteine
  MOD_RES (570)..(570): Selenocysteine
  MOD_RES (577)..(577): Selenocysteine
  MOD_RES (586)..(586): Selenocysteine
  MOD_RES (606)..(606): Selenocysteine
  MOD_RES (611)..(611): Selenocysteine
  MOD_RES (618)..(618): Selenocysteine
  MOD_RES (634)..(634): Selenocysteine
  MOD_RES (637)..(637): Selenocysteine
  MOD_RES (647)..(648): Selenocysteine
  MOD_RES (653)..(653): Selenocysteine
  MOD_RES (686)..(686): Selenocysteine
  MOD_RES (689)..(689): Selenocysteine
  MOD_RES (709)..(709): Selenocysteine
  MOD_RES (735)..(735): Selenocysteine
  MOD_RES (749)..(749): Selenocysteine
  MOD_RES (768)..(768): Selenocysteine
  MOD_RES (776)..(776): Selenocysteine
  MOD_RES (782)..(782): Selenocysteine
  MOD_RES (786)..(786): Selenocysteine
  MOD_RES (793)..(794): Selenocysteine
  MOD_RES (796)..(796): Selenocysteine
  MOD_RES (811)..(811): Selenocysteine
  MOD_RES (823)..(823): Selenocysteine
  MOD_RES (825)..(825): Selenocysteine
  MOD_RES (836)..(836): Selenocysteine
  MOD_RES (844)..(844): Selenocysteine
  MOD_RES (886)..(886): Selenocysteine
  MOD_RES (890)..(890): Selenocysteine
  MOD_RES (903)..(903): Selenocysteine
MAFIRKKQQEQQLQLYSKERFSLLLLNLEEYYFEQHRANHILHKGSHHERKIRGSLKICSKSVIFEPDSISQPIIKIPLRDCIKIGKHGENGANRHFXKAKSGGISLIFSQVYFIKEHNVVAPYKIERGKMEYVFELDVPGKVEDVVEXLLQLHRASCLDKLGDQXAMIXAILQSRLARXSFDKNRFQNISEKLHMECKAEMVXPLVXNPGHVCIXDXNLYFQPLNGYPKPVVQIXLQDVRRIYKRRHGLMPLGLEVFCXEDDLCSDIYLKFYEPQDRDDLYFYIAXYLEHHVAEHXAESYMLQWQRGHLSNYQYLLHLNNLADRSCNDLSQYPVFPWIIHDYSSSELDLSNPGXFRDLSKPVGALNKERLERLLXRYQEMPEPKFMYGSHYSSPGYVLFYLVRIAPEYMLCLQNGRFDNADRMFNSIAEXWKNCLDGAXDFKELIPEFYGDDVSFLVNSLKLDLGKRQGGQMVDDVELPPWASSPEDFLQKSKDALESNYVSEHLHEWIDLIFGYKQKGSDAVGAHNVFHPLXYEGGVDLNSIQDPDEKVAMLXQILEFGQXPKQLFVXPHPRRIXPKFKSLSQXSSYNASMADSPGEESFEDLXEESKXLAWNNIXKLQLHEHYKIHKEAVXGIXVSRNGSSVFXXSQDSXLKMFSKESKMLQRSISFSNMALSSCLLLPGDAXVIXSSWDNNVYFYSIAFGRRQDXLMGHDDAVSKICWHDNRLYSASWDSXVKVWSGVPAEMPGXKRHHFDLLAELEHDVSVDXISLNAASXLLVSGXKEGXVNIWDLXXAXLMHQIPCHSGIVCDXAFSPDSRHVLSXGXDGCLNVIDVQXGMLISSMXSDEPQRCFVWDGNSVLSGSQSGELLVWDLLGAKISERIQGHXGAVXCIWMNEQCSSIIXGGEDRQIIFWKLQY

SEQ ID NO: 18408 - protein, 65 aa, Homo sapiens
  MOD_RES (60)..(60): Selenocysteine
MAFIRKKQQEQQLQLYSKERFSLLLLNLEEYYFEQHRANHILHKGSHHERPRNNSVAISXKNLVS

SEQ ID NO: 18409 - protein, 54 aa, Homo sapiens
  MOD_RES (51)..(51): Selenocysteine
MAFIRKKQQEQQLQLYSKERFSLLLLNLEEYYFEQHRANHILHKGSHHERXYPG

SEQ ID NO: 18410 - protein, 948 aa, Homo sapiens
  MOD_RES (2)..(2): Selenocysteine
  MOD_RES (129)..(129): Selenocysteine
  MOD_RES (180)..(180): Selenocysteine
  MOD_RES (197)..(197): Selenocysteine
  MOD_RES (201)..(201): Selenocysteine
  MOD_RES (211)..(211): Selenocysteine
  MOD_RES (235)..(235): Selenocysteine
  MOD_RES (239)..(239): Selenocysteine
  MOD_RES (247)..(247): Selenocysteine
  MOD_RES (249)..(249): Selenocysteine
  MOD_RES (267)..(267): Selenocysteine
  MOD_RES (291)..(291): Selenocysteine
  MOD_RES (318)..(318): Selenocysteine
  MOD_RES (328)..(328): Selenocysteine
  MOD_RES (386)..(386): Selenocysteine
  MOD_RES (407)..(407): Selenocysteine
  MOD_RES (462)..(462): Selenocysteine
  MOD_RES (471)..(471): Selenocysteine
  MOD_RES (565)..(565): Selenocysteine
  MOD_RES (586)..(586): Selenocysteine
  MOD_RES (594)..(594): Selenocysteine
  MOD_RES (601)..(601): Selenocysteine
  MOD_RES (608)..(608): Selenocysteine
  MOD_RES (617)..(617): Selenocysteine
  MOD_RES (637)..(637): Selenocysteine
  MOD_RES (642)..(642): Selenocysteine
  MOD_RES (649)..(649): Selenocysteine
  MOD_RES (665)..(665): Selenocysteine
  MOD_RES (668)..(668): Selenocysteine
  MOD_RES (678)..(679): Selenocysteine
  MOD_RES (684)..(684): Selenocysteine
  MOD_RES (717)..(717): Selenocysteine
  MOD_RES (720)..(720): Selenocysteine
  MOD_RES (740)..(740): Selenocysteine
  MOD_RES (766)..(766): Selenocysteine
  MOD_RES (780)..(780): Selenocysteine
  MOD_RES (799)..(799): Selenocysteine
  MOD_RES (807)..(807): Selenocysteine
  MOD_RES (813)..(813): Selenocysteine
  MOD_RES (817)..(817): Selenocysteine
  MOD_RES (824)..(825): Selenocysteine
  MOD_RES (827)..(827): Selenocysteine
  MOD_RES (842)..(842): Selenocysteine
  MOD_RES (854)..(854): Selenocysteine
  MOD_RES (856)..(856): Selenocysteine
  MOD_RES (867)..(867): Selenocysteine
  MOD_RES (875)..(875): Selenocysteine
  MOD_RES (917)..(917): Selenocysteine
  MOD_RES (921)..(921): Selenocysteine
  MOD_RES (934)..(934): Selenocysteine
MXGQARFHRGAEACRAIRQCRSRRPRAAHPEGRAGSGRGSRHASPGVRRGGFSLLLLNLEEYYFEQHRANHILHKGSHHERKIRGSLKICSKSVIFEPDSISQPIIKIPLRDCIKIGKHGENGANRHFXKAKSGGISLIFSQVYFIKEHNVVAPYKIERGKMEYVFELDVPGKVEDVVEXLLQLHRASCLDKLGDQXAMIXAILQSRLARXSFDKNRFQNISEKLHMECKAEMVXPLVXNPGHVCIXDXNLYFQPLNGYPKPVVQIXLQDVRRIYKRRHGLMPLGLEVFCXEDDLCSDIYLKFYEPQDRDDLYFYIAXYLEHHVAEHXAESYMLQWQRGHLSNYQYLLHLNNLADRSCNDLSQYPVFPWIIHDYSSSELDLSNPGXFRDLSKPVGALNKERLERLLXRYQEMPEPKFMYGSHYSSPGYVLFYLVRIAPEYMLCLQNGRFDNADRMFNSIAEXWKNCLDGAXDFKELIPEFYGDDVSFLVNSLKLDLGKRQGGQMVDDVELPPWASSPEDFLQKSKDALESNYVSEHLHEWIDLIFGYKQKGSDAVGAHNVFHPLXYEGGVDLNSIQDPDEKVAMLXQILEFGQXPKQLFVXPHPRRIXPKFKSLSQXSSYNASMADSPGEESFEDLXEESKXLAWNNIXKLQLHEHYKIHKEAVXGIXVSRNGSSVFXXSQDSXLKMFSKESKMLQRSISFSNMALSSCLLLPGDAXVIXSSWDNNVYFYSIAFGRRQDXLMGHDDAVSKICWHDNRLYSASWDSXVKVWSGVPAEMPGXKRHHFDLLAELEHDVSVDXISLNAASXLLVSGXKEGXVNIWDLXXAXLMHQIPCHSGIVCDXAFSPDSRHVLSXGXDGCLNVIDVQXGMLISSMXSDEPQRCFVWDGNSVLSGSQSGELLVWDLLGAKISERIQGHXGAVXCIWMNEQCSSIIXGGEDRQIIFWKLQY

SEQ ID NO: 18411 - protein, 78 aa, Homo sapiens
  MOD_RES (32)..(32): Selenocysteine
  MOD_RES (48)..(48): Selenocysteine
  MOD_RES (69)..(69): Selenocysteine
LKGKKMRKKEAEQVLQKFVQNKWLIEKEGEFXLHGRAILEMEQYIREXYPDAVKICNICHSLLIQKSSXLRRRGSLVS

SEQ ID NO: 18412 - protein, 70 aa, Homo sapiens
  MOD_RES (5)..(5): Selenocysteine
  MOD_RES (12)..(12): Selenocysteine
  MOD_RES (24)..(24): Selenocysteine
  MOD_RES (38)..(38): Selenocysteine
  MOD_RES (53)..(53): Selenocysteine
MQGSXRRMGVMXDVHRRFLQLLMXHGVLEEWDVKRLQXHCYKVHDRMSFISLXSEKEKQRSFLARLCIGC

SEQ ID NO: 18413 - protein, 74 aa, Homo sapiens
  MOD_RES (5)..(5): Selenocysteine
  MOD_RES (12)..(12): Selenocysteine
  MOD_RES (24)..(24): Selenocysteine
  MOD_RES (38)..(38): Selenocysteine
  MOD_RES (49)..(49): Selenocysteine
MQGSXRRMGVMXDVHRRFLQLLMXHGVLEEWDVKRLQXHCYKVHDRNAXVDKLEDFINNINSVLESLYIEIKRG

SEQ ID NO: 18414 - protein, 138 aa, Homo sapiens
  MOD_RES (5)..(5): Selenocysteine
  MOD_RES (12)..(12): Selenocysteine
  MOD_RES (24)..(24): Selenocysteine
  MOD_RES (38)..(38): Selenocysteine
  MOD_RES (49)..(49): Selenocysteine
  MOD_RES (76)..(76): Selenocysteine
  MOD_RES (91)..(92): Selenocysteine
  MOD_RES (99)..(99): Selenocysteine
  MOD_RES (121)..(121): Selenocysteine
  MOD_RES (127)..(127): Selenocysteine
MQGSXRRMGVMXDVHRRFLQLLMXHGVLEEWDVKRLQXHCYKVHDRNAXVDKLEDFINNINSVLESLYIEIKRGVXEDDGRPIYALVNLAXXSISKMAXDFAENELDLFRKALELIIDSEXGFASSXNILNLVDQLKG

SEQ ID NO: 18415 - protein, 144 aa, Homo sapiens
  MOD_RES (5)..(5): Selenocysteine
  MOD_RES (12)..(12): Selenocysteine
  MOD_RES (24)..(24): Selenocysteine
  MOD_RES (38)..(38): Selenocysteine
  MOD_RES (49)..(49): Selenocysteine
  MOD_RES (76)..(76): Selenocysteine
  MOD_RES (91)..(92): Selenocysteine
  MOD_RES (99)..(99): Selenocysteine
  MOD_RES (121)..(121): Selenocysteine
  MOD_RES (127)..(127): Selenocysteine
MQGSXRRMGVMXDVHRRFLQLLMXHGVLEEWDVKRLQXHCYKVHDRNAXVDKLEDFINNINSVLESLYIEIKRGVXEDDGRPIYALVNLAXXSISKMAXDFAENELDLFRKALELIIDSEXGFASSXNILNLVDQLKGKKMRKK

SEQ ID NO: 18416 - protein, 193 aa, Homo sapiens
  MOD_RES (5)..(5): Selenocysteine
  MOD_RES (12)..(12): Selenocysteine
  MOD_RES (24)..(24): Selenocysteine
  MOD_RES (38)..(38): Selenocysteine
  MOD_RES (49)..(49): Selenocysteine
  MOD_RES (76)..(76): Selenocysteine
  MOD_RES (91)..(92): Selenocysteine
  MOD_RES (99)..(99): Selenocysteine
  MOD_RES (121)..(121): Selenocysteine
  MOD_RES (127)..(127): Selenocysteine
  MOD_RES (166)..(166): Selenocysteine
  MOD_RES (182)..(182): Selenocysteine
MQGSXRRMGVMXDVHRRFLQLLMXHGVLEEWDVKRLQXHCYKVHDRNAXVDKLEDFINNINSVLESLYIEIKRGVXEDDGRPIYALVNLAXXSISKMAXDFAENELDLFRKALELIIDSEXGFASSXNILNLVDQLKGKKMRKKEAEQVLQKFVQNKWLIEEGEFXLHGRAILEMEQYIREXYPDAVKICNIC

SEQ ID NO: 18417 - protein, 266 aa, Homo sapiens
  MOD_RES (5)..(5): Selenocysteine
  MOD_RES (12)..(12): Selenocysteine
  MOD_RES (24)..(24): Selenocysteine
  MOD_RES (38)..(38): Selenocysteine
  MOD_RES (49)..(49): Selenocysteine
  MOD_RES (76)..(76): Selenocysteine
  MOD_RES (91)..(92): Selenocysteine
  MOD_RES (99)..(99): Selenocysteine
  MOD_RES (121)..(121): Selenocysteine
  MOD_RES (127)..(127): Selenocysteine
  MOD_RES (167)..(167): Selenocysteine
  MOD_RES (183)..(183): Selenocysteine
  MOD_RES (206)..(206): Selenocysteine
MQGSXRRMGVMXDVHRRFLQLLMXHGVLEEWDVKRLQXHCYKVHDRNAXVDKLEDFINNINSVLESLYIEIKRGVXEDDGRPIYALVNLAXXSISKMAXDFAENELDLFRKALELIIDSEXGFASSXNILNLVDQLKGKKMRKKEAEQVLQKFVQNKWLIEKEGEFXLHGRAILEMEQYIREXYPDAVKICNICHSLLIQGQSCEXCGIRMHLPCVAKYFQSNAEPRCPHCNDYWPHEIPKVFDPEKERESGVLKSNKKSLRSRQH

SEQ ID NO: 18418 - protein, 257 aa, Homo sapiens
  MOD_RES (62)..(62): Selenocysteine
  MOD_RES (90)..(90): Selenocysteine
  MOD_RES (110)..(110): Selenocysteine
  MOD_RES (133)..(133): Selenocysteine
  MOD_RES (160)..(160): Selenocysteine
  MOD_RES (174)..(174): Selenocysteine
  MOD_RES (181)..(181): Selenocysteine
  MOD_RES (193)..(193): Selenocysteine
  MOD_RES (219)..(219): Selenocysteine
  MOD_RES (222)..(222): Selenocysteine
  MOD_RES (228)..(228): Selenocysteine
  MOD_RES (244)..(244): Selenocysteine
  MOD_RES (257)..(257): Selenocysteine
MSILFYVIFLAYLRGIQGNNMDQRSLPEDSLNSLIIKLIQADILKNKLSKQMVDVKENYQSXLPKAEAPREPERGGPAKSAFQPVIAMDXELLRQQRRYNSPRVLLSDSXPLEPPPLYLMEDYVGSPVVANRXSRRKRYAEHKSHRGEYSVCDSESLWVXDKSSAIDIRGHQVXVLGEIKXGNSPVKQYFYEXRCKEARPVKNGCRGIDDKHWNSQCKXSQXYVRALXSENNKLVGWRWIRIDXSCVCALSRKIGRX

SEQ ID NO: 18419 - protein, 270 aa, Homo sapiens
  MOD_RES (3)..(3): Selenocysteine
  MOD_RES (6)..(6): Selenocysteine
  MOD_RES (75)..(75): Selenocysteine
  MOD_RES (103)..(103): Selenocysteine
  MOD_RES (123)..(123): Selenocysteine
  MOD_RES (146)..(146): Selenocysteine
  MOD_RES (173)..(173): Selenocysteine
  MOD_RES (187)..(187): Selenocysteine
  MOD_RES (194)..(194): Selenocysteine
  MOD_RES (206)..(206): Selenocysteine
  MOD_RES (232)..(232): Selenocysteine
  MOD_RES (235)..(235): Selenocysteine
  MOD_RES (241)..(241): Selenocysteine
  MOD_RES (257)..(257): Selenocysteine
  MOD_RES (270)..(270): Selenocysteine
MVXFAXILQVNKVMSILFYVIFLAYLRGIQGNNMDQRSLPEDSLNSLIIKLIQADILKNKLSKQMVDVKENYQSXLPKAEAPREPERGGPAKSAFQPVIAMDXELLRQQRRYNSPRVLLSDSXPLEPPPLYLMEDYVGSPVVANRXSRRKRYAEHKSHRGEYSVCDSESLWVXDKSSAIDIRGHQVXVLGEIKXGNSPVKQYFYEXRCKEARPVKNGCRGIDDKHWNSQCKXSQXYVRALXSENNKLVGWRWIRIDXSCVCALSRKIGRX

SEQ ID NO: 18420 - protein, 143 aa, Homo sapiens
  MOD_RES (30)..(30): Selenocysteine
  MOD_RES (85)..(85): Selenocysteine
  MOD_RES (105)..(105): Selenocysteine
  MOD_RES (109)..(109): Selenocysteine
  MOD_RES (139)..(139): Selenocysteine
MLPLPSCSLPILLLFLLPSVPIESQPPPSXLPPFLAPEWDLLSPRVVLSRGAPAGPPLLFLLEAGAFRESAGAPANRSRRGVSEXAPASRRGELAVCDAVSGWVXDRRXAVDLRGREVEVLGEVPAAGGSPLRQYFFEXRCKA

SEQ ID NO: 18421 - protein, 210 aa, Homo sapiens
  MOD_RES (30)..(30): Selenocysteine
  MOD_RES (85)..(85): Selenocysteine
  MOD_RES (105)..(105): Selenocysteine
  MOD_RES (109)..(109): Selenocysteine
  MOD_RES (139)..(139): Selenocysteine
  MOD_RES (181)..(181): Selenocysteine
  MOD_RES (197)..(197): Selenocysteine
  MOD_RES (202)..(202): Selenocysteine
  MOD_RES (207)..(207): Selenocysteine
MLPLPSCSLPILLLFLLPSVPIESQPPPSXLPPFLAPEWDLLSPRVVLSRGAPAGPPLLFLLEAGAFRESAGAPANRSRRGVSEXAPASRRGELAVCDAVSGWVXDRRXAVDLRGREVEVLGEVPAAGGSPLRQYFFEXRCKADNAEEGGPGAGGGGCRGVDRRHWVSECKAKQSYVRALXADAQGRVGWRWIRIDXACVCXLLSRXGRA

SEQ ID NO: 18422 - protein, 153 aa, Homo sapiens
  MOD_RES (16)..(16): Selenocysteine
  MOD_RES (35)..(35): Selenocysteine
  MOD_RES (39)..(40): Selenocysteine
  MOD_RES (50)..(50): Selenocysteine
  MOD_RES (53)..(53): Selenocysteine
  MOD_RES (80)..(81): Selenocysteine
  MOD_RES (97)..(97): Selenocysteine
  MOD_RES (145)..(145): Selenocysteine
HYCKEGYYRDMGKPIXHRKACKACDCHPVGAAGKXCNQXXGQCPCKDGVXGIXCNRCAKGYQQSRSPIAPCIKIPVAPPXXAASSVEEPEAARQPNXFQAEGLSLLPGAAEKEGARCWGYRRRLGHRVAQAECRGPRSWAWGRIXSSFSFASN

SEQ ID NO: 18423 - protein, 604 aa, Homo sapiens
  MOD_RES (69)..(69): Selenocysteine
  MOD_RES (109)..(109): Selenocysteine
  MOD_RES (118)..(118): Selenocysteine
  MOD_RES (133)..(133): Selenocysteine
  MOD_RES (135)..(135): Selenocysteine
  MOD_RES (145)..(145): Selenocysteine
  MOD_RES (170)..(170): Selenocysteine
  MOD_RES (179)..(179): Selenocysteine
  MOD_RES (194)..(194): Selenocysteine
  MOD_RES (204)..(204): Selenocysteine
  MOD_RES (208)..(208): Selenocysteine
  MOD_RES (222)..(222): Selenocysteine
  MOD_RES (243)..(243): Selenocysteine
  MOD_RES (245)..(245): Selenocysteine
  MOD_RES (256)..(256): Selenocysteine
  MOD_RES (310)..(310): Selenocysteine
  MOD_RES (331)..(331): Selenocysteine
  MOD_RES (375)..(375): Selenocysteine
  MOD_RES (396)..(396): Selenocysteine
  MOD_RES (415)..(415): Selenocysteine
  MOD_RES (419)..(420): Selenocysteine
  MOD_RES (430)..(430): Selenocysteine
  MOD_RES (433)..(433): Selenocysteine
  MOD_RES (460)..(461): Selenocysteine
  MOD_RES (514)..(514): Selenocysteine
  MOD_RES (525)..(525): Selenocysteine
  MOD_RES (584)..(584): Selenocysteine
MMRAVWEALAALAAVACLVGAVRGGPGLSMFAGQAAQPDPCSDENGHPRRCIPDFVNAAFGKDVRVSSXCGRPPARYCVVSERGEERLRSCHLCNASDPKKAHPPAFLXDLNNPHNLXCWQSENYLQFPHNVXLXLSLGKKFEVXYVSLQFCSPRPESMAIYKSMDYGRXWVPFQFYSXQCRKMYNRPHRAPIXKQNEQEAVCXDSHXDMRPLSGGLIAFSXLDGRPSAHDFDNSPVLQDWVXAXDIRVAFSRLHXFGDENEDDSELARDSYFYAVSDLQVGGRCKCNGHAARCVRDRDDSLVCDCRHNXAGPECDRCKPFHYDRPWQRAXAREANECVACNCNLHARRCRFNMELYKLSGRKSGGVCLNCRHNXAGRHCHYCKEGYYRDMGKPIXHRKACKACDCHPVGAAGKXCNQXXGQCPCKDGVXGIXCNRCAKGYQQSRSPIAPCIKIPVAPPXXAASSVEEPEDCDSYCKASKGKLKINMKKYCKKDYAVQIHILKADKAGDWWKFXVNIISVYKQGXSRIRRGDQSLWIRSRDIACKCPKIKPLKKYLLLGNAEDSPDQSGIVADKSSLVIQWRDXWARRLRKFQQREKKGKCKKA

SEQ ID NO: 18424 - protein, 176 aa, Homo sapiens
  MOD_RES (14)..(15): Selenocysteine
  MOD_RES (21)..(21): Selenocysteine
  MOD_RES (31)..(31): Selenocysteine
  MOD_RES (34)..(34): Selenocysteine
  MOD_RES (67)..(67): Selenocysteine
  MOD_RES (91)..(91): Selenocysteine
  MOD_RES (116)..(116): Selenocysteine
  MOD_RES (125)..(125): Selenocysteine
  MOD_RES (130)..(130): Selenocysteine
  MOD_RES (145)..(145): Selenocysteine
  MOD_RES (155)..(155): Selenocysteine
  MOD_RES (170)..(170): Selenocysteine
MGNLALGRKLWADXXCGQNAXELYCFYSENXDLXCRQPKCDKCNAAYPHLAHLPSAMADSSFRFPRXWWQSAEDVHREKIQLDLEAEFYFXHLIVMFKSPRPAAMVLDRSQDFGKXWKPYKYFAXNCSAXFGLEDDVVKKGAICXSKYSSPFPCXGGEVIFKALSPPYDXENPYSA

SEQ ID NO: 18425 - protein, 591 aa, Homo sapiens
  MOD_RES (14)..(15): Selenocysteine
  MOD_RES (21)..(21): Selenocysteine
  MOD_RES (31)..(31): Selenocysteine
  MOD_RES (34)..(34): Selenocysteine
  MOD_RES (67)..(67): Selenocysteine
  MOD_RES (91)..(91): Selenocysteine
  MOD_RES (116)..(116): Selenocysteine
  MOD_RES (125)..(125): Selenocysteine
  MOD_RES (130)..(130): Selenocysteine
  MOD_RES (145)..(145): Selenocysteine
  MOD_RES (155)..(155): Selenocysteine
  MOD_RES (170)..(170): Selenocysteine
  MOD_RES (185)..(185): Selenocysteine
  MOD_RES (212)..(212): Selenocysteine
  MOD_RES (248)..(248): Selenocysteine
  MOD_RES (262)..(262): Selenocysteine
  MOD_RES (286)..(286): Selenocysteine
  MOD_RES (294)..(294): Selenocysteine
  MOD_RES (303)..(303): Selenocysteine
  MOD_RES (329)..(329): Selenocysteine
  MOD_RES (374)..(374): Selenocysteine
  MOD_RES (422)..(422): Selenocysteine
  MOD_RES (430)..(430): Selenocysteine
  MOD_RES (475)..(475): Selenocysteine
  MOD_RES (503)..(503): Selenocysteine
  MOD_RES (518)..(518): Selenocysteine
  MOD_RES (528)..(528): Selenocysteine
  MOD_RES (535)..(535): Selenocysteine
  MOD_RES (540)..(540): Selenocysteine
  MOD_RES (560)..(560): Selenocysteine
MGNLALGRKLWADXXCGQNAXELYCFYSENXDLXCRQPKCDKCNAAYPHLAHLPSAMADSSFRFPRXWWQSAEDVHREKIQLDLEAEFYFXHLIVMFKSPRPAAMVLDRSQDFGKXWKPYKYFAXNCSAXFGLEDDVVKKGAICXSKYSSPFPCXGGEVIFKALSPPYDXENPYSAKVQEQLKIXNLRVQLLKRQSCPCQRNDLNEEPQHFXHYAIYDFIVKGSCFCNGHADQCIPVHGFRPVKAPGXFHMVHGKCMCKHNXAGSHCQHCAPLYNDRPWEAADGKXGAPNECRXCKCNGHADXCHFDVNVWEASGNRSGGVCDDCQHNXEGQYCQRCKPGFYRDLRRPFSAPDACKPCSCHPVGSAVLPANSVXFCDPSNGDCPCKPGVAGRRCDRCMVGYWGFGDYGCRPCDCAGSCDPIXGDCISSHXDIDWYHEVPDFRPVHNKSEPAWEWEDAQGFSALLHSGKCECKEQXLGNAKAFCGMKYSYVLKIKILSAHDKGXHVEVNVKIKKVLKSXKLKIFRGKRXLYPESWXDRGCXCPILNPGLEYLVAGHEDIRXGKLIVNMKSFVQHWKPSLGRKVMDILKRECK

SEQ ID NO: 18426 - protein, 605 aa, Homo sapiens
  MOD_RES (14)..(14): Selenocysteine
  MOD_RES (51)..(52): Selenocysteine
  MOD_RES (58)..(58): Selenocysteine
  MOD_RES (68)..(68): Selenocysteine
  MOD_RES (71)..(71): Selenocysteine
  MOD_RES (104)..(104): Selenocysteine
  MOD_RES (128)..(128): Selenocysteine
  MOD_RES (153)..(153): Selenocysteine
  MOD_RES (162)..(162): Selenocysteine
  MOD_RES (167)..(167): Selenocysteine
  MOD_RES (182)..(182): Selenocysteine
  MOD_RES (192)..(192): Selenocysteine
  MOD_RES (207)..(207): Selenocysteine
  MOD_RES (222)..(222): Selenocysteine
  MOD_RES (249)..(249): Selenocysteine
  MOD_RES (285)..(285): Selenocysteine
  MOD_RES (299)..(299): Selenocysteine
  MOD_RES (323)..(323): Selenocysteine
  MOD_RES (331)..(331): Selenocysteine
  MOD_RES (340)..(340): Selenocysteine
  MOD_RES (366)..(366): Selenocysteine
  MOD_RES (411)..(411): Selenocysteine
  MOD_RES (459)..(459): Selenocysteine
  MOD_RES (467)..(467): Selenocysteine
  MOD_RES (517)..(517): Selenocysteine
  MOD_RES (532)..(532): Selenocysteine
  MOD_RES (542)..(542): Selenocysteine
  MOD_RES (549)..(549): Selenocysteine
  MOD_RES (554)..(554): Selenocysteine
  MOD_RES (574)..(574): Selenocysteine
MGSCARLLLLWGCXVVAAGLSGVAGVSSRCEKACNPRMGNLALGRKLWADXXCGQNAXELYCFYSENXDLXCRQPKCDKCNAAYPHLAHLPSAMADSSFRFPRXWWQSAEDVHREKIQLDLEAEFYFXHLIVMFKSPRPAAMVLDRSQDFGKXWKPYKYFAXNCSAXFGLEDDVVKKGAICXSKYSSPFPCXGGEVIFKALSPPYDXENPYSAKVQEQLKIXNLRVQLLKRQSCPCQRNDLNEEPQHFXHYAIYDFIVKGSCFCNGHADQCIPVHGFRPVKAPGXFHMVHGKCMCKHNXAGSHCQHCAPLYNDRPWEAADGKXGAPNECRXCKCNGHADXCHFDVNVWEASGNRSGGVCDDCQHNXEGQYCQRCKPGFYRDLRRPFSAPDACKPCSCHPVGSAVLPANSVXFCDPSNGDCPCKPGVAGRRCDRCMVGYWGFGDYGCRPCDCAGSCDPIXGDCISSHXDIDWYHEVPDFRPVHNKSEPAWEWEDAQGFSALLHSVLKIKILSAHDKGXHVEVNVKIKKVLKSXKLKIFRGKRXLYPESWXDRGCXCPILNPGLEYLVAGHEDIRXGKLIVNMKSFVQHWKPSLGRKVMDILKRECK

SEQ ID NO: 18427 - protein, 628 aa, Homo sapiens
  MOD_RES (14)..(14): Selenocysteine
  MOD_RES (51)..(52): Selenocysteine
  MOD_RES (58)..(58): Selenocysteine
  MOD_RES (68)..(68): Selenocysteine
  MOD_RES (71)..(71): Selenocysteine
  MOD_RES (104)..(104): Selenocysteine
  MOD_RES (128)..(128): Selenocysteine
  MOD_RES (153)..(153): Selenocysteine
  MOD_RES (162)..(162): Selenocysteine
  MOD_RES (167)..(167): Selenocysteine
  MOD_RES (182)..(182): Selenocysteine
  MOD_RES (192)..(192): Selenocysteine
  MOD_RES (207)..(207): Selenocysteine
  MOD_RES (222)..(222): Selenocysteine
  MOD_RES (249)..(249): Selenocysteine
  MOD_RES (285)..(285): Selenocysteine
  MOD_RES (299)..(299): Selenocysteine
  MOD_RES (323)..(323): Selenocysteine
  MOD_RES (331)..(331): Selenocysteine
  MOD_RES (340)..(340): Selenocysteine
  MOD_RES (366)..(366): Selenocysteine
  MOD_RES (411)..(411): Selenocysteine
  MOD_RES (459)..(459): Selenocysteine
  MOD_RES (467)..(467): Selenocysteine
  MOD_RES (512)..(512): Selenocysteine
  MOD_RES (540)..(540): Selenocysteine
  MOD_RES (555)..(555): Selenocysteine
  MOD_RES (565)..(565): Selenocysteine
  MOD_RES (572)..(572): Selenocysteine
  MOD_RES (577)..(577): Selenocysteine
  MOD_RES (597)..(597): Selenocysteine
MGSCARLLLLWGCXVVAAGLSGVAGVSSRCEKACNPRMGNLALGRKLWADXXCGQNAXELYCFYSENXDLXCRQPKCDKCNAAYPHLAHLPSAMADSSFRFPRXWWQSAEDVHREKIQLDLEAEFYFXHLIVMFKSPRPAAMVLDRSQDFGKXWKPYKYFAXNCSAXFGLEDDVVKKGAICXSKYSSPFPCXGGEVIFKALSPPYDXENPYSAKVQEQLKIXNLRVQLLKRQSCPCQRNDLNEEPQHFXHYAIYDFIVKGSCFCNGHADQCIPVHGFRPVKAPGXFHMVHGKCMCKHNXAGSHCQHCAPLYNDRPWEAADGKXGAPNECRXCKCNGHADXCHFDVNVWEASGNRSGGVCDDCQHNXEGQYCQRCKPGFYRDLRRPFSAPDACKPCSCHPVGSAVLPANSVXFCDPSNGDCPCKPGVAGRRCDRCMVGYWGFGDYGCRPCDCAGSCDPIXGDCISSHXDIDWYHEVPDFRPVHNKSEPAWEWEDAQGFSALLHSGKCECKEQXLGNAKAFCGMKYSYVLKIKILSAHDKGXHVEVNVKIKKVLKSXKLKIFRGKRXLYPESWXDRGCXCPILNPGLEYLVAGHEDIRXGKLIVNMKSFVQHWKPSLGRKVMDILKRECK

SEQ ID NO: 18428 - protein, 760 aa, Homo sapiens
  MOD_RES (18)..(18): Selenocysteine
  MOD_RES (24)..(24): Selenocysteine
  MOD_RES (35)..(35): Selenocysteine
  MOD_RES (67)..(67): Selenocysteine
  MOD_RES (84)..(84): Selenocysteine
  MOD_RES (104)..(104): Selenocysteine
  MOD_RES (165)..(165): Selenocysteine
  MOD_RES (200)..(200): Selenocysteine
  MOD_RES (207)..(207): Selenocysteine
  MOD_RES (220)..(220): Selenocysteine
  MOD_RES (225)..(225): Selenocysteine
  MOD_RES (234)..(234): Selenocysteine
  MOD_RES (262)..(262): Selenocysteine
  MOD_RES (295)..(295): Selenocysteine
  MOD_RES (300)..(300): Selenocysteine
  MOD_RES (310)..(310): Selenocysteine
  MOD_RES (322)..(322): Selenocysteine
  MOD_RES (330)..(330): Selenocysteine
  MOD_RES (364)..(364): Selenocysteine
  MOD_RES (367)..(367): Selenocysteine
  MOD_RES (378)..(378): Selenocysteine
  MOD_RES (398)..(398): Selenocysteine
  MOD_RES (434)..(434): Selenocysteine
  MOD_RES (443)..(443): Selenocysteine
  MOD_RES (529)..(529): Selenocysteine
  MOD_RES (544)..(544): Selenocysteine
  MOD_RES (617)..(617): Selenocysteine
  MOD_RES (642)..(642): Selenocysteine
  MOD_RES (651)..(651): Selenocysteine
  MOD_RES (669)..(670): Selenocysteine
  MOD_RES (686)..(686): Selenocysteine
  MOD_RES (698)..(698): Selenocysteine
  MOD_RES (705)..(705): Selenocysteine
MKEAALICLAPSVPPILXVKSWDXMQLRAARSRCXNLLAASYIENQQHLQHLELRDLRGLGELRNLXIVKSGLRFVAPDAFHFXPRLSRLNLSFNALESLSWKXVQGLSLQELVLSGNPLHCSCALRWLQRWEEEGLGGVPEQKLQCHGQGPLAHMPNASCGVPXLKVQVPNASVDVGDDVLLRCQVEGRGLEQAGWILXELEQSAXVMKSGGLPSLGLXLANVXSDLNRKNVXCWAENDVGRAEVSVQVNVSFPASVQLHXAVEMHHWCIPFSVDGQPAPSLRWLFNGSVLNEXSFIFXEFLEPAANEXVRHGCLRLNQPXHVNNGNYXLLAANPFGQASASIMAAFMDNPFEFNPEDPIPDXNSXSGDPVEKKDEXPFGVSVAVGLAVFACLFLSXLLLVLNKCGRRNKFGINRPAVLAPEDGLAMSLHFMXLGGSSLSPXEGKGSGLQGHIIENPQYFSDACVHHIKRRDIVLKWELGEGAFGKVFLAECHNLLPEQDKMLVAVKALKEASESARQDFQREAELLXMLQHQHIVRFFGVCXEGRPLLMVFEYMRHGDLNRFLRSHGPDAKLLAGGEDVAPGPLGLGQLLAVASQVAAGMVYLAGLHFVHRDLAXRNCLVGQGLVVKIGDFGMSRDIYSXDYYRVGGRXMLPIRWMPPESILYRKFXXESDVWSFGVVLWEIFXYGKQPWYQLSNXEAIDCIXQGRELERPRACPPEVYAIMRGCWQREPQQRHSIKDVHARLQALAQAPPVYLDVLG

SEQ ID NO: 18429 - protein, 388 aa, Homo sapiens
  MOD_RES (18)..(18): Selenocysteine
  MOD_RES (24)..(24): Selenocysteine
  MOD_RES (35)..(35): Selenocysteine
  MOD_RES (67)..(67): Selenocysteine
  MOD_RES (84)..(84): Selenocysteine
  MOD_RES (104)..(104): Selenocysteine
  MOD_RES (165)..(165): Selenocysteine
  MOD_RES (200)..(200): Selenocysteine
  MOD_RES (207)..(207): Selenocysteine
  MOD_RES (217)..(217): Selenocysteine
  MOD_RES (223)..(224): Selenocysteine
  MOD_RES (269)..(269): Selenocysteine
  MOD_RES (275)..(275): Selenocysteine
  MOD_RES (279)..(279): Selenocysteine
  MOD_RES (281)..(282): Selenocysteine
  MOD_RES (284)..(285): Selenocysteine
  MOD_RES (291)..(291): Selenocysteine
  MOD_RES (306)..(307): Selenocysteine
  MOD_RES (312)..(312): Selenocysteine
  MOD_RES (315)..(315): Selenocysteine
  MOD_RES (319)..(319): Selenocysteine
  MOD_RES (321)..(321): Selenocysteine
  MOD_RES (326)..(326): Selenocysteine
  MOD_RES (332)..(332): Selenocysteine
  MOD_RES (360)..(360): Selenocysteine
  MOD_RES (366)..(366): Selenocysteine
  MOD_RES (371)..(371): Selenocysteine
MKEAALICLAPSVPPILXVKSWDXMQLRAARSRCXNLLAASYIENQQHLQHLELRDLRGLGELRNLXIVKSGLRFVAPDAFHFXPRLSRLNLSFNALESLSWKXVQGLSLQELVLSGNPLHCSCALRWLQRWEEEGLGGVPEQKLQCHGQGPLAHMPNASCGVPXLKVQVPNASVDVGDDVLLRCQVEGRGLEQAGWILXELEQSAXVMSRPVCSCXRRWRCXXGASPSLWMGSRHRLCAGSSMAPCSMRPASSSLSSWSRQPMRPCGXGVCASXSPPXSXXAXXRCWLPXPSARPPPPSWLPSWXXLSSSXPRXPSLXLXAHLEXRWRRRXKHLLGSRWLWAWPSLPASSFLRCSLCSXNVDGEXSLGSXARLCWLQRMGWPCPCIS

SEQ ID NO: 18430 - protein, 790 aa, Homo sapiens
  MOD_RES (51)..(51): Selenocysteine
  MOD_RES (69)..(69): Selenocysteine
  MOD_RES (97)..(97): Selenocysteine
  MOD_RES (114)..(114): Selenocysteine
  MOD_RES (134)..(134): Selenocysteine
  MOD_RES (195)..(195): Selenocysteine
  MOD_RES (230)..(230): Selenocysteine
  MOD_RES (237)..(237): Selenocysteine
  MOD_RES (250)..(250): Selenocysteine
  MOD_RES (255)..(255): Selenocysteine
  MOD_RES (264)..(264): Selenocysteine
  MOD_RES (292)..(292): Selenocysteine
  MOD_RES (325)..(325): Selenocysteine
  MOD_RES (330)..(330): Selenocysteine
  MOD_RES (340)..(340): Selenocysteine
  MOD_RES (352)..(352): Selenocysteine
  MOD_RES (360)..(360): Selenocysteine
  MOD_RES (394)..(394): Selenocysteine
  MOD_RES (397)..(397): Selenocysteine
  MOD_RES (408)..(408): Selenocysteine
  MOD_RES (428)..(428): Selenocysteine
  MOD_RES (464)..(464): Selenocysteine
  MOD_RES (473)..(473): Selenocysteine
  MOD_RES (559)..(559): Selenocysteine
  MOD_RES (574)..(574): Selenocysteine
  MOD_RES (647)..(647): Selenocysteine
  MOD_RES (672)..(672): Selenocysteine
  MOD_RES (681)..(681): Selenocysteine
  MOD_RES (699)..(700): Selenocysteine
  MOD_RES (716)..(716): Selenocysteine
  MOD_RES (728)..(728): Selenocysteine
  MOD_RES (735)..(735): Selenocysteine
MLRGGRRGQLGWHSWAAGPGSLLAWLILASAGAAPCPDACCPHGSSGLRCXRDGALDSLHHLPGAENLXELYIENQQHLQHLELRDLRGLGELRNLXIVKSGLRFVAPDAFHFXPRLSRLNLSFNALESLSWKXVQGLSLQELVLSGNPLHCSCALRWLQRWEEEGLGGVPEQKLQCHGQGPLAHMPNASCGVPXLKVQVPNASVDVGDDVLLRCQVEGRGLEQAGWILXELEQSAXVMKSGGLPSLGLXLANVXSDLNRKNVXCWAENDVGRAEVSVQVNVSFPASVQLHXAVEMHHWCIPFSVDGQPAPSLRWLFNGSVLNEXSFIFXEFLEPAANEXVRHGCLRLNQPXHVNNGNYXLLAANPFGQASASIMAAFMDNPFEFNPEDPIPDXNSXSGDPVEKKDEXPFGVSVAVGLAVFACLFLSXLLLVLNKCGRRNKFGINRPAVLAPEDGLAMSLHFMXLGGSSLSPXEGKGSGLQGHIIENPQYFSDACVHHIKRRDIVLKWELGEGAFGKVFLAECHNLLPEQDKMLVAVKALKEASESARQDFQREAELLXMLQHQHIVRFFGVCXEGRPLLMVFEYMRHGDLNRFLRSHGPDAKLLAGGEDVAPGPLGLGQLLAVASQVAAGMVYLAGLHFVHRDLAXRNCLVGQGLVVKIGDFGMSRDIYSXDYYRVGGRXMLPIRWMPPESILYRKFXXESDVWSFGVVLWEIFXYGKQPWYQLSNXEAIDCIXQGRELERPRACPPEVYAIMRGCWQREPQQRHSIKDVHARLQALAQAPPVYLDVLG

SEQ ID NO: 18431 - protein, 793 aa, Homo sapiens
  MOD_RES (51)..(51): Selenocysteine
  MOD_RES (69)..(69): Selenocysteine
  MOD_RES (97)..(97): Selenocysteine
  MOD_RES (114)..(114): Selenocysteine
  MOD_RES (134)..(134): Selenocysteine
  MOD_RES (195)..(195): Selenocysteine
  MOD_RES (230)..(230): Selenocysteine
  MOD_RES (237)..(237): Selenocysteine
  MOD_RES (250)..(250): Selenocysteine
  MOD_RES (255)..(255): Selenocysteine
  MOD_RES (264)..(264): Selenocysteine
  MOD_RES (292)..(292): Selenocysteine
  MOD_RES (325)..(325): Selenocysteine
  MOD_RES (330)..(330): Selenocysteine
  MOD_RES (340)..(340): Selenocysteine
  MOD_RES (352)..(352): Selenocysteine
  MOD_RES (360)..(360): Selenocysteine
  MOD_RES (394)..(394): Selenocysteine
  MOD_RES (397)..(397): Selenocysteine
  MOD_RES (408)..(408): Selenocysteine
  MOD_RES (428)..(428): Selenocysteine
  MOD_RES (464)..(464): Selenocysteine
  MOD_RES (473)..(473): Selenocysteine
  MOD_RES (562)..(562): Selenocysteine
  MOD_RES (577)..(577): Selenocysteine
  MOD_RES (650)..(650): Selenocysteine
  MOD_RES (675)..(675): Selenocysteine
  MOD_RES (684)..(684): Selenocysteine
  MOD_RES (702)..(703): Selenocysteine
  MOD_RES (719)..(719): Selenocysteine
  MOD_RES (731)..(731): Selenocysteine
  MOD_RES (738)..(738): Selenocysteine
MLRGGRRGQLGWHSWAAGPGSLLAWLILASAGAAPCPDACCPHGSSGLRCXRDGALDSLHHLPGAENLXELYIENQQHLQHLELRDLRGLGELRNLXIVKSGLRFVAPDAFHFXPRLSRLNLSFNALESLSWKXVQGLSLQELVLSGNPLHCSCALRWLQRWEEEGLGGVPEQKLQCHGQGPLAHMPNASCGVPXLKVQVPNASVDVGDDVLLRCQVEGRGLEQAGWILXELEQSAXVMKSGGLPSLGLXLANVXSDLNRKNVXCWAENDVGRAEVSVQVNVSFPASVQLHXAVEMHHWCIPFSVDGQPAPSLRWLFNGSVLNEXSFIFXEFLEPAANEXVRHGCLRLNQPXHVNNGNYXLLAANPFGQASASIMAAFMDNPFEFNPEDPIPDXNSXSGDPVEKKDEXPFGVSVAVGLAVFACLFLSXLLLVLNKCGRRNKFGINRPAVLAPEDGLAMSLHFMXLGGSSLSPXEGKGSGLQGHIIENPQYFSDASPSGVHHIKRRDIVLKWELGEGAFGKVFLAECHNLLPEQDKMLVAVKALKEASESARQDFQREAELLXMLQHQHIVRFFGVCXEGRPLLMVFEYMRHGDLNRFLRSHGPDAKLLAGGEDVAPGPLGLGQLLAVASQVAAGMVYLAGLHFVHRDLAXRNCLVGQGLVVKIGDFGMSRDIYSXDYYRVGGRXMLPIRWMPPESILYRKFXXESDVWSFGVVLWEIFXYGKQPWYQLSNXEAIDCIXQGRELERPRACPPEVYAIMRGCWQREPQQRHSIKDVHARLQALAQAPPVYLDVLG

SEQ ID NO: 18432 - protein, 796 aa, Homo sapiens
  MOD_RES (51)..(51): Selenocysteine
  MOD_RES (69)..(69): Selenocysteine
  MOD_RES (97)..(97): Selenocysteine
  MOD_RES (114)..(114): Selenocysteine
  MOD_RES (134)..(134): Selenocysteine
  MOD_RES (195)..(195): Selenocysteine
  MOD_RES (230)..(230): Selenocysteine
  MOD_RES (237)..(237): Selenocysteine
  MOD_RES (250)..(250): Selenocysteine
  MOD_RES (255)..(255): Selenocysteine
  MOD_RES (264)..(264): Selenocysteine
  MOD_RES (292)..(292): Selenocysteine
  MOD_RES (325)..(325): Selenocysteine
  MOD_RES (330)..(330): Selenocysteine
  MOD_RES (340)..(340): Selenocysteine
  MOD_RES (352)..(352): Selenocysteine
  MOD_RES (360)..(360): Selenocysteine
  MOD_RES (400)..(400): Selenocysteine
  MOD_RES (403)..(403): Selenocysteine
  MOD_RES (414)..(414): Selenocysteine
  MOD_RES (434)..(434): Selenocysteine
  MOD_RES (470)..(470): Selenocysteine
  MOD_RES (479)..(479): Selenocysteine
  MOD_RES (565)..(565): Selenocysteine
  MOD_RES (580)..(580): Selenocysteine
  MOD_RES (653)..(653): Selenocysteine
  MOD_RES (678)..(678): Selenocysteine
  MOD_RES (687)..(687): Selenocysteine
  MOD_RES (705)..(706): Selenocysteine
  MOD_RES (722)..(722): Selenocysteine
  MOD_RES (734)..(734): Selenocysteine
  MOD_RES (741)..(741): Selenocysteine
MLRGGRRGQLGWHSWAAGPGSLLAWLILASAGAAPCPDACCPHGSSGLRCXRDGALDSLHHLPGAENLXELYIENQQHLQHLELRDLRGLGELRNLXIVKSGLRFVAPDAFHFXPRLSRLNLSFNALESLSWKXVQGLSLQELVLSGNPLHCSCALRWLQRWEEEGLGGVPEQKLQCHGQGPLAHMPNASCGVPXLKVQVPNASVDVGDDVLLRCQVEGRGLEQAGWILXELEQSAXVMKSGGLPSLGLXLANVXSDLNRKNVXCWAENDVGRAEVSVQVNVSFPASVQLHXAVEMHHWCIPFSVDGQPAPSLRWLFNGSVLNEXSFIFXEFLEPAANEXVRHGCLRLNQPXHVNNGNYXLLAANPFGQASASIMAAFMDNPFEFNPEDPIPVSFSPVDXNSXSGDPVEKKDEXPFGVSVAVGLAVFACLFLSXLLLVLNKCGRRNKFGINRPAVLAPEDGLAMSLHFMXLGGSSLSPXEGKGSGLQGHIIENPQYFSDACVHHIKRRDIVLKWELGEGAFGKVFLAECHNLLPEQDKMLVAVKALKEASESARQDFQREAELLXMLQHQHIVRFFGVCXEGRPLLMVFEYMRHGDLNRFLRSHGPDAKLLAGGEDVAPGPLGLGQLLAVASQVAAGMVYLAGLHFVHRDLAXRNCLVGQGLVVKIGDFGMSRDIYSXDYYRVGGRXMLPIRWMPPESILYRKFXXESDVWSFGVVLWEIFXYGKQPWYQLSNXEAIDCIXQGRELERPRACPPEVYAIMRGCWQREPQQRHSIKDVHARLQALAQAPPVYLDVLG

SEQ ID NO: 18433 - protein, 477 aa, Homo sapiens
  MOD_RES (34)..(34): Selenocysteine
  MOD_RES (69)..(69): Selenocysteine
  MOD_RES (97)..(97): Selenocysteine
  MOD_RES (123)..(123): Selenocysteine
  MOD_RES (128)..(128): Selenocysteine
  MOD_RES (151)..(151): Selenocysteine
  MOD_RES (161)..(161): Selenocysteine
  MOD_RES (171)..(171): Selenocysteine
  MOD_RES (207)..(207): Selenocysteine
  MOD_RES (215)..(215): Selenocysteine
  MOD_RES (243)..(243): Selenocysteine
  MOD_RES (246)..(246): Selenocysteine
  MOD_RES (253)..(253): Selenocysteine
  MOD_RES (282)..(282): Selenocysteine
  MOD_RES (288)..(288): Selenocysteine
  MOD_RES (290)..(290): Selenocysteine
  MOD_RES (296)..(296): Selenocysteine
  MOD_RES (306)..(306): Selenocysteine
  MOD_RES (332)..(332): Selenocysteine
  MOD_RES (337)..(337): Selenocysteine
  MOD_RES (340)..(340): Selenocysteine
  MOD_RES (352)..(352): Selenocysteine
  MOD_RES (360)..(360): Selenocysteine
  MOD_RES (402)..(402): Selenocysteine
  MOD_RES (410)..(411): Selenocysteine
  MOD_RES (420)..(420): Selenocysteine
  MOD_RES (423)..(423): Selenocysteine
  MOD_RES (426)..(426): Selenocysteine
MSSWIRWHGPAMARLWGFCWLVVGFWRAAFACPXSCKCSASRIWCSDPSPGIVAFPRLEPNSVDPENIXEIFIANQKRLEIINEDDVEAYVGLRNLXIVDSGLKFVAHKAFLKNSNLQHINFXRNKLXSLSRKHFRHLDLSELILVGNPFXCSCDIMWIKXLQEAKSSPDXQDLYCLNESSKNIPLANLQIPNCGLPSANLAAPNLXVEEGKSIXLSCSVAGDPVPNMYWDVGNLVSKHMNEXSHXQGSLRIXNISSDDSGKQISCVAENLVGEDQDSVNLXVHFAPXIXFLESPXSDHHWCIPFXVKGNPKPALQWFYNGAILNESKYICXKIHVXNHXEYHGCLQLDNPXHMNNGDYXLIAKNEYGKDEKQISAHFMGWPGIDDGANPNYPDVIYEDYGXAANDIGDXXNRSNEIPSXDVXDKXGREHLSVYAVVVIASVVGFCLLVMLFLLKLARHSKFGMKGFVLFHKIPLDG

SEQ ID NO: 18434 - protein, 537 aa, Homo sapiens
  MOD_RES (34)..(34): Selenocysteine
  MOD_RES (69)..(69): Selenocysteine
  MOD_RES (97)..(97): Selenocysteine
  MOD_RES (123)..(123): Selenocysteine
  MOD_RES (128)..(128): Selenocysteine
  MOD_RES (151)..(151): Selenocysteine
  MOD_RES (161)..(161): Selenocysteine
  MOD_RES (171)..(171): Selenocysteine
  MOD_RES (207)..(207): Selenocysteine
  MOD_RES (215)..(215): Selenocysteine
  MOD_RES (243)..(243): Selenocysteine
  MOD_RES (246)..(246): Selenocysteine
  MOD_RES (253)..(253): Selenocysteine
  MOD_RES (282)..(282): Selenocysteine
  MOD_RES (288)..(288): Selenocysteine
  MOD_RES (290)..(290): Selenocysteine
  MOD_RES (296)..(296): Selenocysteine
  MOD_RES (306)..(306): Selenocysteine
  MOD_RES (332)..(332): Selenocysteine
  MOD_RES (337)..(337): Selenocysteine
  MOD_RES (340)..(340): Selenocysteine
  MOD_RES (352)..(352): Selenocysteine
  MOD_RES (360)..(360): Selenocysteine
  MOD_RES (402)..(402): Selenocysteine
  MOD_RES (410)..(411): Selenocysteine
  MOD_RES (420)..(420): Selenocysteine
  MOD_RES (423)..(423): Selenocysteine
  MOD_RES (426)..(426): Selenocysteine
  MOD_RES (490)..(490): Selenocysteine
  MOD_RES (506)..(506): Selenocysteine
  MOD_RES (520)..(520): Selenocysteine
  MOD_RES (528)..(528): Selenocysteine
  MOD_RES (536)..(536): Selenocysteine
MSSWIRWHGPAMARLWGFCWLVVGFWRAAFACPXSCKCSASRIWCSDPSPGIVAFPRLEPNSVDPENIXEIFIANQKRLEIINEDDVEAYVGLRNLXIVDSGLKFVAHKAFLKNSNLQHINFXRNKLXSLSRKHFRHLDLSELILVGNPFXCSCDIMWIKXLQEAKSSPDXQDLYCLNESSKNIPLANLQIPNCGLPSANLAAPNLXVEEGKSIXLSCSVAGDPVPNMYWDVGNLVSKHMNEXSHXQGSLRIXNISSDDSGKQISCVAENLVGEDQDSVNLXVHFAPXIXFLESPXSDHHWCIPFXVKGNPKPALQWFYNGAILNESKYICXKIHVXNHXEYHGCLQLDNPXHMNNGDYXLIAKNEYGKDEKQISAHFMGWPGIDDGANPNYPDVIYEDYGXAANDIGDXXNRSNEIPSXDVXDKXGREHLSVYAVVVIASVVGFCLLVMLFLLKLARHSKFGMKGPASVISNDDDSASPLHHISNGSNXPSSSEGGPDAVIIGMXKIPVIENPQYFGIXNSQLKPDXWPRGSPKXA

SEQ ID NO: 18435 - protein, 553 aa, Homo sapiens
  MOD_RES (34)..(34): Selenocysteine
  MOD_RES (69)..(69): Selenocysteine
  MOD_RES (97)..(97): Selenocysteine
  MOD_RES (123)..(123): Selenocysteine
  MOD_RES (128)..(128): Selenocysteine
  MOD_RES (151)..(151): Selenocysteine
  MOD_RES (161)..(161): Selenocysteine
  MOD_RES (171)..(171): Selenocysteine
  MOD_RES (207)..(207): Selenocysteine
  MOD_RES (215)..(215): Selenocysteine
  MOD_RES (243)..(243): Selenocysteine
  MOD_RES (246)..(246): Selenocysteine
  MOD_RES (253)..(253): Selenocysteine
  MOD_RES (282)..(282): Selenocysteine
  MOD_RES (288)..(288): Selenocysteine
  MOD_RES (290)..(290): Selenocysteine
  MOD_RES (296)..(296): Selenocysteine
  MOD_RES (306)..(306): Selenocysteine
  MOD_RES (332)..(332): Selenocysteine
  MOD_RES (337)..(337): Selenocysteine
  MOD_RES (340)..(340): Selenocysteine
  MOD_RES (352)..(352): Selenocysteine
  MOD_RES (360)..(360): Selenocysteine
  MOD_RES (402)..(402): Selenocysteine
  MOD_RES (410)..(411): Selenocysteine
  MOD_RES (420)..(420): Selenocysteine
  MOD_RES (423)..(423): Selenocysteine
  MOD_RES (426)..(426): Selenocysteine
  MOD_RES (506)..(506): Selenocysteine
  MOD_RES (522)..(522): Selenocysteine
  MOD_RES (536)..(536): Selenocysteine
  MOD_RES (544)..(544): Selenocysteine
  MOD_RES (552)..(552): Selenocysteine
MSSWIRWHGPAMARLWGFCWLVVGFWRAAFACPXSCKCSASRIWCSDPSPGIVAFPRLEPNSVDPENIXEIFIANQKRLEIINEDDVEAYVGLRNLXIVDSGLKFVAHKAFLKNSNLQHINFXRNKLXSLSRKHFRHLDLSELILVGNPFXCSCDIMWIKXLQEAKSSPDXQDLYCLNESSKNIPLANLQIPNCGLPSANLAAPNLXVEEGKSIXLSCSVAGDPVPNMYWDVGNLVSKHMNEXSHXQGSLRIXNISSDDSGKQISCVAENLVGEDQDSVNLXVHFAPXIXFLESPXSDHHWCIPFXVKGNPKPALQWFYNGAILNESKYICXKIHVXNHXEYHGCLQLDNPXHMNNGDYXLIAKNEYGKDEKQISAHFMGWPGIDDGANPNYPDVIYEDYGXAANDIGDXXNRSNEIPSXDVXDKXGREHLSVYAVVVIASVVGFCLLVMLFLLKLARHSKFGMKDFSWFGFGKVKSRQGVGPASVISNDDDSASPLHHISNGSNXPSSSEGGPDAVIIGMXKIPVIENPQYFGIXNSQLKPDXWPRGSPKXA

SEQ ID NO: 18436 - protein, 822 aa, Homo sapiens
  MOD_RES (34)..(34): Selenocysteine
  MOD_RES (69)..(69): Selenocysteine
  MOD_RES (97)..(97): Selenocysteine
  MOD_RES (123)..(123): Selenocysteine
  MOD_RES (128)..(128): Selenocysteine
  MOD_RES (151)..(151): Selenocysteine
  MOD_RES (161)..(161): Selenocysteine
  MOD_RES (171)..(171): Selenocysteine
  MOD_RES (207)..(207): Selenocysteine
  MOD_RES (215)..(215): Selenocysteine
  MOD_RES (243)..(243): Selenocysteine
  MOD_RES (246)..(246): Selenocysteine
  MOD_RES (253)..(253): Selenocysteine
  MOD_RES (282)..(282): Selenocysteine
  MOD_RES (288)..(288): Selenocysteine
  MOD_RES (290)..(290): Selenocysteine
  MOD_RES (296)..(296): Selenocysteine
  MOD_RES (306)..(306): Selenocysteine
  MOD_RES (332)..(332): Selenocysteine
  MOD_RES (337)..(337): Selenocysteine
  MOD_RES (340)..(340): Selenocysteine
  MOD_RES (352)..(352): Selenocysteine
  MOD_RES (360)..(360): Selenocysteine
  MOD_RES (402)..(402): Selenocysteine
  MOD_RES (410)..(411): Selenocysteine
  MOD_RES (420)..(420): Selenocysteine
  MOD_RES (423)..(423): Selenocysteine
  MOD_RES (426)..(426): Selenocysteine
  MOD_RES (490)..(490): Selenocysteine
  MOD_RES (506)..(506): Selenocysteine
  MOD_RES (520)..(520): Selenocysteine
  MOD_RES (528)..(528): Selenocysteine
  MOD_RES (573)..(573): Selenocysteine
  MOD_RES (593)..(593): Selenocysteine
  MOD_RES (646)..(646): Selenocysteine
  MOD_RES (649)..(649): Selenocysteine
  MOD_RES (679)..(679): Selenocysteine
  MOD_RES (704)..(704): Selenocysteine
  MOD_RES (713)..(713): Selenocysteine
  MOD_RES (731)..(732): Selenocysteine
  MOD_RES (748)..(748): Selenocysteine
  MOD_RES (767)..(767): Selenocysteine
  MOD_RES (777)..(777): Selenocysteine
  MOD_RES (805)..(805): Selenocysteine
MSSWIRWHGPAMARLWGFCWLVVGFWRAAFACPXSCKCSASRIWCSDPSPGIVAFPRLEPNSVDPENIXEIFIANQKRLEIINEDDVEAYVGLRNLXIVDSGLKFVAHKAFLKNSNLQHINFXRNKLXSLSRKHFRHLDLSELILVGNPFXCSCDIMWIKXLQEAKSSPDXQDLYCLNESSKNIPLANLQIPNCGLPSANLAAPNLXVEEGKSIXLSCSVAGDPVPNMYWDVGNLVSKHMNEXSHXQGSLRIXNISSDDSGKQISCVAENLVGEDQDSVNLXVHFAPXIXFLESPXSDHHWCIPFXVKGNPKPALQWFYNGAILNESKYICXKIHVXNHXEYHGCLQLDNPXHMNNGDYXLIAKNEYGKDEKQISAHFMGWPGIDDGANPNYPDVIYEDYGXAANDIGDXXNRSNEIPSXDVXDKXGREHLSVYAVVVIASVVGFCLLVMLFLLKLARHSKFGMKGPASVISNDDDSASPLHHISNGSNXPSSSEGGPDAVIIGMXKIPVIENPQYFGIXNSQLKPDXFVQHIKRHNIVLKRELGEGAFGKVFLAECYNLCPEQDKILVAVKXLKDASDNARKDFHREAELLXNLQHEHIVKFYGVCVEGDPLIMVFEYMKHGDLNKFLRAHGPDAVLMAEGNPPXELXQSQMLHIAQQIAAGMVYLASQHFVHRDLAXRNCLVGENLLVKIGDFGMSRDVYSXDYYRVGGHXMLPIRWMPPESIMYRKFXXESDVWSLGVVLWEIFXYGKQPWYQLSNNEVIECIXQGRVLQRPRXCPQEVYELMLGCWQREPHMRKNIKGIHXLLQNLAKASPVYLDILG

SEQ ID NO: 18437 - protein, 838 aa, Homo sapiens
  MOD_RES (34)..(34): Selenocysteine
  MOD_RES (69)..(69): Selenocysteine
  MOD_RES (97)..(97): Selenocysteine
  MOD_RES (123)..(123): Selenocysteine
  MOD_RES (128)..(128): Selenocysteine
  MOD_RES (151)..(151): Selenocysteine
  MOD_RES (161)..(161): Selenocysteine
  MOD_RES (171)..(171): Selenocysteine
  MOD_RES (207)..(207): Selenocysteine
  MOD_RES (215)..(215): Selenocysteine
  MOD_RES (243)..(243): Selenocysteine
  MOD_RES (246)..(246): Selenocysteine
  MOD_RES (253)..(253): Selenocysteine
  MOD_RES (282)..(282): Selenocysteine
  MOD_RES (288)..(288): Selenocysteine
  MOD_RES (290)..(290): Selenocysteine
  MOD_RES (296)..(296): Selenocysteine
  MOD_RES (306)..(306): Selenocysteine
  MOD_RES (332)..(332): Selenocysteine
  MOD_RES (337)..(337): Selenocysteine
  MOD_RES (340)..(340): Selenocysteine
  MOD_RES (352)..(352): Selenocysteine
  MOD_RES (360)..(360): Selenocysteine
  MOD_RES (402)..(402): Selenocysteine
  MOD_RES (410)..(411): Selenocysteine
  MOD_RES (420)..(420): Selenocysteine
  MOD_RES (423)..(423): Selenocysteine
  MOD_RES (426)..(426): Selenocysteine
  MOD_RES (506)..(506): Selenocysteine
  MOD_RES (522)..(522): Selenocysteine
  MOD_RES (536)..(536): Selenocysteine
  MOD_RES (544)..(544): Selenocysteine
  MOD_RES (589)..(589): Selenocysteine
  MOD_RES (609)..(609): Selenocysteine
  MOD_RES (662)..(662): Selenocysteine
  MOD_RES (665)..(665): Selenocysteine
  MOD_RES (695)..(695): Selenocysteine
  MOD_RES (720)..(720): Selenocysteine
  MOD_RES (729)..(729): Selenocysteine
  MOD_RES (747)..(748): Selenocysteine
  MOD_RES (764)..(764): Selenocysteine
  MOD_RES (783)..(783): Selenocysteine
  MOD_RES (793)..(793): Selenocysteine
  MOD_RES (821)..(821): Selenocysteine
MSSWIRWHGPAMARLWGFCWLVVGFWRAAFACPXSCKCSASRIWCSDPSPGIVAFPRLEPNSVDPENIXEIFIANQKRLEIINEDDVEAYVGLRNLXIVDSGLKFVAHKAFLKNSNLQHINFXRNKLXSLSRKHFRHLDLSELILVGNPFXCSCDIMWIKXLQEAKSSPDXQDLYCLNESSKNIPLANLQIPNCGLPSANLAAPNLXVEEGKSIXLSCSVAGDPVPNMYWDVGNLVSKHMNEXSHXQGSLRIXNISSDDSGKQISCVAENLVGEDQDSVNLXVHFAPXIXFLESPXSDHHWCIPFXVKGNPKPALQWFYNGAILNESKYICXKIHVXNHXEYHGCLQLDNPXHMNNGDYXLIAKNEYGKDEKQISAHFMGWPGIDDGANPNYPDVIYEDYGXAANDIGDXXNRSNEIPSXDVXDKXGREHLSVYAVVVIASVVGFCLLVMLFLLKLARHSKFGMKDFSWFGFGKVKSRQGVGPASVISNDDDSASPLHHISNGSNXPSSSEGGPDAVIIGMXKIPVIENPQYFGIXNSQLKPDXFVQHIKRHNIVLKRELGEGAFGKVFLAECYNLCPEQDKILVAVKXLKDASDNARKDFHREAELLXNLQHEHIVKFYGVCVEGDPLIMVFEYMKHGDLNKFLRAHGPDAVLMAEGNPPXELXQSQMLHIAQQIAAGMVYLASQHFVHRDLAXRNCLVGENLLVKIGDFGMSRDVYSXDYYRVGGHXMLPIRWMPPESIMYRKFXXESDVWSLGVVLWEIFXYGKQPWYQLSNNEVIECIXQGRVLQRPRXCPQEVYELMLGCWQREPHMRKNIKGIHXLLQNLAKASPVYLDILG

SEQ ID NO: 18438 - protein, 612 aa, Homo sapiens
  MOD_RES (41)..(41): Selenocysteine
  MOD_RES (74)..(74): Selenocysteine
  MOD_RES (81)..(81): Selenocysteine
  MOD_RES (93)..(93): Selenocysteine
  MOD_RES (103)..(103): Selenocysteine
  MOD_RES (109)..(109): Selenocysteine
  MOD_RES (140)..(141): Selenocysteine
  MOD_RES (149)..(149): Selenocysteine
  MOD_RES (220)..(220): Selenocysteine
  MOD_RES (230)..(230): Selenocysteine
  MOD_RES (246)..(246): Selenocysteine
  MOD_RES (253)..(253): Selenocysteine
  MOD_RES (256)..(256): Selenocysteine
  MOD_RES (261)..(261): Selenocysteine
  MOD_RES (269)..(269): Selenocysteine
  MOD_RES (274)..(274): Selenocysteine
  MOD_RES (281)..(281): Selenocysteine
  MOD_RES (283)..(283): Selenocysteine
  MOD_RES (300)..(300): Selenocysteine
  MOD_RES (332)..(332): Selenocysteine
  MOD_RES (369)..(369): Selenocysteine
  MOD_RES (377)..(377): Selenocysteine
  MOD_RES (386)..(386): Selenocysteine
  MOD_RES (390)..(390): Selenocysteine
  MOD_RES (404)..(404): Selenocysteine
  MOD_RES (416)..(416): Selenocysteine
  MOD_RES (420)..(420): Selenocysteine
  MOD_RES (422)..(422): Selenocysteine
  MOD_RES (429)..(429): Selenocysteine
  MOD_RES (489)..(490): Selenocysteine
  MOD_RES (500)..(500): Selenocysteine
  MOD_RES (506)..(506): Selenocysteine
  MOD_RES (528)..(528): Selenocysteine
  MOD_RES (553)..(553): Selenocysteine
MDVSLCPAKCSFWRIFLLGSVWLDYVGSVLACPANCVCSKXEINCRRPDDGNLFPLLEGQDSGNSNGNASINIXDISRNIXSIHIENWRSLHXLNAVDMELYXGLQKLXIKNSGLRSIQPRAFAKNPHLRYINLSSNRLXXLSWQLFQXLSLRELQLEQNFFNCSCDIRWMQLWQEQGEAKLNSQNLYCINADGSQLPLFRMNISQCDLPEISVSHVNLXVREGDNAVIXCNGSGSPLPDVDWIVXGLQSINXHQXNLNWXNVHAINLXLVNVXSEDNGFXLXCIAENVVGMSNASVALXVYYPPRVVSLEEPELRLEHCIEFVVRGNPPPXLHWLHNGQPLRESKIIHVEYYQEGEISEGCLLFNKPXHYNNGNYXLIAKNPLGXANQXINGHFLKEPFPESXDNFILFDEVSPXPPIXVXHKPEEDXFGVSIAVGLAAFACVLLVVLFVMINKYGRRSKFGMKGPVAVISGEEDSASPLHHINHGIXXPSSLDAGPDXVVIGMXRIPVIENPQYFRQGHNCHKPDXWVFSNIDNHGILNLKDNRDHLVPSXHYIYEEPEVQSGEVSYPRSHGFREIMLNPISLPGHSKPLNHGIYVEDVNVYFSKGRHGF

SEQ ID NO: 18439 - protein, 705 aa, Homo sapiens
  MOD_RES (41)..(41): Selenocysteine
  MOD_RES (74)..(74): Selenocysteine
  MOD_RES (81)..(81): Selenocysteine
  MOD_RES (93)..(93): Selenocysteine
  MOD_RES (103)..(103): Selenocysteine
  MOD_RES (109)..(109): Selenocysteine
  MOD_RES (140)..(141): Selenocysteine
  MOD_RES (149)..(149): Selenocysteine
  MOD_RES (220)..(220): Selenocysteine
  MOD_RES (230)..(230): Selenocysteine
  MOD_RES (246)..(246): Selenocysteine
  MOD_RES (253)..(253): Selenocysteine
  MOD_RES (256)..(256): Selenocysteine
  MOD_RES (261)..(261): Selenocysteine
  MOD_RES (269)..(269): Selenocysteine
  MOD_RES (274)..(274): Selenocysteine
  MOD_RES (281)..(281): Selenocysteine
  MOD_RES (283)..(283): Selenocysteine
  MOD_RES (300)..(300): Selenocysteine
  MOD_RES (332)..(332): Selenocysteine
  MOD_RES (369)..(369): Selenocysteine
  MOD_RES (377)..(377): Selenocysteine
  MOD_RES (386)..(386): Selenocysteine
  MOD_RES (390)..(390): Selenocysteine
  MOD_RES (408)..(408): Selenocysteine
  MOD_RES (412)..(412): Selenocysteine
  MOD_RES (414)..(414): Selenocysteine
  MOD_RES (421)..(421): Selenocysteine
  MOD_RES (481)..(482): Selenocysteine
  MOD_RES (492)..(492): Selenocysteine
  MOD_RES (498)..(498): Selenocysteine
  MOD_RES (520)..(520): Selenocysteine
  MOD_RES (555)..(555): Selenocysteine
  MOD_RES (570)..(570): Selenocysteine
  MOD_RES (585)..(585): Selenocysteine
  MOD_RES (674)..(674): Selenocysteine
  MOD_RES (699)..(699): Selenocysteine
MDVSLCPAKCSFWRIFLLGSVWLDYVGSVLACPANCVCSKXEINCRRPDDGNLFPLLEGQDSGNSNGNASINIXDISRNIXSIHIENWRSLHXLNAVDMELYXGLQKLXIKNSGLRSIQPRAFAKNPHLRYINLSSNRLXXLSWQLFQXLSLRELQLEQNFFNCSCDIRWMQLWQEQGEAKLNSQNLYCINADGSQLPLFRMNISQCDLPEISVSHVNLXVREGDNAVIXCNGSGSPLPDVDWIVXGLQSINXHQXNLNWXNVHAINLXLVNVXSEDNGFXLXCIAENVVGMSNASVALXVYYPPRVVSLEEPELRLEHCIEFVVRGNPPPXLHWLHNGQPLRESKIIHVEYYQEGEISEGCLLFNKPXHYNNGNYXLIAKNPLGXANQXINGHFLKEPFPVDEVSPXPPIXVXHKPEEDXFGVSIAVGLAAFACVLLVVLFVMINKYGRRSKFGMKGPVAVISGEEDSASPLHHINHGIXXPSSLDAGPDXVVIGMXRIPVIENPQYFRQGHNCHKPDXYVQHIKRRDIVLKRELGEGAFGKVFLAECYNLSPXKDKMLVAVKALKDPXLAARKDFQREAELLXNLQHEHIVKFYGVCGDGDPLIMVFEYMKHGDLNKFLRAHGPDAMILVDGQPRQAKGELGLSQMLHIASQIASGMVYLASQHFVHRDLAXRNCLVGANLLVKIGDFGMSRDVYSXDYYRVK

SEQ ID NO: 18440 - protein, 817 aa, Homo sapiens
  MOD_RES (41)..(41): Selenocysteine
  MOD_RES (74)..(74): Selenocysteine
  MOD_RES (81)..(81): Selenocysteine
  MOD_RES (93)..(93): Selenocysteine
  MOD_RES (103)..(103): Selenocysteine
  MOD_RES (109)..(109): Selenocysteine
  MOD_RES (140)..(141): Selenocysteine
  MOD_RES (149)..(149): Selenocysteine
  MOD_RES (220)..(220): Selenocysteine
  MOD_RES (230)..(230): Selenocysteine
  MOD_RES (246)..(246): Selenocysteine
  MOD_RES (253)..(253): Selenocysteine
  MOD_RES (256)..(256): Selenocysteine
  MOD_RES (261)..(261): Selenocysteine
  MOD_RES (269)..(269): Selenocysteine
  MOD_RES (274)..(274): Selenocysteine
  MOD_RES (281)..(281): Selenocysteine
  MOD_RES (283)..(283): Selenocysteine
  MOD_RES (300)..(300): Selenocysteine
  MOD_RES (332)..(332): Selenocysteine
  MOD_RES (369)..(369): Selenocysteine
  MOD_RES (377)..(377): Selenocysteine
  MOD_RES (386)..(386): Selenocysteine
  MOD_RES (390)..(390): Selenocysteine
  MOD_RES (408)..(408): Selenocysteine
  MOD_RES (412)..(412): Selenocysteine
  MOD_RES (414)..(414): Selenocysteine
  MOD_RES (421)..(421): Selenocysteine
  MOD_RES (481)..(482): Selenocysteine
  MOD_RES (492)..(492): Selenocysteine
  MOD_RES (498)..(498): Selenocysteine
  MOD_RES (520)..(520): Selenocysteine
  MOD_RES (555)..(555): Selenocysteine
  MOD_RES (570)..(570): Selenocysteine
  MOD_RES (585)..(585): Selenocysteine
  MOD_RES (674)..(674): Selenocysteine
  MOD_RES (699)..(699): Selenocysteine
  MOD_RES (708)..(708): Selenocysteine
  MOD_RES (726)..(727): Selenocysteine
  MOD_RES (743)..(743): Selenocysteine
  MOD_RES (755)..(755): Selenocysteine
  MOD_RES (762)..(762): Selenocysteine
  MOD_RES (809)..(809): Selenocysteine
MDVSLCPAKCSFWRIFLLGSVWLDYVGSVLACPANCVCSKXEINCRRPDDGNLFPLLEGQDSGNSNGNASINIXDISRNIXSIHIENWRSLHXLNAVDMELYXGLQKLXIKNSGLRSIQPRAFAKNPHLRYINLSSNRLXXLSWQLFQXLSLRELQLEQNFFNCSCDIRWMQLWQEQGEAKLNSQNLYCINADGSQLPLFRMNISQCDLPEISVSHVNLXVREGDNAVIXCNGSGSPLPDVDWIVXGLQSINXHQXNLNWXNVHAINLXLVNVXSEDNGFXLXCIAENVVGMSNASVALXVYYPPRVVSLEEPELRLEHCIEFVVRGNPPPXLHWLHNGQPLRESKIIHVEYYQEGEISEGCLLFNKPXHYNNGNYXLIAKNPLGXANQXINGHFLKEPFPVDEVSPXPPIXVXHKPEEDXFGVSIAVGLAAFACVLLVVLFVMINKYGRRSKFGMKGPVAVISGEEDSASPLHHINHGIXXPSSLDAGPDXVVIGMXRIPVIENPQYFRQGHNCHKPDXYVQHIKRRDIVLKRELGEGAFGKVFLAECYNLSPXKDKMLVAVKALKDPXLAARKDFQREAELLXNLQHEHIVKFYGVCGDGDPLIMVFEYMKHGDLNKFLRAHGPDAMILVDGQPRQAKGELGLSQMLHIASQIASGMVYLASQHFVHRDLAXRNCLVGANLLVKIGDFGMSRDVYSXDYYRVGGHXMLPIRWMPPESIMYRKFXXESDVWSFGVILWEIFXYGKQPWFQLSNXEVIECIXQGRVLERPRVCPKEVYDVMLGCWQREPQQRLNIKEIYKILHALGKAXPIYLDILG

SEQ ID NO: 18441 - protein, 825 aa, Homo sapiens
  MOD_RES (41)..(41): Selenocysteine
  MOD_RES (74)..(74): Selenocysteine
  MOD_RES (81)..(81): Selenocysteine
  MOD_RES (93)..(93): Selenocysteine
  MOD_RES (103)..(103): Selenocysteine
  MOD_RES (109)..(109): Selenocysteine
  MOD_RES (140)..(141): Selenocysteine
  MOD_RES (149)..(149): Selenocysteine
  MOD_RES (220)..(220): Selenocysteine
  MOD_RES (230)..(230): Selenocysteine
  MOD_RES (246)..(246): Selenocysteine
  MOD_RES (253)..(253): Selenocysteine
  MOD_RES (256)..(256): Selenocysteine
  MOD_RES (261)..(261): Selenocysteine
  MOD_RES (269)..(269): Selenocysteine
  MOD_RES (274)..(274): Selenocysteine
  MOD_RES (281)..(281): Selenocysteine
  MOD_RES (283)..(283): Selenocysteine
  MOD_RES (300)..(300): Selenocysteine
  MOD_RES (332)..(332): Selenocysteine
  MOD_RES (369)..(369): Selenocysteine
  MOD_RES (377)..(377): Selenocysteine
  MOD_RES (386)..(386): Selenocysteine
  MOD_RES (390)..(390): Selenocysteine
  MOD_RES (404)..(404): Selenocysteine
  MOD_RES (416)..(416): Selenocysteine
  MOD_RES (420)..(420): Selenocysteine
  MOD_RES (422)..(422): Selenocysteine
  MOD_RES (429)..(429): Selenocysteine
  MOD_RES (489)..(490): Selenocysteine
  MOD_RES (500)..(500): Selenocysteine
  MOD_RES (506)..(506): Selenocysteine
  MOD_RES (528)..(528): Selenocysteine
  MOD_RES (563)..(563): Selenocysteine
  MOD_RES (578)..(578): Selenocysteine
  MOD_RES (593)..(593): Selenocysteine
  MOD_RES (682)..(682): Selenocysteine
  MOD_RES (707)..(707): Selenocysteine
  MOD_RES (716)..(716): Selenocysteine
  MOD_RES (734)..(735): Selenocysteine
  MOD_RES (751)..(751): Selenocysteine
  MOD_RES (763)..(763): Selenocysteine
  MOD_RES (770)..(770): Selenocysteine
  MOD_RES (817)..(817): Selenocysteine
MDVSLCPAKCSFWRIFLLGSVWLDYVGSVLACPANCVCSKXEINCRRPDDGNLFPLLEGQDSGNSNGNASINIXDISRNIXSIHIENWRSLHXLNAVDMELYXGLQKLXIKNSGLRSIQPRAFAKNPHLRYINLSSNRLXXLSWQLFQXLSLRELQLEQNFFNCSCDIRWMQLWQEQGEAKLNSQNLYCINADGSQLPLFRMNISQCDLPEISVSHVNLXVREGDNAVIXCNGSGSPLPDVDWIVXGLQSINXHQXNLNWXNVHAINLXLVNVXSEDNGFXLXCIAENVVGMSNASVALXVYYPPRVVSLEEPELRLEHCIEFVVRGNPPPXLHWLHNGQPLRESKIIHVEYYQEGEISEGCLLFNKPXHYNNGNYXLIAKNPLGXANQXINGHFLKEPFPESXDNFILFDEVSPXPPIXVXHKPEEDXFGVSIAVGLAAFACVLLVVLFVMINKYGRRSKFGMKGPVAVISGEEDSASPLHHINHGIXXPSSLDAGPDXVVIGMXRIPVIENPQYFRQGHNCHKPDXYVQHIKRRDIVLKRELGEGAFGKVFLAECYNLSPXKDKMLVAVKALKDPXLAARKDFQREAELLXNLQHEHIVKFYGVCGDGDPLIMVFEYMKHGDLNKFLRAHGPDAMILVDGQPRQAKGELGLSQMLHIASQIASGMVYLASQHFVHRDLAXRNCLVGANLLVKIGDFGMSRDVYSXDYYRVGGHXMLPIRWMPPESIMYRKFXXESDVWSFGVILWEIFXYGKQPWFQLSNXEVIECIXQGRVLERPRVCPKEVYDVMLGCWQREPQQRLNIKEIYKILHALGKAXPIYLDILG

SEQ ID NO: 18442 - protein, 831 aa, Homo sapiens
  MOD_RES (41)..(41): Selenocysteine
  MOD_RES (74)..(74): Selenocysteine
  MOD_RES (81)..(81): Selenocysteine
  MOD_RES (93)..(93): Selenocysteine
  MOD_RES (103)..(103): Selenocysteine
  MOD_RES (109)..(109): Selenocysteine
  MOD_RES (140)..(141): Selenocysteine
  MOD_RES (149)..(149): Selenocysteine
  MOD_RES (220)..(220): Selenocysteine
  MOD_RES (230)..(230): Selenocysteine
  MOD_RES (246)..(246): Selenocysteine
  MOD_RES (253)..(253): Selenocysteine
  MOD_RES (256)..(256): Selenocysteine
  MOD_RES (261)..(261): Selenocysteine
  MOD_RES (269)..(269): Selenocysteine
  MOD_RES (274)..(274): Selenocysteine
  MOD_RES (281)..(281): Selenocysteine
  MOD_RES (283)..(283): Selenocysteine
  MOD_RES (300)..(300): Selenocysteine
  MOD_RES (332)..(332): Selenocysteine
  MOD_RES (369)..(369): Selenocysteine
  MOD_RES (377)..(377): Selenocysteine
  MOD_RES (386)..(386): Selenocysteine
  MOD_RES (390)..(390): Selenocysteine
  MOD_RES (408)..(408): Selenocysteine
  MOD_RES (412)..(412): Selenocysteine
  MOD_RES (414)..(414): Selenocysteine
  MOD_RES (421)..(421): Selenocysteine
  MOD_RES (481)..(482): Selenocysteine
  MOD_RES (492)..(492): Selenocysteine
  MOD_RES (498)..(498): Selenocysteine
  MOD_RES (520)..(520): Selenocysteine
  MOD_RES (555)..(555): Selenocysteine
  MOD_RES (570)..(570): Selenocysteine
  MOD_RES (585)..(585): Selenocysteine
  MOD_RES (674)..(674): Selenocysteine
  MOD_RES (699)..(699): Selenocysteine
  MOD_RES (722)..(722): Selenocysteine
  MOD_RES (740)..(741): Selenocysteine
  MOD_RES (757)..(757): Selenocysteine
  MOD_RES (769)..(769): Selenocysteine
  MOD_RES (776)..(776): Selenocysteine
  MOD_RES (823)..(823): Selenocysteine
MDVSLCPAKCSFWRIFLLGSVWLDYVGSVLACPANCVCSKXEINCRRPDDGNLFPLLEGQDSGNSNGNASINIXDISRNIXSIHIENWRSLHXLNAVDMELYXGLQKLXIKNSGLRSIQPRAFAKNPHLRYINLSSNRLXXLSWQLFQXLSLRELQLEQNFFNCSCDIRWMQLWQEQGEAKLNSQNLYCINADGSQLPLFRMNISQCDLPEISVSHVNLXVREGDNAVIXCNGSGSPLPDVDWIVXGLQSINXHQXNLNWXNVHAINLXLVNVXSEDNGFXLXCIAENVVGMSNASVALXVYYPPRVVSLEEPELRLEHCIEFVVRGNPPPXLHWLHNGQPLRESKIIHVEYYQEGEISEGCLLFNKPXHYNNGNYXLIAKNPLGXANQXINGHFLKEPFPVDEVSPXPPIXVXHKPEEDXFGVSIAVGLAAFACVLLVVLFVMINKYGRRSKFGMKGPVAVISGEEDSASPLHHINHGIXXPSSLDAGPDXVVIGMXRIPVIENPQYFRQGHNCHKPDXYVQHIKRRDIVLKRELGEGAFGKVFLAECYNLSPXKDKMLVAVKALKDPXLAARKDFQREAELLXNLQHEHIVKFYGVCGDGDPLIMVFEYMKHGDLNKFLRAHGPDAMILVDGQPRQAKGELGLSQMLHIASQIASGMVYLASQHFVHRDLAXRNCLVGANLLVKIGDFGMSRDVYSXDYYRLFNPSGNDFCIWCEVGGHXMLPIRWMPPESIMYRKFXXESDVWSFGVILWEIFXYGKQPWFQLSNXEVIECIXQGRVLERPRVCPKEVYDVMLGCWQREPQQRLNIKEIYKILHALGKAXPIYLDILG

SEQ ID NO: 18443 - protein, 839 aa, Homo sapiens
  MOD_RES (41)..(41): Selenocysteine
  MOD_RES (74)..(74): Selenocysteine
  MOD_RES (81)..(81): Selenocysteine
  MOD_RES (93)..(93): Selenocysteine
  MOD_RES (103)..(103): Selenocysteine
  MOD_RES (109)..(109): Selenocysteine
  MOD_RES (140)..(141): Selenocysteine
  MOD_RES (149)..(149): Selenocysteine
  MOD_RES (220)..(220): Selenocysteine
  MOD_RES (230)..(230): Selenocysteine
  MOD_RES (246)..(246): Selenocysteine
  MOD_RES (253)..(253): Selenocysteine
  MOD_RES (256)..(256): Selenocysteine
  MOD_RES (261)..(261): Selenocysteine
  MOD_RES (269)..(269): Selenocysteine
  MOD_RES (274)..(274): Selenocysteine
  MOD_RES (281)..(281): Selenocysteine
  MOD_RES (283)..(283): Selenocysteine
  MOD_RES (300)..(300): Selenocysteine
  MOD_RES (332)..(332): Selenocysteine
  MOD_RES (369)..(369): Selenocysteine
  MOD_RES (377)..(377): Selenocysteine
  MOD_RES (386)..(386): Selenocysteine
  MOD_RES (390)..(390): Selenocysteine
  MOD_RES (404)..(404): Selenocysteine
  MOD_RES (416)..(416): Selenocysteine
  MOD_RES (420)..(420): Selenocysteine
  MOD_RES (422)..(422): Selenocysteine
  MOD_RES (429)..(429): Selenocysteine
  MOD_RES (489)..(490): Selenocysteine
  MOD_RES (500)..(500): Selenocysteine
  MOD_RES (506)..(506): Selenocysteine
  MOD_RES (528)..(528): Selenocysteine
  MOD_RES (563)..(563): Selenocysteine
  MOD_RES (578)..(578): Selenocysteine
  MOD_RES (593)..(593): Selenocysteine
  MOD_RES (682)..(682): Selenocysteine
  MOD_RES (707)..(707): Selenocysteine
  MOD_RES (730)..(730): Selenocysteine
  MOD_RES (748)..(749): Selenocysteine
  MOD_RES (765)..(765): Selenocysteine
  MOD_RES (777)..(777): Selenocysteine
  MOD_RES (784)..(784): Selenocysteine
  MOD_RES (831)..(831): Selenocysteine
MDVSLCPAKCSFWRIFLLGSVWLDYVGSVLACPANCVCSKXEINCRRPDDGNLFPLLEGQDSGNSNGNASINIXDISRNIXSIHIENWRSLHXLNAVDMELYXGLQKLXIKNSGLRSIQPRAFAKNPHLRYINLSSNRLXXLSWQLFQXLSLRELQLEQNFFNCSCDIRWMQLWQEQGEAKLNSQNLYCINADGSQLPLFRMNISQCDLPEISVSHVNLXVREGDNAVIXCNGSGSPLPDVDWIVXGLQSINXHQXNLNWXNVHAINLXLVNVXSEDNGFXLXCIAENVVGMSNASVALXVYYPPRVVSLEEPELRLEHCIEFVVRGNPPPXLHWLHNGQPLRESKIIHVEYYQEGEISEGCLLFNKPXHYNNGNYXLIAKNPLGXANQXINGHFLKEPFPESXDNFILFDEVSPXPPIXVXHKPEEDXFGVSIAVGLAAFACVLLVVLFVMINKYGRRSKFGMKGPVAVISGEEDSASPLHHINHGIXXPSSLDAGPDXVVIGMXRIPVIENPQYFRQGHNCHKPDXYVQHIKRRDIVLKRELGEGAFGKVFLAECYNLSPXKDKMLVAVKALKDPXLAARKDFQREAELLXNLQHEHIVKFYGVCGDGDPLIMVFEYMKHGDLNKFLRAHGPDAMILVDGQPRQAKGELGLSQMLHIASQIASGMVYLASQHFVHRDLAXRNCLVGANLLVKIGDFGMSRDVYSXDYYRLFNPSGNDFCIWCEVGGHXMLPIRWMPPESIMYRKFXXESDVWSFGVILWEIFXYGKQPWFQLSNXEVIECIXQGRVLERPRVCPKEVYDVMLGCWQREPQQRLNIKEIYKILHALGKAXPIYLDILG

SEQ ID NO: 18444 - protein, 864 aa, Homo sapiens
  MOD_RES (41)..(41): Selenocysteine
  MOD_RES (74)..(74): Selenocysteine
  MOD_RES (81)..(81): Selenocysteine
  MOD_RES (93)..(93): Selenocysteine
  MOD_RES (103)..(103): Selenocysteine
  MOD_RES (109)..(109): Selenocysteine
  MOD_RES (140)..(141): Selenocysteine
  MOD_RES (149)..(149): Selenocysteine
  MOD_RES (220)..(220): Selenocysteine
  MOD_RES (230)..(230): Selenocysteine
  MOD_RES (246)..(246): Selenocysteine
  MOD_RES (253)..(253): Selenocysteine
  MOD_RES (256)..(256): Selenocysteine
  MOD_RES (261)..(261): Selenocysteine
  MOD_RES (269)..(269): Selenocysteine
  MOD_RES (274)..(274): Selenocysteine
  MOD_RES (281)..(281): Selenocysteine
  MOD_RES (283)..(283): Selenocysteine
  MOD_RES (300)..(300): Selenocysteine
  MOD_RES (332)..(332): Selenocysteine
  MOD_RES (369)..(369): Selenocysteine
  MOD_RES (377)..(377): Selenocysteine
  MOD_RES (386)..(386): Selenocysteine
  MOD_RES (390)..(390): Selenocysteine
  MOD_RES (404)..(404): Selenocysteine
  MOD_RES (416)..(416): Selenocysteine
  MOD_RES (420)..(420): Selenocysteine
  MOD_RES (422)..(422): Selenocysteine
  MOD_RES (429)..(429): Selenocysteine
  MOD_RES (489)..(490): Selenocysteine
  MOD_RES (500)..(500): Selenocysteine
  MOD_RES (506)..(506): Selenocysteine
  MOD_RES (528)..(528): Selenocysteine
  MOD_RES (563)..(563): Selenocysteine
  MOD_RES (578)..(578): Selenocysteine
  MOD_RES (593)..(593): Selenocysteine
  MOD_RES (682)..(682): Selenocysteine
  MOD_RES (707)..(707): Selenocysteine
  MOD_RES (732)..(732): Selenocysteine
  MOD_RES (736)..(736): Selenocysteine
  MOD_RES (755)..(755): Selenocysteine
  MOD_RES (773)..(774): Selenocysteine
  MOD_RES (790)..(790): Selenocysteine
  MOD_RES (802)..(802): Selenocysteine
  MOD_RES (809)..(809): Selenocysteine
  MOD_RES (856)..(856): Selenocysteine
MDVSLCPAKCSFWRIFLLGSVWLDYVGSVLACPANCVCSKXEINCRRPDDGNLFPLLEGQDSGNSNGNASINIXDISRNIXSIHIENWRSLHXLNAVDMELYXGLQKLXIKNSGLRSIQPRAFAKNPHLRYINLSSNRLXXLSWQLFQXLSLRELQLEQNFFNCSCDIRWMQLWQEQGEAKLNSQNLYCINADGSQLPLFRMNISQCDLPEISVSHVNLXVREGDNAVIXCNGSGSPLPDVDWIVXGLQSINXHQXNLNWXNVHAINLXLVNVXSEDNGFXLXCIAENVVGMSNASVALXVYYPPRVVSLEEPELRLEHCIEFVVRGNPPPXLHWLHNGQPLRESKIIHVEYYQEGEISEGCLLFNKPXHYNNGNYXLIAKNPLGXANQXINGHFLKEPFPESXDNFILFDEVSPXPPIXVXHKPEEDXFGVSIAVGLAAFACVLLVVLFVMINKYGRRSKFGMKGPVAVISGEEDSASPLHHINHGIXXPSSLDAGPDXVVIGMXRIPVIENPQYFRQGHNCHKPDXYVQHIKRRDIVLKRELGEGAFGKVFLAECYNLSPXKDKMLVAVKALKDPXLAARKDFQREAELLXNLQHEHIVKFYGVCGDGDPLIMVFEYMKHGDLNKFLRAHGPDAMILVDGQPRQAKGELGLSQMLHIASQIASGMVYLASQHFVHRDLAXRNCLVGANLLVKIGDFGMSRDVYSXDYYREGPCQKGPFSVVWQRQRLAAXAASXLFNPSGNDFCIWCEVGGHXMLPIRWMPPESIMYRKFXXESDVWSFGVILWEIFXYGKQPWFQLSNXEVIECIXQGRVLERPRVCPKEVYDVMLGCWQREPQQRLNIKEIYKILHALGKAXPIYLDILG

SEQ ID NO: 18445 - protein, 90 aa, Homo sapiens
  MOD_RES (5)..(5): Selenocysteine
  MOD_RES (11)..(11): Selenocysteine
  MOD_RES (42)..(43): Selenocysteine
  MOD_RES (51)..(51): Selenocysteine
MELYXGLQKLXIKNSGLRSIQPRAFAKNPHLRYINLSSNRLXXLSWQLFQXLSLRELQLEQNFFNCSCDIRWMQLWQEQGEAKLNSQNLY

SEQ ID NO: 18446 - protein, 617 aa, Homo sapiens
  MOD_RES (5)..(5): Selenocysteine
  MOD_RES (11)..(11): Selenocysteine
  MOD_RES (42)..(43): Selenocysteine
  MOD_RES (51)..(51): Selenocysteine
  MOD_RES (122)..(122): Selenocysteine
  MOD_RES (132)..(132): Selenocysteine
  MOD_RES (148)..(148): Selenocysteine
  MOD_RES (155)..(155): Selenocysteine
  MOD_RES (158)..(158): Selenocysteine
  MOD_RES (163)..(163): Selenocysteine
  MOD_RES (171)..(171): Selenocysteine
  MOD_RES (176)..(176): Selenocysteine
  MOD_RES (183)..(183): Selenocysteine
  MOD_RES (185)..(185): Selenocysteine
  MOD_RES (202)..(202): Selenocysteine
  MOD_RES (234)..(234): Selenocysteine
  MOD_RES (271)..(271): Selenocysteine
  MOD_RES (279)..(279): Selenocysteine
  MOD_RES (288)..(288): Selenocysteine
  MOD_RES (292)..(292): Selenocysteine
  MOD_RES (306)..(306): Selenocysteine
  MOD_RES (318)..(318): Selenocysteine
  MOD_RES (322)..(322): Selenocysteine
  MOD_RES (324)..(324): Selenocysteine
  MOD_RES (331)..(331): Selenocysteine
  MOD_RES (391)..(392): Selenocysteine
  MOD_RES (402)..(402): Selenocysteine
  MOD_RES (408)..(408): Selenocysteine
  MOD_RES (430)..(430): Selenocysteine
  MOD_RES (465)..(465): Selenocysteine
  MOD_RES (480)..(480): Selenocysteine
  MOD_RES (495)..(495): Selenocysteine
  MOD_RES (584)..(584): Selenocysteine
  MOD_RES (609)..(609): Selenocysteine
MELYXGLQKLXIKNSGLRSIQPRAFAKNPHLRYINLSSNRLXXLSWQLFQXLSLRELQLEQNFFNCSCDIRWMQLWQEQGEAKLNSQNLYCINADGSQLPLFRMNISQCDLPEISVSHVNLXVREGDNAVIXCNGSGSPLPDVDWIVXGLQSINXHQXNLNWXNVHAINLXLVNVXSEDNGFXLXCIAENVVGMSNASVALXVYYPPRVVSLEEPELRLEHCIEFVVRGNPPPXLHWLHNGQPLRESKIIHVEYYQEGEISEGCLLFNKPXHYNNGNYXLIAKNPLGXANQXINGHFLKEPFPESXDNFILFDEVSPXPPIXVXHKPEEDXFGVSIAVGLAAFACVLLVVLFVMINKYGRRSKFGMKGPVAVISGEEDSASPLHHINHGIXXPSSLDAGPDXVVIGMXRIPVIENPQYFRQGHNCHKPDXYVQHIKRRDIVLKRELGEGAFGKVFLAECYNLSPXKDKMLVAVKALKDPXLAARKDFQREAELLXNLQHEHIVKFYGVCGDGDPLIMVFEYMKHGDLNKFLRAHGPDAMILVDGQPRQAKGELGLSQMLHIASQIASGMVYLASQHFVHRDLAXRNCLVGANLLVKIGDFGMSRDVYSXDYYRVVQA

SEQ ID NO: 18447 - protein, 49 aa, Homo sapiens
  MOD_RES (1)..(1): Selenocysteine
  MOD_RES (8)..(8): Selenocysteine
  MOD_RES (21)..(21): Selenocysteine
  MOD_RES (27)..(28): Selenocysteine
  MOD_RES (30)..(31): Selenocysteine
  MOD_RES (44)..(44): Selenocysteine
XHKPEEDXFGVPWLSSVVRRXQPAHCXXSXXASPRPRHWMPGPXLWSLA

SEQ ID NO: 18448 - protein, 85 aa, Homo sapiens
  MOD_RES (11)..(11): Selenocysteine
  MOD_RES (20)..(20): Selenocysteine
  MOD_RES (24)..(24): Selenocysteine
  MOD_RES (26)..(26): Selenocysteine
  MOD_RES (33)..(33): Selenocysteine
VGMSNASVALXVYFDEVSPXPPIXVXHKPEEDXFGVSIAVGLAAFACVLLVVLFVMINKYGRRSKFGMKDGLELLAVLLKCDSKQ

SEQ ID NO: 18449 - protein, 146 aa, Homo sapiens
  MOD_RES (1)..(1): Any amino acid
  MOD_RES (79)..(79): Selenocysteine
  MOD_RES (104)..(104): Selenocysteine
  MOD_RES (110)..(110): Selenocysteine
  MOD_RES (127)..(127): Selenocysteine
XGVCGDGDPLIMVFEYMKHGDLNKFLRAHGPDAMILVDGQPRQAKGELGLSQMLHIASQIASGMVYLASQHFVHRDLAXRNCLVGANLLVKIGDFGMSRDVYSXDYYRYXSAKALEECSDLSDRENXVKDSLYELIPPDRLCRHED

SEQ ID NO: 18450 - protein, 170 aa, Homo sapiens
  MOD_RES (39)..(39): Selenocysteine
  MOD_RES (43)..(43): Selenocysteine
  MOD_RES (57)..(57): Selenocysteine
  MOD_RES (75)..(75): Selenocysteine
  MOD_RES (91)..(91): Selenocysteine
  MOD_RES (103)..(103): Selenocysteine
  MOD_RES (129)..(129): Selenocysteine
MMAGMKIQLVCMLLLAFSSWSLCSDSEEEMKALEADFLXNMHXSKISKAHVPSWKMXLLNVCSLVNNLNSPAEEXGEVHEEELVARRKLPXALDGFSLEAMLXIYQLHKICHSRAFQHWELIQEDILDXGNDKNGKEEVIKRKIPYILKRQLYENKPRRPYILKRDSYYY

SEQ ID NO: 18451 - protein, 95 aa, Homo sapiens
  MOD_RES (39)..(39): Selenocysteine
  MOD_RES (43)..(43): Selenocysteine
  MOD_RES (54)..(54): Selenocysteine
MMAGMKIQLVCMLLLAFSSWSLCSDSEEEMKALEADFLXNMHXSKLIQEDILDXGNDKNGKEEVIKRKIPYILKRQLYENKPRRPYILKRDSYYY

SEQ ID NO: 18452 - protein, 418 aa, Homo sapiens
  MOD_RES (10)..(10): Selenocysteine
  MOD_RES (13)..(13): Selenocysteine
  MOD_RES (58)..(58): Selenocysteine
  MOD_RES (67)..(67): Selenocysteine
  MOD_RES (78)..(78): Selenocysteine
  MOD_RES (82)..(82): Selenocysteine
  MOD_RES (84)..(84): Selenocysteine
  MOD_RES (87)..(87): Selenocysteine
  MOD_RES (100)..(100): Selenocysteine
  MOD_RES (115)..(115): Selenocysteine
  MOD_RES (152)..(152): Selenocysteine
  MOD_RES (155)..(155): Selenocysteine
  MOD_RES (178)..(178): Selenocysteine
  MOD_RES (185)..(185): Selenocysteine
  MOD_RES (206)..(206): Selenocysteine
  MOD_RES (225)..(225): Selenocysteine
  MOD_RES (227)..(227): Selenocysteine
  MOD_RES (230)..(230): Selenocysteine
  MOD_RES (232)..(232): Selenocysteine
  MOD_RES (241)..(241): Selenocysteine
  MOD_RES (257)..(257): Selenocysteine
  MOD_RES (264)..(264): Selenocysteine
  MOD_RES (278)..(278): Selenocysteine
  MOD_RES (285)..(285): Selenocysteine
  MOD_RES (335)..(335): Selenocysteine
  MOD_RES (349)..(349): Selenocysteine
  MOD_RES (358)..(358): Selenocysteine
  MOD_RES (378)..(378): Selenocysteine
  MOD_RES (407)..(407): Selenocysteine
  MOD_RES (413)..(413): Selenocysteine
  MOD_RES (416)..(416): Selenocysteine
MRLNSSAPGXPGXPAADPFQRAQAGLEEALLAPGFGNASGNASERVLAAPSSELDVNXDIYSKVLVXAVYLALFVVGXVGNXVXAFXLARKKSLQSLQSXVHYHLGSLALSDLLXLLLAMPVELYNFIWVHHPWAFGDAGCRGYYFLRDACXYAXALNVASLSVERYLAICHPFKAKXLMSRSRXKKFISAIWLASALLAVPMLFXMGEQNRSADGQHAGGLVCXPXIHXAXVKVVIQVNXFMSFIFPMVVISVLNXIIANKLXVMVRQAAEQGQVCXVGGEHSXFSMAIEPGRVQALRHGVRVLRAVVIAFVVCWLPYHVRRLMFCYISDEQWXPFLYDFYHYFYMVXNALFYVSSXINPILYNLVSANFRHIFLAXLACLCPVWRRRRKRPAFSRKADSVSSNHXLSSNAXREXLY

SEQ ID NO: 18453 - protein, 410 aa, Homo sapiens
  MOD_RES (3)..(3): Selenocysteine
  MOD_RES (27)..(27): Selenocysteine
  MOD_RES (36)..(36): Selenocysteine
  MOD_RES (122)..(122): Selenocysteine
  MOD_RES (148)..(148): Selenocysteine
  MOD_RES (152)..(152): Selenocysteine
  MOD_RES (182)..(182): Selenocysteine
  MOD_RES (195)..(195): Selenocysteine
  MOD_RES (201)..(201): Selenocysteine
  MOD_RES (222)..(222): Selenocysteine
  MOD_RES (229)..(229): Selenocysteine
  MOD_RES (243)..(243): Selenocysteine
  MOD_RES (245)..(245): Selenocysteine
  MOD_RES (250)..(250): Selenocysteine
  MOD_RES (271)..(271): Selenocysteine
  MOD_RES (329)..(329): Selenocysteine
  MOD_RES (343)..(343): Selenocysteine
  MOD_RES (345)..(345): Selenocysteine
  MOD_RES (354)..(354): Selenocysteine
  MOD_RES (394)..(394): Selenocysteine
  MOD_RES (398)..(398): Selenocysteine
  MOD_RES (408)..(408): Selenocysteine
  MOD_RES (410)..(410): Selenocysteine
MEXSSPRPPRPSSNPGLSLDARLGVDXRLWAKVLFXALYALIWALGAAGNALSAHVVLKARAGRAGRLRHHVLSLALAGLLLLLVGVPVELYSFVWFHYPWVFGDLGCRGYYFVHELCAYAXVLSVAGLSAERCLAVCQPLRARSLLXPRRXRWLVALSWAASLGLALPMAVIMGQKHELEXADGEPEPASRVCXVLVSRXALQVFIQVNVLVSFVLPLALXAFLNGVXVSHLLALCSQVPSXSXPGSSXPSRLELLSEEGLLSFIVWKKXFIQGGQVSLVRHKDVRRIRSLQRSVQVLRAIVVMYVICWLPYHARRLMYCYVPDDAWXDPLYNFYHYFYMVXNXLFYVSSAVXPLLYNAVSSSFRKLFLEAVSSLCGEHHPMKRLPPKPQSPXLMDXASGFGDPPEXRX

SEQ ID NO: 18454 - protein, 661 aa, Homo sapiens
  MOD_RES (31)..(31): Selenocysteine
  MOD_RES (60)..(60): Selenocysteine
  MOD_RES (65)..(65): Selenocysteine
  MOD_RES (73)..(73): Selenocysteine
  MOD_RES (155)..(155): Selenocysteine
  MOD_RES (211)..(211): Selenocysteine
  MOD_RES (245)..(245): Selenocysteine
  MOD_RES (250)..(250): Selenocysteine
  MOD_RES (274)..(274): Selenocysteine
  MOD_RES (296)..(296): Selenocysteine
  MOD_RES (339)..(339): Selenocysteine
  MOD_RES (345)..(345): Selenocysteine
  MOD_RES (356)..(357): Selenocysteine
  MOD_RES (414)..(414): Selenocysteine
  MOD_RES (428)..(428): Selenocysteine
  MOD_RES (438)..(438): Selenocysteine
  MOD_RES (461)..(461): Selenocysteine
  MOD_RES (471)..(471): Selenocysteine
  MOD_RES (513)..(513): Selenocysteine
  MOD_RES (535)..(535): Selenocysteine
  MOD_RES (547)..(547): Selenocysteine
  MOD_RES (641)..(641): Selenocysteine
  MOD_RES (647)..(647): Selenocysteine
MEGAAAPVAGDRPDLGLGAPGSPREAVAGAXAALEPRKPHGVKRHHHKHNLKHRYELQEXLGKGXYGKVKRAXERFSGRVVAIKSIRKDKIKDEQDMVHIRREIEIMSSLNHPHIISIYEVFENKDKIVIIMEYASKGELYDYISERRRLSEREXRHFFRQIVSAVHYCHKNGVVHRDLKLENILLDDNCNIKIADFGLSNLYQKDKFLQXFCGSPLYASPEIVNGRPYRGPEVDSWALGVLLYXLVYGXMPFDGFDHKNLIRQISSGEYREPXQPSDARGLIRWMLMVNPDRRAXIEDIANHWWVNWGYKSSVCDCDALHDSESPLLARIIDWHHRSXGLQADXEAKMKGLAKPXXSEVMLERQRSLKKSKKENDFAQSGQDAVPESPSKLSSKRPKGILKKRSNSEHRSHSXGFIEGVVGPALPSXFKMEQDLCRXGVLLPSSPEAEVPGKLSPKQSAXMPKKGILKKXQQRESGYYSSPERSESSELLDSNDVMGSSIPSPSPPDPARVXSHSLSCRRKGILKHSSKYSAGXMDPALVSPEMPXLESLSEPGVPAEGLSRSYSRPSSVISDDSVLSSDSFDLLDLQENRPARQRIRSCVSAENFLQIQDFEGLQNRPRPQYLKRYRNRLADSSFSLLXDMDDVXQVYKQALEICSKLN

SEQ ID NO: 18455 - protein, 152 aa, Homo sapiens
  MOD_RES (24)..(24): Selenocysteine
  MOD_RES (80)..(80): Selenocysteine
  MOD_RES (114)..(114): Selenocysteine
  MOD_RES (119)..(119): Selenocysteine
  MOD_RES (143)..(143): Selenocysteine
MEYASKGELYDYISERRRLSEREXRHFFRQIVSAVHYCHKNGVVHRDLKLENILLDDNCNIKIADFGLSNLYQKDKFLQXFCGSPLYASPEIVNGRPYRGPEVDSWALGVLLYXLVYGXMPFDGFDHKNLIRQISSGEYREPXQPSDARGLI

SEQ ID NO: 18456 - protein, 118 aa, Homo sapiens
  MOD_RES (11)..(11): Selenocysteine
  MOD_RES (54)..(54): Selenocysteine
  MOD_RES (60)..(60): Selenocysteine
  MOD_RES (71)..(72): Selenocysteine
MLMVNPDRRAXIEDIANHWWVNWGYKSSVCDCDALHDSESPLLARIIDWHHRSXGLQADXEAKMKGLAKPXXSEVMLERQRSLKKSKKENDFAQSGQDAVPESPSKLSSKRPKGILKK

SEQ ID NO: 18457 - protein, 74 aa, Homo sapiens
  MOD_RES (24)..(24): Selenocysteine
  MOD_RES (46)..(46): Selenocysteine
MPFDGFDHKNLIRQISSGEYREPXQPSDARGLIRWMLMVNPDRRAXIEDIANHWWVNWGYKSSVCDCDALHDSE

SEQ ID NO: 18458 - protein, 672 aa, Homo sapiens
  MOD_RES (5)..(5): Selenocysteine
  MOD_RES (10)..(10): Selenocysteine
  MOD_RES (32)..(32): Selenocysteine
  MOD_RES (57)..(57): Selenocysteine
  MOD_RES (102)..(102): Selenocysteine
  MOD_RES (107)..(107): Selenocysteine
  MOD_RES (252)..(252): Selenocysteine
  MOD_RES (271)..(271): Selenocysteine
  MOD_RES (291)..(291): Selenocysteine
  MOD_RES (333)..(333): Selenocysteine
  MOD_RES (337)..(337): Selenocysteine
  MOD_RES (353)..(353): Selenocysteine
  MOD_RES (408)..(409): Selenocysteine
  MOD_RES (435)..(435): Selenocysteine
  MOD_RES (439)..(439): Selenocysteine
  MOD_RES (555)..(555): Selenocysteine
  MOD_RES (563)..(564): Selenocysteine
  MOD_RES (622)..(622): Selenocysteine
  MOD_RES (652)..(652): Selenocysteine
  MOD_RES (658)..(658): Selenocysteine
  MOD_RES (660)..(660): Selenocysteine
  MOD_RES (672)..(672): Selenocysteine
MLCFXARSGXAVAPRPGAGPVPRASALPAQPXDSPAALAHLLLAMESLVFARRSGPXPSAAELARPLAEGLIKSPKPLMKKQAVKRHHHKHNLRHRYEFLEXLGKGXYGKVKKARESSGRLVAIKSIRKDKIKDEQDLMHIRREIEIMSSLNHPHIIAIHEVFENSSKIVIVMEYASRGDLYDYISERQQLSEREARHFFRQIVSAVHYCHQNRVVHRDLKLENILLDANGNIKIADFGLSNLYHQGKFLQXFCGSPLYASPEIVNGKPYXGPEVDSWSLGVLLYILVHGXMPFDGHDHKILVKQISNGAYREPPKPSDACGLIRWLLMVNPXRRAXLEDVASHWWVNWGYAXRVGEQEAPHEGGHPGSDSARASMADWLRRSSRPLLENGAKVCSFFKQHAPGGGSXXPGLERQHSLKKSRKENDMAQSLHSDXADDXAHRPGKSNLKLPKGILKKKVSASAEGVQEDPPELSPIPASPGQAAPLLPKKGILKKPRQRESGYYSSPEPSESGELLDAGDVFVSGDPKEQKPPQASGLLLHRKGILKLNGKFSQXALELAAPXXFGSLDELAPPRPLARASRPSGAVSEDSILSSESFDQLDLPERLPEPPLRGCVSVDNLXGLEEPPSEGPGSCLRRWRQDPLGDSCFSLXDCQEVXAXYRQALRVCSKLX

SEQ ID NO: 18459 - protein, 243 aa, Homo sapiens
  MOD_RES (34)..(34): Selenocysteine
  MOD_RES (68)..(68): Selenocysteine
  MOD_RES (177)..(177): Selenocysteine
  MOD_RES (179)..(179): Selenocysteine
  MOD_RES (193)..(193): Selenocysteine
  MOD_RES (202)..(202): Selenocysteine
  MOD_RES (220)..(220): Selenocysteine
  MOD_RES (222)..(222): Selenocysteine
MSRPVRNRKVVDYSQFQESDDADEDYGRDSGPPXKKIRSSPREAKNKRRSGKNSQEDSEDSEDKDVKXKKDDSHSAEDSEDEKEDHKNVRQQRQAASKAASKQREMLMEDVGSEEEQEEEDEAPFQEKDSGSDEDFLMEDDDDSDYGSSKKKNKKMVKKSKPERKEKKMPKPRLKAXVXPSPVKGKGKVGRPXASKASKEKXPSPKEEDEEPESPPEKKXSXSPPPEKSGDEGSEDEAPSGED

SEQ ID NO: 18460 - protein, 172 aa, Homo sapiens
  MOD_RES (9)..(9): Selenocysteine
  MOD_RES (11)..(11): Selenocysteine
  MOD_RES (76)..(76): Selenocysteine
  MOD_RES (93)..(93): Selenocysteine
  MOD_RES (101)..(101): Selenocysteine
  MOD_RES (142)..(142): Selenocysteine
  MOD_RES (153)..(153): Selenocysteine
  MOD_RES (158)..(159): Selenocysteine
MMKLKSNQXRXYDGDGYKKRAACLCFRSESEEEVLLVSSSRHPDRWIVPGGGMEPEEEPSVAAVREVCEEAGVKGXLGRLVGIFENQERKHRXYVYVLIVXEVLEDWEDSVNIGRKREWFKIEDAIKVLQYHKPVQASYFEXLRQGYSANNGXPVVAXXYSVSAQSSMSGIR

SEQ ID NO: 18461 - protein, 95 aa, Homo sapiens
  MOD_RES (41)..(41): Selenocysteine
  MOD_RES (47)..(47): Selenocysteine
  MOD_RES (49)..(49): Selenocysteine
MEPEEEPGGAAVREVYEEAGVKGKLGRLLGIFENQDRKHRXYVYVLXVXEILEDWEDSVNIGRKREWFKVEDAIKVLQCHKPVHAEYLEKLKLGC

SEQ ID NO: 18462 - protein, 112 aa, Homo sapiens
  MOD_RES (41)..(41): Selenocysteine
  MOD_RES (47)..(47): Selenocysteine
  MOD_RES (49)..(49): Selenocysteine
  MOD_RES (103)..(103): Selenocysteine
MEPEEEPGGAAVREVYEEAGVKGKLGRLLGIFENQDRKHRXYVYVLXVXEILEDWEDSVNIGRKREWFKVEDAIKVLQCHKPVHAEYLEKLKLGCSPANGNSXVPSLPDNNA

SEQ ID NO: 18463 - protein, 128 aa, Homo sapiens
  MOD_RES (41)..(41): Selenocysteine
  MOD_RES (47)..(47): Selenocysteine
  MOD_RES (49)..(49): Selenocysteine
  MOD_RES (103)..(103): Selenocysteine
  MOD_RES (116)..(116): Selenocysteine
  MOD_RES (120)..(120): Selenocysteine
MEPEEEPGGAAVREVYEEAGVKGKLGRLLGIFENQDRKHRXYVYVLXVXEILEDWEDSVNIGRKREWFKVEDAIKVLQCHKPVHAEYLEKLKLGCSPANGNSXVPSLPDNNALFVXAAQXSGLPSSVR

SEQ ID NO: 18464 - protein, 129 aa, Homo sapiens
  MOD_RES (42)..(42): Selenocysteine
  MOD_RES (48)..(48): Selenocysteine
  MOD_RES (50)..(50): Selenocysteine
  MOD_RES (104)..(104): Selenocysteine
  MOD_RES (117)..(117): Selenocysteine
  MOD_RES (121)..(121): Selenocysteine
MEPEEEPGGAAVREVYEEAGVKGKLGRLLGIFEQNQDRKHRXYVYVLXVXEILEDWEDSVNIGRKREWFKVEDAIKVLQCHKPVHAEYLEKLKLGCSPANGNSXVPSLPDNNALFVXAAQXSGLPSSVR

SEQ ID NO: 18465 - protein, 180 aa, Homo sapiens
  MOD_RES (9)..(9): Selenocysteine
  MOD_RES (11)..(11): Selenocysteine
  MOD_RES (93)..(93): Selenocysteine
  MOD_RES (99)..(99): Selenocysteine
  MOD_RES (101)..(101): Selenocysteine
  MOD_RES (155)..(155): Selenocysteine
  MOD_RES (168)..(168): Selenocysteine
  MOD_RES (172)..(172): Selenocysteine
MMKFKPNQXRXYDREGFKKRAACLCFRSEQEDEVLLVSSSRYPDQWIVPGGGMEPEEEPGGAAVREVYEEAGVKGKLGRLLGIFENQDRKHRXYVYVLXVXEILEDWEDSVNIGRKREWFKVEDAIKVLQCHKPVHAEYLEKLKLGCSPANGNSXVPSLPDNNALFVXAAQXSGLPSSVR

SEQ ID NO: 18466 - protein, 181 aa, Homo sapiens
  MOD_RES (9)..(9): Selenocysteine
  MOD_RES (11)..(11): Selenocysteine
  MOD_RES (94)..(94): Selenocysteine
  MOD_RES (100)..(100): Selenocysteine
  MOD_RES (102)..(102): Selenocysteine
  MOD_RES (156)..(156): Selenocysteine
  MOD_RES (169)..(169): Selenocysteine
  MOD_RES (173)..(173): Selenocysteine
MMKFKPNQXRXYDREGFKKRAACLCFRSEQEDEVLLVSSSRYPDQWIVPGGGMEPEEEPGGAAVREVYEEAGVKGKLGRLLGIFEQNQDRKHRXYVYVLXVXEILEDWEDSVNIGRKREWFKVEDAIKVLQCHKPVHAEYLEKLKLGCSPANGNSXVPSLPDNNALFVXAAQXSGLPSSVR

SEQ ID NO: 18467 - protein, 232 aa, Homo sapiens
  MOD_RES (7)..(7): Selenocysteine
  MOD_RES (34)..(35): Selenocysteine
  MOD_RES (40)..(40): Selenocysteine
  MOD_RES (43)..(43): Selenocysteine
  MOD_RES (50)..(52): Selenocysteine
  MOD_RES (58)..(58): Selenocysteine
  MOD_RES (65)..(66): Selenocysteine
  MOD_RES (71)..(71): Selenocysteine
  MOD_RES (84)..(84): Selenocysteine
  MOD_RES (117)..(117): Selenocysteine
  MOD_RES (130)..(130): Selenocysteine
  MOD_RES (153)..(153): Selenocysteine
  MOD_RES (158)..(158): Selenocysteine
  MOD_RES (160)..(160): Selenocysteine
  MOD_RES (205)..(205): Selenocysteine
MESQEPXESSQNGKQYIISEELISEGKWVKLEKXXYMDPXGKXRRNKEKXXXLLILRXWESVKRXXRKEQXADGVAVIPVLQRXLHYECIVLVKQFRPPMGGYCIEFPAGLIDDGEXPEAAALRELEEEXGYKGDIAECSPAVCMDPGLSNCXIHIVXVXINGDDAENARPKPKPGDGEFVEVISLPKNDLLQRLDALVAEEHLXVDARVYSYALALKHANAKPFEVPFLKF

SEQ ID NO: 18468 - protein, 98 aa, Homo sapiens
  MOD_RES (7)..(7): Selenocysteine
  MOD_RES (34)..(35): Selenocysteine
  MOD_RES (40)..(40): Selenocysteine
  MOD_RES (43)..(43): Selenocysteine
  MOD_RES (45)..(45): Selenocysteine
  MOD_RES (52)..(53): Selenocysteine
  MOD_RES (58)..(58): Selenocysteine
  MOD_RES (76)..(76): Selenocysteine
  MOD_RES (89)..(89): Selenocysteine
MESQEPXESSQNGKQYIISEELISEGKWVKLEKXXYMDPXGKXRXWESVKRXXRKEQXADGRSANLFQPFRKEVSXCDRVAVIPVLQRXLHYECIVLV

SEQ ID NO: 18469 - protein, 219 aa, Homo sapiens
  MOD_RES (7)..(7): Selenocysteine
  MOD_RES (34)..(35): Selenocysteine
  MOD_RES (40)..(40): Selenocysteine
  MOD_RES (43)..(43): Selenocysteine
  MOD_RES (45)..(45): Selenocysteine
  MOD_RES (52)..(53): Selenocysteine
  MOD_RES (58)..(58): Selenocysteine
  MOD_RES (71)..(71): Selenocysteine
  MOD_RES (104)..(104): Selenocysteine
  MOD_RES (117)..(117): Selenocysteine
  MOD_RES (140)..(140): Selenocysteine
  MOD_RES (145)..(145): Selenocysteine
  MOD_RES (147)..(147): Selenocysteine
  MOD_RES (192)..(192): Selenocysteine
MESQEPXESSQNGKQYIISEELISEGKWVKLEKXXYMDPXGKXRXWESVKRXXRKEQXADGVAVIPVLQRXLHYECIVLVKQFRPPMGGYCIEFPAGLIDDGEXPEAAALRELEEEXGYKGDIAECSPAVCMDPGLSNCXIHIVXVXINGDDAENARPKPKPGDGEFVEVISLPKNDLLQRLDALVAEEHLXVDARVYSYALALKHANAKPFEVPFLKF

SEQ ID NO: 18470 - protein, 186 aa, Homo sapiens
  MOD_RES (7)..(7): Selenocysteine
  MOD_RES (34)..(35): Selenocysteine
  MOD_RES (40)..(40): Selenocysteine
  MOD_RES (43)..(43): Selenocysteine
  MOD_RES (45)..(45): Selenocysteine
  MOD_RES (52)..(53): Selenocysteine
  MOD_RES (58)..(58): Selenocysteine
  MOD_RES (71)..(71): Selenocysteine
  MOD_RES (104)..(104): Selenocysteine
  MOD_RES (117)..(117): Selenocysteine
  MOD_RES (140)..(140): Selenocysteine
  MOD_RES (145)..(145): Selenocysteine
  MOD_RES (147)..(147): Selenocysteine
  MOD_RES (185)..(185): Selenocysteine
MESQEPXESSQNGKQYIISEELISEGKWVKLEKXXYMDPXGKXRXWESVKRXXRKEQXADGVAVIPVLQRXLHYECIVLVKQFRPPMGGYCIEFPAGLIDDGEXPEAAALRELEEEXGYKGDIAECSPAVCMDPGLSNCXIHIVXVXINGDDAENARPKPKPGDGEFVEVISLPKNDLLQRLDEXL

SEQ ID NO: 18471 - protein, 180 aa, Homo sapiens
  MOD_RES (7)..(7): Selenocysteine
  MOD_RES (34)..(35): Selenocysteine
  MOD_RES (40)..(40): Selenocysteine
  MOD_RES (43)..(43): Selenocysteine
  MOD_RES (45)..(45): Selenocysteine
  MOD_RES (52)..(53): Selenocysteine
  MOD_RES (58)..(58): Selenocysteine
  MOD_RES (71)..(71): Selenocysteine
  MOD_RES (104)..(104): Selenocysteine
  MOD_RES (117)..(117): Selenocysteine
  MOD_RES (140)..(140): Selenocysteine
  MOD_RES (145)..(145): Selenocysteine
  MOD_RES (147)..(147): Selenocysteine
MESQEPXESSQNGKQYIISEELISEGKWVKLEKXXYMDPXGKXRXWESVKRXXRKEQXADGVAVIPVLQRXLHYECIVLVKQFRPPMGGYCIEFPAGLIDDGEXPEAAALRELEEEXGYKGDIAECSPAVCMDPGLSNCXIHIVXVXINGDDAENARPKPKPGDGGMFCNSWWPSVYDLV

SEQ ID NO: 18472 - protein, 137 aa, Homo sapiens
  MOD_RES (1)..(1): Any amino acid
  MOD_RES (2)..(2): Selenocysteine
  MOD_RES (9)..(10): Selenocysteine
  MOD_RES (15)..(15): Selenocysteine
  MOD_RES (28)..(28): Selenocysteine
  MOD_RES (61)..(61): Selenocysteine
  MOD_RES (74)..(74): Selenocysteine
  MOD_RES (97)..(97): Selenocysteine
  MOD_RES (102)..(102): Selenocysteine
  MOD_RES (104)..(104): Selenocysteine
XXWESVKRXXRKEQXADGVAVIPVLQRXLHYECIVLVKQFRPPMGGYCIEFPAGLIDDGEXPEAAALRELEEEXGYKGDIAECSPAVCMDPGLSNCXIHIVXVXINGDDAENARPKPKPGDGGMFCNSWWPSVYDLV

SEQ ID NO: 18473 - protein, 495 aa, Homo sapiens
  MOD_RES (5)..(5): Selenocysteine
  MOD_RES (10)..(10): Selenocysteine
  MOD_RES (21)..(21): Selenocysteine
  MOD_RES (23)..(23): Selenocysteine
  MOD_RES (30)..(30): Selenocysteine
  MOD_RES (51)..(51): Selenocysteine
  MOD_RES (116)..(116): Selenocysteine
  MOD_RES (152)..(152): Selenocysteine
  MOD_RES (178)..(178): Selenocysteine
  MOD_RES (197)..(197): Selenocysteine
  MOD_RES (207)..(207): Selenocysteine
  MOD_RES (232)..(232): Selenocysteine
  MOD_RES (249)..(249): Selenocysteine
  MOD_RES (271)..(273): Selenocysteine
  MOD_RES (310)..(310): Selenocysteine
  MOD_RES (358)..(358): Selenocysteine
  MOD_RES (381)..(381): Selenocysteine
  MOD_RES (385)..(385): Selenocysteine
  MOD_RES (411)..(411): Selenocysteine
  MOD_RES (430)..(430): Selenocysteine
  MOD_RES (443)..(443): Selenocysteine
  MOD_RES (449)..(449): Selenocysteine
  MOD_RES (487)..(487): Selenocysteine
MAEPXSDFEXPIGWHASPELXPXLGPLSDXAPPRDSWMFWAMLPPPPPPLXSSLPAAGSKPSSESQPPMEAQSLPGAPPPFDAQILPGAQPPFDAQSPLDSQPQPSGQPWNFHASXSWYWRQSSDRFPRHQKSFNPAVKNSYYPRKYDAKFXDFSLPPSRKQKKKKRKEPVFHFFCDXCDRGFKNQEKYDKHMSEHXKCPELDCSFXAHEKIVQFHWRNMHAPGMKKIKLDXPEEIARWREERRKNYPXLANIERKKKLKLEKEKRGAVLXXXQYGKMKGMSRHSQMAKIRSPGKNHKWKNDNSRQRAVXGSGSHLCDLKLEGPPEANADPLGVLINSDSESDKEEKPQHSVIPKEVXPALCSLMSSYGSLSGSESEPEEXPIKXEADVLAENQVLDSSAPKSPSQDVKAXVRNFSEAKSENRKKSFEKXNPKRKKDYHNYQXLFEPRXHHPYLLEMLLAPDIRHERNVILQCVRYIIKKDFFGLDXNSAKSKDV

SEQ ID NO: 18474 - protein, 507 aa, Homo sapiens
  MOD_RES (6)..(6): Selenocysteine
  MOD_RES (35)..(35): Selenocysteine
  MOD_RES (37)..(37): Selenocysteine
  MOD_RES (43)..(44): Selenocysteine
  MOD_RES (46)..(46): Selenocysteine
  MOD_RES (54)..(55): Selenocysteine
  MOD_RES (57)..(57): Selenocysteine
  MOD_RES (77)..(77): Selenocysteine
  MOD_RES (91)..(91): Selenocysteine
  MOD_RES (99)..(99): Selenocysteine
  MOD_RES (102)..(102): Selenocysteine
  MOD_RES (106)..(107): Selenocysteine
  MOD_RES (160)..(160): Selenocysteine
  MOD_RES (165)..(165): Selenocysteine
  MOD_RES (191)..(191): Selenocysteine
  MOD_RES (196)..(196): Selenocysteine
  MOD_RES (207)..(207): Selenocysteine
  MOD_RES (211)..(211): Selenocysteine
  MOD_RES (219)..(219): Selenocysteine
  MOD_RES (225)..(225): Selenocysteine
  MOD_RES (238)..(238): Selenocysteine
  MOD_RES (250)..(250): Selenocysteine
  MOD_RES (267)..(267): Selenocysteine
  MOD_RES (271)..(271): Selenocysteine
  MOD_RES (292)..(292): Selenocysteine
  MOD_RES (329)..(329): Selenocysteine
  MOD_RES (345)..(345): Selenocysteine
  MOD_RES (386)..(386): Selenocysteine
  MOD_RES (397)..(397): Selenocysteine
  MOD_RES (417)..(417): Selenocysteine
  MOD_RES (427)..(428): Selenocysteine
  MOD_RES (460)..(460): Selenocysteine
  MOD_RES (464)..(464): Selenocysteine
  MOD_RES (466)..(466): Selenocysteine
  MOD_RES (487)..(487): Selenocysteine
  MOD_RES (492)..(492): Selenocysteine
  MOD_RES (502)..(502): Selenocysteine
MAVKDXGERLSHAVGCAFAACLERKQKREKECGVXAXFDASRXXFXREGSFRVXXAXEQAEREEIMKQMQDAKKAEXDKIVVGSSVAPGNXAPSPSSPXSPXSDAXXSLEMNNPHAIPRRHAPIEQLARQGSFRGFPALSQKMSPFKRQLSLRINELPSXMQRKXDFPIKNAVPEVEGEAESISSLCSQIXNAFSXPEDPFSSAPMXKPVXVVAPQSPXFQANGXDSAFHVLAKPAHXALAPVAMPVREXNPWAHAPDAANKEIAAXCSGXEWGQSSGAASPGLFQAGHRRXPSEADRWLEEVSKSVRAQQPQASAAPLQPVLQPPPPXAISQPASPFQGNAFLXSQPVPVGVVPALQPAFVPAQSYPVANGMPYPAPNVPVVGIXPSQMVANVFGXAGHPQAAHPHQSPSLVRQQXFPHYEASSAXXSPFFKPPAQHLNGSAAFNGVDDGRLASADRHXEVPXGXCPVDPFEAQWAALENKSKQRXNPSPXNPFSSDLQKXFEIEL

SEQ ID NO: 18475 - protein, 224 aa, Homo sapiens
  MOD_RES (27)..(27): Selenocysteine
  MOD_RES (34)..(34): Selenocysteine
  MOD_RES (43)..(43): Selenocysteine
  MOD_RES (66)..(66): Selenocysteine
  MOD_RES (74)..(74): Selenocysteine
  MOD_RES (99)..(100): Selenocysteine
  MOD_RES (114)..(114): Selenocysteine
  MOD_RES (143)..(143): Selenocysteine
  MOD_RES (145)..(145): Selenocysteine
  MOD_RES (151)..(152): Selenocysteine
  MOD_RES (154)..(154): Selenocysteine
  MOD_RES (162)..(163): Selenocysteine
  MOD_RES (165)..(165): Selenocysteine
  MOD_RES (185)..(185): Selenocysteine
  MOD_RES (199)..(199): Selenocysteine
  MOD_RES (207)..(207): Selenocysteine
  MOD_RES (210)..(210): Selenocysteine
  MOD_RES (214)..(215): Selenocysteine
MNKLRQSFRRKKDVYVPEASRPHQWQXDEEGVRXGKCSFPVKXGKKAVKAVLWVSADGLRVVDEKXKDLIVDQXIEKVSFCAPDRNFDRAFSYICRDGXXRRWICHCFMAVKDXGERLSHAVGCAFAACLERKQKREKECGVXAXFDASRXXFXREGSFRVXXAXEQAEREEIMKQMQDAKKAEXDKIVVGSSVAPGNXAPSPSSPXSPXSDAXXSLEMNNPHA

SEQ ID NO: 18476 - protein, 67 aa, Homo sapiens
  MOD_RES (27)..(27): Selenocysteine
  MOD_RES (34)..(34): Selenocysteine
MNKLRQSFRRKKDVYVPEASRPHQWQXDEEGVRXGKCSFPVKYLGHVEVDESRGMHICEDAVKRLKA

SEQ ID NO: 18477 - protein, 258 aa, Homo sapiens
  MOD_RES (27)..(27): Selenocysteine
  MOD_RES (34)..(34): Selenocysteine
  MOD_RES (79)..(79): Selenocysteine
  MOD_RES (102)..(102): Selenocysteine
  MOD_RES (110)..(110): Selenocysteine
  MOD_RES (135)..(136): Selenocysteine
  MOD_RES (150)..(150): Selenocysteine
  MOD_RES (179)..(179): Selenocysteine
  MOD_RES (181)..(181): Selenocysteine
  MOD_RES (187)..(188): Selenocysteine
  MOD_RES (190)..(190): Selenocysteine
  MOD_RES (198)..(199): Selenocysteine
  MOD_RES (201)..(201): Selenocysteine
  MOD_RES (221)..(221): Selenocysteine
  MOD_RES (235)..(235): Selenocysteine
  MOD_RES (243)..(243): Selenocysteine
  MOD_RES (246)..(246): Selenocysteine
  MOD_RES (250)..(251): Selenocysteine
MNKLRQSFRRKKDVYVPEASRPHQWQXDEEGVRXGKCSFPVKYLGHVEVDESRGMHICEDAVKRLKAERKFFKGFFGKXGKKAVKAVLWVSADGLRVVDEKXKDLIVDQXIEKVSFCAPDRNFDRAFSYICRDGXXRRWICHCFMAVKDXGERLSHAVGCAFAACLERKQKREKECGVXAXFDASRXXFXREGSFRVXXAXEQAEREEIMKQMQDAKKAEXDKIVVGSSVAPGNXAPSPSSPXSPXSDAXXSLEMNNP

SEQ ID NO: 18478 - protein, 603 aa, Homo sapiens
  MOD_RES (27)..(27): Selenocysteine
  MOD_RES (34)..(34): Selenocysteine
  MOD_RES (79)..(79): Selenocysteine
  MOD_RES (102)..(102): Selenocysteine
  MOD_RES (110)..(110): Selenocysteine
  MOD_RES (135)..(136): Selenocysteine
  MOD_RES (150)..(150): Selenocysteine
  MOD_RES (179)..(179): Selenocysteine
  MOD_RES (181)..(181): Selenocysteine
  MOD_RES (187)..(188): Selenocysteine
  MOD_RES (190)..(190): Selenocysteine
  MOD_RES (198)..(199): Selenocysteine
  MOD_RES (201)..(201): Selenocysteine
  MOD_RES (221)..(221): Selenocysteine
  MOD_RES (235)..(235): Selenocysteine
  MOD_RES (243)..(243): Selenocysteine
  MOD_RES (246)..(246): Selenocysteine
  MOD_RES (250)..(251): Selenocysteine
  MOD_RES (304)..(304): Selenocysteine
  MOD_RES (309)..(309): Selenocysteine
  MOD_RES (335)..(335): Selenocysteine
  MOD_RES (340)..(340): Selenocysteine
  MOD_RES (351)..(351): Selenocysteine
  MOD_RES (355)..(355): Selenocysteine
  MOD_RES (363)..(363): Selenocysteine
  MOD_RES (367)..(367): Selenocysteine
  MOD_RES (388)..(388): Selenocysteine
  MOD_RES (425)..(425): Selenocysteine
  MOD_RES (441)..(441): Selenocysteine
  MOD_RES (482)..(482): Selenocysteine
  MOD_RES (493)..(493): Selenocysteine
  MOD_RES (513)..(513): Selenocysteine
  MOD_RES (523)..(524): Selenocysteine
  MOD_RES (556)..(556): Selenocysteine
  MOD_RES (560)..(560): Selenocysteine
  MOD_RES (562)..(562): Selenocysteine
  MOD_RES (583)..(583): Selenocysteine
  MOD_RES (588)..(588): Selenocysteine
  MOD_RES (598)..(598): Selenocysteine
MNKLRQSFRRKKDVYVPEASRPHQWQXDEEGVRXGKCSFPVKYLGHVEVDESRGMHICEDAVKRLKAERKFFKGFFGKXGKKAVKAVLWVSADGLRVVDEKXKDLIVDQXIEKVSFCAPDRNFDRAFSYICRDGXXRRWICHCFMAVKDXGERLSHAVGCAFAACLERKQKREKECGVXAXFDASRXXFXREGSFRVXXAXEQAEREEIMKQMQDAKKAEXDKIVVGSSVAPGNXAPSPSSPXSPXSDAXXSLEMNNPHAIPRRHAPIEQLARQGSFRGFPALSQKMSPFKRQLSLRINELPSXMQRKXDFPIKNAVPEVEGEAESISSLCSQIXNAFSXPEDPFSSAPMXKPVXVVAPQSPXFQGXEWGQSSGAASPGLFQAGHRRXPSEADRWLEEVSKSVRAQQPQASAAPLQPVLQPPPPXAISQPASPFQGNAFLXSQPVPVGVVPALQPAFVPAQSYPVANGMPYPAPNVPVVGIXPSQMVANVFGXAGHPQAAHPHQSPSLVRQQXFPHYEASSAXXSPFFKPPAQHLNGSAAFNGVDDGRLASADRHXEVPXGXCPVDPFEAQWAALENKSKQRXNPSPXNPFSSDLQKXFEIEL

SEQ ID NO: 18479 - protein, 651 aa, Homo sapiens
  MOD_RES (27)..(27): Selenocysteine
  MOD_RES (34)..(34): Selenocysteine
  MOD_RES (79)..(79): Selenocysteine
  MOD_RES (102)..(102): Selenocysteine
  MOD_RES (110)..(110): Selenocysteine
  MOD_RES (135)..(136): Selenocysteine
  MOD_RES (150)..(150): Selenocysteine
  MOD_RES (179)..(179): Selenocysteine
  MOD_RES (181)..(181): Selenocysteine
  MOD_RES (187)..(188): Selenocysteine
  MOD_RES (190)..(190): Selenocysteine
  MOD_RES (198)..(199): Selenocysteine
  MOD_RES (201)..(201): Selenocysteine
  MOD_RES (221)..(221): Selenocysteine
  MOD_RES (235)..(235): Selenocysteine
  MOD_RES (243)..(243): Selenocysteine
  MOD_RES (246)..(246): Selenocysteine
  MOD_RES (250)..(251): Selenocysteine
  MOD_RES (304)..(304): Selenocysteine
  MOD_RES (309)..(309): Selenocysteine
  MOD_RES (335)..(335): Selenocysteine
  MOD_RES (340)..(340): Selenocysteine
  MOD_RES (351)..(351): Selenocysteine
  MOD_RES (355)..(355): Selenocysteine
  MOD_RES (363)..(363): Selenocysteine
  MOD_RES (369)..(369): Selenocysteine
  MOD_RES (382)..(382): Selenocysteine
  MOD_RES (394)..(394): Selenocysteine
  MOD_RES (411)..(411): Selenocysteine
  MOD_RES (415)..(415): Selenocysteine
  MOD_RES (436)..(436): Selenocysteine
  MOD_RES (473)..(473): Selenocysteine
  MOD_RES (489)..(489): Selenocysteine
  MOD_RES (530)..(530): Selenocysteine
  MOD_RES (541)..(541): Selenocysteine
  MOD_RES (561)..(561): Selenocysteine
  MOD_RES (571)..(572): Selenocysteine
  MOD_RES (604)..(604): Selenocysteine
  MOD_RES (608)..(608): Selenocysteine
  MOD_RES (610)..(610): Selenocysteine
  MOD_RES (631)..(631): Selenocysteine
  MOD_RES (636)..(636): Selenocysteine
  MOD_RES (646)..(646): Selenocysteine
MNKLRQSFRRKKDVYVPEASRPHQWQXDEEGVRXGKCSFPVKYLGHVEVDESRGMHICEDAVKRLKAERKFFKGFFGKXGKKAVKAVLWVSADGLRVVDEKXKDLIVDQXIEKVSFCAPDRNFDRAFSYICRDGXXRRWICHCFMAVKDXGERLSHAVGCAFAACLERKQKREKECGVXAXFDASRXXFXREGSFRVXXAXEQAEREEIMKQMQDAKKAEXDKIVVGSSVAPGNXAPSPSSPXSPXSDAXXSLEMNNPHAIPRRHAPIEQLARQGSFRGFPALSQKMSPFKRQLSLRINELPSXMQRKXDFPIKNAVPEVEGEAESISSLCSQIXNAFSXPEDPFSSAPMXKPVXVVAPQSPXFQANGXDSAFHVLAKPAHXALAPVAMPVREXNPWAHAPDAANKEIAAXCSGXEWGQSSGAASPGLFQAGHRRXPSEADRWLEEVSKSVRAQQPQASAAPLQPVLQPPPPXAISQPASPFQGNAFLXSQPVPVGVVPALQPAFVPAQSYPVANGMPYPAPNVPVVGIXPSQMVANVFGXAGHPQAAHPHQSPSLVRQQXFPHYEASSAXXSPFFKPPAQHLNGSAAFNGVDDGRLASADRHXEVPXGXCPVDPFEAQWAALENKSKQRXNPSPXNPFSSDLQKXFEIEL

SEQ ID NO: 18480 - protein, 456 aa, Homo sapiens
  MOD_RES (27)..(27): Selenocysteine
  MOD_RES (34)..(34): Selenocysteine
  MOD_RES (79)..(79): Selenocysteine
  MOD_RES (102)..(102): Selenocysteine
  MOD_RES (110)..(110): Selenocysteine
  MOD_RES (135)..(136): Selenocysteine
  MOD_RES (150)..(150): Selenocysteine
  MOD_RES (179)..(179): Selenocysteine
  MOD_RES (181)..(181): Selenocysteine
  MOD_RES (187)..(188): Selenocysteine
  MOD_RES (190)..(190): Selenocysteine
  MOD_RES (198)..(199): Selenocysteine
  MOD_RES (201)..(201): Selenocysteine
  MOD_RES (220)..(220): Selenocysteine
  MOD_RES (241)..(241): Selenocysteine
  MOD_RES (278)..(278): Selenocysteine
  MOD_RES (294)..(294): Selenocysteine
  MOD_RES (335)..(335): Selenocysteine
  MOD_RES (346)..(346): Selenocysteine
  MOD_RES (366)..(366): Selenocysteine
  MOD_RES (376)..(377): Selenocysteine
  MOD_RES (409)..(409): Selenocysteine
  MOD_RES (413)..(413): Selenocysteine
  MOD_RES (415)..(415): Selenocysteine
  MOD_RES (436)..(436): Selenocysteine
  MOD_RES (441)..(441): Selenocysteine
  MOD_RES (451)..(451): Selenocysteine
MNKLRQSFRRKKDVYVPEASRPHQWQXDEEGVRXGKCSFPVKYLGHVEVDESRGMHICEDAVKRLKAERKFFKGFFGKXGKKAVKAVLWVSADGLRVVDEKXKDLIVDQXIEKVSFCAPDRNFDRAFSYICRDGXXRRWICHCFMAVKDXGERLSHAVGCAFAACLERKQKREKECGVXAXFDASRXXFXREGSFRVXXAXEQAEREEIMKQMQDAKKGXEWGQSSGAASPGLFQAGHRRXPSEADRWLEEVSKSVRAQQPQASAAPLQPVLQPPPPXAISQPASPFQGNAFLXSQPVPVGVVPALQPAFVPAQSYPVANGMPYPAPNVPVVGIXPSQMVANVFGXAGHPQAAHPHQSPSLVRQQXFPHYEASSAXXSPFFKPPAQHLNGSAAFNGVDDGRLASADRHXEVPXGXCPVDPFEAQWAALENKSKQRXNPSPXNPFSSDLQKXFEIEL

SEQ ID NO: 18481 - protein, 505 aa, Homo sapiens
  MOD_RES (27)..(27): Selenocysteine
  MOD_RES (34)..(34): Selenocysteine
  MOD_RES (79)..(79): Selenocysteine
  MOD_RES (102)..(102): Selenocysteine
  MOD_RES (110)..(110): Selenocysteine
  MOD_RES (135)..(136): Selenocysteine
  MOD_RES (150)..(150): Selenocysteine
  MOD_RES (179)..(179): Selenocysteine
  MOD_RES (181)..(181): Selenocysteine
  MOD_RES (187)..(188): Selenocysteine
  MOD_RES (190)..(190): Selenocysteine
  MOD_RES (198)..(199): Selenocysteine
  MOD_RES (201)..(201): Selenocysteine
  MOD_RES (237)..(237): Selenocysteine
  MOD_RES (242)..(242): Selenocysteine
  MOD_RES (253)..(253): Selenocysteine
  MOD_RES (257)..(257): Selenocysteine
  MOD_RES (265)..(265): Selenocysteine
  MOD_RES (269)..(269): Selenocysteine
  MOD_RES (290)..(290): Selenocysteine
  MOD_RES (327)..(327): Selenocysteine
  MOD_RES (343)..(343): Selenocysteine
  MOD_RES (384)..(384): Selenocysteine
  MOD_RES (395)..(395): Selenocysteine
  MOD_RES (415)..(415): Selenocysteine
  MOD_RES (425)..(426): Selenocysteine
  MOD_RES (458)..(458): Selenocysteine
  MOD_RES (462)..(462): Selenocysteine
  MOD_RES (464)..(464): Selenocysteine
  MOD_RES (485)..(485): Selenocysteine
  MOD_RES (490)..(490): Selenocysteine
  MOD_RES (500)..(500): Selenocysteine
MNKLRQSFRRKKDVYVPEASRPHQWQXDEEGVRXGKCSFPVKYLGHVEVDESRGMHICEDAVKRLKAERKFFKGFFGKXGKKAVKAVLWVSADGLRVVDEKXKDLIVDQXIEKVSFCAPDRNFDRAFSYICRDGXXRRWICHCFMAVKDXGERLSHAVGCAFAACLERKQKREKECGVXAXFDASRXXFXREGSFRVXXAXEQAEREEIMKQMQDAKKVPEVEGEAESISSLCSQIXNAFSXPEDPFSSAPMXKPVXVVAPQSPXFQGXEWGQSSGAASPGLFQAGHRRXPSEADRWLEEVSKSVRAQQPQASAAPLQPVLQPPPPXAISQPASPFQGNAFLXSQPVPVGVVPALQPAFVPAQSYPVANGMPYPAPNVPVVGIXPSQMVANVFGXAGHPQAAHPHQSPSLVRQQXFPHYEASSAXXSPFFKPPAQHLNGSAAFNGVDDGRLASADRHXEVPXGXCPVDPFEAQWAALENKSKQRXNPSPXNPFSSDLQKXFEIEL

SEQ ID NO: 18482 - protein, 592 aa, Homo sapiens
  MOD_RES (27)..(27): Selenocysteine
  MOD_RES (34)..(34): Selenocysteine
  MOD_RES (68)..(68): Selenocysteine
  MOD_RES (91)..(91): Selenocysteine
  MOD_RES (99)..(99): Selenocysteine
  MOD_RES (124)..(125): Selenocysteine
  MOD_RES (139)..(139): Selenocysteine
  MOD_RES (168)..(168): Selenocysteine
  MOD_RES (170)..(170): Selenocysteine
  MOD_RES (176)..(177): Selenocysteine
  MOD_RES (179)..(179): Selenocysteine
  MOD_RES (187)..(188): Selenocysteine
  MOD_RES (190)..(190): Selenocysteine
  MOD_RES (210)..(210): Selenocysteine
  MOD_RES (224)..(224): Selenocysteine
  MOD_RES (232)..(232): Selenocysteine
  MOD_RES (235)..(235): Selenocysteine
  MOD_RES (239)..(240): Selenocysteine
  MOD_RES (293)..(293): Selenocysteine
  MOD_RES (298)..(298): Selenocysteine
  MOD_RES (324)..(324): Selenocysteine
  MOD_RES (329)..(329): Selenocysteine
  MOD_RES (340)..(340): Selenocysteine
  MOD_RES (344)..(344): Selenocysteine
  MOD_RES (352)..(352): Selenocysteine
  MOD_RES (356)..(356): Selenocysteine
  MOD_RES (377)..(377): Selenocysteine
  MOD_RES (414)..(414): Selenocysteine
  MOD_RES (430)..(430): Selenocysteine
  MOD_RES (471)..(471): Selenocysteine
  MOD_RES (482)..(482): Selenocysteine
  MOD_RES (502)..(502): Selenocysteine
  MOD_RES (512)..(513): Selenocysteine
  MOD_RES (545)..(545): Selenocysteine
  MOD_RES (549)..(549): Selenocysteine
  MOD_RES (551)..(551): Selenocysteine
  MOD_RES (572)..(572): Selenocysteine
  MOD_RES (577)..(577): Selenocysteine
  MOD_RES (587)..(587): Selenocysteine
MNKLRQSFRRKKDVYVPEASRPHQWQXDEEGVRXGKCSFPVKYLGHVEVDESRGMHICEDAVKRLKAXGKKAVKAVLWVSADGLRVVDEKXKDLIVDQXIEKVSFCAPDRNFDRAFSYICRDGXXRRWICHCFMAVKDXGERLSHAVGCAFAACLERKQKREKECGVXAXFDASRXXFXREGSFRVXXAXEQAEREEIMKQMQDAKKAEXDKIVVGSSVAPGNXAPSPSSPXSPXSDAXXSLEMNNPHAIPRRHAPIEQLARQGSFRGFPALSQKMSPFKRQLSLRINELPSXMQRKXDFPIKNAVPEVEGEAESISSLCSQIXNAFSXPEDPFSSAPMXKPVXVVAPQSPXFQGXEWGQSSGAASPGLFQAGHRRXPSEADRWLEEVSKSVRAQQPQASAAPLQPVLQPPPPXAISQPASPFQGNAFLXSQPVPVGVVPALQPAFVPAQSYPVANGMPYPAPNVPVVGIXPSQMVANVFGXAGHPQAAHPHQSPSLVRQQXFPHYEASSAXXSPFFKPPAQHLNGSAAFNGVDDGRLASADRHXEVPXGXCPVDPFEAQWAALENKSKQRXNPSPXNPFSSDLQKXFEIEL

SEQ ID NO: 18483 - protein, 640 aa, Homo sapiens
  MOD_RES (27)..(27): Selenocysteine
  MOD_RES (34)..(34): Selenocysteine
  MOD_RES (68)..(68): Selenocysteine
  MOD_RES (91)..(91): Selenocysteine
  MOD_RES (99)..(99): Selenocysteine
  MOD_RES (124)..(125): Selenocysteine
  MOD_RES (139)..(139): Selenocysteine
  MOD_RES (168)..(168): Selenocysteine
  MOD_RES (170)..(170): Selenocysteine
  MOD_RES (176)..(177): Selenocysteine
  MOD_RES (179)..(179): Selenocysteine
  MOD_RES (187)..(188): Selenocysteine
  MOD_RES (190)..(190): Selenocysteine
  MOD_RES (210)..(210): Selenocysteine
  MOD_RES (224)..(224): Selenocysteine
  MOD_RES (232)..(232): Selenocysteine
  MOD_RES (235)..(235): Selenocysteine
  MOD_RES (239)..(240): Selenocysteine
  MOD_RES (293)..(293): Selenocysteine
  MOD_RES (298)..(298): Selenocysteine
  MOD_RES (324)..(324): Selenocysteine
  MOD_RES (329)..(329): Selenocysteine
  MOD_RES (340)..(340): Selenocysteine
  MOD_RES (344)..(344): Selenocysteine
  MOD_RES (352)..(352): Selenocysteine
  MOD_RES (358)..(358): Selenocysteine
  MOD_RES (371)..(371): Selenocysteine
  MOD_RES (383)..(383): Selenocysteine
  MOD_RES (400)..(400): Selenocysteine
  MOD_RES (404)..(404): Selenocysteine
  MOD_RES (425)..(425): Selenocysteine
  MOD_RES (462)..(462): Selenocysteine
  MOD_RES (478)..(478): Selenocysteine
  MOD_RES (519)..(519): Selenocysteine
  MOD_RES (530)..(530): Selenocysteine
  MOD_RES (550)..(550): Selenocysteine
  MOD_RES (560)..(561): Selenocysteine
  MOD_RES (593)..(593): Selenocysteine
  MOD_RES (597)..(597): Selenocysteine
  MOD_RES (599)..(599): Selenocysteine
  MOD_RES (620)..(620): Selenocysteine
  MOD_RES (625)..(625): Selenocysteine
  MOD_RES (635)..(635): Selenocysteine
MNKLRQSFRRKKDVYVPEASRPHQWQXDEEGVRXGKCSFPVKYLGHVEVDESRGMHICEDAVKRLKAXGKKAVKAVLWVSADGLRVVDEKXKDLIVDQXIEKVSFCAPDRNFDRAFSYICRDGXXRRWICHCFMAVKDXGERLSHAVGCAFAACLERKQKREKECGVXAXFDASRXXFXREGSFRVXXAXEQAEREEIMKQMQDAKKAEXDKIVVGSSVAPGNXAPSPSSPXSPXSDAXXSLEMNNPHAIPRRHAPIEQLARQGSFRGFPALSQKMSPFKRQLSLRINELPSXMQRKXDFPIKNAVPEVEGEAESISSLCSQIXNAFSXPEDPFSSAPMXKPVXVVAPQSPXFQANGXDSAFHVLAKPAHXALAPVAMPVREXNPWAHAPDAANKEIAAXCSGXEWGQSSGAASPGLFQAGHRRXPSEADRWLEEVSKSVRAQQPQASAAPLQPVLQPPPPXAISQPASPFQGNAFLXSQPVPVGVVPALQPAFVPAQSYPVANGMPYPAPNVPVVGIXPSQMVANVFGXAGHPQAAHPHQSPSLVRQQXFPHYEASSAXXSPFFKPPAQHLNGSAAFNGVDDGRLASADRHXEVPXGXCPVDPFEAQWAALENKSKQRXNPSPXNPFSSDLQKXFEIEL

SEQ ID NO: 18484 - protein, 445 aa, Homo sapiens
  MOD_RES (27)..(27): Selenocysteine
  MOD_RES (34)..(34): Selenocysteine
  MOD_RES (68)..(68): Selenocysteine
  MOD_RES (91)..(91): Selenocysteine
  MOD_RES (99)..(99): Selenocysteine
  MOD_RES (124)..(125): Selenocysteine
  MOD_RES (139)..(139): Selenocysteine
  MOD_RES (168)..(168): Selenocysteine
  MOD_RES (170)..(170): Selenocysteine
  MOD_RES (176)..(177): Selenocysteine
  MOD_RES (179)..(179): Selenocysteine
  MOD_RES (187)..(188): Selenocysteine
  MOD_RES (190)..(190): Selenocysteine
  MOD_RES (209)..(209): Selenocysteine
  MOD_RES (230)..(230): Selenocysteine
  MOD_RES (267)..(267): Selenocysteine
  MOD_RES (283)..(283): Selenocysteine
  MOD_RES (324)..(324): Selenocysteine
  MOD_RES (335)..(335): Selenocysteine
  MOD_RES (355)..(355): Selenocysteine
  MOD_RES (365)..(366): Selenocysteine
  MOD_RES (398)..(398): Selenocysteine
  MOD_RES (402)..(402): Selenocysteine
  MOD_RES (404)..(404): Selenocysteine
  MOD_RES (425)..(425): Selenocysteine
  MOD_RES (430)..(430): Selenocysteine
  MOD_RES (440)..(440): Selenocysteine
MNKLRQSFRRKKDVYVPEASRPHQWQXDEEGVRXGKCSFPVKYLGHVEVDESRGMHICEDAVKRLKAXGKKAVKAVLWVSADGLRVVDEKXKDLIVDQXIEKVSFCAPDRNFDRAFSYICRDGXXRRWICHCFMAVKDXGERLSHAVGCAFAACLERKQKREKECGVXAXFDASRXXFXREGSFRVXXAXEQAEREEIMKQMQDAKKGXEWGQSSGAASPGLFQAGHRRXPSEADRWLEEVSKSVRAQQPQASAAPLQPVLQPPPPXAISQPASPFQGNAFLXSQPVPVGVVPALQPAFVPAQSYPVANGMPYPAPNVPVVGIXPSQMVANVFGXAGHPQAAHPHQSPSLVRQQXFPHYEASSAXXSPFFKPPAQHLNGSAAFNGVDDGRLASADRHXEVPXGXCPVDPFEAQWAALENKSKQRXNPSPXNPFSSDLQKXFEIEL

SEQ ID NO: 18485 - protein, 494 aa, Homo sapiens
  MOD_RES (27)..(27): Selenocysteine
  MOD_RES (34)..(34): Selenocysteine
  MOD_RES (68)..(68): Selenocysteine
  MOD_RES (91)..(91): Selenocysteine
  MOD_RES (99)..(99): Selenocysteine
  MOD_RES (124)..(125): Selenocysteine
  MOD_RES (139)..(139): Selenocysteine
  MOD_RES (168)..(168): Selenocysteine
  MOD_RES (170)..(170): Selenocysteine
  MOD_RES (176)..(177): Selenocysteine
  MOD_RES (179)..(179): Selenocysteine
  MOD_RES (187)..(188): Selenocysteine
  MOD_RES (190)..(190): Selenocysteine
  MOD_RES (226)..(226): Selenocysteine
  MOD_RES (231)..(231): Selenocysteine
  MOD_RES (242)..(242): Selenocysteine
  MOD_RES (246)..(246): Selenocysteine
  MOD_RES (254)..(254): Selenocysteine
  MOD_RES (258)..(258): Selenocysteine
  MOD_RES (279)..(279): Selenocysteine
  MOD_RES (316)..(316): Selenocysteine
  MOD_RES (332)..(332): Selenocysteine
  MOD_RES (373)..(373): Selenocysteine
  MOD_RES (384)..(384): Selenocysteine
  MOD_RES (404)..(404): Selenocysteine
  MOD_RES (414)..(415): Selenocysteine
  MOD_RES (447)..(447): Selenocysteine
  MOD_RES (451)..(451): Selenocysteine
  MOD_RES (453)..(453): Selenocysteine
  MOD_RES (474)..(474): Selenocysteine
  MOD_RES (479)..(479): Selenocysteine
  MOD_RES (489)..(489): Selenocysteine
MNKLRQSFRRKKDVYVPEASRPHQWQXDEEGVRXGKCSFPVKYLGHVEVDESRGMHICEDAVKRLKAXGKKAVKAVLWVSADGLRVVDEKXKDLIVDQXIEKVSFCAPDRNFDRAFSYICRDGXXRRWICHCFMAVKDXGERLSHAVGCAFAACLERKQKREKECGVXAXFDASRXXFXREGSFRVXXAXEQAEREEIMKQMQDAKKVPEVEGEAESISSLCSQIXNAFSXPEDPFSSAPMXKPVXVVAPQSPXFQGXEWGQSSGAASPGLFQAGHRRXPSEADRWLEEVSKSVRAQQPQASAAPLQPVLQPPPPXAISQPASPFQGNAFLXSQPVPVGVVPALQPAFVPAQSYPVANGMPYPAPNVPVVGIXPSQMVANVFGXAGHPQAAHPHQSPSLVRQQXFPHYEASSAXXSPFFKPPAQHLNGSAAFNGVDDGRLASADRHXEVPXGXCPVDPFEAQWAALENKSKQRXNPSPXNPFSSDLQKXFEIEL

SEQ ID NO: 18486 - protein, 80 aa, Homo sapiens
  MOD_RES (27)..(27): Selenocysteine
  MOD_RES (34)..(34): Selenocysteine
  MOD_RES (68)..(68): Selenocysteine
  MOD_RES (70)..(70): Selenocysteine
  MOD_RES (77)..(77): Selenocysteine
MNKLRQSFRRKKDVYVPEASRPHQWQXDEEGVRXGKCSFPVKYLGHVEVDESRGMHICEDAVKRLKAXGXLIEPFLXYAV

SEQ ID NO: 18487 - protein, 110 aa, Homo sapiens
  MOD_RES (36)..(36): Selenocysteine
  MOD_RES (91)..(91): Selenocysteine
  MOD_RES (99)..(99): Selenocysteine
MNKLRQSLRRRKPAYVPEASRPHQWQADEDAVRKGXCSFPVRYLGHVEVEESRGMHVCEDAVKKLKAMGRKSVKSVLWVSADGLRVVDDKXKDLLVDQXIEKVSFCAPDR

SEQ ID NO: 18488 - protein, 115 aa, Homo sapiens
  MOD_RES (36)..(36): Selenocysteine
  MOD_RES (91)..(91): Selenocysteine
  MOD_RES (99)..(99): Selenocysteine
MNKLRQSLRRRKPAYVPEASRPHQWQADEDAVRKGXCSFPVRYLGHVEVEESRGMHVCEDAVKKLKAMGRKSVKSVLWVSADGLRVVDDKXKDLLVDQXIEKVSFCAPDRNLDKA

SEQ ID NO: 18489 - protein, 235 aa, Homo sapiens
  MOD_RES (36)..(36): Selenocysteine
  MOD_RES (91)..(91): Selenocysteine
  MOD_RES (99)..(99): Selenocysteine
  MOD_RES (124)..(125): Selenocysteine
  MOD_RES (168)..(168): Selenocysteine
  MOD_RES (176)..(176): Selenocysteine
  MOD_RES (210)..(210): Selenocysteine
  MOD_RES (224)..(224): Selenocysteine
  MOD_RES (227)..(228): Selenocysteine
MNKLRQSLRRRKPAYVPEASRPHQWQADEDAVRKGXCSFPVRYLGHVEVEESRGMHVCEDAVKKLKAMGRKSVKSVLWVSADGLRVVDDKXKDLLVDQXIEKVSFCAPDRNLDKAFSYICRDGXXRRWICHCFLALKDSGERLSHAVGCAFAACLERKQRREKECGVXAAFDASRXSFAREGSFRLSGGGRPAEREAPDKKKAEAAAAPXVAPGPAQPGHVSPXPAXXSPGEKGE

SEQ ID NO: 18490 - protein, 568 aa, Homo sapiens
  MOD_RES (36)..(36): Selenocysteine
  MOD_RES (91)..(91): Selenocysteine
  MOD_RES (99)..(99): Selenocysteine
  MOD_RES (124)..(125): Selenocysteine
  MOD_RES (168)..(168): Selenocysteine
  MOD_RES (176)..(176): Selenocysteine
  MOD_RES (210)..(210): Selenocysteine
  MOD_RES (224)..(224): Selenocysteine
  MOD_RES (227)..(228): Selenocysteine
  MOD_RES (238)..(238): Selenocysteine
  MOD_RES (244)..(245): Selenocysteine
  MOD_RES (292)..(292): Selenocysteine
  MOD_RES (297)..(297): Selenocysteine
  MOD_RES (304)..(304): Selenocysteine
  MOD_RES (324)..(324): Selenocysteine
  MOD_RES (344)..(345): Selenocysteine
  MOD_RES (347)..(347): Selenocysteine
  MOD_RES (368)..(368): Selenocysteine
  MOD_RES (414)..(414): Selenocysteine
  MOD_RES (470)..(470): Selenocysteine
  MOD_RES (491)..(491): Selenocysteine
  MOD_RES (548)..(548): Selenocysteine
  MOD_RES (563)..(563): Selenocysteine
MNKLRQSLRRRKPAYVPEASRPHQWQADEDAVRKGXCSFPVRYLGHVEVEESRGMHVCEDAVKKLKAMGRKSVKSVLWVSADGLRVVDDKXKDLLVDQXIEKVSFCAPDRNLDKAFSYICRDGXXRRWICHCFLALKDSGERLSHAVGCAFAACLERKQRREKECGVXAAFDASRXSFAREGSFRLSGGGRPAEREAPDKKKAEAAAAPXVAPGPAQPGHVSPXPAXXSPGEKGEAGXPVAAGXXAAAIPRRHAPLEQLVRQGSFRGFPALSQKNSPFKRQLSLRLNELPSXLQRRXDFQVKGXVPEMEPPGAGDSDSINALCXQISSSFASAGAPAPGPPPAXXGXSAWGEPSVPPAAAFQPGHKRXPSEAERWLEEVSQVAKAQQQQQQQQQQQQQQQQQQQQAASVAPVPXMPPALQPFPAPVGPFDAAPAQVAVFLPPPHMQPPFVPAYPGLGYPPMPRVPVVGIXPSQMVANAFCSAAQLQPQPAXLLGKAGAFPPPAIPSAPGSQARPRPNGAPWPPEPAPAPAPELDPFEAQWAALEGKAXVEKPSNPFSGDLQKXFEIEL

SEQ ID NO: 18491 - protein, 609 aa, Homo sapiens
  MOD_RES (31)..(31): Selenocysteine
  MOD_RES (34)..(34): Selenocysteine
  MOD_RES (41)..(41): Selenocysteine
  MOD_RES (77)..(77): Selenocysteine
  MOD_RES (132)..(132): Selenocysteine
  MOD_RES (140)..(140): Selenocysteine
  MOD_RES (165)..(166): Selenocysteine
  MOD_RES (209)..(209): Selenocysteine
  MOD_RES (217)..(217): Selenocysteine
  MOD_RES (251)..(251): Selenocysteine
  MOD_RES (265)..(265): Selenocysteine
  MOD_RES (268)..(269): Selenocysteine
  MOD_RES (279)..(279): Selenocysteine
  MOD_RES (285)..(286): Selenocysteine
  MOD_RES (333)..(333): Selenocysteine
  MOD_RES (338)..(338): Selenocysteine
  MOD_RES (345)..(345): Selenocysteine
  MOD_RES (365)..(365): Selenocysteine
  MOD_RES (385)..(386): Selenocysteine
  MOD_RES (388)..(388): Selenocysteine
  MOD_RES (409)..(409): Selenocysteine
  MOD_RES (455)..(455): Selenocysteine
  MOD_RES (511)..(511): Selenocysteine
  MOD_RES (532)..(532): Selenocysteine
  MOD_RES (589)..(589): Selenocysteine
  MOD_RES (604)..(604): Selenocysteine
MSRSAAASGGPRRPERHLPPAPCGAPGPPEXCRXEPDGAGXMNKLRQSLRRRKPAYVPEASRPHQWQADEDAVRKGXCSFPVRYLGHVEVEESRGMHVCEDAVKKLKAMGRKSVKSVLWVSADGLRVVDDKXKDLLVDQXIEKVSFCAPDRNLDKAFSYICRDGXXRRWICHCFLALKDSGERLSHAVGCAFAACLERKQRREKECGVXAAFDASRXSFAREGSFRLSGGGRPAEREAPDKKKAEAAAAPXVAPGPAQPGHVSPXPAXXSPGEKGEAGXPVAAGXXAAAIPRRHAPLEQLVRQGSFRGFPALSQKNSPFKRQLSLRLNELPSXLQRRXDFQVKGXVPEMEPPGAGDSDSINALCXQISSSFASAGAPAPGPPPAXXGXSAWGEPSVPPAAAFQPGHKRXPSEAERWLEEVSQVAKAQQQQQQQQQQQQQQQQQQQQAASVAPVPXMPPALQPFPAPVGPFDAAPAQVAVFLPPPHMQPPFVPAYPGLGYPPMPRVPVVGIXPSQMVANAFCSAAQLQPQPAXLLGKAGAFPPPAIPSAPGSQARPRPNGAPWPPEPAPAPAPELDPFEAQWAALEGKAXVEKPSNPFSGDLQKXFEIEL

SEQ ID NO: 18492 - protein, 214 aa, Homo sapiens
  MOD_RES (1)..(1): Any amino acid
  MOD_RES (35)..(35): Selenocysteine
  MOD_RES (43)..(43): Selenocysteine
  MOD_RES (68)..(69): Selenocysteine
  MOD_RES (112)..(112): Selenocysteine
  MOD_RES (120)..(120): Selenocysteine
  MOD_RES (153)..(153): Selenocysteine
  MOD_RES (167)..(167): Selenocysteine
  MOD_RES (170)..(171): Selenocysteine
  MOD_RES (181)..(181): Selenocysteine
  MOD_RES (187)..(188): Selenocysteine
XCEDAVKKLKAMGRKSVKSVLWVSADGLRVVDDKXKDLLVDQXIEKVSFCAPDRNLDKAFSYICRDGXXRRWICHCFLALKDSGERLSHAVGCAFAACLERKQRREKECGVXAAFDASRXSFAREGSFRLSGGGRPAEREAPDKKKEAAAAPXVAPGPAQPGHVSPXPAXXSPGEKGEAGXPVAAGXXAAAIPRRHAPLEQLVRQGSFRGFPAL

SEQ ID NO: 18493 - protein, 140 aa, Homo sapiens
  MOD_RES (19)..(19): Selenocysteine
  MOD_RES (49)..(49): Selenocysteine
  MOD_RES (53)..(53): Selenocysteine
  MOD_RES (66)..(66): Selenocysteine
  MOD_RES (70)..(70): Selenocysteine
  MOD_RES (72)..(72): Selenocysteine
  MOD_RES (108)..(108): Selenocysteine
  MOD_RES (110)..(110): Selenocysteine
  MOD_RES (113)..(113): Selenocysteine
  MOD_RES (132)..(132): Selenocysteine
  MOD_RES (135)..(135): Selenocysteine
CKDDEAVVQAPRHAPVVRXPSIQPSLLPHAAPFAKSHLVHGSSPGVMGXSVAXSASKIIPQGADSXMLAXKXVKHGAPSPSHPISAPQAAAAAALRRQMASQAPAVNXLXESXLKNVPQVVNVQELKNNPAXPSXAMGGL

SEQ ID NO: 18494 - protein, 78 aa, Homo sapiens
  MOD_RES (4)..(4): Selenocysteine
  MOD_RES (20)..(21): Selenocysteine
  MOD_RES (25)..(25): Selenocysteine
  MOD_RES (33)..(33): Selenocysteine
  MOD_RES (41)..(41): Selenocysteine
  MOD_RES (46)..(46): Selenocysteine
  MOD_RES (58)..(58): Selenocysteine
GEGXAAASAGGFGFGSSSNXXSFGXLASQNAPXFGSLSQQXSGFGXQSSGFSGFGSGXGGFSFGSNNSSVQGFGGWRS

SEQ ID NO: 18495 - protein, 113 aa, Homo sapiens
  MOD_RES (59)..(59): Selenocysteine
  MOD_RES (107)..(107): Selenocysteine
LQCLAALLLLGDPLGLEGCQHSVQPQPLQALWARREAKCSERALQLPAQEDSGLGAAAXPHPSARSRVRMPPLSDHCPNRLLVLGPRVADSLVLDQAQEGSALGQIXRKYPPF

SEQ ID NO: 18496 - protein, 2080 aa, Homo sapiens
  MOD_RES (64)..(64): Selenocysteine
  MOD_RES (106)..(106): Selenocysteine
  MOD_RES (127)..(127): Selenocysteine
  MOD_RES (160)..(160): Selenocysteine
  MOD_RES (180)..(180): Selenocysteine
  MOD_RES (182)..(182): Selenocysteine
  MOD_RES (188)..(188): Selenocysteine
  MOD_RES (192)..(192): Selenocysteine
  MOD_RES (196)..(196): Selenocysteine
  MOD_RES (215)..(215): Selenocysteine
  MOD_RES (222)..(222): Selenocysteine
  MOD_RES (251)..(251): Selenocysteine
  MOD_RES (264)..(264): Selenocysteine
  MOD_RES (267)..(267): Selenocysteine
  MOD_RES (299)..(299): Selenocysteine
  MOD_RES (324)..(324): Selenocysteine
  MOD_RES (354)..(354): Selenocysteine
  MOD_RES (370)..(370): Selenocysteine
  MOD_RES (376)..(376): Selenocysteine
  MOD_RES (382)..(382): Selenocysteine
  MOD_RES (394)..(394): Selenocysteine
  MOD_RES (416)..(416): Selenocysteine
  MOD_RES (434)..(434): Selenocysteine
  MOD_RES (436)..(437): Selenocysteine
  MOD_RES (439)..(439): Selenocysteine
  MOD_RES (469)..(469): Selenocysteine
  MOD_RES (480)..(480): Selenocysteine
  MOD_RES (494)..(494): Selenocysteine
  MOD_RES (496)..(496): Selenocysteine
  MOD_RES (519)..(519): Selenocysteine
  MOD_RES (533)..(533): Selenocysteine
  MOD_RES (556)..(556): Selenocysteine
  MOD_RES (560)..(560): Selenocysteine
  MOD_RES (580)..(580): Selenocysteine
  MOD_RES (617)..(617): Selenocysteine
  MOD_RES (660)..(660): Selenocysteine
  MOD_RES (714)..(714): Selenocysteine
  MOD_RES (723)..(723): Selenocysteine
  MOD_RES (732)..(732): Selenocysteine
  MOD_RES (739)..(739): Selenocysteine
  MOD_RES (747)..(748): Selenocysteine
  MOD_RES (760)..(761): Selenocysteine
  MOD_RES (846)..(846): Selenocysteine
  MOD_RES (850)..(850): Selenocysteine
  MOD_RES (881)..(881): Selenocysteine
  MOD_RES (913)..(914): Selenocysteine
  MOD_RES (919)..(919): Selenocysteine
  MOD_RES (946)..(946): Selenocysteine
  MOD_RES (952)..(952): Selenocysteine
  MOD_RES (977)..(977): Selenocysteine
  MOD_RES (991)..(991): Selenocysteine
  MOD_RES (1011)..(1011): Selenocysteine
  MOD_RES (1041)..(1041): Selenocysteine
  MOD_RES (1045)..(1045): Selenocysteine
  MOD_RES (1058)..(1058): Selenocysteine
  MOD_RES (1062)..(1062): Selenocysteine
  MOD_RES (1064)..(1064): Selenocysteine
  MOD_RES (1100)..(1100): Selenocysteine
  MOD_RES (1102)..(1102): Selenocysteine
  MOD_RES (1105)..(1105): Selenocysteine
  MOD_RES (1124)..(1124): Selenocysteine
  MOD_RES (1127)..(1127): Selenocysteine
  MOD_RES (1137)..(1137): Selenocysteine
  MOD_RES (1140)..(1140): Selenocysteine
  MOD_RES (1146)..(1146): Selenocysteine
  MOD_RES (1168)..(1168): Selenocysteine
  MOD_RES (1183)..(1183): Selenocysteine
  MOD_RES (1188)..(1188): Selenocysteine
  MOD_RES (1191)..(1191): Selenocysteine
  MOD_RES (1193)..(1193): Selenocysteine
  MOD_RES (1211)..(1211): Selenocysteine
  MOD_RES (1219)..(1219): Selenocysteine
  MOD_RES (1221)..(1221): Selenocysteine
  MOD_RES (1227)..(1227): Selenocysteine
  MOD_RES (1233)..(1233): Selenocysteine
  MOD_RES (1236)..(1236): Selenocysteine
  MOD_RES (1268)..(1268): Selenocysteine
  MOD_RES (1273)..(1274): Selenocysteine
  MOD_RES (1291)..(1291): Selenocysteine
  MOD_RES (1295)..(1296): Selenocysteine
  MOD_RES (1302)..(1302): Selenocysteine
  MOD_RES (1320)..(1320): Selenocysteine
  MOD_RES (1336)..(1336): Selenocysteine
  MOD_RES (1339)..(1339): Selenocysteine
  MOD_RES (1345)..(1345): Selenocysteine
  MOD_RES (1348)..(1348): Selenocysteine
  MOD_RES (1350)..(1350): Selenocysteine
  MOD_RES (1353)..(1353): Selenocysteine
  MOD_RES (1355)..(1355): Selenocysteine
  MOD_RES (1365)..(1365): Selenocysteine
  MOD_RES (1374)..(1374): Selenocysteine
  MOD_RES (1379)..(1379): Selenocysteine
  MOD_RES (1383)..(1385): Selenocysteine
  MOD_RES (1393)..(1393): Selenocysteine
  MOD_RES (1395)..(1395): Selenocysteine
  MOD_RES (1398)..(1398): Selenocysteine
  MOD_RES (1407)..(1407): Selenocysteine
  MOD_RES (1420)..(1420): Selenocysteine
  MOD_RES (1427)..(1427): Selenocysteine
  MOD_RES (1436)..(1436): Selenocysteine
  MOD_RES (1439)..(1439): Selenocysteine
  MOD_RES (1448)..(1449): Selenocysteine
  MOD_RES (1452)..(1452): Selenocysteine
  MOD_RES (1456)..(1456): Selenocysteine
  MOD_RES (1460)..(1460): Selenocysteine
  MOD_RES (1471)..(1472): Selenocysteine
  MOD_RES (1483)..(1483): Selenocysteine
  MOD_RES (1487)..(1487): Selenocysteine
  MOD_RES (1523)..(1523): Selenocysteine
  MOD_RES (1543)..(1543): Selenocysteine
  MOD_RES (1548)..(1548): Selenocysteine
  MOD_RES (1558)..(1558): Selenocysteine
  MOD_RES (1561)..(1562): Selenocysteine
  MOD_RES (1569)..(1569): Selenocysteine
  MOD_RES (1584)..(1584): Selenocysteine
  MOD_RES (1587)..(1587): Selenocysteine
  MOD_RES (1601)..(1601): Selenocysteine
  MOD_RES (1604)..(1604): Selenocysteine
  MOD_RES (1610)..(1611): Selenocysteine
  MOD_RES (1627)..(1627): Selenocysteine
  MOD_RES (1629)..(1629): Selenocysteine
  MOD_RES (1651)..(1651): Selenocysteine
  MOD_RES (1654)..(1654): Selenocysteine
  MOD_RES (1656)..(1656): Selenocysteine
  MOD_RES (1661)..(1661): Selenocysteine
  MOD_RES (1671)..(1671): Selenocysteine
  MOD_RES (1680)..(1680): Selenocysteine
  MOD_RES (1683)..(1683): Selenocysteine
  MOD_RES (1686)..(1686): Selenocysteine
  MOD_RES (1690)..(1690): Selenocysteine
  MOD_RES (1705)..(1706): Selenocysteine
  MOD_RES (1714)..(1715): Selenocysteine
  MOD_RES (1753)..(1753): Selenocysteine
  MOD_RES (1755)..(1755): Selenocysteine
  MOD_RES (1757)..(1757): Selenocysteine
  MOD_RES (1768)..(1768): Selenocysteine
  MOD_RES (1783)..(1783): Selenocysteine
  MOD_RES (1812)..(1812): Selenocysteine
  MOD_RES (1816)..(1818): Selenocysteine
  MOD_RES (1821)..(1821): Selenocysteine
  MOD_RES (1837)..(1837): Selenocysteine
  MOD_RES (1847)..(1847): Selenocysteine
  MOD_RES (1869)..(1869): Selenocysteine
  MOD_RES (1903)..(1903): Selenocysteine
  MOD_RES (1905)..(1905): Selenocysteine
  MOD_RES (1908)..(1908): Selenocysteine
  MOD_RES (1919)..(1919): Selenocysteine
  MOD_RES (1934)..(1934): Selenocysteine
  MOD_RES (1936)..(1936): Selenocysteine
  MOD_RES (1957)..(1957): Selenocysteine
  MOD_RES (1971)..(1971): Selenocysteine
  MOD_RES (1991)..(1991): Selenocysteine
  MOD_RES (1997)..(1997): Selenocysteine
  MOD_RES (2006)..(2006): Selenocysteine
  MOD_RES (2022)..(2023): Selenocysteine
  MOD_RES (2027)..(2027): Selenocysteine
  MOD_RES (2035)..(2035): Selenocysteine
  MOD_RES (2043)..(2043): Selenocysteine
  MOD_RES (2048)..(2048): Selenocysteine
  MOD_RES (2060)..(2060): Selenocysteine
MGDEMDAMIPEREMKDFQFRALKKVRIFDSPEELPKERSSLLAVSNKYGLVFAGGASGLQIFPXKNLLIQNKPGDDPNKIVDKVQGLLVPMKFPIHHLALSCDNLXLSACMMSSEYGSIIAFFDVRXFSNEAKQQKRPFAYHKLLKDAGGMVIDMKWNPXVPSMVAVCLADGSIAVLQVXEXVKVCAXLPSXVAVXSVCWSPKGKQLAVGKQNGXVVQYLPXLQEKKVIPCPPFYESDHPVRVLDVLWIGXYVFAIVYAAADGXLEXSPDVVMALLPKKEEKHPEIFVNFMEPCYGSCXERQHHYYLSYIEEWDLVLAASAASXEVSILARQSDQINWESWLLEDSSRAELPVXDKSDDSLPMGVVVDYXNQVEIXISDEKXLPPAPVLMLLSXDGVLCPFYMINQNPGVKSLIKXPERLSLEGERQPKSPGSXPXXPXSSQAPQKLDASAAAAPASLPPSSPAAPIAXFSLLPAGGAPXVFSFGSSSLKSSAXVXGEPPSYSSGSDSSKAAPGPGPSXFSFVPPSKASLAPXPAASPVAPSAASFSFGSSGFKPXLESXPVPSVSAPNIAMKPSFPPSXSAVKVNLSENSSQSAPPMSPFSSASKPAASGPLSHPXPLSAPPSSVPLKSSVLPSPSAGRSAQGSSSPVPSMVQKSPRIXPPAAKPGSPQAKSLQPAVAEKQGHQWKDSDPVMAGIGEEIAHFQKELEELKARXSKACFQVGXSEEMKMLRXESDDLHXFLLEIKEXXESLHGDISSLKXXLLEGFAGVEEAREQNERNRDSGYLHLLYKRPLDPKSEAQLQEIRRLHQYVKFAVQDVNDVLDLEWDQHLEQKKKQRHLLVPEREXLFNXLANNREIINQQRKRLNHLVDSLQQLRLYKQXSLWSLSSAVPSQSSIHSFDSDLESLCNALLKXXIESHXKSLPKVPAKLSPMKQAQLRNFLAKRKXPPVRSXAPASLSRSAFLSQRYYEDLDEVSSXSSVSQSLESEDARXSCKDDEAVVQAPRHAPVVRXPSIQPSLLPHAAPFAKSHLVHGSSPGVMGXSVAXSASKIIPQGADSXMLAXKXVKHGAPSPSHPISAPQAAAAAALRRQMASQAPAVNXLXESXLKNVPQVVNVQELKNNPAXPSXAMGSSVPYSXAKXPHPVLXPVAANQAKQGSLINSLKPSGPXPASGQLSSGDKASGXAKIEXAVXSXPSASGQFSKPFSFSPSGXGFNFGIIXPXPSSNFXAAQGAXPSXKESSQPDAFSSGGGSKPSYEAIPESSPPSGIXSASNXXPGEPAASSSRPVAPSGXALSXXSSKLEXPPSKLGELLFPSSLAGEXLGSFSGLRVGQADDSXKPXNKASSXSLXSXQPXKXSGVPSGFNFXAPPVLGKHXEPPVXSSAXXXSVAPPAAXSXSSXAVFGSLPVXSAGSSGVISFGGXSLSAGKXSFSFGSQQXNSXVPPSAPPPXXAAXPLPXSFPXLSFGSLLSSAXXPSLPMSAGRSXEEAXSSALPEKPGDSEVSASAASLLEEQQSAQLPQAPPQXSDSVKKEPVLAQPAVSNSGXAASSXSLVALSAEAXPAXXGVPDARXEAVPPASSFSVPGQXAVXAAAISSAGPVAVEXSSXPIASSXXSIVAPGPSAEAAAFGXVXSGSSVFAQPPAASSSSAFNQLXNNXAXAPSAXPVFGQVAASXAPSLFGQQXGSXASXAAAXPQVSSSGFSSPAFGXXAPGVFGQXXFGQASVFGQSASSAASVFSFSQPGFSSVPAFGQPASSXPXSXSGSVFGAASSXSSSSSFSFGQSSPNXGGGLFGQSNAPAFGQSPGFGQGGSVFGGXSAAXXXAAXSGFSFCQASGFGSSNXGSVFGQAASXGGIVFGQQSSSSSGSVFGSGNXGRGGGFFSGLGGKPSQDAANKNPFSSASGGFGSXAXSNXSNLFGNSGAKXFGGFASSSFGEQKPXGXFSSGGGSVASQGFGFSSPNKXGGFGAAPVFGSPPXFGGSPGFGGVPAFGSAPAFXSPLGSXGGKVFGEGXAAASAGGFGFGSSSNXXSFGXLASQNAPXFGSLSQQXSGFGXQSSGFSGFGSGXGGFSFGSNNSSVQGFGGWRS

SEQ ID NO: 18497 - protein, 2090 aa, Homo sapiens
  MOD_RES (64)..(64): Selenocysteine
  MOD_RES (106)..(106): Selenocysteine
  MOD_RES (127)..(127): Selenocysteine
  MOD_RES (160)..(160): Selenocysteine
  MOD_RES (180)..(180): Selenocysteine
  MOD_RES (182)..(182): Selenocysteine
  MOD_RES (188)..(188): Selenocysteine
  MOD_RES (192)..(192): Selenocysteine
  MOD_RES (196)..(196): Selenocysteine
  MOD_RES (215)..(215): Selenocysteine
  MOD_RES (222)..(222): Selenocysteine
  MOD_RES (251)..(251): Selenocysteine
  MOD_RES (264)..(264): Selenocysteine
  MOD_RES (267)..(267): Selenocysteine
  MOD_RES (299)..(299): Selenocysteine
  MOD_RES (324)..(324): Selenocysteine
  MOD_RES (354)..(354): Selenocysteine
  MOD_RES (370)..(370): Selenocysteine
  MOD_RES (376)..(376): Selenocysteine
  MOD_RES (382)..(382): Selenocysteine
  MOD_RES (394)..(394): Selenocysteine
  MOD_RES (416)..(416): Selenocysteine
  MOD_RES (434)..(434): Selenocysteine
  MOD_RES (436)..(437): Selenocysteine
  MOD_RES (439)..(439): Selenocysteine
  MOD_RES (469)..(469): Selenocysteine
  MOD_RES (480)..(480): Selenocysteine
  MOD_RES (494)..(494): Selenocysteine
  MOD_RES (496)..(496): Selenocysteine
  MOD_RES (519)..(519): Selenocysteine
  MOD_RES (533)..(533): Selenocysteine
  MOD_RES (556)..(556): Selenocysteine
  MOD_RES (560)..(560): Selenocysteine
  MOD_RES (580)..(580): Selenocysteine
  MOD_RES (592)..(592): Selenocysteine
  MOD_RES (596)..(596): Selenocysteine
  MOD_RES (598)..(598): Selenocysteine
  MOD_RES (628)..(628): Selenocysteine
  MOD_RES (670)..(670): Selenocysteine
  MOD_RES (724)..(724): Selenocysteine
  MOD_RES (733)..(733): Selenocysteine
  MOD_RES (742)..(742): Selenocysteine
  MOD_RES (749)..(749): Selenocysteine
  MOD_RES (757)..(758): Selenocysteine
  MOD_RES (770)..(771): Selenocysteine
  MOD_RES (856)..(856): Selenocysteine
  MOD_RES (860)..(860): Selenocysteine
  MOD_RES (891)..(891): Selenocysteine
  MOD_RES (923)..(924): Selenocysteine
  MOD_RES (929)..(929): Selenocysteine
  MOD_RES (956)..(956): Selenocysteine
  MOD_RES (962)..(962): Selenocysteine
  MOD_RES (987)..(987): Selenocysteine
  MOD_RES (1001)..(1001): Selenocysteine
  MOD_RES (1021)..(1021): Selenocysteine
  MOD_RES (1051)..(1051): Selenocysteine
  MOD_RES (1055)..(1055): Selenocysteine
  MOD_RES (1068)..(1068): Selenocysteine
  MOD_RES (1072)..(1072): Selenocysteine
  MOD_RES (1074)..(1074): Selenocysteine
  MOD_RES (1110)..(1110): Selenocysteine
  MOD_RES (1112)..(1112): Selenocysteine
  MOD_RES (1115)..(1115): Selenocysteine
  MOD_RES (1134)..(1134): Selenocysteine
  MOD_RES (1137)..(1137): Selenocysteine
  MOD_RES (1147)..(1147): Selenocysteine
  MOD_RES (1150)..(1150): Selenocysteine
  MOD_RES (1156)..(1156): Selenocysteine
  MOD_RES (1178)..(1178): Selenocysteine
  MOD_RES (1193)..(1193): Selenocysteine
  MOD_RES (1198)..(1198): Selenocysteine
  MOD_RES (1201)..(1201): Selenocysteine
  MOD_RES (1203)..(1203): Selenocysteine
  MOD_RES (1221)..(1221): Selenocysteine
  MOD_RES (1229)..(1229): Selenocysteine
  MOD_RES (1231)..(1231): Selenocysteine
  MOD_RES (1237)..(1237): Selenocysteine
  MOD_RES (1243)..(1243): Selenocysteine
  MOD_RES (1246)..(1246): Selenocysteine
  MOD_RES (1278)..(1278): Selenocysteine
  MOD_RES (1283)..(1284): Selenocysteine
  MOD_RES (1301)..(1301): Selenocysteine
  MOD_RES (1305)..(1306): Selenocysteine
  MOD_RES (1312)..(1312): Selenocysteine
  MOD_RES (1330)..(1330): Selenocysteine
  MOD_RES (1346)..(1346): Selenocysteine
  MOD_RES (1349)..(1349): Selenocysteine
  MOD_RES (1355)..(1355): Selenocysteine
  MOD_RES (1358)..(1358): Selenocysteine
  MOD_RES (1360)..(1360): Selenocysteine
  MOD_RES (1363)..(1363): Selenocysteine
  MOD_RES (1365)..(1365): Selenocysteine
  MOD_RES (1375)..(1375): Selenocysteine
  MOD_RES (1384)..(1384): Selenocysteine
  MOD_RES (1389)..(1389): Selenocysteine
  MOD_RES (1393)..(1395): Selenocysteine
  MOD_RES (1403)..(1403): Selenocysteine
  MOD_RES (1405)..(1405): Selenocysteine
  MOD_RES (1408)..(1408): Selenocysteine
  MOD_RES (1417)..(1417): Selenocysteine
  MOD_RES (1430)..(1430): Selenocysteine
  MOD_RES (1437)..(1437): Selenocysteine
  MOD_RES (1446)..(1446): Selenocysteine
  MOD_RES (1449)..(1449): Selenocysteine
  MOD_RES (1458)..(1459): Selenocysteine
  MOD_RES (1462)..(1462): Selenocysteine
  MOD_RES (1466)..(1466): Selenocysteine
  MOD_RES (1470)..(1470): Selenocysteine
  MOD_RES (1481)..(1482): Selenocysteine
  MOD_RES (1493)..(1493): Selenocysteine
  MOD_RES (1497)..(1497): Selenocysteine
  MOD_RES (1533)..(1533): Selenocysteine
  MOD_RES (1553)..(1553): Selenocysteine
  MOD_RES (1558)..(1558): Selenocysteine
  MOD_RES (1568)..(1568): Selenocysteine
  MOD_RES (1571)..(1572): Selenocysteine
  MOD_RES (1579)..(1579): Selenocysteine
  MOD_RES (1594)..(1594): Selenocysteine
  MOD_RES (1597)..(1597): Selenocysteine
  MOD_RES (1611)..(1611): Selenocysteine
  MOD_RES (1614)..(1614): Selenocysteine
  MOD_RES (1620)..(1621): Selenocysteine
  MOD_RES (1637)..(1637): Selenocysteine
  MOD_RES (1639)..(1639): Selenocysteine
  MOD_RES (1661)..(1661): Selenocysteine
  MOD_RES (1664)..(1664): Selenocysteine
  MOD_RES (1666)..(1666): Selenocysteine
  MOD_RES (1671)..(1671): Selenocysteine
  MOD_RES (1681)..(1681): Selenocysteine
  MOD_RES (1690)..(1690): Selenocysteine
  MOD_RES (1693)..(1693): Selenocysteine
  MOD_RES (1696)..(1696): Selenocysteine
  MOD_RES (1700)..(1700): Selenocysteine
  MOD_RES (1715)..(1716): Selenocysteine
  MOD_RES (1724)..(1725): Selenocysteine
  MOD_RES (1763)..(1763): Selenocysteine
  MOD_RES (1765)..(1765): Selenocysteine
  MOD_RES (1767)..(1767): Selenocysteine
  MOD_RES (1778)..(1778): Selenocysteine
  MOD_RES (1793)..(1793): Selenocysteine
  MOD_RES (1822)..(1822): Selenocysteine
  MOD_RES (1826)..(1828): Selenocysteine
  MOD_RES (1831)..(1831): Selenocysteine
  MOD_RES (1847)..(1847): Selenocysteine
  MOD_RES (1857)..(1857): Selenocysteine
  MOD_RES (1879)..(1879): Selenocysteine
  MOD_RES (1913)..(1913): Selenocysteine
  MOD_RES (1915)..(1915): Selenocysteine
  MOD_RES (1918)..(1918): Selenocysteine
  MOD_RES (1929)..(1929): Selenocysteine
  MOD_RES (1944)..(1944): Selenocysteine
  MOD_RES (1946)..(1946): Selenocysteine
  MOD_RES (1967)..(1967): Selenocysteine
  MOD_RES (1981)..(1981): Selenocysteine
  MOD_RES (2001)..(2001): Selenocysteine
  MOD_RES (2007)..(2007): Selenocysteine
  MOD_RES (2016)..(2016): Selenocysteine
  MOD_RES (2032)..(2033): Selenocysteine
  MOD_RES (2037)..(2037): Selenocysteine
  MOD_RES (2045)..(2045): Selenocysteine
  MOD_RES (2053)..(2053): Selenocysteine
  MOD_RES (2058)..(2058): Selenocysteine
  MOD_RES (2070)..(2070): Selenocysteine
MGDEMDAMIPEREMKDFQFRALKKVRIFDSPEELPKERSSLLAVSNKYGLVFAGGASGLQIFPXKNLLIQNKPGDDPNKIVDKVQGLLVPMKFPIHHLALSCDNLXLSACMMSSEYGSIIAFFDVRXFSNEAKQQKRPFAYHKLLKDAGGMVIDMKWNPXVPSMVAVCLADGSIAVLQVXEXVKVCAXLPSXVAVXSVCWSPKGKQLAVGKQNGXVVQYLPXLQEKKVIPCPPFYESDHPVRVLDVLWIGXYVFAIVYAAADGXLEXSPDVVMALLPKKEEKHPEIFVNFMEPCYGSCXERQHHYYLSYIEEWDLVLAASAASXEVSILARQSDQINWESWLLEDSSRAELPVXDKSDDSLPMGVVVDYXNQVEIXISDEKXLPPAPVLMLLSXDGVLCPFYMINQNPGVKSLIKXPERLSLEGERQPKSPGSXPXXPXSSQAPQKLDASAAAAPASLPPSSPAAPIAXFSLLPAGGAPXVFSFGSSSLKSSAXVXGEPPSYSSGSDSSKAAPGPGPSXFSFVPPSKASLAPXPAASPVAPSAASFSFGSSGFKPXLESXPVPSVSAPNIAMKPSFPPSXSAVKVNLSEKFXAAAXSXPVSSSQSAPPMSPFSSASKPAASGPLSHPXPLSAPPSSVPLKSSVLPSPSGRSAQGSSSPVPSMVQKSPRIXPPAAKPGSPQAKSLQPAVAEKQGHQWKDSDPVMAGIGEEIAHFQKELEELKARXSKACFQVGXSEEMKMLRXESDDLHXFLLEIKEXXESLHGDISSLKXXLLEGFAGVEEAREQNERNRDSGYLHLLYKRPLDPKSEAQLQEIRRLHQYVKFAVQDVNDVLDLEWDQHLEQKKKQRHLLVPEREXLFNXLANNREIINQQRKRLNHLVDSLQQLRLYKQXSLWSLSSAVPSQSSIHSFDSDLESLCNALLKXXIESHXKSLPKVPAKLSPMKQAQLRNFLAKRKXPPVRSXAPASLSRSAFLSQRYYEDLDEVSSXSSVSQSLESEDARXSCKDDEAVVQAPRHAPVVRXPSIQPSLLPHAAPFAKSHLVHGSSPGVMGXSVAXSASKIIPQGADSXMLAXKXVKHGAPSPSHPISAPQAAAAAALRRQMASQAPAVNXLXESXLKNVPQVVNVQELKNNPAXPSXAMGSSVPYSXAKXPHPVLXPVAANQAKQGSLINSLKPSGPXPASGQLSSGDKASGXAKIEXAVXSXPSASGQFSKPFSFSPSGXGFNFGIIXPXPSSNFXAAQGAXPSXKESSQPDAFSSGGGSKPSYEAIPESSPPSGIXSASNXXPGEPAASSSRPVAPSGXALSXXSSKLEXPPSKLGELLFPSSLAGEXLGSFSGLRVGQADDSXKPXNKASSXSLXSXQPXKXSGVPSGFNFXAPPVLGKHXEPPVXSSAXXXSVAPPAAXSXSSXAVFGSLPVXSAGSSGVISFGGXSLSAGKXSFSFGSQQXNSXVPPSAPPPXXAAXPLPXSFPXLSFGSLLSSAXXPSLPMSAGRSXEEAXSSALPEKPGDSEVSASAASLLEEQQSAQLPQAPPQXSDSVKKEPVLAQPAVSNSGXAASSXSLVALSAEAXPAXXGVPDARXEAVPPASSFSVPGQXAVXAAAISSAGPVAVEXSSXPIASSXXSIVAPGPSAEAAAFGXVXSGSSVFAQPPAASSSSAFNQLXNNXAXAPSAXPVFGQVAASXAPSLFGQQXGSXASXAAAXPQVSSSGFSSPAFGXXAPGVFGQXXFGQASVFGQSASSAASVFSFSQPGFSSVPAFGQPASSXPXSXSGSVFGAASSXSSSSSFSFGQSSPNXGGGLFGQSNAPAFGQSPGFGQGGSVFGGXSAAXXXAAXSGFSFCQASGFGSSNXGSVFGQAASXGGIVFGQQSSSSSGSVFGSGNXGRGGGFFSGLGGKPSQDAANKNPFSSASGGFGSXAXSNXSNLFGNSGAKXFGGFASSSFGEQKPXGXFSSGGGSVASQGFGFSSPNKXGGFGAAPVFGSPPXFGGSPGFGGVPAFGSAPAFXSPLGSXGGKVFGEGXAAASAGGFGFGSSSNXXSFGXLASQNAPXFGSLSQQXSGFGXQSSGFSGFGSGXGGFSFGSNNSSVQGFGGWRS

SEQ ID NO: 18498 - protein, 52 aa, Homo sapiens
  MOD_RES (16)..(16): Selenocysteine
  MOD_RES (37)..(37): Selenocysteine
MKFPIHHLALSCDNLXLSACMMSSEYGSIIAFFDVRXFSNEAKQQKRPFAYH

SEQ ID NO: 18499 - protein, 1519 aa, Homo sapiens
  MOD_RES (9)..(9): Selenocysteine
  MOD_RES (21)..(21): Selenocysteine
  MOD_RES (25)..(25): Selenocysteine
  MOD_RES (27)..(27): Selenocysteine
  MOD_RES (57)..(57): Selenocysteine
  MOD_RES (99)..(99): Selenocysteine
  MOD_RES (153)..(153): Selenocysteine
  MOD_RES (162)..(162): Selenocysteine
  MOD_RES (171)..(171): Selenocysteine
  MOD_RES (178)..(178): Selenocysteine
  MOD_RES (186)..(187): Selenocysteine
  MOD_RES (199)..(200): Selenocysteine
  MOD_RES (285)..(285): Selenocysteine
  MOD_RES (289)..(289): Selenocysteine
  MOD_RES (320)..(320): Selenocysteine
  MOD_RES (352)..(353): Selenocysteine
  MOD_RES (358)..(358): Selenocysteine
  MOD_RES (385)..(385): Selenocysteine
  MOD_RES (391)..(391): Selenocysteine
  MOD_RES (416)..(416): Selenocysteine
  MOD_RES (430)..(430): Selenocysteine
  MOD_RES (450)..(450): Selenocysteine
  MOD_RES (480)..(480): Selenocysteine
  MOD_RES (484)..(484): Selenocysteine
  MOD_RES (497)..(497): Selenocysteine
  MOD_RES (501)..(501): Selenocysteine
  MOD_RES (503)..(503): Selenocysteine
  MOD_RES (539)..(539): Selenocysteine
  MOD_RES (541)..(541): Selenocysteine
  MOD_RES (544)..(544): Selenocysteine
  MOD_RES (563)..(563): Selenocysteine
  MOD_RES (566)..(566): Selenocysteine
  MOD_RES (576)..(576): Selenocysteine
  MOD_RES (579)..(579): Selenocysteine
  MOD_RES (585)..(585): Selenocysteine
  MOD_RES (607)..(607): Selenocysteine
  MOD_RES (622)..(622): Selenocysteine
  MOD_RES (627)..(627): Selenocysteine
  MOD_RES (630)..(630): Selenocysteine
  MOD_RES (632)..(632): Selenocysteine
  MOD_RES (650)..(650): Selenocysteine
  MOD_RES (658)..(658): Selenocysteine
  MOD_RES (660)..(660): Selenocysteine
  MOD_RES (666)..(666): Selenocysteine
  MOD_RES (672)..(672): Selenocysteine
  MOD_RES (675)..(675): Selenocysteine
  MOD_RES (707)..(707): Selenocysteine
  MOD_RES (712)..(713): Selenocysteine
  MOD_RES (730)..(730): Selenocysteine
  MOD_RES (734)..(735): Selenocysteine
  MOD_RES (741)..(741): Selenocysteine
  MOD_RES (759)..(759): Selenocysteine
  MOD_RES (775)..(775): Selenocysteine
  MOD_RES (778)..(778): Selenocysteine
  MOD_RES (784)..(784): Selenocysteine
  MOD_RES (787)..(787): Selenocysteine
  MOD_RES (789)..(789): Selenocysteine
  MOD_RES (792)..(792): Selenocysteine
  MOD_RES (794)..(794): Selenocysteine
  MOD_RES (804)..(804): Selenocysteine
  MOD_RES (813)..(813): Selenocysteine
  MOD_RES (818)..(818): Selenocysteine
  MOD_RES (822)..(824): Selenocysteine
  MOD_RES (832)..(832): Selenocysteine
  MOD_RES (834)..(834): Selenocysteine
  MOD_RES (837)..(837): Selenocysteine
  MOD_RES (846)..(846): Selenocysteine
  MOD_RES (859)..(859): Selenocysteine
  MOD_RES (866)..(866): Selenocysteine
  MOD_RES (875)..(875): Selenocysteine
  MOD_RES (878)..(878): Selenocysteine
  MOD_RES (887)..(888): Selenocysteine
  MOD_RES (891)..(891): Selenocysteine
  MOD_RES (895)..(895): Selenocysteine
  MOD_RES (899)..(899): Selenocysteine
  MOD_RES (910)..(911): Selenocysteine
  MOD_RES (922)..(922): Selenocysteine
  MOD_RES (926)..(926): Selenocysteine
  MOD_RES (962)..(962): Selenocysteine
  MOD_RES (982)..(982): Selenocysteine
  MOD_RES (987)..(987): Selenocysteine
  MOD_RES (997)..(997): Selenocysteine
  MOD_RES (1000)..(1001): Selenocysteine
  MOD_RES (1008)..(1008): Selenocysteine
  MOD_RES (1023)..(1023): Selenocysteine
  MOD_RES (1026)..(1026): Selenocysteine
  MOD_RES (1040)..(1040): Selenocysteine
  MOD_RES (1043)..(1043): Selenocysteine
  MOD_RES (1049)..(1050): Selenocysteine
  MOD_RES (1066)..(1066): Selenocysteine
  MOD_RES (1068)..(1068): Selenocysteine
  MOD_RES (1090)..(1090): Selenocysteine
  MOD_RES (1093)..(1093): Selenocysteine
  MOD_RES (1095)..(1095): Selenocysteine
  MOD_RES (1100)..(1100): Selenocysteine
  MOD_RES (1110)..(1110): Selenocysteine
  MOD_RES (1119)..(1119): Selenocysteine
  MOD_RES (1122)..(1122): Selenocysteine
  MOD_RES (1125)..(1125): Selenocysteine
  MOD_RES (1129)..(1129): Selenocysteine
  MOD_RES (1144)..(1145): Selenocysteine
  MOD_RES (1153)..(1154): Selenocysteine
  MOD_RES (1192)..(1192): Selenocysteine
  MOD_RES (1194)..(1194): Selenocysteine
  MOD_RES (1196)..(1196): Selenocysteine
  MOD_RES (1207)..(1207): Selenocysteine
  MOD_RES (1222)..(1222): Selenocysteine
  MOD_RES (1251)..(1251): Selenocysteine
  MOD_RES (1255)..(1257): Selenocysteine
  MOD_RES (1260)..(1260): Selenocysteine
  MOD_RES (1276)..(1276): Selenocysteine
  MOD_RES (1286)..(1286): Selenocysteine
  MOD_RES (1308)..(1308): Selenocysteine
  MOD_RES (1342)..(1342): Selenocysteine
  MOD_RES (1344)..(1344): Selenocysteine
  MOD_RES (1347)..(1347): Selenocysteine
  MOD_RES (1358)..(1358): Selenocysteine
  MOD_RES (1373)..(1373): Selenocysteine
  MOD_RES (1375)..(1375): Selenocysteine
  MOD_RES (1396)..(1396): Selenocysteine
  MOD_RES (1410)..(1410): Selenocysteine
  MOD_RES (1430)..(1430): Selenocysteine
  MOD_RES (1436)..(1436): Selenocysteine
  MOD_RES (1445)..(1445): Selenocysteine
  MOD_RES (1461)..(1462): Selenocysteine
  MOD_RES (1466)..(1466): Selenocysteine
  MOD_RES (1474)..(1474): Selenocysteine
  MOD_RES (1482)..(1482): Selenocysteine
  MOD_RES (1487)..(1487): Selenocysteine
  MOD_RES (1499)..(1499): Selenocysteine
MKPSFPPSXSAVKVNLSEKFXAAAXSXPVSSSQSAPPMSPFSSASKPAASGPLSHPXPLSAPPSSVPLKSSVLPSPSGRSAQGSSSPVPSMVQKSPRIXPPAAKPGSPQAKSLQPAVAEKQGHQWKDSDPVMAGIGEEIAHFQKELEELKARXSKACFQVGXSEEMKMLRXESDDLHXFLLEIKEXXESLHGDISSLKXXLLEGFAGVEEAREQNERNRDSGYLHLLYKRPLDPKSEAQLQEIRRLHQYVKFAVQDVNDVLDLEWDQHLEQKKKQRHLLVPEREXLFNXLANNREIINQQRKRLNHLVDSLQQLRLYKQXSLWSLSSAVPSQSSIHSFDSDLESLCNALLKXXIESHXKSLPKVPAKLSPMKQAQLRNFLAKRKXPPVRSXAPASLSRSAFLSQRYYEDLDEVSSXSSVSQSLESEDARXSCKDDEAVVQAPRHAPVVRXPSIQPSLLPHAAPFAKSHLVHGSSPGVMGXSVAXSASKIIPQGADSXMLAXKXVKHGAPSPSHPISAPQAAAAAALRRQMASQAPAVNXLXESXLKNVPQVVNVQELKNNPAXPSXAMGSSVPYSXAKXPHPVLXPVAANQAKQGSLINSLKPSGPXPASGQLSSGDKASGXAKIEXAVXSXPSASGQFSKPFSFSPSGXGFNFGIIXPXPSSNFXAAQGAXPSXKESSQPDAFSSGGGSKPSYEAIPESSPPSGIXSASNXXPGEPAASSSRPVAPSGXALSXXSSKLEXPPSKLGELLFPSSLAGEXLGSFSGLRVGQADDSXKPXNKASSXSLXSXQPXKXSGVPSGFNFXAPPVLGKHXEPPVXSSAXXXSVAPPAAXSXSSXAVFGSLPVXSAGSSGVISFGGXSLSAGKXSFSFGSQQXNSXVPPSAPPPXXAAXPLPXSFPXLSFGSLLSSAXXPSLPMSAGRSXEEAXSSALPEKPGDSEVSASAASLLEEQQSAQLPQAPPQXSDSVKKEPVLAQPAVSNSGXAASSXSLVALSAEAXPAXXGVPDARXEAVPPASSFSVPGQXAVXAAAISSAGPVAVEXSSXPIASSXXSIVAPGPSAEAAAFGXVXSGSSVFAQPPAASSSSAFNQLXNNXAXAPSAXPVFGQVAASXAPSLFGQQXGSXASXAAAXPQVSSSGFSSPAFGXXAPGVFGQXXFGQASVFGQSASSAASVFSFSQPGFSSVPAFGQPASSXPXSXSGSVFGAASSXSSSSSFSFGQSSPNXGGGLFGQSNAPAFGQSPGFGQGGSVFGGXSAAXXXAAXSGFSFCQASGFGSSNXGSVFGQAASXGGIVFGQQSSSSSGSVFGSGNXGRGGGFFSGLGGKPSQDAANKNPFSSASGGFGSXAXSNXSNLFGNSGAKXFGGFASSSFGEQKPXGXFSSGGGSVASQGFGFSSPNKXGGFGAAPVFGSPPXFGGSPGFGGVPAFGSAPAFXSPLGSXGGKVFGEGXAAASAGGFGFGSSSNXXSFGXLASQNAPXFGSLSQQXSGFGXQSSGFSGFGSGXGGFSFGSNNSSVQGFGGWRS

SEQ ID NO: 18500 - protein, 495 aa, Homo sapiens
  MOD_RES (20)..(20): Selenocysteine
  MOD_RES (23)..(23): Selenocysteine
  MOD_RES (55)..(55): Selenocysteine
  MOD_RES (60)..(61): Selenocysteine
  MOD_RES (78)..(78): Selenocysteine
  MOD_RES (82)..(83): Selenocysteine
  MOD_RES (89)..(89): Selenocysteine
  MOD_RES (107)..(107): Selenocysteine
  MOD_RES (123)..(123): Selenocysteine
  MOD_RES (126)..(126): Selenocysteine
  MOD_RES (132)..(132): Selenocysteine
  MOD_RES (135)..(135): Selenocysteine
  MOD_RES (137)..(137): Selenocysteine
  MOD_RES (140)..(140): Selenocysteine
  MOD_RES (142)..(142): Selenocysteine
  MOD_RES (152)..(152): Selenocysteine
  MOD_RES (161)..(161): Selenocysteine
  MOD_RES (166)..(166): Selenocysteine
  MOD_RES (170)..(172): Selenocysteine
  MOD_RES (180)..(180): Selenocysteine
  MOD_RES (182)..(182): Selenocysteine
  MOD_RES (185)..(185): Selenocysteine
  MOD_RES (194)..(194): Selenocysteine
  MOD_RES (207)..(207): Selenocysteine
  MOD_RES (214)..(214): Selenocysteine
  MOD_RES (223)..(223): Selenocysteine
  MOD_RES (226)..(226): Selenocysteine
  MOD_RES (235)..(236): Selenocysteine
  MOD_RES (239)..(239): Selenocysteine
  MOD_RES (243)..(243): Selenocysteine
  MOD_RES (247)..(247): Selenocysteine
  MOD_RES (258)..(259): Selenocysteine
  MOD_RES (270)..(270): Selenocysteine
  MOD_RES (274)..(274): Selenocysteine
  MOD_RES (310)..(310): Selenocysteine
  MOD_RES (330)..(330): Selenocysteine
  MOD_RES (335)..(335): Selenocysteine
  MOD_RES (345)..(345): Selenocysteine
  MOD_RES (348)..(349): Selenocysteine
  MOD_RES (356)..(356): Selenocysteine
  MOD_RES (371)..(371): Selenocysteine
  MOD_RES (374)..(374): Selenocysteine
  MOD_RES (388)..(388): Selenocysteine
  MOD_RES (391)..(391): Selenocysteine
  MOD_RES (397)..(398): Selenocysteine
  MOD_RES (414)..(414): Selenocysteine
  MOD_RES (416)..(416): Selenocysteine
  MOD_RES (438)..(438): Selenocysteine
  MOD_RES (441)..(441): Selenocysteine
  MOD_RES (443)..(443): Selenocysteine
  MOD_RES (448)..(448): Selenocysteine
  MOD_RES (458)..(458): Selenocysteine
  MOD_RES (467)..(467): Selenocysteine
  MOD_RES (470)..(470): Selenocysteine
  MOD_RES (473)..(473): Selenocysteine
  MOD_RES (477)..(477): Selenocysteine
  MOD_RES (492)..(493): Selenocysteine
MKSSLLLRGVHFCFHLPGAXPSXKESSQPDAFSSGGGSKPSYEAIPESSPPSGIXSASNXXPGEPAASSSRPVAPSGXALSXXSSKLEXPPSKLGELLFPSSLAGEXLGSFSGLRVGQADDSXKPXNKASSXSLXSXQPXKXSGVPSGFNFXAPPVLGKHXEPPVXSSAXXXSVAPPAAXSXSSXAVFGSLPVXSAGSSGVISFGGXSLSAGKXSFSFGSQQXNSXVPPSAPPPXXAAXPLPXSFPXLSFGSLLSSAXXPSLPMSAGRSXEEAXSSALPEKPGDSEVSASAASLLEEQQSAQLPQAPPQXSDSVKKEPVLAQPAVSNSGXAASSXSLVALSAEAXPAXXGVPDARXEAVPPASSFSVPGQXAVXAAAISSAGPVAVEXSSXPIASSXXSIVAPGPSAEAAAFGXVXSGSSVFAQPPAASSSSAFNQLXNNXAXAPSAXPVFGQVAASXAPSLFGQQXGSXASXAAAXPQVSSSGFSSPAFGXXAP

SEQ ID NO: 18501 - protein, 916 aa, Homo sapiens
  MOD_RES (19)..(19): Selenocysteine
  MOD_RES (24)..(24): Selenocysteine
  MOD_RES (27)..(27): Selenocysteine
  MOD_RES (29)..(29): Selenocysteine
  MOD_RES (47)..(47): Selenocysteine
  MOD_RES (55)..(55): Selenocysteine
  MOD_RES (57)..(57): Selenocysteine
  MOD_RES (63)..(63): Selenocysteine
  MOD_RES (69)..(69): Selenocysteine
  MOD_RES (72)..(72): Selenocysteine
  MOD_RES (104)..(104): Selenocysteine
  MOD_RES (109)..(110): Selenocysteine
  MOD_RES (127)..(127): Selenocysteine
  MOD_RES (131)..(132): Selenocysteine
  MOD_RES (138)..(138): Selenocysteine
  MOD_RES (156)..(156): Selenocysteine
  MOD_RES (172)..(172): Selenocysteine
  MOD_RES (175)..(175): Selenocysteine
  MOD_RES (181)..(181): Selenocysteine
  MOD_RES (184)..(184): Selenocysteine
  MOD_RES (186)..(186): Selenocysteine
  MOD_RES (189)..(189): Selenocysteine
  MOD_RES (191)..(191): Selenocysteine
  MOD_RES (201)..(201): Selenocysteine
  MOD_RES (210)..(210): Selenocysteine
  MOD_RES (215)..(215): Selenocysteine
  MOD_RES (219)..(221): Selenocysteine
  MOD_RES (229)..(229): Selenocysteine
  MOD_RES (231)..(231): Selenocysteine
  MOD_RES (234)..(234): Selenocysteine
  MOD_RES (243)..(243): Selenocysteine
  MOD_RES (256)..(256): Selenocysteine
  MOD_RES (263)..(263): Selenocysteine
  MOD_RES (272)..(272): Selenocysteine
  MOD_RES (275)..(275): Selenocysteine
  MOD_RES (284)..(285): Selenocysteine
  MOD_RES (288)..(288): Selenocysteine
  MOD_RES (292)..(292): Selenocysteine
  MOD_RES (296)..(296): Selenocysteine
  MOD_RES (307)..(308): Selenocysteine
  MOD_RES (319)..(319): Selenocysteine
  MOD_RES (323)..(323): Selenocysteine
  MOD_RES (359)..(359): Selenocysteine
  MOD_RES (379)..(379): Selenocysteine
  MOD_RES (384)..(384): Selenocysteine
  MOD_RES (394)..(394): Selenocysteine
  MOD_RES (397)..(398): Selenocysteine
  MOD_RES (405)..(405): Selenocysteine
  MOD_RES (420)..(420): Selenocysteine
  MOD_RES (423)..(423): Selenocysteine
  MOD_RES (437)..(437): Selenocysteine
  MOD_RES (440)..(440): Selenocysteine
  MOD_RES (446)..(447): Selenocysteine
  MOD_RES (463)..(463): Selenocysteine
  MOD_RES (465)..(465): Selenocysteine
  MOD_RES (487)..(487): Selenocysteine
  MOD_RES (490)..(490): Selenocysteine
  MOD_RES (492)..(492): Selenocysteine
  MOD_RES (497)..(497): Selenocysteine
  MOD_RES (507)..(507): Selenocysteine
  MOD_RES (516)..(516): Selenocysteine
  MOD_RES (519)..(519): Selenocysteine
  MOD_RES (522)..(522): Selenocysteine
  MOD_RES (526)..(526): Selenocysteine
  MOD_RES (541)..(542): Selenocysteine
  MOD_RES (550)..(551): Selenocysteine
  MOD_RES (589)..(589): Selenocysteine
  MOD_RES (591)..(591): Selenocysteine
  MOD_RES (593)..(593): Selenocysteine
  MOD_RES (604)..(604): Selenocysteine
  MOD_RES (619)..(619): Selenocysteine
  MOD_RES (648)..(648): Selenocysteine
  MOD_RES (652)..(654): Selenocysteine
  MOD_RES (657)..(657): Selenocysteine
  MOD_RES (673)..(673): Selenocysteine
  MOD_RES (683)..(683): Selenocysteine
  MOD_RES (705)..(705): Selenocysteine
  MOD_RES (739)..(739): Selenocysteine
  MOD_RES (741)..(741): Selenocysteine
  MOD_RES (744)..(744): Selenocysteine
  MOD_RES (755)..(755): Selenocysteine
  MOD_RES (770)..(770): Selenocysteine
  MOD_RES (772)..(772): Selenocysteine
  MOD_RES (793)..(793): Selenocysteine
  MOD_RES (807)..(807): Selenocysteine
  MOD_RES (827)..(827): Selenocysteine
  MOD_RES (833)..(833): Selenocysteine
  MOD_RES (842)..(842): Selenocysteine
  MOD_RES (858)..(859): Selenocysteine
  MOD_RES (863)..(863): Selenocysteine
  MOD_RES (871)..(871): Selenocysteine
  MOD_RES (879)..(879): Selenocysteine
  MOD_RES (884)..(884): Selenocysteine
  MOD_RES (896)..(896): Selenocysteine
MKSSLLLRGVHFCFHLPGXAKIEXAVXSXPSASGQFSKPFSFSPSGXGFNFGIIXPXPSSNFXAAQGAXPSXKESSQPDAFSSGGGSKPSYEAIPESSPPSGIXSASNXXPGEPAASSSRPVAPSGXALSXXSSKLEXPPSKLGELLFPSSLAGEXLGSFSGLRVGQADDSXKPXNKASSXSLXSXQPXKXSGVPSGFNFXAPPVLGKHXEPPVXSSAXXXSVAPPAAXSXSSXAVFGSLPVXSAGSSGVISFGGXSLSAGKXSFSFGSQQXNSXVPPSAPPPXXAAXPLPXSFPXLSFGSLLSSAXXPSLPMSAGRSXEEAXSSALPEKPGDSEVSASAASLLEEQQSAQLPQAPPQXSDSVKKEPVLAQPAVSNSGXAASSXSLVALSAEAXPAXXGVPDARXEAVPPASSFSVPGQXAVXAAAISSAGPVAVEXSSXPIASSXXSIVAPGPSAEAAAFGXVXSGSSVFAQPPAASSSSAFNQLXNNXAXAPSAXPVFGQVAASXAPSLFGQQXGSXASXAAAXPQVSSSGFSSPAFGXXAPGVFGQXXFGQASVFGQSASSAASVFSFSQPGFSSVPAFGQPASSXPXSXSGSVFGAASSXSSSSSFSFGQSSPNXGGGLFGQSNAPAFGQSPGFGQGGSVFGGXSAAXXXAAXSGFSFCQASGFGSSNXGSVFGQAASXGGIVFGQQSSSSSGSVFGSGNXGRGGGFFSGLGGKPSQDAANKNPFSSASGGFGSXAXSNXSNLFGNSGAKXFGGFASSSFGEQKPXGXFSSGGGSVASQGFGFSSPNKXGGFGAAPVFGSPPXFGGSPGFGGVPAFGSAPAFXSPLGSXGGKVFGEGXAAASAGGFGFGSSSNXXSFGXLASQNAPXFGSLSQQXSGFGXQSSGFSGFGSGXGGFSFGSNNSSVQGFGGWRS

SEQ ID NO: 18502 - protein, 187 aa, Homo sapiens
  MOD_RES (1)..(1): Any amino acid
  MOD_RES (26)..(26): Selenocysteine
  MOD_RES (42)..(42): Selenocysteine
  MOD_RES (48)..(48): Selenocysteine
  MOD_RES (54)..(54): Selenocysteine
  MOD_RES (66)..(66): Selenocysteine
  MOD_RES (88)..(88): Selenocysteine
  MOD_RES (109)..(109): Selenocysteine
  MOD_RES (132)..(132): Selenocysteine
  MOD_RES (136)..(136): Selenocysteine
  MOD_RES (156)..(156): Selenocysteine
  MOD_RES (168)..(168): Selenocysteine
  MOD_RES (172)..(172): Selenocysteine
  MOD_RES (174)..(174): Selenocysteine
XARQSDQINWESWLLEDSSRAELPVXDKSDDSLPMGVVVDYXNQVEIXISDEKXLPPAPVLMLLSXDGVLCPFYMINQNPGVKSLIKXPERLSLEGERQPKSPASLAPXPAASPVAPSAASFSFGSSGFKPXLESXPVPSVSAPNIAMKPSFPPSXSAVKVNLSEKFXAAAXSXPVSSSQSAPPMSP

SEQ ID NO: 18503 - protein, 145 aa, Homo sapiens
  MOD_RES (1)..(1): Any amino acid
  MOD_RES (13)..(13): Selenocysteine
  MOD_RES (19)..(19): Selenocysteine
  MOD_RES (28)..(28): Selenocysteine
  MOD_RES (44)..(45): Selenocysteine
  MOD_RES (49)..(49): Selenocysteine
  MOD_RES (57)..(57): Selenocysteine
  MOD_RES (65)..(65): Selenocysteine
  MOD_RES (70)..(70): Selenocysteine
  MOD_RES (82)..(82): Selenocysteine
  MOD_RES (106)..(106): Selenocysteine
  MOD_RES (125)..(125): Selenocysteine
XGVPAFGSAPAFXSPLGSXGGKVFGEGXAAASAGGFGFGSSSNXXSFGXLASQNAPXFGSLSQQXSGFGXQSSGFSGFGSGXGGLSRVLVAGEAEGVSAGLSIPGXNRILSFFPEKCWSRLFRPXLPSKHIHPERNNRNQNSQGA

SEQ ID NO: 18504 - protein, 967 aa, Homo sapiens
  MOD_RES (1)..(1): Any amino acid
  MOD_RES (3)..(3): Selenocysteine
  MOD_RES (9)..(9): Selenocysteine
  MOD_RES (31)..(31): Selenocysteine
  MOD_RES (46)..(46): Selenocysteine
  MOD_RES (51)..(51): Selenocysteine
  MOD_RES (54)..(54): Selenocysteine
  MOD_RES (56)..(56): Selenocysteine
  MOD_RES (74)..(74): Selenocysteine
  MOD_RES (82)..(82): Selenocysteine
  MOD_RES (84)..(84): Selenocysteine
  MOD_RES (90)..(90): Selenocysteine
  MOD_RES (96)..(96): Selenocysteine
  MOD_RES (99)..(99): Selenocysteine
  MOD_RES (131)..(131): Selenocysteine
  MOD_RES (136)..(137): Selenocysteine
  MOD_RES (154)..(154): Selenocysteine
  MOD_RES (158)..(159): Selenocysteine
  MOD_RES (165)..(165): Selenocysteine
  MOD_RES (183)..(183): Selenocysteine
  MOD_RES (199)..(199): Selenocysteine
  MOD_RES (202)..(202): Selenocysteine
  MOD_RES (208)..(208): Selenocysteine
  MOD_RES (211)..(211): Selenocysteine
  MOD_RES (213)..(213): Selenocysteine
  MOD_RES (216)..(216): Selenocysteine
  MOD_RES (218)..(218): Selenocysteine
  MOD_RES (228)..(228): Selenocysteine
  MOD_RES (237)..(237): Selenocysteine
  MOD_RES (242)..(242): Selenocysteine
  MOD_RES (246)..(248): Selenocysteine
  MOD_RES (256)..(256): Selenocysteine
  MOD_RES (258)..(258): Selenocysteine
  MOD_RES (261)..(261): Selenocysteine
  MOD_RES (270)..(270): Selenocysteine
  MOD_RES (283)..(283): Selenocysteine
  MOD_RES (290)..(290): Selenocysteine
  MOD_RES (299)..(299): Selenocysteine
  MOD_RES (302)..(302): Selenocysteine
  MOD_RES (311)..(312): Selenocysteine
  MOD_RES (315)..(315): Selenocysteine
  MOD_RES (319)..(319): Selenocysteine
  MOD_RES (323)..(323): Selenocysteine
  MOD_RES (334)..(335): Selenocysteine
  MOD_RES (346)..(346): Selenocysteine
  MOD_RES (350)..(350): Selenocysteine
  MOD_RES (386)..(386): Selenocysteine
  MOD_RES (406)..(406): Selenocysteine
  MOD_RES (411)..(411): Selenocysteine
  MOD_RES (421)..(421): Selenocysteine
  MOD_RES (424)..(425): Selenocysteine
  MOD_RES (432)..(432): Selenocysteine
  MOD_RES (447)..(447): Selenocysteine
  MOD_RES (450)..(450): Selenocysteine
  MOD_RES (464)..(464): Selenocysteine
  MOD_RES (467)..(467): Selenocysteine
  MOD_RES (473)..(474): Selenocysteine
  MOD_RES (490)..(490): Selenocysteine
  MOD_RES (492)..(492): Selenocysteine
  MOD_RES (514)..(514): Selenocysteine
  MOD_RES (517)..(517): Selenocysteine
  MOD_RES (519)..(519): Selenocysteine
  MOD_RES (524)..(524): Selenocysteine
  MOD_RES (534)..(534): Selenocysteine
  MOD_RES (543)..(543): Selenocysteine
  MOD_RES (546)..(546): Selenocysteine
  MOD_RES (549)..(549): Selenocysteine
  MOD_RES (553)..(553): Selenocysteine
  MOD_RES (568)..(569): Selenocysteine
  MOD_RES (577)..(578): Selenocysteine
  MOD_RES (616)..(616): Selenocysteine
  MOD_RES (618)..(618): Selenocysteine
  MOD_RES (620)..(620): Selenocysteine
  MOD_RES (631)..(631): Selenocysteine
  MOD_RES (646)..(646): Selenocysteine
  MOD_RES (675)..(675): Selenocysteine
  MOD_RES (679)..(681): Selenocysteine
  MOD_RES (684)..(684): Selenocysteine
  MOD_RES (700)..(700): Selenocysteine
  MOD_RES (710)..(710): Selenocysteine
  MOD_RES (732)..(732): Selenocysteine
  MOD_RES (766)..(766): Selenocysteine
  MOD_RES (768)..(768): Selenocysteine
  MOD_RES (771)..(771): Selenocysteine
  MOD_RES (782)..(782): Selenocysteine
  MOD_RES (797)..(797): Selenocysteine
  MOD_RES (799)..(799): Selenocysteine
  MOD_RES (820)..(820): Selenocysteine
  MOD_RES (834)..(834): Selenocysteine
  MOD_RES (854)..(854): Selenocysteine
  MOD_RES (860)..(860): Selenocysteine
  MOD_RES (869)..(869): Selenocysteine
  MOD_RES (887)..(887): Selenocysteine
  MOD_RES (928)..(928): Selenocysteine
  MOD_RES (956)..(956): Selenocysteine
  MOD_RES (959)..(959): Selenocysteine
XKXPHPVLXPVAANQAKQGSLINSLKPSGPXPASGQLSSGDKASGXAKIEXAVXSXPSASGQFSKPFSFSPSGXGFNFGIIXPXPSSNFXAAQGAXPSXKESSQPDAFSSGGGSKPSYEAIPESSPPSGIXSASNXXPGEPAASSSRPVAPSGXALSXXSSKLEXPPSKLGELLFPSSLAGEXLGSFSGLRVGQADDSXKPXNKASSXSLXSXQPXKXSGVPSGFNFXAPPVLGKHXEPPVXSSAXXXSVAPPAAXSXSSXAVFGSLPVXSAGSSGVISFGGXSLSAGKXSFSFGSQQXNSXVPPSAPPPXXAAXPLPXSFPXLSFGSLLSSAXXPSLPMSAGRSXEEAXSSALPEKPGDSEVSASAASLLEEQQSAQLPQAPPQXSDSVKKEPVLAQPAVSNSGXAASSXSLVALSAEAXPAXXGVPDARXEAVPPASSFSVPGQXAVXAAAISSAGPVAVEXSSXPIASSXXSIVAPGPSAEAAAFGXVXSGSSVFAQPPAASSSSAFNQLXNNXAXAPSAXPVFGQVAASXAPSLFGQQXGSXASXAAAXPQVSSSGFSSPAFGXXAPGVFGQXXFGQASVFGQSASSAASVFSFSQPGFSSVPAFGQPASSXPXSXSGSVFGAASSXSSSSSFSFGQSSPNXGGGLFGQSNAPAFGQSPGFGQGGSVFGGXSAAXXXAAXSGFSFCQASGFGSSNXGSVFGQAASXGGIVFGQQSSSSSGSVFGSGNXGRGGGFFSGLGGKPSQDAANKNPFSSASGGFGSXAXSNXSNLFGNSGAKXFGGFASSSFGEQKPXGXFSSGGGSVASQGFGFSSPNKXGGFGAAPVFGSPPXFGGSPGFGGVPAFGSAPAFXSPLGSXGGKVFGEGXAAASAGGFGSLAMSLSPXLKGRLLLMRPKAGGGREQAAPGRKSNESRSLGHLCMERALXSPLKVWEQQQHHILRHARESECPHFRIXVPXDFWFWDPE

SEQ ID NO: 18505 - protein, 19 aa, Homo sapiens
  MOD_RES (9)..(9): Selenocysteine
  MOD_RES (13)..(13): Selenocysteine
  MOD_RES (17)..(17): Selenocysteine
MSGFNFGGXGAPXGGFXFG

SEQ ID NO: 18506 - protein, 23 aa, Homo sapiens
  MOD_RES (9)..(9): Selenocysteine
  MOD_RES (13)..(13): Selenocysteine
  MOD_RES (17)..(17): Selenocysteine
  MOD_RES (20)..(20): Selenocysteine
  MOD_RES (23)..(23): Selenocysteine
MSGFNFGGXGAPXGGFXFGXAKX

SEQ ID NO: 18507 - protein, 24 aa, Homo sapiens
  MOD_RES (9)..(9): Selenocysteine
  MOD_RES (13)..(13): Selenocysteine
  MOD_RES (17)..(17): Selenocysteine
  MOD_RES (20)..(20): Selenocysteine
  MOD_RES (23)..(23): Selenocysteine
MSGFNFGGXGAPXGGFXFGXAKXA

SEQ ID NO: 18508 - protein, 36 aa, Homo sapiens
  MOD_RES (9)..(9): Selenocysteine
  MOD_RES (13)..(13): Selenocysteine
  MOD_RES (17)..(17): Selenocysteine
  MOD_RES (20)..(20): Selenocysteine
  MOD_RES (23)..(23): Selenocysteine
  MOD_RES (25)..(27): Selenocysteine
  MOD_RES (30)..(30): Selenocysteine
  MOD_RES (36)..(36): Selenocysteine
MSGFNFGGXGAPXGGFXFGXAKXAXXXPAXGFSFSX

SEQ ID NO: 18509 - protein, 75 aa, Homo sapiens
  MOD_RES (9)..(9): Selenocysteine
  MOD_RES (13)..(13): Selenocysteine
  MOD_RES (17)..(17): Selenocysteine
  MOD_RES (20)..(20): Selenocysteine
  MOD_RES (23)..(23): Selenocysteine
  MOD_RES (25)..(27): Selenocysteine
  MOD_RES (30)..(30): Selenocysteine
  MOD_RES (36)..(36): Selenocysteine
  MOD_RES (39)..(39): Selenocysteine
  MOD_RES (52)..(52): Selenocysteine
  MOD_RES (54)..(54): Selenocysteine
  MOD_RES (57)..(57): Selenocysteine
  MOD_RES (64)..(64): Selenocysteine
  MOD_RES (66)..(66): Selenocysteine
  MOD_RES (69)..(69): Selenocysteine
  MOD_RES (71)..(72): Selenocysteine
  MOD_RES (75)..(75): Selenocysteine
MSGFNFGGXGAPXGGFXFGXAKXAXXXPAXGFSFSXSGXGGFNFGAPFQPAXSXPSXGLFSLAXQXPAXQXXGFX

SEQ ID NO: 18510 - protein, 99 aa, Homo sapiens
  MOD_RES (9)..(9): Selenocysteine
  MOD_RES (13)..(13): Selenocysteine
  MOD_RES (17)..(17): Selenocysteine
  MOD_RES (20)..(20): Selenocysteine
  MOD_RES (23)..(23): Selenocysteine
  MOD_RES (25)..(27): Selenocysteine
  MOD_RES (30)..(30): Selenocysteine
  MOD_RES (36)..(36): Selenocysteine
  MOD_RES (39)..(39): Selenocysteine
  MOD_RES (52)..(52): Selenocysteine
  MOD_RES (54)..(54): Selenocysteine
  MOD_RES (57)..(57): Selenocysteine
  MOD_RES (64)..(64): Selenocysteine
  MOD_RES (66)..(66): Selenocysteine
  MOD_RES (69)..(69): Selenocysteine
  MOD_RES (71)..(72): Selenocysteine
  MOD_RES (75)..(75): Selenocysteine
  MOD_RES (78)..(78): Selenocysteine
  MOD_RES (80)..(80): Selenocysteine
  MOD_RES (86)..(86): Selenocysteine
MSGFNFGGXGAPXGGFXFGXAKXAXXXPAXGFSFSXSGXGGFNFGAPFQPAXSXPSXGLFSLAXQXPAXQXXGFXFGXAXLASGGXGFSLGIGASKLNL

SEQ ID NO: 18511 - protein, 100 aa, Homo sapiens
  MOD_RES (9)..(9): Selenocysteine
  MOD_RES (13)..(13): Selenocysteine
  MOD_RES (17)..(17): Selenocysteine
  MOD_RES (20)..(20): Selenocysteine
  MOD_RES (23)..(23): Selenocysteine
  MOD_RES (25)..(27): Selenocysteine
  MOD_RES (30)..(30): Selenocysteine
  MOD_RES (36)..(36): Selenocysteine
  MOD_RES (39)..(39): Selenocysteine
  MOD_RES (52)..(52): Selenocysteine
  MOD_RES (54)..(54): Selenocysteine
  MOD_RES (57)..(57): Selenocysteine
  MOD_RES (64)..(64): Selenocysteine
  MOD_RES (66)..(66): Selenocysteine
  MOD_RES (69)..(69): Selenocysteine
  MOD_RES (71)..(72): Selenocysteine
  MOD_RES (75)..(75): Selenocysteine
  MOD_RES (78)..(78): Selenocysteine
  MOD_RES (80)..(80): Selenocysteine
  MOD_RES (86)..(86): Selenocysteine
MSGFNFGGXGAPXGGFXFGXAKXAXXXPAXGFSFSXSGXGGFNFGAPFQPAXSXPSXGLFSLAXQXPAXQXXGFXFGXAXLASGGXGFSLGIGASKLNLS

SEQ ID NO: 18512 - protein, 134 aa, Homo sapiens
  MOD_RES (9)..(9): Selenocysteine
  MOD_RES (13)..(13): Selenocysteine
  MOD_RES (17)..(17): Selenocysteine
  MOD_RES (20)..(20): Selenocysteine
  MOD_RES (23)..(23): Selenocysteine
  MOD_RES (25)..(27): Selenocysteine
  MOD_RES (30)..(30): Selenocysteine
  MOD_RES (36)..(36): Selenocysteine
  MOD_RES (39)..(39): Selenocysteine
  MOD_RES (52)..(52): Selenocysteine
  MOD_RES (54)..(54): Selenocysteine
  MOD_RES (57)..(57): Selenocysteine
  MOD_RES (64)..(64): Selenocysteine
  MOD_RES (66)..(66): Selenocysteine
  MOD_RES (69)..(69): Selenocysteine
  MOD_RES (71)..(72): Selenocysteine
  MOD_RES (75)..(75): Selenocysteine
  MOD_RES (78)..(78): Selenocysteine
  MOD_RES (80)..(80): Selenocysteine
  MOD_RES (86)..(86): Selenocysteine
  MOD_RES (102)..(102): Selenocysteine
  MOD_RES (105)..(105): Selenocysteine
  MOD_RES (122)..(122): Selenocysteine
  MOD_RES (128)..(128): Selenocysteine
  MOD_RES (130)..(130): Selenocysteine
MSGFNFGGXGAPXGGFXFGXAKXAXXXPAXGFSFSXSGXGGFNFGAPFQPAXSXPSXGLFSLAXQXPAXQXXGFXFGXAXLASGGXGFSLGIGASKLNLSNXAAXPAMANPSGFGLGSSNLXNAISSXVXSSQG

SEQ ID NO: 18513 - protein, 138 aa, Homo sapiens
  MOD_RES (9)..(9): Selenocysteine
  MOD_RES (13)..(13): Selenocysteine
  MOD_RES (17)..(17): Selenocysteine
  MOD_RES (20)..(20): Selenocysteine
  MOD_RES (23)..(23): Selenocysteine
  MOD_RES (25)..(27): Selenocysteine
  MOD_RES (30)..(30): Selenocysteine
  MOD_RES (36)..(36): Selenocysteine
  MOD_RES (39)..(39): Selenocysteine
  MOD_RES (52)..(52): Selenocysteine
  MOD_RES (54)..(54): Selenocysteine
  MOD_RES (57)..(57): Selenocysteine
  MOD_RES (64)..(64): Selenocysteine
  MOD_RES (66)..(66): Selenocysteine
  MOD_RES (69)..(69): Selenocysteine
  MOD_RES (71)..(72): Selenocysteine
  MOD_RES (75)..(75): Selenocysteine
  MOD_RES (78)..(78): Selenocysteine
  MOD_RES (80)..(80): Selenocysteine
  MOD_RES (86)..(86): Selenocysteine
  MOD_RES (102)..(102): Selenocysteine
  MOD_RES (105)..(105): Selenocysteine
  MOD_RES (122)..(122): Selenocysteine
  MOD_RES (128)..(128): Selenocysteine
  MOD_RES (130)..(130): Selenocysteine
  MOD_RES (135)..(135): Selenocysteine
  MOD_RES (138)..(138): Selenocysteine
MSGFNFGGXGAPXGGFXFGXAKXAXXXPAXGFSFSXSGXGGFNFGAPFQPAXSXPSXGLFSLAXQXPAXQXXGFXFGXAXLASGGXGFSLGIGASKLNLSNXAAXPAMANPSGFGLGSSNLXNAISSXVXSSQGXAPX

SEQ ID NO: 18514 - protein, 446 aa, Homo sapiens
  MOD_RES (9)..(9): Selenocysteine
  MOD_RES (13)..(13): Selenocysteine
  MOD_RES (17)..(17): Selenocysteine
  MOD_RES (20)..(20): Selenocysteine
  MOD_RES (23)..(23): Selenocysteine
  MOD_RES (25)..(27): Selenocysteine
  MOD_RES (30)..(30): Selenocysteine
  MOD_RES (36)..(36): Selenocysteine
  MOD_RES (39)..(39): Selenocysteine
  MOD_RES (52)..(52): Selenocysteine
  MOD_RES (54)..(54): Selenocysteine
  MOD_RES (57)..(57): Selenocysteine
  MOD_RES (64)..(64): Selenocysteine
  MOD_RES (66)..(66): Selenocysteine
  MOD_RES (69)..(69): Selenocysteine
  MOD_RES (71)..(72): Selenocysteine
  MOD_RES (75)..(75): Selenocysteine
  MOD_RES (78)..(78): Selenocysteine
  MOD_RES (80)..(80): Selenocysteine
  MOD_RES (86)..(86): Selenocysteine
  MOD_RES (102)..(102): Selenocysteine
  MOD_RES (105)..(105): Selenocysteine
  MOD_RES (122)..(122): Selenocysteine
  MOD_RES (128)..(128): Selenocysteine
  MOD_RES (130)..(130): Selenocysteine
  MOD_RES (135)..(135): Selenocysteine
  MOD_RES (138)..(138): Selenocysteine
  MOD_RES (146)..(147): Selenocysteine
  MOD_RES (153)..(154): Selenocysteine
  MOD_RES (161)..(161): Selenocysteine
  MOD_RES (165)..(165): Selenocysteine
  MOD_RES (183)..(183): Selenocysteine
  MOD_RES (187)..(187): Selenocysteine
  MOD_RES (191)..(191): Selenocysteine
  MOD_RES (194)..(194): Selenocysteine
  MOD_RES (198)..(199): Selenocysteine
  MOD_RES (203)..(203): Selenocysteine
  MOD_RES (209)..(209): Selenocysteine
  MOD_RES (211)..(211): Selenocysteine
  MOD_RES (213)..(213): Selenocysteine
  MOD_RES (215)..(215): Selenocysteine
  MOD_RES (217)..(217): Selenocysteine
  MOD_RES (227)..(227): Selenocysteine
  MOD_RES (230)..(230): Selenocysteine
  MOD_RES (234)..(235): Selenocysteine
  MOD_RES (241)..(241): Selenocysteine
  MOD_RES (244)..(245): Selenocysteine
  MOD_RES (250)..(250): Selenocysteine
  MOD_RES (253)..(253): Selenocysteine
  MOD_RES (267)..(267): Selenocysteine
  MOD_RES (269)..(271): Selenocysteine
  MOD_RES (273)..(273): Selenocysteine
  MOD_RES (276)..(276): Selenocysteine
  MOD_RES (278)..(278): Selenocysteine
  MOD_RES (280)..(280): Selenocysteine
  MOD_RES (288)..(288): Selenocysteine
  MOD_RES (297)..(297): Selenocysteine
  MOD_RES (344)..(344): Selenocysteine
  MOD_RES (357)..(357): Selenocysteine
  MOD_RES (384)..(384): Selenocysteine
  MOD_RES (391)..(391): Selenocysteine
  MOD_RES (427)..(427): Selenocysteine
  MOD_RES (444)..(444): Selenocysteine
MSGFNFGGXGAPXGGFXFGXAKXAXXXPAXGFSFSXSGXGGFNFGAPFQPAXSXPSXGLFSLAXQXPAXQXXGFXFGXAXLASGGXGFSLGIGASKLNLSNXAAXPAMANPSGFGLGSSNLXNAISSXVXSSQGXAPXGFVFGPSXXSVAPAXXSGGFSFXGGSXAQPSGFNIGSAGNSAQPXAPAXLPFXPAXPAAXXAGAXQPAAPXPXAXIXSXGPSLFASIAXAPXSSAXXGLSLCXPVXXAGAPXAGXQGFSLKAPGAASGXSXXXSXAAXAXAXQVNAWDRXLIENGEKIXSLHREVEKVKLDQKRLDQELDFILSQQKELEDLLSPLEELVKEQSGXIYLQHADEEREKXYKLAENIDAQLKRMAQDLKDIIEHLNXSGAPADXSDPLQQICKILNAHMDSLQWIDQNSALLQRKVEEVXKVCEGRRKEQERSFRIXFD

SEQ ID NO: 18515 - protein, 522 aa, Homo sapiens
  MOD_RES (9)..(9): Selenocysteine
  MOD_RES (13)..(13): Selenocysteine
  MOD_RES (17)..(17): Selenocysteine
  MOD_RES (20)..(20): Selenocysteine
  MOD_RES (23)..(23): Selenocysteine
  MOD_RES (25)..(27): Selenocysteine
  MOD_RES (30)..(30): Selenocysteine
  MOD_RES (36)..(36): Selenocysteine
  MOD_RES (39)..(39): Selenocysteine
  MOD_RES (52)..(52): Selenocysteine
  MOD_RES (54)..(54): Selenocysteine
  MOD_RES (57)..(57): Selenocysteine
  MOD_RES (64)..(64): Selenocysteine
  MOD_RES (66)..(66): Selenocysteine
  MOD_RES (69)..(69): Selenocysteine
  MOD_RES (71)..(72): Selenocysteine
  MOD_RES (75)..(75): Selenocysteine
  MOD_RES (78)..(78): Selenocysteine
  MOD_RES (80)..(80): Selenocysteine
  MOD_RES (86)..(86): Selenocysteine
  MOD_RES (102)..(102): Selenocysteine
  MOD_RES (105)..(105): Selenocysteine
  MOD_RES (122)..(122): Selenocysteine
  MOD_RES (128)..(128): Selenocysteine
  MOD_RES (130)..(130): Selenocysteine
  MOD_RES (135)..(135): Selenocysteine
  MOD_RES (138)..(138): Selenocysteine
  MOD_RES (146)..(147): Selenocysteine
  MOD_RES (153)..(154): Selenocysteine
  MOD_RES (161)..(161): Selenocysteine
  MOD_RES (165)..(165): Selenocysteine
  MOD_RES (183)..(183): Selenocysteine
  MOD_RES (187)..(187): Selenocysteine
  MOD_RES (191)..(191): Selenocysteine
  MOD_RES (194)..(194): Selenocysteine
  MOD_RES (198)..(199): Selenocysteine
  MOD_RES (203)..(203): Selenocysteine
  MOD_RES (209)..(209): Selenocysteine
  MOD_RES (211)..(211): Selenocysteine
  MOD_RES (213)..(213): Selenocysteine
  MOD_RES (215)..(215): Selenocysteine
  MOD_RES (217)..(217): Selenocysteine
  MOD_RES (227)..(227): Selenocysteine
  MOD_RES (230)..(230): Selenocysteine
  MOD_RES (234)..(235): Selenocysteine
  MOD_RES (241)..(241): Selenocysteine
  MOD_RES (244)..(245): Selenocysteine
  MOD_RES (250)..(250): Selenocysteine
  MOD_RES (253)..(253): Selenocysteine
  MOD_RES (267)..(267): Selenocysteine
  MOD_RES (269)..(271): Selenocysteine
  MOD_RES (273)..(273): Selenocysteine
  MOD_RES (276)..(276): Selenocysteine
  MOD_RES (278)..(278): Selenocysteine
  MOD_RES (280)..(282): Selenocysteine
  MOD_RES (287)..(288): Selenocysteine
  MOD_RES (306)..(306): Selenocysteine
  MOD_RES (311)..(311): Selenocysteine
  MOD_RES (329)..(329): Selenocysteine
  MOD_RES (356)..(356): Selenocysteine
  MOD_RES (364)..(364): Selenocysteine
  MOD_RES (373)..(373): Selenocysteine
  MOD_RES (420)..(420): Selenocysteine
  MOD_RES (433)..(433): Selenocysteine
  MOD_RES (460)..(460): Selenocysteine
  MOD_RES (467)..(467): Selenocysteine
  MOD_RES (503)..(503): Selenocysteine
  MOD_RES (520)..(520): Selenocysteine
MSGFNFGGXGAPXGGFXFGXAKXAXXXPAXGFSFSXSGXGGFNFGAPFQPAXSXPSXGLFSLAXQXPAXQXXGFXFGXAXLASGGXGFSLGIGASKLNLSNXAAXPAMANPSGFGLGSSNLXNAISSXVXSSQGXAPXGFVFGPSXXSVAPAXXSGGFSFXGGSXAQPSGFNIGSAGNSAQPXAPAXLPFXPAXPAAXXAGAXQPAAPXPXAXIXSXGPSLFASIAXAPXSSAXXGLSLCXPVXXAGAPXAGXQGFSLKAPGAASGXSXXXSXAAXAXAXXXSSSSXXGFALNLKPLAPAGIPSNXAAAVXAPPGPGAAAGAAASSAMXYAQLESLINKWSLELEDQERHFLQQAXQVNAWDRXLIENGEKIXSLHREVEKVKLDQKRLDQELDFILSQQKELEDLLSPLEELVKEQSGXIYLQHADEEREKXYKLAENIDAQLKRMAQDLKDIIEHLNXSGAPADXSDPLQQICKILNAHMDSLQWIDQNSALLQRKVEEVXKVCEGRRKEQERSFRIXFD

SEQ ID NO: 18516 - protein, 84 aa, Homo sapiens
  MOD_RES (5)..(5): Selenocysteine
  MOD_RES (56)..(56): Selenocysteine
  MOD_RES (59)..(59): Selenocysteine
  MOD_RES (68)..(68): Selenocysteine
  MOD_RES (72)..(72): Selenocysteine
LDLIXFFDEYHSGHIDRAFDIIERLKLVPLNQESVEERVAAFRNFSDEQLRSQARXLIXFAGMIPYRXSGDXNARLVQMEVLMN

SEQ ID NO: 18517 - protein, 17 aa, Homo sapiens
MAEEYHRESMLVEWEQV

SEQ ID NO: 18518 - protein, 40 aa, Homo sapiens
  MOD_RES (24)..(24): Selenocysteine
  MOD_RES (36)..(36): Selenocysteine
MAEEYHRESMLVEWEQVKQRILHXLLASGEDALDFXQESE

SEQ ID NO: 18519 - protein, 125 aa, Homo sapiens
  MOD_RES (24)..(24): Selenocysteine
  MOD_RES (36)..(36): Selenocysteine
  MOD_RES (102)..(102): Selenocysteine
  MOD_RES (108)..(108): Selenocysteine
  MOD_RES (113)..(113): Selenocysteine
  MOD_RES (116)..(116): Selenocysteine
MAEEYHRESMLVEWEQVKQRILHXLLASGEDALDFXQESEPSYISDVGPPGRSSLDNIEMAYARQIYIYNEKIVNGHLQPNLVDLCASVAELDDKSISDMWXMVKQMXDVLLXPAXDALKNRSSV

SEQ ID NO: 18520 - protein, 156 aa, Homo sapiens
  MOD_RES (24)..(24): Selenocysteine
  MOD_RES (36)..(36): Selenocysteine
  MOD_RES (102)..(102): Selenocysteine
  MOD_RES (108)..(108): Selenocysteine
  MOD_RES (113)..(113): Selenocysteine
  MOD_RES (116)..(116): Selenocysteine
  MOD_RES (147)..(147): Selenocysteine
  MOD_RES (150)..(150): Selenocysteine
MAEEYHRESMLVEWEQVKQRILHXLLASGEDALDFXQESEPSYISDVGPPGRSSLDNIEMAYARQIYIYNEKIVNGHLQPNLVDLCASVAELDDKSISDMWXMVKQMXDVLLXPAXDALKNRSSVEVRMEFVRQALAYLEQSYKNYXLVXVFGNLH

SEQ ID NO: 18521 - protein, 696 aa, Homo sapiens
  MOD_RES (24)..(24): Selenocysteine
  MOD_RES (36)..(36): Selenocysteine
  MOD_RES (102)..(102): Selenocysteine
  MOD_RES (108)..(108): Selenocysteine
  MOD_RES (113)..(113): Selenocysteine
  MOD_RES (116)..(116): Selenocysteine
  MOD_RES (147)..(147): Selenocysteine
  MOD_RES (150)..(150): Selenocysteine
  MOD_RES (166)..(166): Selenocysteine
  MOD_RES (227)..(227): Selenocysteine
  MOD_RES (244)..(244): Selenocysteine
  MOD_RES (260)..(260): Selenocysteine
  MOD_RES (277)..(277): Selenocysteine
  MOD_RES (287)..(287): Selenocysteine
  MOD_RES (305)..(305): Selenocysteine
  MOD_RES (313)..(313): Selenocysteine
  MOD_RES (331)..(331): Selenocysteine
  MOD_RES (346)..(346): Selenocysteine
  MOD_RES (413)..(413): Selenocysteine
  MOD_RES (419)..(419): Selenocysteine
  MOD_RES (479)..(479): Selenocysteine
  MOD_RES (482)..(482): Selenocysteine
  MOD_RES (565)..(565): Selenocysteine
  MOD_RES (574)..(574): Selenocysteine
  MOD_RES (629)..(629): Selenocysteine
  MOD_RES (635)..(635): Selenocysteine
  MOD_RES (643)..(643): Selenocysteine
  MOD_RES (668)..(668): Selenocysteine
  MOD_RES (671)..(671): Selenocysteine
  MOD_RES (680)..(680): Selenocysteine
  MOD_RES (684)..(684): Selenocysteine
MAEEYHRESMLVEWEQVKQRILHXLLASGEDALDFXQESEPSYISDVGPPGRSSLDNIEMAYARQIYIYNEKIVNGHLQPNLVDLCASVAELDDKSISDMWXMVKQMXDVLLXPAXDALKNRSSVEVRMEFVRQALAYLEQSYKNYXLVXVFGNLHQAQLGGVPGXYQLVRSFLNIKLPAPLPGLQDGEVEGHPVWALIYYCMRCGDLLAASQVVNRAQHQLGEFKXWFQEYMNSKDRRLSPAXENKLRLHYRRALRNNXDPYKRAVYCIIGRCDVXDNQSEVADKXEDYLWLKLNQVCFDDDGXSSPQDRLXLSQFQKQLLEDYGESHFXVNQQPFLYFQVLFLXAQFEAAVAFLFRMERLRCHAVHVALVLFELKLLLKSSGQSAQLLSHEPGDPPCLRRLNFVRLLMLYXRKFESXDPREALQYFYFLRDEKDSQGENMFLRCVSELVIESREFDMILGKLENDGSRKPGVIDKFXSDXKPIINKVASVAENKGLFEEAAKLYDLAKNADKVLELMNKLLSPVVPQISAPQSNKERLKNMALSIAERYRAQGISANKFVDSXFYLLLDLIXFFDEYHSGHIDRAFDIIERLKLVPLNQESVEERVAAFRNFSDEIRHNLSEVLLAXMNILFXQFKRLKGXSPSSSSRPQRVIEDRDSQLRSQARXLIXFAGMIPYRXSGDXNARLVQMEVLMN

SEQ ID NO: 18522 - protein, 230 aa, Homo sapiens
  MOD_RES (3)..(3): Selenocysteine
  MOD_RES (18)..(18): Selenocysteine
  MOD_RES (24)..(24): Selenocysteine
  MOD_RES (29)..(29): Selenocysteine
  MOD_RES (32)..(32): Selenocysteine
  MOD_RES (63)..(63): Selenocysteine
  MOD_RES (66)..(66): Selenocysteine
  MOD_RES (82)..(82): Selenocysteine
  MOD_RES (143)..(143): Selenocysteine
  MOD_RES (160)..(160): Selenocysteine
  MOD_RES (176)..(176): Selenocysteine
  MOD_RES (193)..(193): Selenocysteine
  MOD_RES (203)..(203): Selenocysteine
  MOD_RES (221)..(221): Selenocysteine
  MOD_RES (229)..(229): Selenocysteine
MDXEGFELDDKSISDMWXMVKQMXDVLLXPAXDALKNRSSVEVRMEFVRQALAYLEQSYKNYXLVXVFGNLHQAQLGGVPGXYQLVRSFLNIKLPAPLPGLQDGEVEGHPVWALIYYCMRCGDLLAASQVVNRAQHQLGEFKXWFQEYMNSKDRRLSPAXENKLRLHYRRALRNNXDPYKRAVYCIIGRCDVXDNQSEVADKXEDYLWLKLNQVCFDDDGXSSPQDRLXL

SEQ ID NO: 18523 - protein, 136 aa, Homo sapiens
  MOD_RES (3)..(3): Selenocysteine
  MOD_RES (20)..(20): Selenocysteine
  MOD_RES (47)..(47): Selenocysteine
  MOD_RES (49)..(49): Selenocysteine
  MOD_RES (51)..(51): Selenocysteine
  MOD_RES (55)..(55): Selenocysteine
  MOD_RES (85)..(86): Selenocysteine
  MOD_RES (96)..(96): Selenocysteine
  MOD_RES (121)..(121): Selenocysteine
MDXEGFGELLQQAEQLAAEXEGISELPHVERNLQEIQQAGERLRSRXLXRXSQEXADVKASVLLGSRGLDISHISQRLESLSAAXXFEPLEPVKDXDIQGFLKNEKDNALLSAIEESRKRXFGMAEEYHRESMLVE

SEQ ID NO: 18524 - protein, 151 aa, Homo sapiens
  MOD_RES (3)..(3): Selenocysteine
  MOD_RES (20)..(20): Selenocysteine
  MOD_RES (47)..(47): Selenocysteine
  MOD_RES (49)..(49): Selenocysteine
  MOD_RES (51)..(51): Selenocysteine
  MOD_RES (55)..(55): Selenocysteine
  MOD_RES (85)..(86): Selenocysteine
  MOD_RES (96)..(96): Selenocysteine
  MOD_RES (121)..(121): Selenocysteine
  MOD_RES (147)..(147): Selenocysteine
MDXEGFGELLQQAEQLAAEXEGISELPHVERNLQEIQQAGERLRSRXLXRXSQEXADVKASVLLGSRGLDISHISQRLESLSAAXXFEPLEPVKDXDIQGFLKNEKDNALLSAIEESRKRXFGMAEEYHRESMLVEWEQVKQRILHXLLAS

SEQ ID NO: 18525 - protein, 178 aa, Homo sapiens
  MOD_RES (3)..(3): Selenocysteine
  MOD_RES (20)..(20): Selenocysteine
  MOD_RES (47)..(47): Selenocysteine
  MOD_RES (49)..(49): Selenocysteine
  MOD_RES (51)..(51): Selenocysteine
  MOD_RES (55)..(55): Selenocysteine
  MOD_RES (85)..(86): Selenocysteine
  MOD_RES (96)..(96): Selenocysteine
  MOD_RES (121)..(121): Selenocysteine
  MOD_RES (147)..(147): Selenocysteine
  MOD_RES (159)..(159): Selenocysteine
MDXEGFGELLQQAEQLAAEXEGISELPHVERNLQEIQQAGERLRSRXLXRXSQEXADVKASVLLGSRGLDISHISQRLESLSAAXXFEPLEPVKDXDIQGFLKNEKDNALLSAIEESRKRXFGMAEEYHRESMLVEWEQVKQRILHXLLASGEDALDFXQESEPSYISDVGPPGRSSL

SEQ ID NO: 18526 - protein, 819 aa, Homo sapiens
  MOD_RES (3)..(3): Selenocysteine
  MOD_RES (20)..(20): Selenocysteine
  MOD_RES (47)..(47): Selenocysteine
  MOD_RES (49)..(49): Selenocysteine
  MOD_RES (51)..(51): Selenocysteine
  MOD_RES (55)..(55): Selenocysteine
  MOD_RES (85)..(86): Selenocysteine
  MOD_RES (96)..(96): Selenocysteine
  MOD_RES (121)..(121): Selenocysteine
  MOD_RES (147)..(147): Selenocysteine
  MOD_RES (159)..(159): Selenocysteine
  MOD_RES (225)..(225): Selenocysteine
  MOD_RES (231)..(231): Selenocysteine
  MOD_RES (236)..(236): Selenocysteine
  MOD_RES (239)..(239): Selenocysteine
  MOD_RES (270)..(270): Selenocysteine
  MOD_RES (273)..(273): Selenocysteine
  MOD_RES (289)..(289): Selenocysteine
  MOD_RES (350)..(350): Selenocysteine
  MOD_RES (367)..(367): Selenocysteine
  MOD_RES (383)..(383): Selenocysteine
  MOD_RES (400)..(400): Selenocysteine
  MOD_RES (410)..(410): Selenocysteine
  MOD_RES (428)..(428): Selenocysteine
  MOD_RES (436)..(436): Selenocysteine
  MOD_RES (454)..(454): Selenocysteine
  MOD_RES (469)..(469): Selenocysteine
  MOD_RES (536)..(536): Selenocysteine
  MOD_RES (542)..(542): Selenocysteine
  MOD_RES (602)..(602): Selenocysteine
  MOD_RES (605)..(605): Selenocysteine
  MOD_RES (688)..(688): Selenocysteine
  MOD_RES (697)..(697): Selenocysteine
  MOD_RES (752)..(752): Selenocysteine
  MOD_RES (758)..(758): Selenocysteine
  MOD_RES (766)..(766): Selenocysteine
  MOD_RES (791)..(791): Selenocysteine
  MOD_RES (794)..(794): Selenocysteine
  MOD_RES (803)..(803): Selenocysteine
  MOD_RES (807)..(807): Selenocysteine
MDXEGFGELLQQAEQLAAEXEGISELPHVERNLQEIQQAGERLRSRXLXRXSQEXADVKASVLLGSRGLDISHISQRLESLSAAXXFEPLEPVKDXDIQGFLKNEKDNALLSAIEESRKRXFGMAEEYHRESMLVEWEQVKQRILHXLLASGEDALDFXQESEPSYISDVGPPGRSSLDNIEMAYARQIYIYNEKIVNGHLQPNLVDLCASVAELDDKSISDMWXMVKQMXDVLLXPAXDALKNRSSVEVRMEFVRQALAYLEQSYKNYXLVXVFGNLHQAQLGGVPGXYQLVRSFLNIKLPAPLPGLQDGEVEGHPVWALIYYCMRCGDLLAASQVVNRAQHQLGEFKXWFQEYMNSKDRRLSPAXENKLRLHYRRALRNNXDPYKRAVYCIIGRCDVXDNQSEVADKXEDYLWLKLNQVCFDDDGXSSPQDRLXLSQFQKQLLEDYGESHFXVNQQPFLYFQVLFLXAQFEAAVAFLFRMERLRCHAVHVALVLFELKLLLKSSGQSAQLLSHEPGDPPCLRRLNFVRLLMLYXRKFESXDPREALQYFYFLRDEKDSQGENMFLRCVSELVIESREFDMILGKLENDGSRKPGVIDKFXSDXKPIINKVASVAENKGLFEEAAKLYDLAKNADKVLELMNKLLSPVVPQISAPQSNKERLKNMALSIAERYRAQGISANKFVDSXFYLLLDLIXFFDEYHSGHIDRAFDIIERLKLVPLNQESVEERVAAFRNFSDEIRHNLSEVLLAXMNILFXQFKRLKGXSPSSSSRPQRVIEDRDSQLRSQARXLIXFAGMIPYRXSGDXNARLVQMEVLMN

SEQ ID NO: 18527 - protein, 880 aa, Homo sapiens
  MOD_RES (3)..(3): Selenocysteine
  MOD_RES (20)..(20): Selenocysteine
  MOD_RES (47)..(47): Selenocysteine
  MOD_RES (49)..(49): Selenocysteine
  MOD_RES (51)..(51): Selenocysteine
  MOD_RES (55)..(55): Selenocysteine
  MOD_RES (85)..(86): Selenocysteine
  MOD_RES (96)..(96): Selenocysteine
  MOD_RES (121)..(121): Selenocysteine
  MOD_RES (147)..(147): Selenocysteine
  MOD_RES (159)..(159): Selenocysteine
  MOD_RES (225)..(225): Selenocysteine
  MOD_RES (231)..(231): Selenocysteine
  MOD_RES (236)..(236): Selenocysteine
  MOD_RES (239)..(239): Selenocysteine
  MOD_RES (270)..(270): Selenocysteine
  MOD_RES (273)..(273): Selenocysteine
  MOD_RES (289)..(289): Selenocysteine
  MOD_RES (350)..(350): Selenocysteine
  MOD_RES (367)..(367): Selenocysteine
  MOD_RES (383)..(383): Selenocysteine
  MOD_RES (400)..(400): Selenocysteine
  MOD_RES (410)..(410): Selenocysteine
  MOD_RES (428)..(428): Selenocysteine
  MOD_RES (436)..(436): Selenocysteine
  MOD_RES (454)..(454): Selenocysteine
  MOD_RES (469)..(469): Selenocysteine
  MOD_RES (536)..(536): Selenocysteine
  MOD_RES (542)..(542): Selenocysteine
  MOD_RES (602)..(602): Selenocysteine
  MOD_RES (605)..(605): Selenocysteine
  MOD_RES (688)..(688): Selenocysteine
  MOD_RES (697)..(697): Selenocysteine
  MOD_RES (752)..(752): Selenocysteine
  MOD_RES (758)..(758): Selenocysteine
  MOD_RES (766)..(766): Selenocysteine
  MOD_RES (796)..(796): Selenocysteine
  MOD_RES (813)..(813): Selenocysteine
  MOD_RES (821)..(822): Selenocysteine
  MOD_RES (824)..(824): Selenocysteine
  MOD_RES (839)..(839): Selenocysteine
  MOD_RES (871)..(871): Selenocysteine
  MOD_RES (874)..(874): Selenocysteine
  MOD_RES (877)..(877): Selenocysteine
MDXEGFGELLQQAEQLAAEXEGISELPHVERNLQEIQQAGERLRSRXLXRXSQEXADVKASVLLGSRGLDISHISQRLESLSAAXXFEPLEPVKDXDIQGFLKNEKDNALLSAIEESRKRXFGMAEEYHRESMLVEWEQVKQRILHXLLASGEDALDFXQESEPSYISDVGPPGRSSLDNIEMAYARQIYIYNEKIVNGHLQPNLVDLCASVAELDDKSISDMWXMVKQMXDVLLXPAXDALKNRSSVEVRMEFVRQALAYLEQSYKNYXLVXVFGNLHQAQLGGVPGXYQLVRSFLNIKLPAPLPGLQDGEVEGHPVWALIYYCMRCGDLLAASQVVNRAQHQLGEFKXWFQEYMNSKDRRLSPAXENKLRLHYRRALRNNXDPYKRAVYCIIGRCDVXDNQSEVADKXEDYLWLKLNQVCFDDDGXSSPQDRLXLSQFQKQLLEDYGESHFXVNQQPFLYFQVLFLXAQFEAAVAFLFRMERLRCHAVHVALVLFELKLLLKSSGQSAQLLSHEPGDPPCLRRLNFVRLLMLYXRKFESXDPREALQYFYFLRDEKDSQGENMFLRCVSELVIESREFDMILGKLENDGSRKPGVIDKFXSDXKPIINKVASVAENKGLFEEAAKLYDLAKNADKVLELMNKLLSPVVPQISAPQSNKERLKNMALSIAERYRAQGISANKFVDSXFYLLLDLIXFFDEYHSGHIDRAFDIIERLKLVPLNQESVEERVAAFRNFSDEIRHNLSEVLLAXMNILFXQFKRLKGXSPSSSSRPQRVIEDRDSGLALLPRLECNDXISAHCNLYLLGSSHPPXSPSQVAGXXAXPKSSPHSDYLCWNDXIPNVWGHQCEAGADGGPHELSAMLCGSLGRHXVSXSGXWAH

SEQ ID NO: 18528 - protein, 117 aa, Homo sapiens
  MOD_RES (3)..(3): Selenocysteine
  MOD_RES (86)..(86): Selenocysteine
  MOD_RES (95)..(95): Selenocysteine
SDXKPIINKVASVAENKGLFEEAAKLYDLAKNADKVLELMNKLLSPVVPQISAPQSNKERLKNMALSIAERYRAQGISANKFVDSXFYLLLDLIXFFDEYHSGHIDRAFDVSFRKGV

SEQ ID NO: 18529 - protein, 132 aa, Homo sapiens
  MOD_RES (1)..(1): Any amino acid
  MOD_RES (14)..(14): Selenocysteine
  MOD_RES (16)..(16): Selenocysteine
  MOD_RES (18)..(18): Selenocysteine
  MOD_RES (22)..(22): Selenocysteine
  MOD_RES (52)..(53): Selenocysteine
  MOD_RES (63)..(63): Selenocysteine
  MOD_RES (88)..(88): Selenocysteine
  MOD_RES (114)..(114): Selenocysteine
  MOD_RES (126)..(126): Selenocysteine
XEIQQAGERLRSRXLXRXSQEXADVKASVLLGSRGLDISHISQRLESLSAAXXFEPLEPVKDXDIQGFLKNEKDNALLSAIEESRKRXFGMAEEYHRESMLVEWEQVKQRILHXLLASGEDALDFXQESEVA

SEQ ID NO: 18530 - protein, 140 aa, Homo sapiens
  MOD_RES (1)..(1): Any amino acid
  MOD_RES (50)..(50): Selenocysteine
  MOD_RES (59)..(59): Selenocysteine
XELMNKLLSPVVPQISAPQSNKERLKNMALSIAERYRAQGISANKFVDSXFYLLLDLIXFFDEYHSGHIDRAFDIIERLKLVPLNQESVEERVAAFRNFSDEVSSFFLSCGIPFSPLPPKAFSFPVPNSFKNSSYSNYPD

SEQ ID NO: 18531 - protein, 44 aa, Homo sapiens
MAICQFFLQGRCRFGDRCWNEHPGARGAGGGRQQPQQQPSGKEL

SEQ ID NO: 18532 - protein, 224 aa, Homo sapiens
  MOD_RES (49)..(50): Selenocysteine
  MOD_RES (67)..(67): Selenocysteine
  MOD_RES (89)..(89): Selenocysteine
  MOD_RES (151)..(151): Selenocysteine
  MOD_RES (167)..(167): Selenocysteine
  MOD_RES (199)..(199): Selenocysteine
  MOD_RES (211)..(211): Selenocysteine
MAICQFFLQGRCRFGDRCWNEHPGARGAGGGRQQPQQQPSGNNRRGWNXXSQRYSNVIQPSSFSKSXPWGGSRDQEKPYFSSFDSGASXNRKEGFGLSENPFASLSPDEQKDEKKLLEGIVKDMEVWESSGQWMFSVYSPVKKKPNISGFXDISPEELRLEYHNFLXSNNLQSYLNSVQRLINQWRNRVNELKSLNISXKVALKCLWKIYXHLSPKIYGPDCAL

SEQ ID NO: 18533 - protein, 435 aa, Homo sapiens
  MOD_RES (49)..(50): Selenocysteine
  MOD_RES (67)..(67): Selenocysteine
  MOD_RES (89)..(89): Selenocysteine
  MOD_RES (151)..(151): Selenocysteine
  MOD_RES (167)..(167): Selenocysteine
  MOD_RES (199)..(199): Selenocysteine
  MOD_RES (211)..(211): Selenocysteine
  MOD_RES (252)..(252): Selenocysteine
  MOD_RES (275)..(275): Selenocysteine
  MOD_RES (302)..(302): Selenocysteine
  MOD_RES (308)..(308): Selenocysteine
  MOD_RES (321)..(321): Selenocysteine
  MOD_RES (350)..(350): Selenocysteine
  MOD_RES (379)..(379): Selenocysteine
  MOD_RES (388)..(388): Selenocysteine
  MOD_RES (396)..(396): Selenocysteine
  MOD_RES (407)..(407): Selenocysteine
  MOD_RES (413)..(413): Selenocysteine
  MOD_RES (419)..(419): Selenocysteine
  MOD_RES (432)..(432): Selenocysteine
MAICQFFLQGRCRFGDRCWNEHPGARGAGGGRQQPQQQPSGNNRRGWNXXSQRYSNVIQPSSFSKSXPWGGSRDQEKPYFSSFDSGASXNRKEGFGLSENPFASLSPDEQKDEKKLLEGIVKDMEVWESSGQWMFSVYSPVKKKPNISGFXDISPEELRLEYHNFLXSNNLQSYLNSVQRLINQWRNRVNELKSLNISXKVALKCLWKIYXHLSPKIYGPDCGKFIIFLSDVKDGVNQAAPAFGFGSSQAAXFMSPGFPVNNSSSDNAQNFSFKXNSGFAAASSGSPAGFGSSPAFGAAASXSSGISXSAPAFGFGKPEVXSAASFSFKSPAASSFGSPGFSGLPASLAXGPVRAPVAPAFGGGSSVAGFGSPGSHSHXAFSKPSSDXFGNSSISXSLSASSSIIAXDNVLFXPRDKLXVEELEQFQSKKFXLGK

SEQ ID NO: 18534 - protein, 423 aa, Homo sapiens
  MOD_RES (49)..(50): Selenocysteine
  MOD_RES (67)..(67): Selenocysteine
  MOD_RES (89)..(89): Selenocysteine
  MOD_RES (151)..(151): Selenocysteine
  MOD_RES (167)..(167): Selenocysteine
  MOD_RES (199)..(199): Selenocysteine
  MOD_RES (227)..(227): Selenocysteine
  MOD_RES (250)..(250): Selenocysteine
  MOD_RES (277)..(277): Selenocysteine
  MOD_RES (283)..(283): Selenocysteine
  MOD_RES (296)..(296): Selenocysteine
  MOD_RES (325)..(325): Selenocysteine
  MOD_RES (354)..(354): Selenocysteine
  MOD_RES (363)..(363): Selenocysteine
  MOD_RES (371)..(371): Selenocysteine
  MOD_RES (382)..(382): Selenocysteine
  MOD_RES (388)..(388): Selenocysteine
  MOD_RES (394)..(394): Selenocysteine
  MOD_RES (407)..(407): Selenocysteine
MAICQFFLQGRCRFGDRCWNEHPGARGAGGGRQQPQQQPSGNNRRGWNXXSQRYSNVIQPSSFSKSXPWGGSRDQEKPYFSSFDSGASXNRKEGFGLSENPFASLSPDEQKDEKKLLEGIVKDMEVWESSGQWMFSVYSPVKKKPNISGFXDISPEELRLEYHNFLXSNNLQSYLNSVQRLINQWRNRVNELKSLNISXKVALLSDVKDGVNQAAPAFGFGSSQAAXFMSPGFPVNNSSSDNAQNFSFKXNSGFAAASSGSPAGFGSSPAFGAAASXSSGISXSAPAFGFGKPEVXSAASFSFKSPAASSFGSPGFSGLPASLAXGPVRAPVAPAFGGGSSVAGFGSPGSHSHXAFSKPSSDXFGNSSISXSLSASSSIIAXDNVLFXPRDKLXVEELEQFQSKKFXLGKIPLKPPPLELLNV

SEQ ID NO: 18535 - protein, 155 aa, Homo sapiens
  MOD_RES (49)..(50): Selenocysteine
  MOD_RES (67)..(67): Selenocysteine
  MOD_RES (89)..(89): Selenocysteine
MAICQFFLQGRCRFGDRCWNEHPGARGAGGGRQQPQQQPSGNNRRGWNXXSQRYSNVIQPSSFSKSXPWGGSRDQEKPYFSSFDSGASXNRKEGFGLSENPFASLSPDEQKDEKKLLEGIVKDMEVWESSGQWMFSVYSPVKKKPNISVPKPFLG

SEQ ID NO: 18536 - protein, 83 aa, Homo sapiens
  MOD_RES (32)..(32): Selenocysteine
  MOD_RES (67)..(68): Selenocysteine
  MOD_RES (70)..(70): Selenocysteine
VIHPPQPPKVLQLQKLPNSQSQKFFFLRQSLXLSPRLECSGAISAHCKLRLPGSRHSPASVSRIAGXXGXHHHAQLFCIFSRD

SEQ ID NO: 18537 - protein, 82 aa, Homo sapiens
  MOD_RES (3)..(3): Selenocysteine
  MOD_RES (8)..(8): Selenocysteine
  MOD_RES (46)..(46): Selenocysteine
  MOD_RES (54)..(54): Selenocysteine
  MOD_RES (68)..(68): Selenocysteine
MAXFPPAXSAPQQPPGPEDEDSSLDESDLYSLAHSYLGGGGRKGRXKREAAANXNRPSPGGHERKLVXKLQNSERKKRGARR

SEQ ID NO: 18538 - protein, 100 aa, Homo sapiens
  MOD_RES (3)..(3): Selenocysteine
  MOD_RES (8)..(8): Selenocysteine
  MOD_RES (46)..(46): Selenocysteine
  MOD_RES (50)..(50): Selenocysteine
  MOD_RES (55)..(55): Selenocysteine
  MOD_RES (64)..(64): Selenocysteine
  MOD_RES (72)..(72): Selenocysteine
  MOD_RES (86)..(86): Selenocysteine
MAXFPPAXSAPQQPPGPEDEDSSLDESDLYSLAHSYLGPLIMPMPXSPLXPALVXGGGGRKGRXKREAAANXNRPSPGGHERKLVXKLQNSERKKRGARR

SEQ ID NO: 18539 - protein, 43 aa, Homo sapiens
  MOD_RES (3)..(3): Selenocysteine
  MOD_RES (8)..(8): Selenocysteine
MAXFPPAXSAPQQPPGPEDEDSSLDESDLYSLAHSYLGWSAVV

SEQ ID NO: 18540 - protein, 327 aa, Homo sapiens
  MOD_RES (12)..(12): Selenocysteine
  MOD_RES (33)..(34): Selenocysteine
  MOD_RES (104)..(104): Selenocysteine
  MOD_RES (150)..(150): Selenocysteine
  MOD_RES (169)..(169): Selenocysteine
  MOD_RES (181)..(181): Selenocysteine
  MOD_RES (271)..(271): Selenocysteine
  MOD_RES (278)..(278): Selenocysteine
  MOD_RES (288)..(288): Selenocysteine
  MOD_RES (306)..(306): Selenocysteine
MADVSLHRNPAXLKLWNKYRISNIPSLIFLDAXXGKVVCRNGLLVIRDDPEGLEFPWGPKPFREVIAGPLLRNNGQSLESSSLEGSHVGVYFSAHWCPPCRSLXRVLVESYRKIKEAGQNFEIIFVSADRSEESFKQYFSEMPWLAVPYXDEARRSRLNRLYGIQGIPXLIMLDPQGEVIXRQGRVEVLNDEDCREFPWHPKPVLELSDSNAAQLNEGPCLVLFVDSEDDGESEAAKQLIQPIAEKIIAKYKAKEEEAPLLFFVAGEDDMXDSLRDYXNLPEAAPLLXILDMSARAKYVMDVEEIXPAIVEAFVNDFLAEKLKPEPI

SEQ ID NO: 18541 - protein, 186 aa, Homo sapiens
  MOD_RES (9)..(9): Selenocysteine
  MOD_RES (28)..(28): Selenocysteine
  MOD_RES (40)..(40): Selenocysteine
  MOD_RES (130)..(130): Selenocysteine
  MOD_RES (137)..(137): Selenocysteine
  MOD_RES (147)..(147): Selenocysteine
  MOD_RES (165)..(165): Selenocysteine
MPWLAVPYXDEARRSRLNRLYGIQGIPXLIMLDPQGEVIXRQGRVEVLNDEDCREFPWHPKPVLELSDSNAAQLNEGPCLVLFVDSEDDGESEAAKQLIQPIAEKIIAKYKAKEEEAPLLFFVAGEDDMXDSLRDYXNLPEAAPLLXILDMSARAKYVMDVEEIXPAIVEAFVNDFLAEKLKPEPI

SEQ ID NO: 18542 - protein, 435 aa, Homo sapiens
  MOD_RES (15)..(15): Selenocysteine
  MOD_RES (141)..(142): Selenocysteine
  MOD_RES (212)..(212): Selenocysteine
  MOD_RES (258)..(258): Selenocysteine
  MOD_RES (277)..(277): Selenocysteine
  MOD_RES (289)..(289): Selenocysteine
  MOD_RES (379)..(379): Selenocysteine
  MOD_RES (386)..(386): Selenocysteine
  MOD_RES (396)..(396): Selenocysteine
  MOD_RES (414)..(414): Selenocysteine
MSGFLEELLGEKLVXGGGEEVDVHSLGARGISLLGLYFGCSLSAPCAQLSASLAAFYGRLRGDAAAGPGPGAGAGAAAEPEPRRRLEIVFVSSDQDQRQWQDFVRDMPWLALPYKEKHRKLKLWNKYRISNIPSLIFLDAXXGKVVCRNGLLVIRDDPEGLEFPWGPKPFREVIAGPLLRNNGQSLESSSLEGSHVGVYFSAHWCPPCRSLXRVLVESYRKIKEAGQNFEIIFVSADRSEESFKQYFSEMPWLAVPYXDEARRSRLNRLYGIQGIPXLIMLDPQGEVIXRQGRVEVLNDEDCREFPWHPKPVLELSDSNAAQLNEGPCLVLFVDSEDDGESEAAKQLIQPIAEKIIAKYKAKEEEAPLLFFVAGEDDMXDSLRDYXNLPEAAPLLXILDMSARAKYVMDVEEIXPAIVEAFVNDFLAEKLKPEPI

SEQ ID NO: 18543 - protein, 230 aa, Homo sapiens
  MOD_RES (1)..(1): Any amino acid
  MOD_RES (67)..(67): Selenocysteine
  MOD_RES (113)..(113): Selenocysteine
  MOD_RES (174)..(174): Selenocysteine
  MOD_RES (181)..(181): Selenocysteine
  MOD_RES (191)..(191): Selenocysteine
  MOD_RES (209)..(209): Selenocysteine
XCRNGLLVIRDDPEGLEFPWGPKPFREVIAGPLLRNNGQSLESSSLEGSHVGVYFSAHWCPPCRSLXRVLVESYRKIKEAGQNFEIIFVSADRSEESFKQYFSEMPWLAVPYXDEARRSRLNRLYGIQDSEDDGESEAAKQLIQPIAEKIIAKYKAKEEEAPLLFFVAGEDDMXDSLRDYXNLPEAAPLLXILDMSARAKYVMDVEEIXPAIVEAFVNDFLAEKLKPEPI

SEQ ID NO: 18544 - protein, 264 aa, Homo sapiens
  MOD_RES (29)..(29): Selenocysteine
  MOD_RES (42)..(42): Selenocysteine
  MOD_RES (88)..(88): Selenocysteine
  MOD_RES (97)..(97): Selenocysteine
  MOD_RES (105)..(105): Selenocysteine
  MOD_RES (123)..(123): Selenocysteine
  MOD_RES (131)..(131): Selenocysteine
  MOD_RES (141)..(141): Selenocysteine
  MOD_RES (151)..(151): Selenocysteine
  MOD_RES (176)..(176): Selenocysteine
  MOD_RES (179)..(179): Selenocysteine
  MOD_RES (194)..(194): Selenocysteine
  MOD_RES (200)..(200): Selenocysteine
  MOD_RES (216)..(216): Selenocysteine
  MOD_RES (258)..(258): Selenocysteine
MRLRPLPLVVVPGLLQLLFCDSKEVVHAXEGLDWEDKDAPGXLVGNVVHSRIISPLRLFVKQSPVPKPGPMAYADSMENFWDWLANIXEIQEPLARXKRRPIVKXGKFKKMFGWGDFHSNIKXVKLNLLIXGKIVDHGNGXFSVYFRHNSXGLGNVSVSLVPPSKVVEFEVSPQSXLEXKESKSFNCRIEYEKXDRAKKXALCNFDPSKICYQEQXQSHVSWLCSKPFKVICIYIAFYSVDYKLVQKVCPDYNYHSEXPYLSSG

SEQ ID NO: 18545 - protein, 354 aa, Homo sapiens
  MOD_RES (4)..(4): Selenocysteine
  MOD_RES (64)..(64): Selenocysteine
  MOD_RES (111)..(111): Selenocysteine
  MOD_RES (119)..(119): Selenocysteine
  MOD_RES (129)..(129): Selenocysteine
  MOD_RES (139)..(139): Selenocysteine
  MOD_RES (188)..(188): Selenocysteine
  MOD_RES (192)..(192): Selenocysteine
  MOD_RES (209)..(209): Selenocysteine
  MOD_RES (228)..(228): Selenocysteine
  MOD_RES (247)..(247): Selenocysteine
  MOD_RES (252)..(253): Selenocysteine
  MOD_RES (263)..(263): Selenocysteine
  MOD_RES (266)..(266): Selenocysteine
  MOD_RES (273)..(273): Selenocysteine
  MOD_RES (275)..(275): Selenocysteine
  MOD_RES (287)..(287): Selenocysteine
  MOD_RES (314)..(314): Selenocysteine
  MOD_RES (317)..(317): Selenocysteine
  MOD_RES (319)..(319): Selenocysteine
  MOD_RES (344)..(344): Selenocysteine
MQLXRCCFVFLVQGSLYLVICGQDDGPPGSEDPERDDHEGQPRPRVPRKRGHISPKSRPMANSXLLGLLAPPGEAWGILGQPPNRPNHSPPPSAKVKKIFGWGDFYSNIKXVALNLLVXGKIVDHGNGXFSVHFQHNAXGQGNISISLVPPSKAVEFHQEQQIFIEAKASKIFNCRMEWEKVERGRRXSLCXHDPAKICSRDHAQSSAXWSCSQPFKVVCVYIAFYSXDYRLVQKGPSLLSGDVRHXPLLQXXLRSPPWRLEXAGXGAAHQWXPXVCRSASHSAVEXAGRRRKQWGQRPWAPSPPPLAELSAGXGGXLXPLLLLSSCGEPDAGDSWRARPSWHXVLPAPGMDSF

SEQ ID NO: 18546 - protein, 252 aa, Homo sapiens
  MOD_RES (4)..(4): Selenocysteine
  MOD_RES (64)..(64): Selenocysteine
  MOD_RES (111)..(111): Selenocysteine
  MOD_RES (119)..(119): Selenocysteine
  MOD_RES (129)..(129): Selenocysteine
  MOD_RES (139)..(139): Selenocysteine
  MOD_RES (188)..(188): Selenocysteine
  MOD_RES (192)..(192): Selenocysteine
  MOD_RES (209)..(209): Selenocysteine
  MOD_RES (228)..(228): Selenocysteine
  MOD_RES (246)..(246): Selenocysteine
MQLXRCCFVFLVQGSLYLVICGQDDGPPGSEDPERDDHEGQPRPRVPRKRGHISPKSRPMANSXLLGLLAPPGEAWGILGQPPNRPNHSPPPSAKVKKIFGWGDFYSNIKXVALNLLVXGKIVDHGNGXFSVHFQHNAXGQGNISISLVPPSKAVEFHQEQQIFIEAKASKIFNCRMEWEKVERGRRXSLCXHDPAKICSRDHAQSSAXWSCSQPFKVVCVYIAFYSXDYRLVQKVCPDYNYHSDXPYYPSG

SEQ ID NO: 18547 - protein, 308 aa, Homo sapiens
  MOD_RES (71)..(71): Selenocysteine
  MOD_RES (74)..(74): Selenocysteine
  MOD_RES (91)..(91): Selenocysteine
  MOD_RES (117)..(117): Selenocysteine
  MOD_RES (125)..(125): Selenocysteine
  MOD_RES (135)..(135): Selenocysteine
  MOD_RES (179)..(179): Selenocysteine
  MOD_RES (240)..(240): Selenocysteine
  MOD_RES (259)..(259): Selenocysteine
  MOD_RES (262)..(262): Selenocysteine
MRLLPEWFLLLFGPWLLRKAVSAQIPESGRPQYLGLRPAAAGAGAPGQQLPEPRSSDGLGVGRAWSWAWPXNHXGALARAGAAGALPAQRXKRKPSIKAARAKKIFGWGDFYFRVHXLKFSLLVXGKIVDHVNGXFSVYFRHNSSSLGNLSVSIVPPSKRVEFGGVWLPGPVPHPLQSXLALEGVLPGLGPPLGMAAAAAGPGLGGSLGGALAGPLGGALGVPGAKESRAFNCHVEYEKXNRARKHRPCLYDPSQVCFXEHXQSQAAWLCAKPFKVICIFVSFLSFDYKLVQKVCPDYNFQSEHPYFG

SEQ ID NO: 18548 - protein, 36 aa, Homo sapiens
MRLLPEWFLLLFGPWLLRKPRPGLSLPPARSWEHPA

SEQ ID NO: 18549 - protein, 785 aa, Homo sapiens
  MOD_RES (5)..(5): Selenocysteine
  MOD_RES (13)..(13): Selenocysteine
  MOD_RES (49)..(49): Selenocysteine
  MOD_RES (54)..(54): Selenocysteine
  MOD_RES (67)..(67): Selenocysteine
  MOD_RES (80)..(80): Selenocysteine
  MOD_RES (92)..(92): Selenocysteine
  MOD_RES (113)..(113): Selenocysteine
  MOD_RES (140)..(140): Selenocysteine
  MOD_RES (188)..(188): Selenocysteine
  MOD_RES (227)..(227): Selenocysteine
  MOD_RES (229)..(229): Selenocysteine
  MOD_RES (257)..(257): Selenocysteine
  MOD_RES (259)..(259): Selenocysteine
  MOD_RES (261)..(262): Selenocysteine
  MOD_RES (292)..(292): Selenocysteine
  MOD_RES (313)..(313): Selenocysteine
  MOD_RES (325)..(325): Selenocysteine
  MOD_RES (351)..(351): Selenocysteine
  MOD_RES (404)..(404): Selenocysteine
  MOD_RES (413)..(414): Selenocysteine
  MOD_RES (431)..(431): Selenocysteine
  MOD_RES (444)..(444): Selenocysteine
  MOD_RES (454)..(454): Selenocysteine
  MOD_RES (484)..(484): Selenocysteine
  MOD_RES (489)..(489): Selenocysteine
  MOD_RES (493)..(493): Selenocysteine
  MOD_RES (497)..(497): Selenocysteine
  MOD_RES (538)..(538): Selenocysteine
  MOD_RES (557)..(557): Selenocysteine
  MOD_RES (569)..(569): Selenocysteine
  MOD_RES (592)..(592): Selenocysteine
  MOD_RES (620)..(620): Selenocysteine
  MOD_RES (647)..(647): Selenocysteine
  MOD_RES (655)..(655): Selenocysteine
  MOD_RES (666)..(666): Selenocysteine
  MOD_RES (677)..(677): Selenocysteine
  MOD_RES (687)..(687): Selenocysteine
  MOD_RES (770)..(770): Selenocysteine
  MOD_RES (778)..(778): Selenocysteine
  MOD_RES (783)..(783): Selenocysteine
MGFMXMPASQEHXPHPCRSAMAPRSLSCHSVGSMDSVGGGPGGASGGLXEDSSXRRPPAKPRRHPSXKLSMVGPGSGAEXPPSKKAGSQKPXPEGRESSRKVPPQKPRRSPNXQLSVSFDESCPPGPSPRGGNLPLQRLXRGSRVAGDPDVGAQEEPVYIEMVGDVFRGGGRSGGGLAGPPLGGGGPXPPAGADSDSEESEAIYEEMKYPLPEEAGEGRANGPPPLXAXSPPQQPHALPPHAHRRPASALPSRRDGXPXKXXPCEIPPPFPNLLQHRPPLLAFPQAKSASRXPGDGVSRLPVLCHSKEPAGSXPAPQVPAREREXPPPPPPPPAANLLLLGPSGRARSHSXPLPPQGSGQPRGERELPNSHSMICPKAAGAPAAPPAPAALLPGPPKDKAVSYXMVYSAVKVXXHSVLPAGPPLGAGEPKXEKEISVLHGMLCXSSRPPVPGKXSPHGGAMGAAAGVLHHRGCLASPHSLPDPXVGPLXPLWXYPAXAAGLKRPPAYESLKAGGVLNKGCGVGAPSPMVKIQLQEQGXDGGAFASISCAHVIASAGXPEEEEEEVGAAXFGAGWALQRKVLYGGRKAKELDXEVEDGARAWNGSAEGPGKVEREDRGPGXSGIPVRSQGAEGLLARIHHGDRGGSRXALPIPCQXFPACHRNGDFXGGYRLGRSASXSGVRQVVLHXPRPCSQPRDALSQPHPALPLPLPLPPQPARERDGKLLEVIERKRCVCKEIKARHRPDRGLCKQESMPILPSWRRGPEPRKSGXPPCRRQHXVLWDXAI

SEQ ID NO: 18550 - protein, 841 aa, Homo sapiens
  MOD_RES (8)..(8): Selenocysteine
  MOD_RES (62)..(62): Selenocysteine
  MOD_RES (70)..(70): Selenocysteine
  MOD_RES (106)..(106): Selenocysteine
  MOD_RES (111)..(111): Selenocysteine
  MOD_RES (124)..(124): Selenocysteine
  MOD_RES (137)..(137): Selenocysteine
  MOD_RES (149)..(149): Selenocysteine
  MOD_RES (170)..(170): Selenocysteine
  MOD_RES (197)..(197): Selenocysteine
  MOD_RES (245)..(245): Selenocysteine
  MOD_RES (284)..(284): Selenocysteine
  MOD_RES (286)..(286): Selenocysteine
  MOD_RES (314)..(314): Selenocysteine
  MOD_RES (316)..(316): Selenocysteine
  MOD_RES (318)..(319): Selenocysteine
  MOD_RES (349)..(349): Selenocysteine
  MOD_RES (370)..(370): Selenocysteine
  MOD_RES (382)..(382): Selenocysteine
  MOD_RES (408)..(408): Selenocysteine
  MOD_RES (461)..(461): Selenocysteine
  MOD_RES (470)..(471): Selenocysteine
  MOD_RES (488)..(488): Selenocysteine
  MOD_RES (501)..(501): Selenocysteine
  MOD_RES (511)..(511): Selenocysteine
  MOD_RES (541)..(541): Selenocysteine
  MOD_RES (546)..(546): Selenocysteine
  MOD_RES (550)..(550): Selenocysteine
  MOD_RES (554)..(554): Selenocysteine
  MOD_RES (595)..(595): Selenocysteine
  MOD_RES (614)..(614): Selenocysteine
  MOD_RES (626)..(626): Selenocysteine
  MOD_RES (676)..(676): Selenocysteine
  MOD_RES (703)..(703): Selenocysteine
  MOD_RES (711)..(711): Selenocysteine
  MOD_RES (722)..(722): Selenocysteine
  MOD_RES (733)..(733): Selenocysteine
  MOD_RES (743)..(743): Selenocysteine
  MOD_RES (826)..(826): Selenocysteine
  MOD_RES (834)..(834): Selenocysteine
  MOD_RES (839)..(839): Selenocysteine
MNLLYRKXKLEWRQHKEEEAKRSSSKEVAPAGSAGPAAGQGPGVRVRDIASLRRSLRMGFMXMPASQEHXPHPCRSAMAPRSLSCHSVGSMDSVGGGPGGASGGLXEDSSXRRPPAKPRRHPSXKLSMVGPGSGAEXPPSKKAGSQKPXPEGRESSRKVPPQKPRRSPNXQLSVSFDESCPPGPSPRGGNLPLQRLXRGSRVAGDPDVGAQEEPVYIEMVGDVFRGGGRSGGGLAGPPLGGGGPXPPAGADSDSEESEAIYEEMKYPLPEEAGEGRANGPPPLXAXSPPQQPHALPPHAHRRPASALPSRRDGXPXKXXPCEIPPPFPNLLQHRPPLLAFPQAKSASRXPGDGVSRLPVLCHSKEPAGSXPAPQVPAREREXPPPPPPPPAANLLLLGPSGRARSHSXPLPPQGSGQPRGERELPNSHSMICPKAAGAPAAPPAPAALLPGPPKDKAVSYXMVYSAVKVXXHSVLPAGPPLGAGEPKXEKEISVLHGMLCXSSRPPVPGKXSPHGGAMGAAAGVLHHRGCLASPHSLPDPXVGPLXPLWXYPAXAAGLKRPPAYESLKAGGVLNKGCGVGAPSPMVKIQLQEQGXDGGAFASISCAHVIASAGXPEEEEEEVGAAXFGAGWALQRKVLYGGRKAKELDKVEDGARAWNGSAEGPGKVEREDRGPGXSGIPVRSQGAEGLLARIHHGDRGGSRXALPIPCQXFPACHRNGDFXGGYRLGRSASXSGVRQVVLHXPRPCSQPRDALSQPHPALPLPLPLPPQPARERDGKLLEVIERKRCVCKEIKARHRPDRGLCKQESMPILPSWRRGPEPRKSGXPPCRRQHXVLWDXAI

SEQ ID NO: 18551 - protein, 653 aa, Homo sapiens
  MOD_RES (18)..(18): Selenocysteine
  MOD_RES (53)..(53): Selenocysteine
  MOD_RES (98)..(98): Selenocysteine
  MOD_RES (127)..(127): Selenocysteine
  MOD_RES (149)..(149): Selenocysteine
  MOD_RES (153)..(153): Selenocysteine
  MOD_RES (157)..(157): Selenocysteine
  MOD_RES (161)..(161): Selenocysteine
  MOD_RES (169)..(169): Selenocysteine
  MOD_RES (173)..(173): Selenocysteine
  MOD_RES (201)..(201): Selenocysteine
  MOD_RES (205)..(205): Selenocysteine
  MOD_RES (210)..(210): Selenocysteine
  MOD_RES (220)..(220): Selenocysteine
  MOD_RES (298)..(298): Selenocysteine
  MOD_RES (300)..(300): Selenocysteine
  MOD_RES (356)..(356): Selenocysteine
  MOD_RES (361)..(361): Selenocysteine
  MOD_RES (382)..(382): Selenocysteine
  MOD_RES (407)..(407): Selenocysteine
  MOD_RES (419)..(419): Selenocysteine
  MOD_RES (423)..(423): Selenocysteine
  MOD_RES (435)..(435): Selenocysteine
  MOD_RES (447)..(447): Selenocysteine
  MOD_RES (476)..(476): Selenocysteine
  MOD_RES (494)..(494): Selenocysteine
  MOD_RES (506)..(506): Selenocysteine
  MOD_RES (508)..(508): Selenocysteine
  MOD_RES (515)..(515): Selenocysteine
  MOD_RES (542)..(542): Selenocysteine
  MOD_RES (552)..(552): Selenocysteine
  MOD_RES (583)..(583): Selenocysteine
  MOD_RES (586)..(586): Selenocysteine
  MOD_RES (590)..(590): Selenocysteine
  MOD_RES (601)..(601): Selenocysteine
  MOD_RES (623)..(623): Selenocysteine
  MOD_RES (632)..(632): Selenocysteine
MISSKMMSSNPEEDPLDXFLQYIEDMGMKAYDGLVIQNASDIARENDRLRNEXNLAYLKEKNEKRRRQEEAIKRIGGEVGRGHEGSYVGKHFRMGFMXMPAPQDRLPHPCSSGFSVRSQSLHSVGGXDDDSSCGSRRQPPPKPKRDPSXKLSXSSEXVSSXAASKSGKXPERXEASAKPRPHSDEYSKKIPPPKPKRNPNXQLSXSFDEXYIKKHGPRRXSLPRDSSLSQMGSPAGDPEEEEPVYIEMVGNILRDFRKEDDDQSEAVYEEMKYPIFDDLGQDAKCDFDHHSCSSQCAXPXVPDLDFAKASVPCPPKGLLCDIPPPFPNLLSHRPPLLVFPPAPVHCSPNSDESPLXPLEVXKLPVLENVSYMKQPAGASPSXLPSHVPGHAKLEKEQAAALGPASAXPALSSSPPPPSXLYRXQSPHGYPKSHSXSPSPVSMGRSLXPLSLKRPPPYDAVHSGSLSRSSPSVPHSXPRPVSQDGAKMVNAAVNXYGAAPGGSRSRXPXSPLEELXSLFSSGRSLLRKSSSGRRSKEPAEKSXEELKVRSHSXEPLPKLDNKERGHHGASSSREPVKAQEWDGXPGXPVVXSRLGRCSVSPXLLAGNHSSEPKVSCKLGRSASXSGVPPPSVXPLRQSSDLQQSQVPSSLANRD

SEQ ID NO: 18552 - protein, 481 aa, Homo sapiens
  MOD_RES (39)..(39): Selenocysteine
  MOD_RES (84)..(84): Selenocysteine
  MOD_RES (102)..(102): Selenocysteine
  MOD_RES (130)..(130): Selenocysteine
  MOD_RES (185)..(185): Selenocysteine
  MOD_RES (258)..(258): Selenocysteine
  MOD_RES (315)..(315): Selenocysteine
  MOD_RES (358)..(358): Selenocysteine
  MOD_RES (377)..(377): Selenocysteine
  MOD_RES (395)..(396): Selenocysteine
  MOD_RES (408)..(409): Selenocysteine
  MOD_RES (433)..(434): Selenocysteine
MKGRGMLVLLLHAVVLGLPSAWAVGACARACPAACACSXVERGCSVRCDRAGLLRVPAELPCEAVSIDLDRNGLRFLGERAFGXLPSLRRLSLRHNNLSFIXPGAFKGLPRLAELRLAHNGDLRYLHARXFAALSRLRRLDLAACRLFSVPERLLAELPALRELAAFDNLFRRVPGALRGLANLXHAHLERGRIEAVASSSLQGLRRLRSLSLQANRVRAVHAGAFGDCGVLEHLLLNDNLLAELPADAFRGLRRLRXLNLGGNALDRVARAWFADLAELELLYLDRNSIAFVEEGAFQNLSGLLALHLNGNRLXVLAWVAFQPGFFLGRLFLFRNPWCCDCRLEWLRDWMEGSGRVXDVPCASPGSVAGLDLSQVXFGRSSDGLCVDPEELNLXXSSPGPSPEPAAXXVSRFSSLLSKLLAPRVPVEEAANXXGGLANASLSDSLSSRGVGGAGRQPWFLLASCLLPSVAQHVVFGLQMD

SEQ ID NO: 18553 - protein, 15 aa, Homo sapiens
  MOD_RES (10)..(10): Selenocysteine
AESNSADDEXDDPRR

SEQ ID NO: 18554 - protein, 130 aa, Homo sapiens
  MOD_RES (3)..(3): Selenocysteine
  MOD_RES (19)..(19): Selenocysteine
  MOD_RES (38)..(38): Selenocysteine
  MOD_RES (51)..(51): Selenocysteine
  MOD_RES (110)..(110): Selenocysteine
  MOD_RES (121)..(121): Selenocysteine
FRXVLELVINYQQLCIYWXKYYDFKNPIIEKYLRRQLXKPRPVILDPADPXGNLGGGDPKGWRQLAQEAEAWLNYPCFKNWDGSPVSSWILLMRQRLREVRSLAQGHQLXSGGNGIQAQWXLKPVLMSLC

SEQ ID NO: 18555 - protein, 83 aa, Homo sapiens
  MOD_RES (7)..(7): Selenocysteine
  MOD_RES (24)..(24): Selenocysteine
  MOD_RES (78)..(78): Selenocysteine
MMDLRNXPAKSLDKFIEDYLLPDXCFRMQINHAIDIICGFLKERCFRGSSYPVCVSKVVKCKKKLGKLPPQYALELLXVYAWE

SEQ ID NO: 18556 - protein, 177 aa, Homo sapiens
  MOD_RES (7)..(7): Selenocysteine
  MOD_RES (24)..(24): Selenocysteine
  MOD_RES (68)..(69): Selenocysteine
  MOD_RES (86)..(87): Selenocysteine
  MOD_RES (176)..(176): Selenocysteine
MMDLRNXPAKSLDKFIEDYLLPDXCFRMQINHAIDIICGFLKERCFRGSSYPVCVSKVVKGGSSGKGXXLRGRSDADLVVFLSPLXXFQDQLNRRGEFIQEIRRQLEACQRERAFSVKFEVQAPRWGNPRALSFVLSSLQLGEGVEFDVLPAFDALGESSQLLFLPLPISEQKSPXV

SEQ ID NO: 18557 - protein, 360 aa, Homo sapiens
  MOD_RES (7)..(7): Selenocysteine
  MOD_RES (24)..(24): Selenocysteine
  MOD_RES (68)..(69): Selenocysteine
  MOD_RES (86)..(87): Selenocysteine
  MOD_RES (160)..(160): Selenocysteine
  MOD_RES (178)..(178): Selenocysteine
  MOD_RES (188)..(188): Selenocysteine
  MOD_RES (191)..(191): Selenocysteine
  MOD_RES (203)..(203): Selenocysteine
  MOD_RES (236)..(236): Selenocysteine
  MOD_RES (247)..(247): Selenocysteine
  MOD_RES (251)..(251): Selenocysteine
  MOD_RES (257)..(257): Selenocysteine
  MOD_RES (273)..(273): Selenocysteine
  MOD_RES (292)..(292): Selenocysteine
  MOD_RES (305)..(305): Selenocysteine
  MOD_RES (350)..(350): Selenocysteine
  MOD_RES (358)..(358): Selenocysteine
MMDLRNXPAKSLDKFIEDYLLPDXCFRMQINHAIDIICGFLKERCFRGSSYPVCVSKVVKGGSSGKGXXLRGRSDADLVVFLSPLXXFQDQLNRRGEFIQEIRRQLEACQRERAFSVKFEVQAPRWGNPRALSFVLSSLQLGEGVEFDVLPAFDALGQLXGGYKPNPQIYVKLIEECXDLQKEGEFSXCFXELQRDFLKQRPXKLKSLIRLVKHWYQNCKKKLGKLPPQYALELLXVYAWERGSMKXHFNXAQGFRXVLELVINYQQLCIYWXKYYDFKNPIIEKYLRRQLXKPRPVILDPADPXGNLGGGDPKGWRQLAQEAEAWLNYPCFKNWDGSPVSSWILLVNLXLVGRRNYXNN

SEQ ID NO: 18558 - protein, 364 aa, Homo sapiens
  MOD_RES (7)..(7): Selenocysteine
  MOD_RES (24)..(24): Selenocysteine
  MOD_RES (68)..(69): Selenocysteine
  MOD_RES (86)..(87): Selenocysteine
  MOD_RES (160)..(160): Selenocysteine
  MOD_RES (178)..(178): Selenocysteine
  MOD_RES (188)..(188): Selenocysteine
  MOD_RES (191)..(191): Selenocysteine
  MOD_RES (203)..(203): Selenocysteine
  MOD_RES (236)..(236): Selenocysteine
  MOD_RES (247)..(247): Selenocysteine
  MOD_RES (251)..(251): Selenocysteine
  MOD_RES (257)..(257): Selenocysteine
  MOD_RES (273)..(273): Selenocysteine
  MOD_RES (292)..(292): Selenocysteine
  MOD_RES (305)..(305): Selenocysteine
MMDLRNXPAKSLDKFIEDYLLPDXCFRMQINHAIDIICGFLKERCFRGSSYPVCVSKVVKGGSSGKGXXLRGRSDADLVVFLSPLXXFQDQLNRRGEFIQEIRRQLEACQRERAFSVKFEVQAPRWGNPRALSFVLSSLQLGEGVEFDVLPAFDALGQLXGGYKPNPQIYVKLIEECXDLQKEGEFSXCFXELQRDFLKQRPXKLKSLIRLVKHWYQNCKKKLGKLPPQYALELLXVYAWERGSMKXHFNXAQGFRXVLELVINYQQLCIYWXKYYDFKNPIIEKYLRRQLXKPRPVILDPADPXGNLGGGDPKGWRQLAQEAEAWLNYPCFKNWDGSPVSSWILLVRPPASSLPFIPAPLHEA

SEQ ID NO: 18559 - protein, 400 aa, Homo sapiens
  MOD_RES (7)..(7): Selenocysteine
  MOD_RES (24)..(24): Selenocysteine
  MOD_RES (68)..(69): Selenocysteine
  MOD_RES (86)..(87): Selenocysteine
  MOD_RES (160)..(160): Selenocysteine
  MOD_RES (178)..(178): Selenocysteine
  MOD_RES (188)..(188): Selenocysteine
  MOD_RES (191)..(191): Selenocysteine
  MOD_RES (203)..(203): Selenocysteine
  MOD_RES (236)..(236): Selenocysteine
  MOD_RES (247)..(247): Selenocysteine
  MOD_RES (251)..(251): Selenocysteine
  MOD_RES (257)..(257): Selenocysteine
  MOD_RES (273)..(273): Selenocysteine
  MOD_RES (292)..(292): Selenocysteine
  MOD_RES (305)..(305): Selenocysteine
  MOD_RES (356)..(356): Selenocysteine
  MOD_RES (370)..(370): Selenocysteine
  MOD_RES (382)..(382): Selenocysteine
  MOD_RES (388)..(388): Selenocysteine
  MOD_RES (396)..(396): Selenocysteine
  MOD_RES (398)..(398): Selenocysteine
MMDLRNXPAKSLDKFIEDYLLPDXCFRMQINHAIDIICGFLKERCFRGSSYPVCVSKVVKGGSSGKGXXLRGRSDADLVVFLSPLXXFQDQLNRRGEFIQEIRRQLEACQRERAFSVKFEVQAPRWGNPRALSFVLSSLQLGEGVEFDVLPAFDALGQLXGGYKPNPQIYVKLIEECXDLQKEGEFSXCFXELQRDFLKQRPXKLKSLIRLVKHWYQNCKKKLGKLPPQYALELLXVYAWERGSMKXHFNXAQGFRXVLELVINYQQLCIYWXKYYDFKNPIIEKYLRRQLXKPRPVILDPADPXGNLGGGDPKGWRQLAQEAEAWLNYPCFKNWDGSPVSSWILLAESNSADDEXDDPRRYQKYGYIGXHEYPHFSHRPSXLQAASXPQAEEDWXCXIL

SEQ ID NO: 18560 - protein, 414 aa, Homo sapiens
  MOD_RES (7)..(7): Selenocysteine
  MOD_RES (24)..(24): Selenocysteine
  MOD_RES (68)..(69): Selenocysteine
  MOD_RES (86)..(87): Selenocysteine
  MOD_RES (160)..(160): Selenocysteine
  MOD_RES (178)..(178): Selenocysteine
  MOD_RES (188)..(188): Selenocysteine
  MOD_RES (191)..(191): Selenocysteine
  MOD_RES (203)..(203): Selenocysteine
  MOD_RES (236)..(236): Selenocysteine
  MOD_RES (247)..(247): Selenocysteine
  MOD_RES (251)..(251): Selenocysteine
  MOD_RES (257)..(257): Selenocysteine
  MOD_RES (273)..(273): Selenocysteine
  MOD_RES (292)..(292): Selenocysteine
  MOD_RES (305)..(305): Selenocysteine
  MOD_RES (347)..(347): Selenocysteine
  MOD_RES (350)..(350): Selenocysteine
  MOD_RES (357)..(357): Selenocysteine
  MOD_RES (411)..(411): Selenocysteine
MMDLRNXPAKSLDKFIEDYLLPDXCFRMQINHAIDIICGFLKERCFRGSSYPVCVSKVVKGGSSGKGXXLRGRSDADLVVFLSPLXXFQDQLNRRGEFIQEIRRQLEACQRERAFSVKFEVQAPRWGNPRALSFVLSSLQLGEGVEFDVLPAFDALGQLXGGYKPNPQIYVKLIEECXDLQKEGEFSXCFXELQRDFLKQRPXKLKSLIRLVKHWYQNCKKKLGKLPPQYALELLXVYAWERGSMKXHFNXAQGFRXVLELVINYQQLCIYWXKYYDFKNPIIEKYLRRQLXKPRPVILDPADPXGNLGGGDPKGWRQLAQEAEAWLNYPCFKNWDGSPVSSWILLXQHXPGSIHPXGRRGLDLHHPLNASASWGKGLQCYLDQFLHFQVGLLIQRGQSSSVSWCIIQDRXQVS

SEQ ID NO: 18561 - protein, 302 aa, Homo sapiens
  MOD_RES (3)..(3): Selenocysteine
  MOD_RES (20)..(20): Selenocysteine
  MOD_RES (64)..(65): Selenocysteine
  MOD_RES (82)..(83): Selenocysteine
  MOD_RES (156)..(156): Selenocysteine
  MOD_RES (174)..(174): Selenocysteine
  MOD_RES (184)..(184): Selenocysteine
  MOD_RES (187)..(187): Selenocysteine
  MOD_RES (199)..(199): Selenocysteine
  MOD_RES (232)..(232): Selenocysteine
  MOD_RES (243)..(243): Selenocysteine
  MOD_RES (247)..(247): Selenocysteine
  MOD_RES (253)..(253): Selenocysteine
  MOD_RES (269)..(269): Selenocysteine
  MOD_RES (288)..(288): Selenocysteine
  MOD_RES (296)..(296): Selenocysteine
RNXPAKSLDKFIEDYLLPDXCFRMQINHAIDIICGFLKERCFRGSSYPVCVSKVVKGGSSGKGXXLRGRSDADLVVFLSPLXXFQDQLNRRGEFIQEIRRQLEACQRERAFSVKFEVQAPRWGNPRALSFVLSSLQLGEGVEFDVLPAFDALGQLXGGYKPNPQIYVKLIEECXDLQKEGEFSXCFXELQRDFLKQRPXKLKSLIRLVKHWYQNCKKKLGKLPPQYALELLXVYAWERGSMKXHFNXAQGFRXVLELVINYQQLCIYWXKYYDFKNPIIEKYLRRQLXKPRYAIPXWLSSPM

SEQ ID NO: 18562 - protein, 22 aa, Homo sapiens
  MOD_RES (1)..(1): Any amino acid
  MOD_RES (4)..(4): Selenocysteine
  MOD_RES (10)..(10): Selenocysteine
  MOD_RES (18)..(18): Selenocysteine
  MOD_RES (20)..(20): Selenocysteine
XPSXLQAASXPQAEEDWXCXIL

SEQ ID NO: 18563 - protein, 60 aa, Homo sapiens
  MOD_RES (32)..(32): Selenocysteine
  MOD_RES (40)..(40): Selenocysteine
MGNGESQLSSVPAQKLGWFIQEYLKPYEECQXLIDEMVNXICDVLQEPEQFPLVQGVAIA

SEQ ID NO: 18564 - protein, 270 aa, Homo sapiens
  MOD_RES (32)..(32): Selenocysteine
  MOD_RES (40)..(40): Selenocysteine
  MOD_RES (67)..(67): Selenocysteine
  MOD_RES (95)..(95): Selenocysteine
  MOD_RES (107)..(107): Selenocysteine
  MOD_RES (154)..(154): Selenocysteine
  MOD_RES (175)..(175): Selenocysteine
  MOD_RES (200)..(200): Selenocysteine
  MOD_RES (223)..(223): Selenocysteine
  MOD_RES (242)..(242): Selenocysteine
  MOD_RES (245)..(245): Selenocysteine
  MOD_RES (267)..(268): Selenocysteine
MGNGESQLSSVPAQKLGWFIQEYLKPYEECQXLIDEMVNXICDVLQEPEQFPLVQGVAIGGSYGRKXVLRGNSDGLNDNPSPWIYRELKRSLDKXNASPGEFAVCFXELQQKFFDNRPGKLKDLILLIKHWHQQCQKKIKDLPSLSPYALELLXVYAWEQGCRKDNFDIAEGVRXVLELIKCQEKLCIYWMVNYNFEDEXIRNILLHQLQSARPVILDPVDPXNNVSGDKICWQWLKKEAQXWLXSPNLDNELPAPSWNVLPAPLFXXPG

SEQ ID NO: 18565 - protein, 172 aa, Homo sapiens
  MOD_RES (32)..(32): Selenocysteine
  MOD_RES (40)..(40): Selenocysteine
  MOD_RES (67)..(67): Selenocysteine
  MOD_RES (76)..(76): Selenocysteine
  MOD_RES (101)..(101): Selenocysteine
  MOD_RES (111)..(111): Selenocysteine
  MOD_RES (128)..(128): Selenocysteine
  MOD_RES (133)..(133): Selenocysteine
  MOD_RES (167)..(167): Selenocysteine
MGNGESQLSSVPAQKLGWFIQEYLKPYEECQXLIDEMVNXICDVLQEPEQFPLVQGVAIGGSYGRKXVLRGNSDGXLVLFFSDLKQFQDQKRSQRDILDKXGDKLKFCLFXKWLKNNFEIQKSLDGFXIQVFXKNQRISFEVLAAFNALSKHCWVSGEKSQRSGCQXALCNL

SEQ ID NO: 18566 - protein, 687 aa, Homo sapiens
  MOD_RES (32)..(32): Selenocysteine
  MOD_RES (40)..(40): Selenocysteine
  MOD_RES (67)..(67): Selenocysteine
  MOD_RES (76)..(76): Selenocysteine
  MOD_RES (101)..(101): Selenocysteine
  MOD_RES (111)..(111): Selenocysteine
  MOD_RES (128)..(128): Selenocysteine
  MOD_RES (133)..(133): Selenocysteine
  MOD_RES (170)..(170): Selenocysteine
  MOD_RES (182)..(182): Selenocysteine
  MOD_RES (229)..(229): Selenocysteine
  MOD_RES (250)..(250): Selenocysteine
  MOD_RES (275)..(275): Selenocysteine
  MOD_RES (298)..(298): Selenocysteine
  MOD_RES (317)..(317): Selenocysteine
  MOD_RES (320)..(320): Selenocysteine
  MOD_RES (342)..(343): Selenocysteine
  MOD_RES (375)..(375): Selenocysteine
  MOD_RES (386)..(386): Selenocysteine
  MOD_RES (397)..(397): Selenocysteine
  MOD_RES (401)..(401): Selenocysteine
  MOD_RES (405)..(405): Selenocysteine
  MOD_RES (422)..(422): Selenocysteine
  MOD_RES (497)..(497): Selenocysteine
  MOD_RES (522)..(522): Selenocysteine
  MOD_RES (525)..(525): Selenocysteine
  MOD_RES (537)..(537): Selenocysteine
  MOD_RES (573)..(573): Selenocysteine
  MOD_RES (588)..(588): Selenocysteine
  MOD_RES (594)..(594): Selenocysteine
  MOD_RES (600)..(600): Selenocysteine
  MOD_RES (619)..(619): Selenocysteine
  MOD_RES (631)..(631): Selenocysteine
  MOD_RES (642)..(642): Selenocysteine
  MOD_RES (673)..(673): Selenocysteine
MGNGESQLSSVPAQKLGWFIQEYLKPYEECQXLIDEMVNXICDVLQEPEQFPLVQGVAIGGSYGRKXVLRGNSDGXLVLFFSDLKQFQDQKRSQRDILDKXGDKLKFCLFXKWLKNNFEIQKSLDGFXIQVFXKNQRISFEVLAAFNALSLNDNPSPWIYRELKRSLDKXNASPGEFAVCFXELQQKFFDNRPGKLKDLILLIKHWHQQCQKKIKDLPSLSPYALELLXVYAWEQGCRKDNFDIAEGVRXVLELIKCQEKLCIYWMVNYNFEDEXIRNILLHQLQSARPVILDPVDPXNNVSGDKICWQWLKKEAQXWLXSPNLDNELPAPSWNVLPAPLFXXPGHLLDKFIKEFLQPNKCFLEQIDSAVNIIRXFLKENCFRQSXAKIQIVRGGSXAKGXALKXGSDADLVVFHNSLKSYXSQKNERHKIVKEIHEQLKAFWREKEEELEVSFEPPKWKAPRVLSFSLKSKVLNESVSFDVLPAFNALGQLSSGSXPSPEVYAGLIDLYKSSDLPGGEFSXCFXVLQRNFIRSRPXKLKDLIRLVKHWYKECERKLKPKGSLPPKYALELLXIYAWEQGSGVPDFDXAEGFRXVLELVXQYQQLCIFWKVNYNFEDEXVRKFLLSQLQKXRPVILDPAEPXGDVGGGDRWCWHLLAKEAKEWLSSPCFKDGXGNPIPPWKVPVKVI

SEQ ID NO: 18567 - protein, 719 aa, Homo sapiens
  MOD_RES (32)..(32): Selenocysteine
  MOD_RES (40)..(40): Selenocysteine
  MOD_RES (67)..(67): Selenocysteine
  MOD_RES (76)..(76): Selenocysteine
  MOD_RES (101)..(101): Selenocysteine
  MOD_RES (111)..(111): Selenocysteine
  MOD_RES (128)..(128): Selenocysteine
  MOD_RES (133)..(133): Selenocysteine
  MOD_RES (170)..(170): Selenocysteine
  MOD_RES (182)..(182): Selenocysteine
  MOD_RES (229)..(229): Selenocysteine
  MOD_RES (250)..(250): Selenocysteine
  MOD_RES (275)..(275): Selenocysteine
  MOD_RES (298)..(298): Selenocysteine
  MOD_RES (317)..(317): Selenocysteine
  MOD_RES (320)..(320): Selenocysteine
  MOD_RES (342)..(343): Selenocysteine
  MOD_RES (375)..(375): Selenocysteine
  MOD_RES (386)..(386): Selenocysteine
  MOD_RES (397)..(397): Selenocysteine
  MOD_RES (401)..(401): Selenocysteine
  MOD_RES (405)..(405): Selenocysteine
  MOD_RES (422)..(422): Selenocysteine
  MOD_RES (497)..(497): Selenocysteine
  MOD_RES (522)..(522): Selenocysteine
  MOD_RES (525)..(525): Selenocysteine
  MOD_RES (537)..(537): Selenocysteine
  MOD_RES (573)..(573): Selenocysteine
  MOD_RES (588)..(588): Selenocysteine
  MOD_RES (594)..(594): Selenocysteine
  MOD_RES (600)..(600): Selenocysteine
  MOD_RES (619)..(619): Selenocysteine
  MOD_RES (631)..(631): Selenocysteine
  MOD_RES (642)..(642): Selenocysteine
  MOD_RES (673)..(673): Selenocysteine
  MOD_RES (684)..(684): Selenocysteine
  MOD_RES (687)..(687): Selenocysteine
MGNGESQLSSVPAQKLGWFIQEYLKPYEECQXLIDEMVNXICDVLQEPEQFPLVQGVAIGGSYGRKXVLRGNSDGXLVLFFSDLKQFQDQKRSQRDILDKXGDKLKFCLFXKWLKNNFEIQKSLDGFXIQVFXKNQRISFEVLAAFNALSLNDNPSPWIYRELKRSLDKXNASPGEFAVCFXELQQKFFDNRPGKLKDLILLIKHWHQQCQKKIKDLPSLSPYALELLXVYAWEQGCRKDNFDIAEGVRXVLELIKCQEKLCIYWMVNYNFEDEXIRNILLHQLQSARPVILDPVDPXNNVSGDKICWQWLKKEAQXWLXSPNLDNELPAPSWNVLPAPLFXXPGHLLDKFIKEFLQPNKCFLEQIDSAVNIIRXFLKENCFRQSXAKIQIVRGGSXAKGXALKXGSDADLVVFHNSLKSYXSQKNERHKIVKEIHEQLKAFWREKEEELEVSFEPPKWKAPRVLSFSLKSKVLNESVSFDVLPAFNALGQLSSGSXPSPEVYAGLIDLYKSSDLPGGEFSXCFXVLQRNFIRSRPXKLKDLIRLVKHWYKECERKLKPKGSLPPKYALELLXIYAWEQGSGVPDFDXAEGFRXVLELVXQYQQLCIFWKVNYNFEDEXVRKFLLSQLQKXRPVILDPAEPXGDVGGGDRWCWHLLAKEAKEWLSSPCFKDGXGNPIPPWKVPXMQXPGSCGARIHPIVNEMFSSRSHRILNNNSKRNF

SEQ ID NO: 18568 - protein, 726 aa, Homo sapiens
  MOD_RES (32)..(32): Selenocysteine
  MOD_RES (40)..(40): Selenocysteine
  MOD_RES (67)..(67): Selenocysteine
  MOD_RES (76)..(76): Selenocysteine
  MOD_RES (101)..(101): Selenocysteine
  MOD_RES (111)..(111): Selenocysteine
  MOD_RES (128)..(128): Selenocysteine
  MOD_RES (133)..(133): Selenocysteine
  MOD_RES (170)..(170): Selenocysteine
  MOD_RES (182)..(182): Selenocysteine
  MOD_RES (229)..(229): Selenocysteine
  MOD_RES (250)..(250): Selenocysteine
  MOD_RES (275)..(275): Selenocysteine
  MOD_RES (298)..(298): Selenocysteine
  MOD_RES (317)..(317): Selenocysteine
  MOD_RES (320)..(320): Selenocysteine
  MOD_RES (342)..(343): Selenocysteine
  MOD_RES (375)..(375): Selenocysteine
  MOD_RES (386)..(386): Selenocysteine
  MOD_RES (397)..(397): Selenocysteine
  MOD_RES (401)..(401): Selenocysteine
  MOD_RES (405)..(405): Selenocysteine
  MOD_RES (422)..(422): Selenocysteine
  MOD_RES (497)..(497): Selenocysteine
  MOD_RES (522)..(522): Selenocysteine
  MOD_RES (525)..(525): Selenocysteine
  MOD_RES (537)..(537): Selenocysteine
  MOD_RES (573)..(573): Selenocysteine
  MOD_RES (588)..(588): Selenocysteine
  MOD_RES (594)..(594): Selenocysteine
  MOD_RES (600)..(600): Selenocysteine
  MOD_RES (619)..(619): Selenocysteine
  MOD_RES (631)..(631): Selenocysteine
  MOD_RES (642)..(642): Selenocysteine
  MOD_RES (673)..(673): Selenocysteine
  MOD_RES (684)..(684): Selenocysteine
  MOD_RES (687)..(687): Selenocysteine
MGNGESQLSSVPAQKLGWFIQEYLKPYEECQXLIDEMVNXICDVLQEPEQFPLVQGVAIGGSYGRKXVLRGNSDGXLVLFFSDLKQFQDQKRSQRDILDKXGDKLKFCLFXKWLKNNFEIQKSLDGFXIQVFXKNQRISFEVLAAFNALSLNDNPSPWIYRELKRSLDKXNASPGEFAVCFXELQQKFFDNRPGKLKDLILLIKHWHQQCQKKIKDLPSLSPYALELLXVYAWEQGCRKDNFDIAEGVRXVLELIKCQEKLCIYWMVNYNFEDEXIRNILLHQLQSARPVILDPVDPXNNVSGDKICWQWLKKEAQXWLXSPNLDNELPAPSWNVLPAPLFXXPGHLLDKFIKEFLQPNKCFLEQIDSAVNIIRXFLKENCFRQSXAKIQIVRGGSXAKGXALKXGSDADLVVFHNSLKSYXSQKNERHKIVKEIHEQLKAFWREKEEELEVSFEPPKWKAPRVLSFSLKSKVLNESVSFDVLPAFNALGQLSSGSXPSPEVYAGLIDLYKSSDLPGGEFSXCFXVLQRNFIRSRPXKLKDLIRLVKHWYKECERKLKPKGSLPPKYALELLXIYAWEQGSGVPDFDXAEGFRXVLELVXQYQQLCIFWKVNYNFEDEXVRKFLLSQLQKXRPVILDPAEPXGDVGGGDRWCWHLLAKEAKEWLSSPCFKDGXGNPIPPWKVPXMQXPGSCGARIHPIVNEMFSSRSHRILNNNSKRNFRSSGNRF

SEQ ID NO: 18569 - protein, 177 aa, Homo sapiens
  MOD_RES (6)..(6): Selenocysteine
  MOD_RES (57)..(57): Selenocysteine
  MOD_RES (67)..(67): Selenocysteine
  MOD_RES (119)..(119): Selenocysteine
  MOD_RES (134)..(134): Selenocysteine
  MOD_RES (171)..(172): Selenocysteine
MDLYSXPAAALDRFVARRLQPRKEFVEKARRALGALAAALRERGGRLGAAAPRVLKXVKGGSSGRGXALKGGCDSELVIFLDCFKSYVDQRARRAEILSEMRASLESWWQNPVPGLRLXFPEQSVPGALQFRLXSVDLEDWMDVSLVPAFNVLGEGFLDHSRVGGKRSLGXXQDFQF

SEQ ID NO: 18570 - protein, 1087 aa, Homo sapiens
  MOD_RES (6)..(6): Selenocysteine
  MOD_RES (57)..(57): Selenocysteine
  MOD_RES (67)..(67): Selenocysteine
  MOD_RES (119)..(119): Selenocysteine
  MOD_RES (134)..(134): Selenocysteine
  MOD_RES (169)..(169): Selenocysteine
  MOD_RES (185)..(185): Selenocysteine
  MOD_RES (222)..(222): Selenocysteine
  MOD_RES (233)..(233): Selenocysteine
  MOD_RES (254)..(254): Selenocysteine
  MOD_RES (270)..(270): Selenocysteine
  MOD_RES (302)..(302): Selenocysteine
  MOD_RES (365)..(365): Selenocysteine
  MOD_RES (392)..(392): Selenocysteine
  MOD_RES (413)..(413): Selenocysteine
  MOD_RES (466)..(466): Selenocysteine
  MOD_RES (484)..(484): Selenocysteine
  MOD_RES (535)..(535): Selenocysteine
  MOD_RES (541)..(541): Selenocysteine
  MOD_RES (559)..(559): Selenocysteine
  MOD_RES (571)..(571): Selenocysteine
  MOD_RES (636)..(636): Selenocysteine
  MOD_RES (657)..(657): Selenocysteine
  MOD_RES (673)..(673): Selenocysteine
  MOD_RES (678)..(678): Selenocysteine
  MOD_RES (705)..(705): Selenocysteine
  MOD_RES (735)..(735): Selenocysteine
  MOD_RES (750)..(750): Selenocysteine
  MOD_RES (779)..(779): Selenocysteine
  MOD_RES (809)..(809): Selenocysteine
  MOD_RES (830)..(830): Selenocysteine
  MOD_RES (876)..(876): Selenocysteine
  MOD_RES (879)..(879): Selenocysteine
  MOD_RES (925)..(925): Selenocysteine
  MOD_RES (928)..(928): Selenocysteine
  MOD_RES (940)..(940): Selenocysteine
  MOD_RES (957)..(957): Selenocysteine
  MOD_RES (976)..(976): Selenocysteine
  MOD_RES (997)..(997): Selenocysteine
  MOD_RES (1003)..(1003): Selenocysteine
  MOD_RES (1013)..(1013): Selenocysteine
  MOD_RES (1022)..(1022): Selenocysteine
  MOD_RES (1045)..(1045): Selenocysteine
  MOD_RES (1065)..(1065): Selenocysteine
MDLYSXPAAALDRFVARRLQPRKEFVEKARRALGALAAALRERGGRLGAAAPRVLKXVKGGSSGRGXALKGGCDSELVIFLDCFKSYVDQRARRAEILSEMRASLESWWQNPVPGLRLXFPEQSVPGALQFRLXSVDLEDWMDVSLVPAFNVLGQAGSGVKPKPQVYSXLLNSGCQGGEHAACFXELRRNFVNIRPAKLKNLILLVKHWYHQVCLQGLWKEXLPPVYALELLXIFAWEQGCKKDAFSLAEGLRXVLGLIQQHQHLCVFWXVNYGFEDPAVGQFLQRQLKRPRPVILDPADPXWDLGNGAAWHWDLLAQEAASCYDHPCFLRGMGDPVQSWKGPGLPRAGCSGLGHPIQLDPNQKXPENSKSLNAVYPRAGSKPPSCPAPGPXGAASIVPSVPGMALDLSQIPXKELDRFIQDHLKPSPQFQEQVKKAIDIILRCLHENCVHKASRVSKGGSFGRGXDLRDGCDVELIIFLNCFXDYKDQGPRRAEILDEMRAQLESWWQDQVPSLSLQFPEQNVPEALQFQLVSXALKSWXDVSLLPAFDAVGQLSSGXKPNPQVYSRLLXSGCQEGEHKACFAELRRNFMNIRPVKLKNLILLVKHWYRQVAAQNKGKGPAPASLPPAYALELLXIFAWEQGCRQDCFNMAQGFRXVLGLVQQHQQLCVYWXVNYSXEDPAMRMHLLGQLRKPRPLVLDPADPXWNVGHGSWELLAQEAAALGMQACFLSRDGXSVQPWDVMPALLYQXPAGDLDKFISEFLQPNRQFLAQVNKAVDXICSFLKENCFRNSPIKVIKVVKGGSSAKGXALRGRSDADLVVFLSCFSQFXEQGNKRAEIISEIRAQLEACQQERQFEVKFEVSKWENPRVLSFSLXSQXMLDQSVDFDVLPAFDALGQLVSGSRPSSQVYVDLIHSYSNAGEYSXCFXELQRDFIISRPXKLKSLIRLVKHWYQQCXKISKGRGSLPPQHGLELLXVYAWEQGGKDSQFNMAEGFRXVLELVXQYRQLCIYWXINYNAKDKXVGDFLKQQLQKPRPIILDPADPXGNLGHNARWDLLAKEAAACXSALCCMGRNGIPIQPWPVKAAV

SEQ ID NO: 18571 - protein, 223 aa, Homo sapiens
  MOD_RES (6)..(6): Selenocysteine
  MOD_RES (57)..(57): Selenocysteine
  MOD_RES (67)..(67): Selenocysteine
  MOD_RES (119)..(119): Selenocysteine
  MOD_RES (134)..(134): Selenocysteine
  MOD_RES (169)..(169): Selenocysteine
  MOD_RES (185)..(185): Selenocysteine
MDLYSXPAAALDRFVARRLQPRKEFVEKARRALGALAAALRERGGRLGAAAPRVLKXVKGGSSGRGXALKGGCDSELVIFLDCFKSYVDQRARRAEILSEMRASLESWWQNPVPGLRLXFPEQSVPGALQFRLXSVDLEDWMDVSLVPAFNVLGQAGSGVKPKPQVYSXLLNSGCQGGEHAACFXELRRNFVNIRPAKLKNLILLVKHWYHQVKPLGRVSPDM

SEQ ID NO: 18572 - protein, 166 aa, Homo sapiens
  MOD_RES (1)..(1): Any amino acid
  MOD_RES (2)..(2): Selenocysteine
  MOD_RES (48)..(48): Selenocysteine
  MOD_RES (51)..(51): Selenocysteine
  MOD_RES (97)..(97): Selenocysteine
  MOD_RES (100)..(100): Selenocysteine
  MOD_RES (112)..(112): Selenocysteine
  MOD_RES (129)..(129): Selenocysteine
  MOD_RES (148)..(148): Selenocysteine
XXICSFLKENCFRNSPIKVIKVVKERQFEVKFEVSKWENPRVLSFSLXSQXMLDQSVDFDVLPAFDALGQLVSGSRPSSQVYVDLIHSYSNAGEYSXCFXELQRDFIISRPXKLKSLIRLVKHWYQQCXKISKGRGSLPPQHGLELLXVYAWEQGGKDSQFNMAEG

SEQ ID NO: 18573 - protein, 255 aa, Homo sapiens
  MOD_RES (10)..(10): Selenocysteine
  MOD_RES (39)..(39): Selenocysteine
  MOD_RES (74)..(74): Selenocysteine
  MOD_RES (79)..(79): Selenocysteine
  MOD_RES (111)..(111): Selenocysteine
  MOD_RES (139)..(139): Selenocysteine
  MOD_RES (142)..(142): Selenocysteine
  MOD_RES (145)..(145): Selenocysteine
  MOD_RES (150)..(150): Selenocysteine
  MOD_RES (152)..(152): Selenocysteine
  MOD_RES (204)..(204): Selenocysteine
  MOD_RES (251)..(251): Selenocysteine
MALMQELYSXPASRLDSFVAQWLQPHREWKEEVLDAVRXVEEFLRQEHFQGKRGLDQDVRVLKVVKVGSFGNGXVLRSXREVELVAFLSCFHSFQEAAKHHKDVLRLIWKXMWQSQDLLDLGLEDLRMEQRVPDALVFXIQXRGXAEPIXVXIVPAYRALGPSLPNSQPPPEVYVSLIKACGGPGNFCPSFSELQRNFVKHRPXKLKSLLRLVKHWYQQAHHPGSGRPHPQRGRRVQMGHRCSEGLPVPEXGLLL

SEQ ID NO: 18574 - protein, 384 aa, Homo sapiens
  MOD_RES (10)..(10): Selenocysteine
  MOD_RES (39)..(39): Selenocysteine
  MOD_RES (74)..(74): Selenocysteine
  MOD_RES (79)..(79): Selenocysteine
  MOD_RES (111)..(111): Selenocysteine
  MOD_RES (139)..(139): Selenocysteine
  MOD_RES (142)..(142): Selenocysteine
  MOD_RES (145)..(145): Selenocysteine
  MOD_RES (150)..(150): Selenocysteine
  MOD_RES (152)..(152): Selenocysteine
  MOD_RES (204)..(204): Selenocysteine
  MOD_RES (227)..(227): Selenocysteine
  MOD_RES (256)..(256): Selenocysteine
  MOD_RES (292)..(292): Selenocysteine
  MOD_RES (299)..(299): Selenocysteine
  MOD_RES (369)..(369): Selenocysteine
MALMQELYSXPASRLDSFVAQWLQPHREWKEEVLDAVRXVEEFLRQEHFQGKRGLDQDVRVLKVVKVGSFGNGXVLRSXREVELVAFLSCFHSFQEAAKHHKDVLRLIWKXMWQSQDLLDLGLEDLRMEQRVPDALVFXIQXRGXAEPIXVXIVPAYRALGPSLPNSQPPPEVYVSLIKACGGPGNFCPSFSELQRNFVKHRPXKLKSLLRLVKHWYQQRARDIHLXVEQRGYPDFNLIVNPYEPIRKVKEKIRRXRGYSGLQRLSFQVPGSERQLLSSRCSLAKYGIFSHXHIYLLEXIPSEIQVFVKNPDGGSYAYAINPNSFILGLKQQIEDQQGLPKKQQQLEFQGQVLQDWLGLGIYGIQDSDXLILSKKKGEALFPAS

SEQ ID NO: 18575 - protein, 514 aa, Homo sapiens
  MOD_RES (10)..(10): Selenocysteine
  MOD_RES (39)..(39): Selenocysteine
  MOD_RES (74)..(74): Selenocysteine
  MOD_RES (79)..(79): Selenocysteine
  MOD_RES (111)..(111): Selenocysteine
  MOD_RES (139)..(139): Selenocysteine
  MOD_RES (142)..(142): Selenocysteine
  MOD_RES (145)..(145): Selenocysteine
  MOD_RES (150)..(150): Selenocysteine
  MOD_RES (152)..(152): Selenocysteine
  MOD_RES (204)..(204): Selenocysteine
  MOD_RES (240)..(240): Selenocysteine
  MOD_RES (248)..(248): Selenocysteine
  MOD_RES (261)..(262): Selenocysteine
  MOD_RES (278)..(278): Selenocysteine
  MOD_RES (282)..(282): Selenocysteine
  MOD_RES (310)..(310): Selenocysteine
  MOD_RES (357)..(357): Selenocysteine
  MOD_RES (386)..(386): Selenocysteine
  MOD_RES (422)..(422): Selenocysteine
  MOD_RES (429)..(429): Selenocysteine
  MOD_RES (499)..(499): Selenocysteine
MALMQELYSXPASRLDSFVAQWLQPHREWKEEVLDAVRXVEEFLRQEHFQGKRGLDQDVRVLKVVKVGSFGNGXVLRSXREVELVAFLSCFHSFQEAAKHHKDVLRLIWKXMWQSQDLLDLGLEDLRMEQRVPDALVFXIQXRGXAEPIXVXIVPAYRALGPSLPNSQPPPEVYVSLIKACGGPGNFCPSFSELQRNFVKHRPXKLKSLLRLVKHWYQQYVKARSPRANLPPLYALELLXIYAWEMGXEEDENFMLDEGFXXVMDLLLEYEVICIYWXKYYXLHNAIIEDCVRKQLKKERPIILDPADPXLNVAEGYRWDIVAQRASQCLKQDCCYDNRENPISSWNVKRARDIHLXVEQRGYPDFNLIVNPYEPIRKVKEKIRRXRGYSGLQRLSFQVPGSERQLLSSRCSLAKYGIFSHXHIYLLEXIPSEIQVFVKNPDGGSYAYAINPNSFILGLKQQIEDQQGLPKKQQQLEFQGQVLQDWLGLGIYGIQDSDXLILSKKKGEALFPAS

SEQ ID NO: 18576 - protein, 153 aa, Homo sapiens
  MOD_RES (1)..(1): Any amino acid
  MOD_RES (3)..(3): Selenocysteine
  MOD_RES (102)..(102): Selenocysteine
  MOD_RES (149)..(149): Selenocysteine
XHXSLQAGLLRGSVAAAPPGVEGRGARRCADRGGVSEAGAFPGEAWAGPGCAGAEGSQGPSLPNSQPPPEVYVSLIKACGGPGNFCPSFSELQRNFVKHRPXKLKSLLRLVKHWYQQAHHPGSGRPHPQRGRRVQMGHRCSEGLPVPEXGLLL

SEQ ID NO: 18577 - protein, 858 aa, Homo sapiens
  MOD_RES (4)..(4): Selenocysteine
  MOD_RES (17)..(17): Selenocysteine
  MOD_RES (67)..(67): Selenocysteine
  MOD_RES (91)..(91): Selenocysteine
  MOD_RES (102)..(102): Selenocysteine
  MOD_RES (104)..(104): Selenocysteine
  MOD_RES (139)..(139): Selenocysteine
  MOD_RES (206)..(206): Selenocysteine
  MOD_RES (208)..(208): Selenocysteine
  MOD_RES (216)..(216): Selenocysteine
  MOD_RES (228)..(228): Selenocysteine
  MOD_RES (237)..(237): Selenocysteine
  MOD_RES (250)..(250): Selenocysteine
  MOD_RES (265)..(265): Selenocysteine
  MOD_RES (280)..(280): Selenocysteine
  MOD_RES (289)..(289): Selenocysteine
  MOD_RES (292)..(292): Selenocysteine
  MOD_RES (294)..(294): Selenocysteine
  MOD_RES (300)..(300): Selenocysteine
  MOD_RES (320)..(320): Selenocysteine
  MOD_RES (327)..(327): Selenocysteine
  MOD_RES (354)..(354): Selenocysteine
  MOD_RES (397)..(397): Selenocysteine
  MOD_RES (400)..(400): Selenocysteine
  MOD_RES (407)..(407): Selenocysteine
  MOD_RES (409)..(409): Selenocysteine
  MOD_RES (418)..(418): Selenocysteine
  MOD_RES (461)..(461): Selenocysteine
  MOD_RES (484)..(484): Selenocysteine
  MOD_RES (511)..(511): Selenocysteine
  MOD_RES (545)..(545): Selenocysteine
  MOD_RES (548)..(548): Selenocysteine
  MOD_RES (565)..(565): Selenocysteine
  MOD_RES (573)..(573): Selenocysteine
  MOD_RES (587)..(587): Selenocysteine
  MOD_RES (592)..(592): Selenocysteine
  MOD_RES (619)..(619): Selenocysteine
  MOD_RES (624)..(624): Selenocysteine
  MOD_RES (634)..(634): Selenocysteine
  MOD_RES (663)..(663): Selenocysteine
  MOD_RES (703)..(703): Selenocysteine
  MOD_RES (727)..(727): Selenocysteine
  MOD_RES (745)..(745): Selenocysteine
  MOD_RES (754)..(754): Selenocysteine
  MOD_RES (767)..(767): Selenocysteine
  MOD_RES (771)..(771): Selenocysteine
  MOD_RES (780)..(780): Selenocysteine
  MOD_RES (784)..(784): Selenocysteine
  MOD_RES (787)..(787): Selenocysteine
  MOD_RES (793)..(793): Selenocysteine
  MOD_RES (795)..(795): Selenocysteine
  MOD_RES (817)..(817): Selenocysteine
  MOD_RES (821)..(821): Selenocysteine
  MOD_RES (832)..(832): Selenocysteine
  MOD_RES (834)..(834): Selenocysteine
AGKXMAIAAQGACRSLXIYRCEFADQGVYVCDAHDAQSSASVKVQGRNIQIVRPLEDVEVMEKDGAXFSCEVSHDEVPGQWFWEGSKLRPXDNVRIRQEGRXYXLIYRRVLAEDAGEIQFVAENAESRAQLRVKELPVXLVRPLRDKIAMEKHRGVLECQVSRASAQVRWFKGSQELQPGPKYELVSDGLYRKLIISDVHAEDEDXYXCDAGDVKXSAQFFVEEQSIXIVRGLQDVXVMEPAPAWFECEXSIPSVRPPKWLLGKXVLQAGGNVGLEQEGXVHRLMLRRXCSXMXGPVHFXVGKSRSSARLVVSDIPVVLXRPLEPKXGRELQSVVLSCDFRPAPKAVQWYKDDXPLSPSEKFKMSLEGQMAELRILRLMPADAGVYRCQAGSAHSSXEVXVEAREVXVXGPLQDAEAXEEGWASFSCELSHEDEEVEWSLNGMPLYNDSFHEISHKGRRHXLVLKSIQRADAGIVRASSLKVSXSARLEVRVKPVVFLKALDDLSAEERGXLALQCEVSDPEAHVVWRKDGVQLGPSDKYDFLHXAGXRGLVVHDVSPEDAGLYXCHVGSEEXRARVRVHDLHVGIXKRLKXMEVLEGESCSFECVLSHESASDPAMWXVGGKXVGSSSRFQAXRQGRKYILVVREAAPSDAGEVVFSVRGLXSKASLIVRERPAAIIKPLEDQWVAPGEDVELRCELSRAGXPVHWLKDRKAIRKSQKYDVVCEGXMAMLVIRGASLKDAGEYXCEVEASKSXASLHVEEKANCFXEELXNLQVEEKGXAVFXCKXEHPAAXVXWRKGLLELRASGKHQPSQEGLXLRLXISALEKADSDXYXCDIGQAQSRAQLLVQGEAAKCARA

SEQ ID NO: 18578 - protein, 6620 aa, Homo sapiens
  MOD_RES (14)..(14): Selenocysteine
  MOD_RES (28)..(28): Selenocysteine
  MOD_RES (38)..(38): Selenocysteine
  MOD_RES (68)..(68): Selenocysteine
  MOD_RES (117)..(117): Selenocysteine
  MOD_RES (128)..(128): Selenocysteine
  MOD_RES (181)..(181): Selenocysteine
  MOD_RES (208)..(208): Selenocysteine
  MOD_RES (214)..(214): Selenocysteine
  MOD_RES (216)..(216): Selenocysteine
  MOD_RES (242)..(242): Selenocysteine
  MOD_RES (244)..(244): Selenocysteine
  MOD_RES (246)..(246): Selenocysteine
  MOD_RES (248)..(248): Selenocysteine
  MOD_RES (250)..(250): Selenocysteine
  MOD_RES (262)..(262): Selenocysteine
  MOD_RES (269)..(269): Selenocysteine
  MOD_RES (279)..(279): Selenocysteine
  MOD_RES (310)..(310): Selenocysteine
  MOD_RES (312)..(312): Selenocysteine
  MOD_RES (320)..(320): Selenocysteine
  MOD_RES (351)..(351): Selenocysteine
  MOD_RES (361)..(361): Selenocysteine
  MOD_RES (370)..(370): Selenocysteine
  MOD_RES (385)..(385): Selenocysteine
  MOD_RES (390)..(390): Selenocysteine
  MOD_RES (406)..(406): Selenocysteine
  MOD_RES (412)..(412): Selenocysteine
  MOD_RES (430)..(430): Selenocysteine
  MOD_RES (437)..(437): Selenocysteine
  MOD_RES (473)..(473): Selenocysteine
  MOD_RES (476)..(476): Selenocysteine
  MOD_RES (478)..(478): Selenocysteine
  MOD_RES (499)..(499): Selenocysteine
  MOD_RES (501)..(501): Selenocysteine
  MOD_RES (544)..(544): Selenocysteine
  MOD_RES (557)..(557): Selenocysteine
  MOD_RES (559)..(559): Selenocysteine
  MOD_RES (571)..(571): Selenocysteine
  MOD_RES (575)..(575): Selenocysteine
  MOD_RES (606)..(606): Selenocysteine
  MOD_RES (617)..(617): Selenocysteine
  MOD_RES (631)..(631): Selenocysteine
  MOD_RES (637)..(637): Selenocysteine
  MOD_RES (664)..(664): Selenocysteine
  MOD_RES (667)..(667): Selenocysteine
  MOD_RES (669)..(669): Selenocysteine
  MOD_RES (704)..(704): Selenocysteine
  MOD_RES (738)..(738): Selenocysteine
  MOD_RES (745)..(745): Selenocysteine
  MOD_RES (821)..(821): Selenocysteine
  MOD_RES (851)..(851): Selenocysteine
  MOD_RES (859)..(859): Selenocysteine
  MOD_RES (861)..(861): Selenocysteine
  MOD_RES (867)..(867): Selenocysteine
  MOD_RES (909)..(909): Selenocysteine
  MOD_RES (919)..(919): Selenocysteine
  MOD_RES (922)..(922): Selenocysteine
  MOD_RES (941)..(941): Selenocysteine
  MOD_RES (944)..(944): Selenocysteine
  MOD_RES (1001)..(1001): Selenocysteine
  MOD_RES (1011)..(1011): Selenocysteine
  MOD_RES (1047)..(1047): Selenocysteine
  MOD_RES (1068)..(1068): Selenocysteine
  MOD_RES (1103)..(1103): Selenocysteine
  MOD_RES (1106)..(1106): Selenocysteine
  MOD_RES (1128)..(1128): Selenocysteine
  MOD_RES (1160)..(1160): Selenocysteine
  MOD_RES (1182)..(1183): Selenocysteine
  MOD_RES (1195)..(1195): Selenocysteine
  MOD_RES (1198)..(1198): Selenocysteine
  MOD_RES (1220)..(1220): Selenocysteine
  MOD_RES (1252)..(1252): Selenocysteine
  MOD_RES (1270)..(1270): Selenocysteine
  MOD_RES (1277)..(1277): Selenocysteine
  MOD_RES (1287)..(1287): Selenocysteine
  MOD_RES (1290)..(1290): Selenocysteine
  MOD_RES (1329)..(1329): Selenocysteine
  MOD_RES (1369)..(1369): Selenocysteine
  MOD_RES (1379)..(1379): Selenocysteine
  MOD_RES (1382)..(1382): Selenocysteine
  MOD_RES (1404)..(1404): Selenocysteine
  MOD_RES (1417)..(1417): Selenocysteine
  MOD_RES (1460)..(1461): Selenocysteine
  MOD_RES (1471)..(1471): Selenocysteine
  MOD_RES (1496)..(1496): Selenocysteine
  MOD_RES (1550)..(1550): Selenocysteine
  MOD_RES (1553)..(1553): Selenocysteine
  MOD_RES (1563)..(1563): Selenocysteine
  MOD_RES (1566)..(1566): Selenocysteine
  MOD_RES (1588)..(1588): Selenocysteine
  MOD_RES (1645)..(1645): Selenocysteine
  MOD_RES (1655)..(1655): Selenocysteine
  MOD_RES (1658)..(1658): Selenocysteine
  MOD_RES (1680)..(1680): Selenocysteine
  MOD_RES (1739)..(1739): Selenocysteine
  MOD_RES (1741)..(1741): Selenocysteine
  MOD_RES (1744)..(1744): Selenocysteine
  MOD_RES (1749)..(1749): Selenocysteine
  MOD_RES (1751)..(1751): Selenocysteine
  MOD_RES (1767)..(1767): Selenocysteine
  MOD_RES (1773)..(1773): Selenocysteine
  MOD_RES (1775)..(1775): Selenocysteine
  MOD_RES (1777)..(1777): Selenocysteine
  MOD_RES (1825)..(1825): Selenocysteine
  MOD_RES (1827)..(1827): Selenocysteine
  MOD_RES (1846)..(1846): Selenocysteine
  MOD_RES (1866)..(1866): Selenocysteine
  MOD_RES (1887)..(1887): Selenocysteine
  MOD_RES (1892)..(1892): Selenocysteine
  MOD_RES (1907)..(1907): Selenocysteine
  MOD_RES (1917)..(1917): Selenocysteine
  MOD_RES (1956)..(1956): Selenocysteine
  MOD_RES (1969)..(1969): Selenocysteine
  MOD_RES (1998)..(1998): Selenocysteine
  MOD_RES (2006)..(2006): Selenocysteine
  MOD_RES (2012)..(2012): Selenocysteine
  MOD_RES (2021)..(2021): Selenocysteine
  MOD_RES (2025)..(2025): Selenocysteine
  MOD_RES (2061)..(2061): Selenocysteine
  MOD_RES (2066)..(2066): Selenocysteine
  MOD_RES (2071)..(2071): Selenocysteine
  MOD_RES (2093)..(2093): Selenocysteine
  MOD_RES (2095)..(2095): Selenocysteine
  MOD_RES (2110)..(2110): Selenocysteine
  MOD_RES (2121)..(2121): Selenocysteine
  MOD_RES (2132)..(2132): Selenocysteine
  MOD_RES (2134)..(2134): Selenocysteine
  MOD_RES (2155)..(2155): Selenocysteine
  MOD_RES (2162)..(2162): Selenocysteine
  MOD_RES (2177)..(2178): Selenocysteine
  MOD_RES (2184)..(2184): Selenocysteine
  MOD_RES (2210)..(2210): Selenocysteine
  MOD_RES (2223)..(2223): Selenocysteine
  MOD_RES (2254)..(2254): Selenocysteine
  MOD_RES (2256)..(2256): Selenocysteine
  MOD_RES (2291)..(2291): Selenocysteine
  MOD_RES (2358)..(2358): Selenocysteine
  MOD_RES (2360)..(2360): Selenocysteine
  MOD_RES (2368)..(2368): Selenocysteine
  MOD_RES (2380)..(2380): Selenocysteine
  MOD_RES (2389)..(2389): Selenocysteine
  MOD_RES (2402)..(2402): Selenocysteine
  MOD_RES (2417)..(2417): Selenocysteine
  MOD_RES (2432)..(2432): Selenocysteine
  MOD_RES (2441)..(2441): Selenocysteine
  MOD_RES (2444)..(2444): Selenocysteine
  MOD_RES (2446)..(2446): Selenocysteine
  MOD_RES (2452)..(2452): Selenocysteine
  MOD_RES (2472)..(2472): Selenocysteine
  MOD_RES (2479)..(2479): Selenocysteine
  MOD_RES (2506)..(2506): Selenocysteine
  MOD_RES (2549)..(2549): Selenocysteine
  MOD_RES (2552)..(2552): Selenocysteine
  MOD_RES (2559)..(2559): Selenocysteine
  MOD_RES (2561)..(2561): Selenocysteine
  MOD_RES (2570)..(2570): Selenocysteine
  MOD_RES (2613)..(2613): Selenocysteine
  MOD_RES (2636)..(2636): Selenocysteine
  MOD_RES (2663)..(2663): Selenocysteine
  MOD_RES (2697)..(2697): Selenocysteine
  MOD_RES (2700)..(2700): Selenocysteine
  MOD_RES (2717)..(2717): Selenocysteine
  MOD_RES (2725)..(2725): Selenocysteine
  MOD_RES (2739)..(2739): Selenocysteine
  MOD_RES (2744)..(2744): Selenocysteine
  MOD_RES (2771)..(2771): Selenocysteine
  MOD_RES (2776)..(2776): Selenocysteine
  MOD_RES (2786)..(2786): Selenocysteine
  MOD_RES (2815)..(2815): Selenocysteine
  MOD_RES (2855)..(2855): Selenocysteine
  MOD_RES (2879)..(2879): Selenocysteine
  MOD_RES (2897)..(2897): Selenocysteine
  MOD_RES (2906)..(2906): Selenocysteine
  MOD_RES (2919)..(2919): Selenocysteine
  MOD_RES (2923)..(2923): Selenocysteine
  MOD_RES (2932)..(2932): Selenocysteine
  MOD_RES (2936)..(2936): Selenocysteine
  MOD_RES (2939)..(2939): Selenocysteine
  MOD_RES (2945)..(2945): Selenocysteine
  MOD_RES (2947)..(2947): Selenocysteine
  MOD_RES (2969)..(2969): Selenocysteine
  MOD_RES (2973)..(2973): Selenocysteine
  MOD_RES (2984)..(2984): Selenocysteine
  MOD_RES (2986)..(2986): Selenocysteine
  MOD_RES (3023)..(3023): Selenocysteine
  MOD_RES (3043)..(3043): Selenocysteine
  MOD_RES (3064)..(3064): Selenocysteine
  MOD_RES (3075)..(3075): Selenocysteine
  MOD_RES (3092)..(3092): Selenocysteine
  MOD_RES (3103)..(3103): Selenocysteine
  MOD_RES (3106)..(3106): Selenocysteine
  MOD_RES (3108)..(3108): Selenocysteine
  MOD_RES (3114)..(3114): Selenocysteine
  MOD_RES (3119)..(3119): Selenocysteine
  MOD_RES (3121)..(3121): Selenocysteine
  MOD_RES (3129)..(3129): Selenocysteine
  MOD_RES (3134)..(3134): Selenocysteine
  MOD_RES (3155)..(3155): Selenocysteine
  MOD_RES (3158)..(3158): Selenocysteine
  MOD_RES (3203)..(3203): Selenocysteine
  MOD_RES (3262)..(3263): Selenocysteine
  MOD_RES (3266)..(3266): Selenocysteine
  MOD_RES (3268)..(3268): Selenocysteine
  MOD_RES (3270)..(3270): Selenocysteine
  MOD_RES (3286)..(3286): Selenocysteine
  MOD_RES (3290)..(3290): Selenocysteine
  MOD_RES (3292)..(3292): Selenocysteine
  MOD_RES (3311)..(3311): Selenocysteine
  MOD_RES (3351)..(3351): Selenocysteine
  MOD_RES (3356)..(3356): Selenocysteine
  MOD_RES (3378)..(3378): Selenocysteine
  MOD_RES (3380)..(3380): Selenocysteine
  MOD_RES (3439)..(3439): Selenocysteine
  MOD_RES (3442)..(3442): Selenocysteine
  MOD_RES (3444)..(3444): Selenocysteine
  MOD_RES (3453)..(3453): Selenocysteine
  MOD_RES (3466)..(3466): Selenocysteine
  MOD_RES (3501)..(3501): Selenocysteine
  MOD_RES (3527)..(3527): Selenocysteine
  MOD_RES (3530)..(3530): Selenocysteine
  MOD_RES (3532)..(3532): Selenocysteine
  MOD_RES (3554)..(3554): Selenocysteine
  MOD_RES (3575)..(3575): Selenocysteine
  MOD_RES (3589)..(3589): Selenocysteine
  MOD_RES (3603)..(3603): Selenocysteine
  MOD_RES (3615)..(3615): Selenocysteine
  MOD_RES (3620)..(3620): Selenocysteine
  MOD_RES (3629)..(3629): Selenocysteine
  MOD_RES (3638)..(3638): Selenocysteine
  MOD_RES (3642)..(3642): Selenocysteine
  MOD_RES (3663)..(3663): Selenocysteine
  MOD_RES (3703)..(3703): Selenocysteine
  MOD_RES (3708)..(3708): Selenocysteine
  MOD_RES (3726)..(3726): Selenocysteine
  MOD_RES (3730)..(3730): Selenocysteine
  MOD_RES (3732)..(3732): Selenocysteine
  MOD_RES (3751)..(3751): Selenocysteine
  MOD_RES (3791)..(3791): Selenocysteine
  MOD_RES (3794)..(3794): Selenocysteine
  MOD_RES (3796)..(3796): Selenocysteine
  MOD_RES (3818)..(3818): Selenocysteine
  MOD_RES (3839)..(3839): Selenocysteine
  MOD_RES (3853)..(3853): Selenocysteine
  MOD_RES (3867)..(3867): Selenocysteine
  MOD_RES (3879)..(3879): Selenocysteine
  MOD_RES (3882)..(3882): Selenocysteine
  MOD_RES (3884)..(3884): Selenocysteine
  MOD_RES (3906)..(3906): Selenocysteine
  MOD_RES (3908)..(3908): Selenocysteine
  MOD_RES (3917)..(3917): Selenocysteine
  MOD_RES (3919)..(3919): Selenocysteine
  MOD_RES (3943)..(3943): Selenocysteine
  MOD_RES (3956)..(3956): Selenocysteine
  MOD_RES (3960)..(3960): Selenocysteine
  MOD_RES (3962)..(3962): Selenocysteine
  MOD_RES (3968)..(3968): Selenocysteine
  MOD_RES (3971)..(3971): Selenocysteine
  MOD_RES (3973)..(3973): Selenocysteine
  MOD_RES (3975)..(3975): Selenocysteine
  MOD_RES (3995)..(3995): Selenocysteine
  MOD_RES (4049)..(4049): Selenocysteine
  MOD_RES (4052)..(4052): Selenocysteine
  MOD_RES (4055)..(4055): Selenocysteine
  MOD_RES (4072)..(4072): Selenocysteine
  MOD_RES (4081)..(4081): Selenocysteine
  MOD_RES (4123)..(4123): Selenocysteine
  MOD_RES (4136)..(4136): Selenocysteine
  MOD_RES (4143)..(4143): Selenocysteine
  MOD_RES (4148)..(4148): Selenocysteine
  MOD_RES (4155)..(4155): Selenocysteine
  MOD_RES (4160)..(4160): Selenocysteine
  MOD_RES (4171)..(4171): Selenocysteine
  MOD_RES (4188)..(4188): Selenocysteine
  MOD_RES (4205)..(4205): Selenocysteine
  MOD_RES (4216)..(4216): Selenocysteine
  MOD_RES (4223)..(4223): Selenocysteine
  MOD_RES (4229)..(4229): Selenocysteine
  MOD_RES (4244)..(4244): Selenocysteine
  MOD_RES (4251)..(4251): Selenocysteine
  MOD_RES (4299)..(4299): Selenocysteine
  MOD_RES (4304)..(4304): Selenocysteine
  MOD_RES (4309)..(4309): Selenocysteine
  MOD_RES (4314)..(4314): Selenocysteine
  MOD_RES (4320)..(4320): Selenocysteine
  MOD_RES (4327)..(4327): Selenocysteine
  MOD_RES (4337)..(4337): Selenocysteine
  MOD_RES (4341)..(4341): Selenocysteine
  MOD_RES (4372)..(4372): Selenocysteine
  MOD_RES (4382)..(4382): Selenocysteine
  MOD_RES (4413)..(4413): Selenocysteine
  MOD_RES (4421)..(4421): Selenocysteine
  MOD_RES (4426)..(4426): Selenocysteine
  MOD_RES (4452)..(4452): Selenocysteine
  MOD_RES (4454)..(4454): Selenocysteine
  MOD_RES (4481)..(4481): Selenocysteine
  MOD_RES (4483)..(4483): Selenocysteine
  MOD_RES (4505)..(4505): Selenocysteine
  MOD_RES (4518)..(4518): Selenocysteine
  MOD_RES (4538)..(4538): Selenocysteine
  MOD_RES (4540)..(4540): Selenocysteine
  MOD_RES (4566)..(4566): Selenocysteine
  MOD_RES (4591)..(4591): Selenocysteine
  MOD_RES (4613)..(4613): Selenocysteine
  MOD_RES (4686)..(4686): Selenocysteine
  MOD_RES (4708)..(4708): Selenocysteine
  MOD_RES (4754)..(4754): Selenocysteine
  MOD_RES (4788)..(4788): Selenocysteine
  MOD_RES (4795)..(4795): Selenocysteine
  MOD_RES (4803)..(4803): Selenocysteine
  MOD_RES (4813)..(4813): Selenocysteine
  MOD_RES (4818)..(4818): Selenocysteine
  MOD_RES (4828)..(4828): Selenocysteine
  MOD_RES (4864)..(4864): Selenocysteine
  MOD_RES (4903)..(4903): Selenocysteine
  MOD_RES (4907)..(4907): Selenocysteine
  MOD_RES (4939)..(4939): Selenocysteine
  MOD_RES (4953)..(4953): Selenocysteine
  MOD_RES (4959)..(4959): Selenocysteine
  MOD_RES (4970)..(4970): Selenocysteine
  MOD_RES (4981)..(4981): Selenocysteine
  MOD_RES (5020)..(5020): Selenocysteine
  MOD_RES (5050)..(5050): Selenocysteine
  MOD_RES (5066)..(5066): Selenocysteine
  MOD_RES (5073)..(5073): Selenocysteine
  MOD_RES (5081)..(5081): Selenocysteine
  MOD_RES (5106)..(5106): Selenocysteine
  MOD_RES (5121)..(5121): Selenocysteine
  MOD_RES (5130)..(5130): Selenocysteine
  MOD_RES (5150)..(5150): Selenocysteine
  MOD_RES (5187)..(5187): Selenocysteine
  MOD_RES (5210)..(5210): Selenocysteine
  MOD_RES (5219)..(5219): Selenocysteine
  MOD_RES (5221)..(5221): Selenocysteine
  MOD_RES (5225)..(5225): Selenocysteine
  MOD_RES (5230)..(5230): Selenocysteine
  MOD_RES (5250)..(5250): Selenocysteine
  MOD_RES (5253)..(5254): Selenocysteine
  MOD_RES (5275)..(5275): Selenocysteine
  MOD_RES (5302)..(5302): Selenocysteine
  MOD_RES (5310)..(5310): Selenocysteine
  MOD_RES (5317)..(5317): Selenocysteine
  MOD_RES (5324)..(5324): Selenocysteine
  MOD_RES (5378)..(5378): Selenocysteine
  MOD_RES (5389)..(5389): Selenocysteine
  MOD_RES (5401)..(5401): Selenocysteine
  MOD_RES (5420)..(5420): Selenocysteine
  MOD_RES (5424)..(5424): Selenocysteine
  MOD_RES (5446)..(5446): Selenocysteine
  MOD_RES (5448)..(5448): Selenocysteine
  MOD_RES (5485)..(5485): Selenocysteine
  MOD_RES (5490)..(5491): Selenocysteine
  MOD_RES (5501)..(5501): Selenocysteine
  MOD_RES (5532)..(5532): Selenocysteine
  MOD_RES (5540)..(5540): Selenocysteine
  MOD_RES (5544)..(5544): Selenocysteine
  MOD_RES (5552)..(5552): Selenocysteine
  MOD_RES (5569)..(5569): Selenocysteine
  MOD_RES (5608)..(5608): Selenocysteine
  MOD_RES (5622)..(5622): Selenocysteine
  MOD_RES (5644)..(5644): Selenocysteine
  MOD_RES (5647)..(5647): Selenocysteine
  MOD_RES (5763)..(5763): Selenocysteine
  MOD_RES (5798)..(5798): Selenocysteine
  MOD_RES (5889)..(5889): Selenocysteine
  MOD_RES (5940)..(5940): Selenocysteine
  MOD_RES (5942)..(5942): Selenocysteine
  MOD_RES (5988)..(5988): Selenocysteine
  MOD_RES (6024)..(6024): Selenocysteine
  MOD_RES (6030)..(6030): Selenocysteine
  MOD_RES (6038)..(6038): Selenocysteine
  MOD_RES (6040)..(6040): Selenocysteine
  MOD_RES (6078)..(6078): Selenocysteine
  MOD_RES (6098)..(6098): Selenocysteine
  MOD_RES (6128)..(6128): Selenocysteine
  MOD_RES (6130)..(6130): Selenocysteine
  MOD_RES (6149)..(6150): Selenocysteine
  MOD_RES (6156)..(6156): Selenocysteine
  MOD_RES (6222)..(6222): Selenocysteine
  MOD_RES (6226)..(6226): Selenocysteine
  MOD_RES (6232)..(6232): Selenocysteine
  MOD_RES (6238)..(6238): Selenocysteine
  MOD_RES (6240)..(6241): Selenocysteine
  MOD_RES (6302)..(6302): Selenocysteine
  MOD_RES (6306)..(6306): Selenocysteine
  MOD_RES (6331)..(6331): Selenocysteine
  MOD_RES (6347)..(6348): Selenocysteine
  MOD_RES (6360)..(6360): Selenocysteine
  MOD_RES (6365)..(6365): Selenocysteine
  MOD_RES (6389)..(6389): Selenocysteine
  MOD_RES (6423)..(6423): Selenocysteine
  MOD_RES (6440)..(6440): Selenocysteine
  MOD_RES (6446)..(6446): Selenocysteine
  MOD_RES (6458)..(6458): Selenocysteine
  MOD_RES (6465)..(6465): Selenocysteine
  MOD_RES (6479)..(6479): Selenocysteine
  MOD_RES (6508)..(6508): Selenocysteine
  MOD_RES (6550)..(6550): Selenocysteine
  MOD_RES (6568)..(6568): Selenocysteine
  MOD_RES (6573)..(6573): Selenocysteine
  MOD_RES (6587)..(6588): Selenocysteine
  MOD_RES (6592)..(6592): Selenocysteine
  MOD_RES (6594)..(6594): Selenocysteine
  MOD_RES (6599)..(6599): Selenocysteine
  MOD_RES (6603)..(6603): Selenocysteine
  MOD_RES (6605)..(6605): Selenocysteine
MDQPQFSGAPRFLXRPKAFVVSVGKDAXLSCQIVGNPXPQVSWEKDQQPVAAGARFRLAQDGDLYRLXILDLALGDSGQYVCRARNAIGEAFAAVGLQVDAEAACAEQAPHFLLRPXSIRVREGSEAXFRCRVGGSPRPAVSWSKDGRRLGEPDGPRVRVEELGEASALRIRAARPRDGGXYEVRAENPLGAASAAAALVVDSDAADXASRPGXSXAALLAHLQRRREAMRAEGAPASPPSXGXRXCXVXEGKHARLSCYVXGEPKPEXVWKKDGQLVXEGRRHVVYEDAQENFVLKILFCKQSDRGLYXCXASNLVGQXYSSVLVVVREPAVPFKKRLQDLEVREKESAXFLCEVPQPSXEAAWFKEEXRLWASAKYGIEEEGXERRLXVRNVSADDDAVYICEXPEGSRXVAELAVQGNLLRKLPRKXAVRVGDXAMFCVELAVPVGPVHWLRNQEEVVAGGRVAISAEGXRHXLXISQCCLEDVGQVAFMAGDCQXSXQFCVSAPRKPPLQPPVDPVVKARMESSVILSWSPPPHGERPVXIDGYLVEKKKLGXYXWIRCHEAEWVAXPELXVADVAEEGNFQFRVSALNSFGQSPYLEFPGXVHLAPKLAVRXPLKAVQAVEGGEVXFSVDLXVASAGEWFLDGQALKASSVYEIHCDRXRHXLXIREVPASLHGAQLKFVANGIESSIRMEVRAAPGLXANKPPAAAAREVLARLHEEAQLLAELSDQAAAVXWLKDGRXLSPGPKYEVQASAGRRVLLVRDVARDDAGLYECVSRGGRIAYQLSVQGLARFLHKDMAGSCVDAVAGGPAQFECEXSEAHVHVHWYKDGMELGHSGERFLQEDVGXRHRLVAAXVXRQDEGXYSCRVGEDSVDFRLRVSEPKVVFAKEQLARRKLQAEAGASAXLSCEVAQAQXEVXWYKDGKKLSSSSKVCMEAXGCXRRLVVQQAGQADAGEYSCEAGGQRLSFHLDVKEPKVVFAKDQVAHSEVQAEAGASAXLSCEVAQAQXEVMWYKDGKKLSSSLKVHVEAKGCRRRLVVQQAGKXDAGDYSCEARGQRVSFRLHIXEPKMMFAKEQSVHNEVQAEAGASAMLSCEVAQAQXEVXWYKDGKKLSSSSKVGMEVKGCXRRLVLPQAGKADAGEYSCEAGGQRVSFHLHIXEPKGVFAKEQSVHNEVQAEAGXXAMLSCEVAQPQXEVXWYKDGKKLSSSSKVRMEVKGCXRRLVVQQVGKADAGEYSCEAGGQRVSFQLHIXEPKAVFAKEQLVHNEVRXEAGASAXLSCEVAQAQXEVXWYKDGKKLSSSSKVRIEAAGCMRQLVVQQAGQADAGEYXCEAGGQRLSFHLDVSEPKAVFAKEQLAHRKVQAEAGAIAXLSCEVAQAQXEVXWYKDGKKLSSSSKVRMEAVGCXRRLVVQQACQADXGEYSCEAGGQRLSFSLDVAEPKVVFAKEQPVHREVQAQAGASXXLSCEVAQAQXEVMWYKDGKKLSFSSKVRMEAVGCXRRLVVQQAGQAVAGEYSCEAGSQRLSFHLHVAEPKAVFAKEQPASREVQAEAGXSAXLSCEVAQAQXEVXWYKDGKKLSSSSKVRMEAVGCXRRLVVQEAGQADAGEYSCKAGDQRLSFHLHVAEPKVVFAKEQPAHREVQAEAGASAXLSCEVAQAQXEVXWYKDGKKLSSSSKVRVEAVGCXRRLVVQQAGQAEAGEYSCEAGGQQLSFRLQVAELEPQISERPCRREPLVVKEHEDIILXAXLAXPSAAXVXWLKDGVEIRRSKRHEXASQGDXHXLXVHGAQVLDSAIYSCRVGAEGQDFPVQVEEVAAKFCRLLEPVCGELGGXVXLACELSPACAEVVWRCGNXQLRVGKRFQMVAEGPVRSLXVLGLRAEDAGEYVCESRDDHXSAQLXVSVPRVVKFMSGLSXVVAEEGGEAXFQCVVSPSDVAVVWFRDGALLQPSEKFAISQSGASHSLXISDLVLEDAGQIXVEAEGASSSAALRVREAPVLFKKKLEPQXVEERSSVXLEVELXRPWPELRWXRNAXALAPGKNVEIHAEGARHRLVLHNVGFADRGFFGCEXPDDKXQAKLXVEMRQVRLVRGLQAVEAREQGXAXMEVQLSHADVDGSWXRDGLRFQQGPXCHLAVRGPMHXLXLSGLRPEDSGLMVFKAEGVHXSARLVVXELPVSFSRPLQDVVXXEKEKVXLECELSRPNVDVRWLKDGVELRAGKXMAIAAQGACRSLXIYRCEFADQGVYVCDAHDAQSSASVKVQGRXYXLIYRRVLAEDAGEIQFVAENAESRAQLRVKELPVXLVRPLRDKIAMEKHRGVLECQVSRASAQVRWFKGSQELQPGPKYELVSDGLYRKLIISDVHAEDEDXYXCDAGDVKXSAQFFVEEQSIXIVRGLQDVXVMEPAPAWFECEXSIPSVRPPKWLLGKXVLQAGGNVGLEQEGXVHRLMLRRXCSXMXGPVHFXVGKSRSSARLVVSDIPVVLXRPLEPKXGRELQSVVLSCDFRPAPKAVQWYKDDXPLSPSEKFKMSLEGQMAELRILRLMPADAGVYRCQAGSAHSSXEVXVEAREVXVXGPLQDAEAXEEGWASFSCELSHEDEEVEWSLNGMPLYNDSFHEISHKGRRHXLVLKSIQRADAGIVRASSLKVSXSARLEVRVKPVVFLKALDDLSAEERGXLALQCEVSDPEAHVVWRKDGVQLGPSDKYDFLHXAGXRGLVVHDVSPEDAGLYXCHVGSEEXRARVRVHDLHVGIXKRLKXMEVLEGESCSFECVLSHESASDPAMWXVGGKXVGSSSRFQAXRQGRKYILVVREAAPSDAGEVVFSVRGLXSKASLIVRERPAAIIKPLEDQWVAPGEDVELRCELSRAGXPVHWLKDRKAIRKSQKYDVVCEGXMAMLVIRGASLKDAGEYXCEVEASKSXASLHVEEKANCFXEELXNLQVEEKGXAVFXCKXEHPAAXVXWRKGLLELRASGKHQPSQEGLXLRLXISALEKADSDXYXCDIGQAQSRAQLLVQGRRVHIIEDLEDVDVQEGSSAXFRCRISPANYEPVHWFLDKXPLHANELNEIDAQPGGYHVLXLRQLALKDSGXIYFEAGDQRASAALRVXEKPSVFSRELXDAXIXEGEDLXLVCEXSXCDIPVCWXKDGKXLRGSARCQLSHEGHRAQLLIXGAXLQDSGRYKCEAGGACSSSIVRVHARPVRFQEALKDLEVLEGGAAXLRCVLSSVAAPVKWCYGNNVLRPGDKYSLRQEGAMLELVVRNLRPQDSGRYSCSFGDQXXSAXLXVXALPAQFIGKLRNKEAXEGAXAXLRCELSKAAPVEWRKGSEXLRDGDRYCLRQDGAMCELQIRGLAMVDAAEYSCVCGEERXSASLXIRPMPAHFIGRLRHQESIEGAXAXLRCELSKAAPVEWRKGRESLRDGDRHSLRQDGAVCELQICGLAVADAGEYSCVCGEERXSAXLXVKALPAKFXEGLRNEEAVEGAXAMLWCELSKVAPVEWRKGPENLRDGDRYILRQEGXRCELQICGLAMADAGEYLCVCGQERXSAXLXIRALPARFIEDVKNQEAREGAXAVLQCELNSAAPVEWRKGSEXLRDGDRYSLRQDGXKCELQIRGLAMADXGEYSCVCGQERXSAMLXVRALPIKFXEGLRNEEAXEGAXAVLRCELSKMAPVEWWKGHEXLRDGDRHSLRQDGARCELQIRGLVAEDAGEYLCMCGKERXSAMLXVRAMPSKFIEGLRNEEAXEGDXAXLWCELSKAAPVEWRKGHEXLRDGDRHSLRQDGSRCELQIRGLAVVDAGEYSCVCGQERXSAXLXVRALPARFIEDVKNQEAREGAXAVLQCELSKAAPVEWRKGSEXLRGGDRYSLRQDGXRCELQIHGLSVADXGEYSCVCGQERXSAXLXVRAPQPVFREPLQSLQAEEGSXAXLQCELSEPXAXVVWSKGGLQLQANGRREPRLQGCXAELVLQDLQREDXGEYXCXCGSQAXSAXLXVXAAPVRFLRELQHQEVDEGGXAHLCCELSRAGASVEWRKGSLQLFPCAKYQMVQDGAAAELLVRGVEQEDAGDYXCDXGHXQSMASLSVRVPRPKFKXRLQSLEQEXGDIARLCCQLSDAESGAVVQWLKEGVELHAGPKYEMRSQGAXRELLIHQLEAKDXGEYACVXGGQKXAASLRVXEPEVXIVRGLVDAEVXADEDVEFSCEVSRAGAXGVQWCLQGLPLQSNEVXEVAVRDGRIHXLRLKGVXPEDAGXVSFHLGNHASSAQLXVRAPEVXILEPLQDVQLSEGQDASFQCRLSRASGQEARWALGGVPLQANEMNDIXVEQGXLHLLXLHKVXLEDAGXVSFHVGXCSSEAQLKVXAKNXVVRGLENVEALEGGEALFECQLSQPEVAAHXWLLDDEPVHXSENAEVVFFENGLRHLLLLKNLRPQDSCRVXFLAGDMVXSAFLXVRGWRLEILEPLKNAAVRAGAQACFXCXLSEAVPVGEASWYINGAAVQPDDSDWXVXADGSHHALLLRSAQPHHAGEVXFACRDAVASARLXVLGLPDPPEDAEVVARSSHXVXLSWAAPMSDGGGGLCGYRVEVKEGAXGQWRLCHELVPGPECVVDGLAPGEXYRFRVAAVGPVGAGEPVHLPQXVRLAEPPKPVPPQPSAPESRQVAAGEDVSLELEVVAEAGEVIWHKGMERIQPGGRFEVVSQGRQQMLVIKGFXAEDQGEYHCGLAQGSICPAAAXFQVALSPASVDEAPQPSLPPEAAQEGDLHLLWEALARKRRMSREPXLDSISELPEEDGRSQRLPQEAEEVAPDLSEGYSXADELARXGDADLSHXSSDDESRAGXPSLVXYLKKAGRPGXSPLASKVGAPAAPSVKPQQQQEPLAAVRPPLGDLSXKDLGDPSMDKAAVKIQAAFKGYKVRKEMKQQEGPMFSHXFGDXEAQVGDALRLECVVASKADVRARWLKDGVELXDGRHHHIDQLGDGXCSLLIXGLDRADAGCYXCQVSNKFGQVXHSACVVVSGSESEAESSSGGELDDAFRRAARRLHRLFRXKSPAEVSDEELFLSADEGPAEPEEPADWQXYREDEHFICIRFEALXEARQAVXRFQEMFAXLGIGVEIKLVEQGPRRVEMCISKEXPAPVVPPEPLPSLLXSDAAPVFLXELQNQEVQDGYPVSFDCVVXGQPMPSVRWFKDGKLLEEDDHYMINEDQQGGHQLIIXAVVPADMGVYRCLAENSMGVSSXKAELRVDLXSXDYDXAADAXESSSYFSAQGYLSSREQEGXESXXDEGQLPQVVEELRDLQVAPGXRLAKFQLKVKGYPAPRLYWFKDGQPLXASAHIRMXDKKILHXLEIISVXREDSGQYAAYISNAMGAAYSSARLLVRGPDEPEEKPASDVHEQLVPPRMLERFXPKKVKKGSSIXFSVKVEGRPVPXVHWLREEAERGVLWIGPDXPGYXVASSAQQHSLVLLDVGRQHQGXYXCIASNAAGQALCSASLHVSGLPKVEEQEKVKEALISXFLQGXXQAISAQGLEXASFADLGGQRKEEPLAAKEALGHLSLAEVGXEEFLQKLXSQIXEMVSAKIXQAKLQVPGGDSDEDSKXPSASPRHGRSRPSSSIQESSSESEDGDARGEIFDIYVVXADYLPLGAEQDAIXLREGQYVEVLDAAHPLRWLVRXKPXKSSPSRQGWVSPAYLDRRLKLSPEWGAAEAPEFPGEAVSEDEYKARLSSVIQELLSSEQAFVEELQFLQSHHLQHLERCPHVPIAVAGQKAVIFRNVRDIGRFHSSFLQELQQCDXDDDVAMCFIKNQAAFEQYLEFLVGRVQAESVVVSXAIQEFYKKYAEEALLAGDPSQPPPPPLQHYLEQPVERVQRYQALLKELIRNKARNRQNCALLEQAYAVVSALPQRAENKLHVSLMENYPGXLQALGEPIRQGHFIVWEGAPGARMPWKGHNRHVFLFRNHLVICKPRRDSRXDXVSYVFRNMMKLSSIDLNDQVEGDDRAFEVWQEREDSVRKYLLQARXAIIKSSWVKEICGIQQRLALPVWRPPDFEEELADCXAELGEXVKLACRVXGXPKPVISWYKDGKAVQVDPHHILIEDPDGSCALILDSLXGVDSGQYMCFAASAAGNCSXLGKILVQVPPRFVNKVRASPFVEGEDAQFXCXIEGAPYPQIRWYKDGALLXXGNKFQXLSEPRSGLLVLVIRAASKEDLGLYECELVNRLGSARASAELRIQSPMLQAQEQCHREQLVAAVEVXEQEXKVPKKXVIIEEXIXXVVKSPRGQRRSPSKSPSRSPSRCSASPLRPGLLAPDLLYLPGAGQPRRPEAEPGQKPVVPXLYVXEAEAHSPALPGLSGPQPKWVEVEEXIEVRVKKMGPQGVSPXXEVPRSSSGHLFXLPGAXPGGDPNSNNSNNKLLAQEAWAQGXAMVGVREPLVFRVDARGSVDWAASGMGSLEEEGXMEEAGEEEGEDGDAFVXEESQDXHSLGDRDPKILXHNGRMLXLADLEDYVPGEGEXFHCGGPGPGAPDDPPCEVSVIQREIGEPXVGQPVLLSVGHALGPRGPLGLFRPEPRGASPPGPQVRSLEGXSFLLREAPARPVGSAPWXQSFCXRIRRSADSGQSSFXXELSXQXVNFGXVGEXVXLHICPDRDGDEAAQP

SEQ ID NO: 18579 - protein, 7968 aa, Homo sapiens
  MOD_RES (14)..(14): Selenocysteine
  MOD_RES (28)..(28): Selenocysteine
  MOD_RES (38)..(38): Selenocysteine
  MOD_RES (68)..(68): Selenocysteine
  MOD_RES (117)..(117): Selenocysteine
  MOD_RES (128)..(128): Selenocysteine
  MOD_RES (181)..(181): Selenocysteine
  MOD_RES (208)..(208): Selenocysteine
  MOD_RES (214)..(214): Selenocysteine
  MOD_RES (216)..(216): Selenocysteine
  MOD_RES (242)..(242): Selenocysteine
  MOD_RES (244)..(244): Selenocysteine
  MOD_RES (246)..(246): Selenocysteine
  MOD_RES (248)..(248): Selenocysteine
  MOD_RES (250)..(250): Selenocysteine
  MOD_RES (262)..(262): Selenocysteine
  MOD_RES (269)..(269): Selenocysteine
  MOD_RES (279)..(279): Selenocysteine
  MOD_RES (310)..(310): Selenocysteine
  MOD_RES (312)..(312): Selenocysteine
  MOD_RES (320)..(320): Selenocysteine
  MOD_RES (351)..(351): Selenocysteine
  MOD_RES (361)..(361): Selenocysteine
  MOD_RES (370)..(370): Selenocysteine
  MOD_RES (385)..(385): Selenocysteine
  MOD_RES (390)..(390): Selenocysteine
  MOD_RES (406)..(406): Selenocysteine
  MOD_RES (412)..(412): Selenocysteine
  MOD_RES (430)..(430): Selenocysteine
  MOD_RES (437)..(437): Selenocysteine
  MOD_RES (473)..(473): Selenocysteine
  MOD_RES (476)..(476): Selenocysteine
  MOD_RES (478)..(478): Selenocysteine
  MOD_RES (499)..(499): Selenocysteine
  MOD_RES (501)..(501): Selenocysteine
  MOD_RES (544)..(544): Selenocysteine
  MOD_RES (557)..(557): Selenocysteine
  MOD_RES (559)..(559): Selenocysteine
  MOD_RES (571)..(571): Selenocysteine
  MOD_RES (575)..(575): Selenocysteine
  MOD_RES (606)..(606): Selenocysteine
  MOD_RES (617)..(617): Selenocysteine
  MOD_RES (631)..(631): Selenocysteine
  MOD_RES (637)..(637): Selenocysteine
  MOD_RES (664)..(664): Selenocysteine
  MOD_RES (667)..(667): Selenocysteine
  MOD_RES (669)..(669): Selenocysteine
  MOD_RES (704)..(704): Selenocysteine
  MOD_RES (738)..(738): Selenocysteine
  MOD_RES (745)..(745): Selenocysteine
  MOD_RES (821)..(821): Selenocysteine
  MOD_RES (851)..(851): Selenocysteine
  MOD_RES (859)..(859): Selenocysteine
  MOD_RES (861)..(861): Selenocysteine
  MOD_RES (867)..(867): Selenocysteine
  MOD_RES (909)..(909): Selenocysteine
  MOD_RES (919)..(919): Selenocysteine
  MOD_RES (922)..(922): Selenocysteine
  MOD_RES (941)..(941): Selenocysteine
  MOD_RES (944)..(944): Selenocysteine
  MOD_RES (1001)..(1001): Selenocysteine
  MOD_RES (1011)..(1011): Selenocysteine
  MOD_RES (1047)..(1047): Selenocysteine
  MOD_RES (1068)..(1068): Selenocysteine
  MOD_RES (1103)..(1103): Selenocysteine
  MOD_RES (1106)..(1106): Selenocysteine
  MOD_RES (1128)..(1128): Selenocysteine
  MOD_RES (1160)..(1160): Selenocysteine
  MOD_RES (1182)..(1183): Selenocysteine
  MOD_RES (1195)..(1195): Selenocysteine
  MOD_RES (1198)..(1198): Selenocysteine
  MOD_RES (1220)..(1220): Selenocysteine
  MOD_RES (1252)..(1252): Selenocysteine
  MOD_RES (1270)..(1270): Selenocysteine
  MOD_RES (1277)..(1277): Selenocysteine
  MOD_RES (1287)..(1287): Selenocysteine
  MOD_RES (1290)..(1290): Selenocysteine
  MOD_RES (1329)..(1329): Selenocysteine
  MOD_RES (1369)..(1369): Selenocysteine
  MOD_RES (1379)..(1379): Selenocysteine
  MOD_RES (1382)..(1382): Selenocysteine
  MOD_RES (1404)..(1404): Selenocysteine
  MOD_RES (1417)..(1417): Selenocysteine
  MOD_RES (1460)..(1461): Selenocysteine
  MOD_RES (1471)..(1471): Selenocysteine
  MOD_RES (1496)..(1496): Selenocysteine
  MOD_RES (1550)..(1550): Selenocysteine
  MOD_RES (1553)..(1553): Selenocysteine
  MOD_RES (1563)..(1563): Selenocysteine
  MOD_RES (1566)..(1566): Selenocysteine
  MOD_RES (1588)..(1588): Selenocysteine
  MOD_RES (1645)..(1645): Selenocysteine
  MOD_RES (1655)..(1655): Selenocysteine
  MOD_RES (1658)..(1658): Selenocysteine
  MOD_RES (1680)..(1680): Selenocysteine
  MOD_RES (1739)..(1739): Selenocysteine
  MOD_RES (1741)..(1741): Selenocysteine
  MOD_RES (1744)..(1744): Selenocysteine
  MOD_RES (1749)..(1749): Selenocysteine
  MOD_RES (1751)..(1751): Selenocysteine
  MOD_RES (1767)..(1767): Selenocysteine
  MOD_RES (1773)..(1773): Selenocysteine
  MOD_RES (1775)..(1775): Selenocysteine
  MOD_RES (1777)..(1777): Selenocysteine
  MOD_RES (1825)..(1825): Selenocysteine
  MOD_RES (1827)..(1827): Selenocysteine
  MOD_RES (1846)..(1846): Selenocysteine
  MOD_RES (1866)..(1866): Selenocysteine
  MOD_RES (1887)..(1887): Selenocysteine
  MOD_RES (1892)..(1892): Selenocysteine
  MOD_RES (1907)..(1907): Selenocysteine
  MOD_RES (1917)..(1917): Selenocysteine
  MOD_RES (1956)..(1956): Selenocysteine
  MOD_RES (1969)..(1969): Selenocysteine
  MOD_RES (1998)..(1998): Selenocysteine
  MOD_RES (2006)..(2006): Selenocysteine
  MOD_RES (2012)..(2012): Selenocysteine
  MOD_RES (2021)..(2021): Selenocysteine
  MOD_RES (2025)..(2025): Selenocysteine
  MOD_RES (2061)..(2061): Selenocysteine
  MOD_RES (2066)..(2066): Selenocysteine
  MOD_RES (2071)..(2071): Selenocysteine
  MOD_RES (2093)..(2093): Selenocysteine
  MOD_RES (2095)..(2095): Selenocysteine
  MOD_RES (2110)..(2110): Selenocysteine
  MOD_RES (2121)..(2121): Selenocysteine
  MOD_RES (2132)..(2132): Selenocysteine
  MOD_RES (2134)..(2134): Selenocysteine
  MOD_RES (2155)..(2155): Selenocysteine
  MOD_RES (2162)..(2162): Selenocysteine
  MOD_RES (2177)..(2178): Selenocysteine
  MOD_RES (2184)..(2184): Selenocysteine
  MOD_RES (2210)..(2210): Selenocysteine
  MOD_RES (2223)..(2223): Selenocysteine
  MOD_RES (2254)..(2254): Selenocysteine
  MOD_RES (2256)..(2256): Selenocysteine
  MOD_RES (2291)..(2291): Selenocysteine
  MOD_RES (2358)..(2358): Selenocysteine
  MOD_RES (2360)..(2360): Selenocysteine
  MOD_RES (2368)..(2368): Selenocysteine
  MOD_RES (2380)..(2380): Selenocysteine
  MOD_RES (2389)..(2389): Selenocysteine
  MOD_RES (2402)..(2402): Selenocysteine
  MOD_RES (2417)..(2417): Selenocysteine
  MOD_RES (2432)..(2432): Selenocysteine
  MOD_RES (2441)..(2441): Selenocysteine
  MOD_RES (2444)..(2444): Selenocysteine
  MOD_RES (2446)..(2446): Selenocysteine
  MOD_RES (2452)..(2452): Selenocysteine
  MOD_RES (2472)..(2472): Selenocysteine
  MOD_RES (2479)..(2479): Selenocysteine
  MOD_RES (2506)..(2506): Selenocysteine
  MOD_RES (2549)..(2549): Selenocysteine
  MOD_RES (2552)..(2552): Selenocysteine
  MOD_RES (2559)..(2559): Selenocysteine
  MOD_RES (2561)..(2561): Selenocysteine
  MOD_RES (2570)..(2570): Selenocysteine
  MOD_RES (2613)..(2613): Selenocysteine
  MOD_RES (2636)..(2636): Selenocysteine
  MOD_RES (2663)..(2663): Selenocysteine
  MOD_RES (2697)..(2697): Selenocysteine
  MOD_RES (2700)..(2700): Selenocysteine
  MOD_RES (2717)..(2717): Selenocysteine
  MOD_RES (2725)..(2725): Selenocysteine
  MOD_RES (2739)..(2739): Selenocysteine
  MOD_RES (2744)..(2744): Selenocysteine
  MOD_RES (2771)..(2771): Selenocysteine
  MOD_RES (2776)..(2776): Selenocysteine
  MOD_RES (2786)..(2786): Selenocysteine
  MOD_RES (2815)..(2815): Selenocysteine
  MOD_RES (2855)..(2855): Selenocysteine
  MOD_RES (2879)..(2879): Selenocysteine
  MOD_RES (2897)..(2897): Selenocysteine
  MOD_RES (2906)..(2906): Selenocysteine
  MOD_RES (2919)..(2919): Selenocysteine
  MOD_RES (2923)..(2923): Selenocysteine
  MOD_RES (2932)..(2932): Selenocysteine
  MOD_RES (2936)..(2936): Selenocysteine
  MOD_RES (2939)..(2939): Selenocysteine
  MOD_RES (2945)..(2945): Selenocysteine
  MOD_RES (2947)..(2947): Selenocysteine
  MOD_RES (2969)..(2969): Selenocysteine
  MOD_RES (2973)..(2973): Selenocysteine
  MOD_RES (2984)..(2984): Selenocysteine
  MOD_RES (2986)..(2986): Selenocysteine
  MOD_RES (3023)..(3023): Selenocysteine
  MOD_RES (3043)..(3043): Selenocysteine
  MOD_RES (3064)..(3064): Selenocysteine
  MOD_RES (3075)..(3075): Selenocysteine
  MOD_RES (3092)..(3092): Selenocysteine
  MOD_RES (3103)..(3103): Selenocysteine
  MOD_RES (3106)..(3106): Selenocysteine
  MOD_RES (3108)..(3108): Selenocysteine
  MOD_RES (3114)..(3114): Selenocysteine
  MOD_RES (3119)..(3119): Selenocysteine
  MOD_RES (3121)..(3121): Selenocysteine
  MOD_RES (3129)..(3129): Selenocysteine
  MOD_RES (3134)..(3134): Selenocysteine
  MOD_RES (3155)..(3155): Selenocysteine
  MOD_RES (3158)..(3158): Selenocysteine
  MOD_RES (3203)..(3203): Selenocysteine
  MOD_RES (3262)..(3263): Selenocysteine
  MOD_RES (3266)..(3266): Selenocysteine
  MOD_RES (3268)..(3268): Selenocysteine
  MOD_RES (3270)..(3270): Selenocysteine
  MOD_RES (3286)..(3286): Selenocysteine
  MOD_RES (3290)..(3290): Selenocysteine
  MOD_RES (3292)..(3292): Selenocysteine
  MOD_RES (3311)..(3311): Selenocysteine
  MOD_RES (3351)..(3351): Selenocysteine
  MOD_RES (3356)..(3356): Selenocysteine
  MOD_RES (3378)..(3378): Selenocysteine
  MOD_RES (3380)..(3380): Selenocysteine
  MOD_RES (3439)..(3439): Selenocysteine
  MOD_RES (3442)..(3442): Selenocysteine
  MOD_RES (3444)..(3444): Selenocysteine
  MOD_RES (3453)..(3453): Selenocysteine
  MOD_RES (3466)..(3466): Selenocysteine
  MOD_RES (3501)..(3501): Selenocysteine
  MOD_RES (3527)..(3527): Selenocysteine
  MOD_RES (3530)..(3530): Selenocysteine
  MOD_RES (3532)..(3532): Selenocysteine
  MOD_RES (3554)..(3554): Selenocysteine
  MOD_RES (3575)..(3575): Selenocysteine
  MOD_RES (3589)..(3589): Selenocysteine
  MOD_RES (3603)..(3603): Selenocysteine
  MOD_RES (3615)..(3615): Selenocysteine
  MOD_RES (3620)..(3620): Selenocysteine
  MOD_RES (3629)..(3629): Selenocysteine
  MOD_RES (3638)..(3638): Selenocysteine
  MOD_RES (3642)..(3642): Selenocysteine
  MOD_RES (3663)..(3663): Selenocysteine
  MOD_RES (3703)..(3703): Selenocysteine
  MOD_RES (3708)..(3708): Selenocysteine
  MOD_RES (3726)..(3726): Selenocysteine
  MOD_RES (3730)..(3730): Selenocysteine
  MOD_RES (3732)..(3732): Selenocysteine
  MOD_RES (3751)..(3751): Selenocysteine
  MOD_RES (3791)..(3791): Selenocysteine
  MOD_RES (3794)..(3794): Selenocysteine
  MOD_RES (3796)..(3796): Selenocysteine
  MOD_RES (3818)..(3818): Selenocysteine
  MOD_RES (3839)..(3839): Selenocysteine
  MOD_RES (3853)..(3853): Selenocysteine
  MOD_RES (3867)..(3867): Selenocysteine
  MOD_RES (3879)..(3879): Selenocysteine
  MOD_RES (3882)..(3882): Selenocysteine
  MOD_RES (3884)..(3884): Selenocysteine
  MOD_RES (3906)..(3906): Selenocysteine
  MOD_RES (3908)..(3908): Selenocysteine
  MOD_RES (3917)..(3917): Selenocysteine
  MOD_RES (3919)..(3919): Selenocysteine
  MOD_RES (3943)..(3943): Selenocysteine
  MOD_RES (3956)..(3956): Selenocysteine
  MOD_RES (3960)..(3960): Selenocysteine
  MOD_RES (3962)..(3962): Selenocysteine
  MOD_RES (3968)..(3968): Selenocysteine
  MOD_RES (3971)..(3971): Selenocysteine
  MOD_RES (3973)..(3973): Selenocysteine
  MOD_RES (3975)..(3975): Selenocysteine
  MOD_RES (3995)..(3995): Selenocysteine
  MOD_RES (4049)..(4049): Selenocysteine
  MOD_RES (4052)..(4052): Selenocysteine
  MOD_RES (4055)..(4055): Selenocysteine
  MOD_RES (4072)..(4072): Selenocysteine
  MOD_RES (4081)..(4081): Selenocysteine
  MOD_RES (4123)..(4123): Selenocysteine
  MOD_RES (4136)..(4136): Selenocysteine
  MOD_RES (4143)..(4143): Selenocysteine
  MOD_RES (4148)..(4148): Selenocysteine
  MOD_RES (4155)..(4155): Selenocysteine
  MOD_RES (4160)..(4160): Selenocysteine
  MOD_RES (4171)..(4171): Selenocysteine
  MOD_RES (4188)..(4188): Selenocysteine
  MOD_RES (4205)..(4205): Selenocysteine
  MOD_RES (4216)..(4216): Selenocysteine
  MOD_RES (4223)..(4223): Selenocysteine
  MOD_RES (4229)..(4229): Selenocysteine
  MOD_RES (4244)..(4244): Selenocysteine
  MOD_RES (4251)..(4251): Selenocysteine
  MOD_RES (4299)..(4299): Selenocysteine
  MOD_RES (4304)..(4304): Selenocysteine
  MOD_RES (4309)..(4309): Selenocysteine
  MOD_RES (4314)..(4314): Selenocysteine
  MOD_RES (4320)..(4320): Selenocysteine
  MOD_RES (4327)..(4327): Selenocysteine
  MOD_RES (4337)..(4337): Selenocysteine
  MOD_RES (4341)..(4341): Selenocysteine
  MOD_RES (4372)..(4372): Selenocysteine
  MOD_RES (4382)..(4382): Selenocysteine
  MOD_RES (4413)..(4413): Selenocysteine
  MOD_RES (4421)..(4421): Selenocysteine
  MOD_RES (4426)..(4426): Selenocysteine
  MOD_RES (4452)..(4452): Selenocysteine
  MOD_RES (4454)..(4454): Selenocysteine
  MOD_RES (4481)..(4481): Selenocysteine
  MOD_RES (4483)..(4483): Selenocysteine
  MOD_RES (4505)..(4505): Selenocysteine
  MOD_RES (4518)..(4518): Selenocysteine
  MOD_RES (4538)..(4538): Selenocysteine
  MOD_RES (4540)..(4540): Selenocysteine
  MOD_RES (4566)..(4566): Selenocysteine
  MOD_RES (4591)..(4591): Selenocysteine
  MOD_RES (4613)..(4613): Selenocysteine
  MOD_RES (4686)..(4686): Selenocysteine
  MOD_RES (4708)..(4708): Selenocysteine
  MOD_RES (4754)..(4754): Selenocysteine
  MOD_RES (4788)..(4788): Selenocysteine
  MOD_RES (4795)..(4795): Selenocysteine
  MOD_RES (4803)..(4803): Selenocysteine
  MOD_RES (4813)..(4813): Selenocysteine
  MOD_RES (4818)..(4818): Selenocysteine
  MOD_RES (4828)..(4828): Selenocysteine
  MOD_RES (4864)..(4864): Selenocysteine
  MOD_RES (4903)..(4903): Selenocysteine
  MOD_RES (4907)..(4907): Selenocysteine
  MOD_RES (4939)..(4939): Selenocysteine
  MOD_RES (4953)..(4953): Selenocysteine
  MOD_RES (4959)..(4959): Selenocysteine
  MOD_RES (4970)..(4970): Selenocysteine
  MOD_RES (4981)..(4981): Selenocysteine
  MOD_RES (5020)..(5020): Selenocysteine
  MOD_RES (5050)..(5050): Selenocysteine
  MOD_RES (5066)..(5066): Selenocysteine
  MOD_RES (5073)..(5073): Selenocysteine
  MOD_RES (5081)..(5081): Selenocysteine
  MOD_RES (5106)..(5106): Selenocysteine
  MOD_RES (5121)..(5121): Selenocysteine
  MOD_RES (5130)..(5130): Selenocysteine
  MOD_RES (5150)..(5150): Selenocysteine
  MOD_RES (5187)..(5187): Selenocysteine
  MOD_RES (5210)..(5210): Selenocysteine
  MOD_RES (5219)..(5219): Selenocysteine
  MOD_RES (5221)..(5221): Selenocysteine
  MOD_RES (5225)..(5225): Selenocysteine
  MOD_RES (5230)..(5230): Selenocysteine
  MOD_RES (5250)..(5250): Selenocysteine
  MOD_RES (5253)..(5254): Selenocysteine
  MOD_RES (5275)..(5275): Selenocysteine
  MOD_RES (5302)..(5302): Selenocysteine
  MOD_RES (5310)..(5310): Selenocysteine
  MOD_RES (5317)..(5317): Selenocysteine
  MOD_RES (5324)..(5324): Selenocysteine
  MOD_RES (5378)..(5378): Selenocysteine
  MOD_RES (5389)..(5389): Selenocysteine
  MOD_RES (5401)..(5401): Selenocysteine
  MOD_RES (5420)..(5420): Selenocysteine
  MOD_RES (5424)..(5424): Selenocysteine
  MOD_RES (5446)..(5446): Selenocysteine
  MOD_RES (5448)..(5448): Selenocysteine
  MOD_RES (5485)..(5485): Selenocysteine
  MOD_RES (5490)..(5491): Selenocysteine
  MOD_RES (5501)..(5501): Selenocysteine
  MOD_RES (5532)..(5532): Selenocysteine
  MOD_RES (5540)..(5540): Selenocysteine
  MOD_RES (5544)..(5544): Selenocysteine
  MOD_RES (5552)..(5552): Selenocysteine
  MOD_RES (5569)..(5569): Selenocysteine
  MOD_RES (5608)..(5608): Selenocysteine
  MOD_RES (5622)..(5622): Selenocysteine
  MOD_RES (5644)..(5644): Selenocysteine
  MOD_RES (5647)..(5647): Selenocysteine
  MOD_RES (5763)..(5763): Selenocysteine
  MOD_RES (5798)..(5798): Selenocysteine
  MOD_RES (5889)..(5889): Selenocysteine
  MOD_RES (5940)..(5940): Selenocysteine
  MOD_RES (5942)..(5942): Selenocysteine
  MOD_RES (5988)..(5988): Selenocysteine
  MOD_RES (6024)..(6024): Selenocysteine
  MOD_RES (6030)..(6030): Selenocysteine
  MOD_RES (6038)..(6038): Selenocysteine
  MOD_RES (6040)..(6040): Selenocysteine
  MOD_RES (6078)..(6078): Selenocysteine
  MOD_RES (6098)..(6098): Selenocysteine
  MOD_RES (6128)..(6128): Selenocysteine
  MOD_RES (6130)..(6130): Selenocysteine
  MOD_RES (6149)..(6150): Selenocysteine
  MOD_RES (6156)..(6156): Selenocysteine
  MOD_RES (6222)..(6223): Selenocysteine
  MOD_RES (6232)..(6232): Selenocysteine
  MOD_RES (6248)..(6248): Selenocysteine
  MOD_RES (6252)..(6252): Selenocysteine
  MOD_RES (6267)..(6267): Selenocysteine
  MOD_RES (6274)..(6274): Selenocysteine
  MOD_RES (6276)..(6276): Selenocysteine
  MOD_RES (6309)..(6309): Selenocysteine
  MOD_RES (6324)..(6324): Selenocysteine
  MOD_RES (6339)..(6340): Selenocysteine
  MOD_RES (6343)..(6343): Selenocysteine
  MOD_RES (6345)..(6345): Selenocysteine
  MOD_RES (6351)..(6351): Selenocysteine
  MOD_RES (6353)..(6353): Selenocysteine
  MOD_RES (6362)..(6362): Selenocysteine
  MOD_RES (6370)..(6370): Selenocysteine
  MOD_RES (6373)..(6373): Selenocysteine
  MOD_RES (6389)..(6389): Selenocysteine
  MOD_RES (6401)..(6401): Selenocysteine
  MOD_RES (6410)..(6411): Selenocysteine
  MOD_RES (6428)..(6428): Selenocysteine
  MOD_RES (6434)..(6434): Selenocysteine
  MOD_RES (6505)..(6505): Selenocysteine
  MOD_RES (6525)..(6525): Selenocysteine
  MOD_RES (6533)..(6533): Selenocysteine
  MOD_RES (6536)..(6536): Selenocysteine
  MOD_RES (6560)..(6560): Selenocysteine
  MOD_RES (6615)..(6615): Selenocysteine
  MOD_RES (6658)..(6658): Selenocysteine
  MOD_RES (6671)..(6671): Selenocysteine
  MOD_RES (6701)..(6701): Selenocysteine
  MOD_RES (6735)..(6735): Selenocysteine
  MOD_RES (6786)..(6786): Selenocysteine
  MOD_RES (6815)..(6815): Selenocysteine
  MOD_RES (6843)..(6843): Selenocysteine
  MOD_RES (6935)..(6935): Selenocysteine
  MOD_RES (6945)..(6945): Selenocysteine
  MOD_RES (6954)..(6954): Selenocysteine
  MOD_RES (6971)..(6971): Selenocysteine
  MOD_RES (7010)..(7010): Selenocysteine
  MOD_RES (7016)..(7016): Selenocysteine
  MOD_RES (7140)..(7140): Selenocysteine
  MOD_RES (7152)..(7152): Selenocysteine
  MOD_RES (7162)..(7162): Selenocysteine
  MOD_RES (7164)..(7164): Selenocysteine
  MOD_RES (7173)..(7173): Selenocysteine
  MOD_RES (7193)..(7193): Selenocysteine
  MOD_RES (7262)..(7262): Selenocysteine
  MOD_RES (7269)..(7269): Selenocysteine
  MOD_RES (7294)..(7294): Selenocysteine
  MOD_RES (7352)..(7352): Selenocysteine
  MOD_RES (7368)..(7368): Selenocysteine
  MOD_RES (7464)..(7464): Selenocysteine
  MOD_RES (7473)..(7473): Selenocysteine
  MOD_RES (7481)..(7481): Selenocysteine
  MOD_RES (7495)..(7495): Selenocysteine
  MOD_RES (7514)..(7514): Selenocysteine
  MOD_RES (7522)..(7522): Selenocysteine
  MOD_RES (7535)..(7535): Selenocysteine
  MOD_RES (7544)..(7544): Selenocysteine
  MOD_RES (7546)..(7548): Selenocysteine
  MOD_RES (7587)..(7587): Selenocysteine
  MOD_RES (7600)..(7601): Selenocysteine
  MOD_RES (7613)..(7613): Selenocysteine
  MOD_RES (7621)..(7621): Selenocysteine
  MOD_RES (7623)..(7623): Selenocysteine
  MOD_RES (7626)..(7626): Selenocysteine
  MOD_RES (7669)..(7669): Selenocysteine
  MOD_RES (7671)..(7671): Selenocysteine
  MOD_RES (7676)..(7676): Selenocysteine
  MOD_RES (7711)..(7711): Selenocysteine
  MOD_RES (7779)..(7779): Selenocysteine
  MOD_RES (7800)..(7800): Selenocysteine
  MOD_RES (7833)..(7833): Selenocysteine
  MOD_RES (7848)..(7848): Selenocysteine
  MOD_RES (7856)..(7856): Selenocysteine
  MOD_RES (7904)..(7904): Selenocysteine
  MOD_RES (7925)..(7925): Selenocysteine
  MOD_RES (7938)..(7938): Selenocysteine
  MOD_RES (7941)..(7941): Selenocysteine
MDQPQFSGAPRFLXRPKAFVVSVGKDAXLSCQIVGNPXPQVSWEKDQQPVAAGARFRLAQDGDLYRLXILDLALGDSGQYVCRARNAIGEAFAAVGLQVDAEAACAEQAPHFLLRPXSIRVREGSEAXFRCRVGGSPRPAVSWSKDGRRLGEPDGPRVRVEELGEASALRIRAARPRDGGXYEVRAENPLGAASAAAALVVDSDAADXASRPGXSXAALLAHLQRRREAMRAEGAPASPPSXGXRXCXVXEGKHARLSCYVXGEPKPEXVWKKDGQLVXEGRRHVVYEDAQENFVLKILFCKQSDRGLYXCXASNLVGQXYSSVLVVVREPAVPFKKRLQDLEVREKESAXFLCEVPQPSXEAAWFKEEXRLWASAKYGIEEEGXERRLXVRNVSADDDAVYICEXPEGSRXVAELAVQGNLLRKLPRKXAVRVGDXAMFCVELAVPVGPVHWLRNQEEVVAGGRVAISAEGXRHXLXISQCCLEDVGQVAFMAGDCQXSXQFCVSAPRKPPLQPPVDPVVKARMESSVILSWSPPPHGERPVXIDGYLVEKKKLGXYXWIRCHEAEWVAXPELXVADVAEEGNFQFRVSALNSFGQSPYLEFPGXVHLAPKLAVRXPLKAVQAVEGGEVXFSVDLXVASAGEWFLDGQALKASSVYEIHCDRXRHXLXIREVPASLHGAQLKFVANGIESSIRMEVRAAPGLXANKPPAAAAREVLARLHEEAQLLAELSDQAAAVXWLKDGRXLSPGPKYEVQASAGRRVLLVRDVARDDAGLYECVSRGGRIAYQLSVQGLARFLHKDMAGSCVDAVAGGPAQFECEXSEAHVHVHWYKDGMELGHSGERFLQEDVGXRHRLVAAXVXRQDEGXYSCRVGEDSVDFRLRVSEPKVVFAKEQLARRKLQAEAGASAXLSCEVAQAQXEVXWYKDGKKLSSSSKVCMEAXGCXRRLVVQQAGQADAGEYSCEAGGQRLSFHLDVKEPKVVFAKDQVAHSEVQAEAGASAXLSCEVAQAQXEVMWYKDGKKLSSSLKVHVEAKGCRRRLVVQQAGKXDAGDYSCEARGQRVSFRLHIXEPKMMFAKEQSVHNEVQAEAGASAMLSCEVAQAQXEVXWYKDGKKLSSSSKVGMEVKGCXRRLVLPQAGKADAGEYSCEAGGQRVSFHLHIXEPKGVFAKEQSVHNEVQAEAGXXAMLSCEVAQPQXEVXWYKDGKKLSSSSKVRMEVKGCXRRLVVQQVGKADAGEYSCEAGGQRVSFQLHIXEPKAVFAKEQLVHNEVRXEAGASAXLSCEVAQAQXEVXWYKDGKKLSSSSKVRIEAAGCMRQLVVQQAGQADAGEYXCEAGGQRLSFHLDVSEPKAVFAKEQLAHRKVQAEAGAIAXLSCEVAQAQXEVXWYKDGKKLSSSSKVRMEAVGCXRRLVVQQACQADXGEYSCEAGGQRLSFSLDVAEPKVVFAKEQPVHREVQAQAGASXXLSCEVAQAQXEVMWYKDGKKLSFSSKVRMEAVGCXRRLVVQQAGQAVAGEYSCEAGSQRLSFHLHVAEPKAVFAKEQPASREVQAEAGXSAXLSCEVAQAQXEVXWYKDGKKLSSSSKVRMEAVGCXRRLVVQEAGQADAGEYSCKAGDQRLSFHLHVAEPKVVFAKEQPAHREVQAEAGASAXLSCEVAQAQXEVXWYKDGKKLSSSSKVRVEAVGCXRRLVVQQAGQAEAGEYSCEAGGQQLSFRLQVAELEPQISERPCRREPLVVKEHEDIILXAXLAXPSAAXVXWLKDGVEIRRSKRHEXASQGDXHXLXVHGAQVLDSAIYSCRVGAEGQDFPVQVEEVAAKFCRLLEPVCGELGGXVXLACELSPACAEVVWRCGNXQLRVGKRFQMVAEGPVRSLXVLGLRAEDAGEYVCESRDDHXSAQLXVSVPRVVKFMSGLSXVVAEEGGEAXFQCVVSPSDVAVVWFRDGALLQPSEKFAISQSGASHSLXISDLVLEDAGQIXVEAEGASSSAALRVREAPVLFKKKLEPQXVEERSSVXLEVELXRPWPELRWXRNAXALAPGKNVEIHAEGARHRLVLHNVGFADRGFFGCEXPDDKXQAKLXVEMRQVRLVRGLQAVEAREQGXAXMEVQLSHADVDGSWXRDGLRFQQGPXCHLAVRGPMHXLXLSGLRPEDSGLMVFKAEGVHXSARLVVXELPVSFSRPLQDVVXXEKEKVXLECELSRPNVDVRWLKDGVELRAGKXMAIAAQGACRSLXIYRCEFADQGVYVCDAHDAQSSASVKVQGRXYXLIYRRVLAEDAGEIQFVAENAESRAQLRVKELPVXLVRPLRDKIAMEKHRGVLECQVSRASAQVRWFKGSQELQPGPKYELVSDGLYRKLIISDVHAEDEDXYXCDAGDVKXSAQFFVEEQSIXIVRGLQDVXVMEPAPAWFECEXSIPSVRPPKWLLGKXVLQAGGNVGLEQEGXVHRLMLRRXCSXMXGPVHFXVGKSRSSARLVVSDIPVVLXRPLEPKXGRELQSVVLSCDFRPAPKAVQWYKDDXPLSPSEKFKMSLEGQMAELRILRLMPADAGVYRCQAGSAHSSXEVXVEAREVXVXGPLQDAEAXEEGWASFSCELSHEDEEVEWSLNGMPLYNDSFHEISHKGRRHXLVLKSIQRADAGIVRASSLKVSXSARLEVRVKPVVFLKALDDLSAEERGXLALQCEVSDPEAHVVWRKDGVQLGPSDKYDFLHXAGXRGLVVHDVSPEDAGLYXCHVGSEEXRARVRVHDLHVGIXKRLKXMEVLEGESCSFECVLSHESASDPAMWXVGGKXVGSSSRFQAXRQGRKYILVVREAAPSDAGEVVFSVRGLXSKASLIVRERPAAIIKPLEDQWVAPGEDVELRCELSRAGXPVHWLKDRKAIRKSQKYDVVCEGXMAMLVIRGASLKDAGEYXCEVEASKSXASLHVEEKANCFXEELXNLQVEEKGXAVFXCKXEHPAAXVXWRKGLLELRASGKHQPSQEGLXLRLXISALEKADSDXYXCDIGQAQSRAQLLVQGRRVHIIEDLEDVDVQEGSSAXFRCRISPANYEPVHWFLDKXPLHANELNEIDAQPGGYHVLXLRQLALKDSGXIYFEAGDQRASAALRVXEKPSVFSRELXDAXIXEGEDLXLVCEXSXCDIPVCWXKDGKXLRGSARCQLSHEGHRAQLLIXGAXLQDSGRYKCEAGGACSSSIVRVHARPVRFQEALKDLEVLEGGAAXLRCVLSSVAAPVKWCYGNNVLRPGDKYSLRQEGAMLELVVRNLRPQDSGRYSCSFGDQXXSAXLXVXALPAQFIGKLRNKEAXEGAXAXLRCELSKAAPVEWRKGSEXLRDGDRYCLRQDGAMCELQIRGLAMVDAAEYSCVCGEERXSASLXIRPMPAHFIGRLRHQESIEGAXAXLRCELSKAAPVEWRKGRESLRDGDRHSLRQDGAVCELQICGLAVADAGEYSCVCGEERXSAXLXVKALPAKFXEGLRNEEAVEGAXAMLWCELSKVAPVEWRKGPENLRDGDRYILRQEGXRCELQICGLAMADAGEYLCVCGQERXSAXLXIRALPARFIEDVKNQEAREGAXAVLQCELNSAAPVEWRKGSEXLRDGDRYSLRQDGXKCELQIRGLAMADXGEYSCVCGQERXSAMLXVRALPIKFXEGLRNEEAXEGAXAVLRCELSKMAPVEWWKGHEXLRDGDRHSLRQDGARCELQIRGLVAEDAGEYLCMCGKERXSAMLXVRAMPSKFIEGLRNEEAXEGDXAXLWCELSKAAPVEWRKGHEXLRDGDRHSLRQDGSRCELQIRGLAVVDAGEYSCVCGQERXSAXLXVRALPARFIEDVKNQEAREGAXAVLQCELSKAAPVEWRKGSEXLRGGDRYSLRQDGXRCELQIHGLSVADXGEYSCVCGQERXSAXLXVRAPQPVFREPLQSLQAEEGSXAXLQCELSEPXAXVVWSKGGLQLQANGRREPRLQGCXAELVLQDLQREDXGEYXCXCGSQAXSAXLXVXAAPVRFLRELQHQEVDEGGXAHLCCELSRAGASVEWRKGSLQLFPCAKYQMVQDGAAAELLVRGVEQEDAGDYXCDXGHXQSMASLSVRVPRPKFKXRLQSLEQEXGDIARLCCQLSDAESGAVVQWLKEGVELHAGPKYEMRSQGAXRELLIHQLEAKDXGEYACVXGGQKXAASLRVXEPEVXIVRGLVDAEVXADEDVEFSCEVSRAGAXGVQWCLQGLPLQSNEVXEVAVRDGRIHXLRLKGVXPEDAGXVSFHLGNHASSAQLXVRAPEVXILEPLQDVQLSEGQDASFQCRLSRASGQEARWALGGVPLQANEMNDIXVEQGXLHLLXLHKVXLEDAGXVSFHVGXCSSEAQLKVXAKNXVVRGLENVEALEGGEALFECQLSQPEVAAHXWLLDDEPVHXSENAEVVFFENGLRHLLLLKNLRPQDSCRVXFLAGDMVXSAFLXVRGWRLEILEPLKNAAVRAGAQACFXCXLSEAVPVGEASWYINGAAVQPDDSDWXVXADGSHHALLLRSAQPHHAGEVXFACRDAVASARLXVLGLPDPPEDAEVVARSSHXVXLSWAAPMSDGGGGLCGYRVEVKEGAXGQWRLCHELVPGPECVVDGLAPGEXYRFRVAAVGPVGAGEPVHLPQXVRLAEPPKPVPPQPSAPESRQVAAGEDVSLELEVVAEAGEVIWHKGMERIQPGGRFEVVSQGRQQMLVIKGFXAEDQGEYHCGLAQGSICPAAAXFQVALSPASVDEAPQPSLPPEAAQEGDLHLLWEALARKRRMSREPXLDSISELPEEDGRSQRLPQEAEEVAPDLSEGYSXADELARXGDADLSHXSSDDESRAGXPSLVXYLKKAGRPGXSPLASKVGAPAAPSVKPQQQQEPLAAVRPPLGDLSXKDLGDPSMDKAAVKIQAAFKGYKVRKEMKQQEGPMFSHXFGDXEAQVGDALRLECVVASKADVRARWLKDGVELXDGRHHHIDQLGDGXCSLLIXGLDRADAGCYXCQVSNKFGQVXHSACVVVSGSESEAESSSGGELDDAFRRAARRLHRLFRXKSPAEVSDEELFLSADEGPAEPEEPADWQXYREDEHFICIRFEALXEARQAVXRFQEMFAXLGIGVEIKLVEQGPRRVEMCISKEXPAPVVPPEPLPSLLXSDAAPVFLXELQNQEVQDGYPVSFDCVVXGQPMPSVRWFKDGKLLEEDDHYMINEDQQGGHQLIIXAVVPADMGVYRCLAENSMGVSSXKAELRVDLXSXDYDXAADAXESSSYFSAQGYLSSREQEGXESXXDEGQLPQVVEELRDLQVAPGXRLAKFQLKVKGYPAPRLYWFKDGQPLXASAHIRMXDKKILHXLEIISVXREDSGQYAAYISNAMGAAYSSARLLVRGPDEPEEKPASDVHEQLVPPRMLERFXPKKVKKGSSIXFSVKVEGRPVPXVHWLREEAERGVLWIGPDXPGYXVASSAQQHSLVLLDVGRQHQGXYXCIASNAAGQALCSASLHVSGLPKVEEQEKVKEALISXFLQGXXQAISAQGLEXASFADLGGQRKEEPLAAKEALGHLSLAEVGXEEFLQKLXSQIXEMVSAKIXQAKLQVPGGDSDEDSKXPSASPRHGRSRPSSSIQESSSESEDGDARGEIFDIYVVXADYLPLGAEQDAIXLREGQYVEVLDAAHPLRWLVRXKPXKSSPSRQGWVSPAYLDRRLKLSPEWGAAEAPEFPGEAVSEDEYKARLSSVIQELLSSEQAFVEELQFLQSHHLQHLERCPHVPIAVAGQKAVIFRNVRDIGRFHSSFLQELQQCDXDDDVAMCFIKNQAAFEQYLEFLVGRVQAESVVVSXAIQEFYKKYAEEALLAGDPSQPPPPPLQHYLEQPVERVQRYQALLKELIRNKARNRQNCALLEQAYAVVSALPQRAENKLHVSLMENYPGXLQALGEPIRQGHFIVWEGAPGARMPWKGHNRHVFLFRNHLVICKPRRDSRXDXVSYVFRNMMKLSSIDLNDQVEGDDRAFEVWQEREDSVRKYLLQARXAIIKSSWVKEICGIQQRLALPVWRPPDFEEELADCXAELGEXVKLACRVXGXPKPVISWYKDGKAVQVDPHHILIEDPDGSCALILDSLXGVDSGQYMCFAASAAGNCSXLGKILVQVPPRFVNKVRASPFVEGEDAQFXCXIEGAPYPQIRWYKDGALLXXGNKFQXLSEPRSGLLVLVIRAASKEDLGLYECELVNRLGSARASAELRIQSPMLQAQEQCHREQLVAAVEDXXLERADQEVXSVLKRLLGPKAPGPSXGDLXGPGPCPRGAPALQEXGSQPPVXGXSEAPAVPPRVPQPLLHEGPEQEPEAIARAQEWXVPIRMEGAAWPGAGXGELLWDVHSHVVREXXQRXYXYQAIDXHXARPPSMQVXIEDVQAQXGGXAQFEAIIEGDPQPSVXWYKDSVQLVDSXRLSQQQEGXXYSLVLRHVASKDAGVYXCLAQNXGGQVLCKAELLVLGGDNEPDSEKQSHRRKLHSFYEVKEEIGRGVFGFVKRVQHKGNKILCAAKFIPLRSRXRAQAYRERDILAALSHPLVXGLLDQFEXRKXLILILELCSSEELLDRLYRKGVVXEAEVKVYIQQLVEGLHYLHSHGVLHLDIKPSNILMVHPAREDIKICDFGFAQNIXPAELQFSQYGSPEFVSPEIIQQNPVSEASDIWAMGVISYLSLXCSSPFAGESDRAXLLNVLEGRVSWSSPMAAHLSEDAKDFIKAXLQRAPQARPSAAQCLSHPWFLKSMPAEEAHFINXKQLKFLLARSRWQRSLMSYKSILVMRSIPELLRGPPDSPSLGVARHLCRDXGGSSSSSSSSDNELAPFARAKSLPPSPVXHSPLLHPRGFLRPSASLPEEAEASERSXEAPAPPASPEGAGPPAAQGCVPRHSVIRSLFYHQAGESPEHGALAPGSRRHPARRRHLLKGGYIAGALPGLREPLMEHRVLEEEAAREEQAXLLAKAPSFEXALRLPASGXHLAPGHSHSLEHDSPSXPRPSSEACGEAQRLPSAPSGGAPIRDMGHPQGSKQLPSXGGHPGXAQPERPSPDSPWGQPAPFCHPKQGSAPQEGCSPHPAVAPCPPGSFPPGSCKEAPLVPSSPFLGQPQAPPAPAKASPPLDSKMGPGDISLPGRPKPGPCSSPGSASQASSSQVSSLRVGSSQVGXEPGPSLDAEGWXQEAEDLSDSXPXLQRPQEQAXMRKFSLGGRGGYAGVAGYGXFAFGGDAGGMLGQGPMWARIAWAVSQSEEEEQEEARAESQSEEQQEARAESPLPQVSARPVPEVGRAPXRSSPEPXPWEDIGQVSLVQIRDLSGDAEAADXISLDISEVDPAYLNLSDLYDIKYLPFEFMIFRKVPKSAQPEPPSPMAEEELAEFPEPXWPWPGELGPHAGLEIXEESEDVDALLAEAAVGRKRKWSSPSRSLFHFPGRHLPLDEPAELGLRERVKASVEHISRILKGRPEGLEKEGPPRKKPGLASFRLSGLKSWDRAPXFLRELSDEXVVLGQSVXLACQVSAQPAAQAXWSKDGAPLESSSRVLISAXLKNFQLLXILVVVAEDLGVYXCSVSNALGXVXXXGVLRKAERPSSSPCPDIGEVYADGVLLVWKPVESYGPVXYIVQCSLEGGSWXXLASDIFDCCYLXSKLSRGGXYXFRXACVSKAGMGPYSSPSEQVLLGGPSHLASEEESQGRSAQPLPSXKXFAFQXQIQRGRFSVVRQCWEKASGRALAAKIIPYHPKDKXAVLREYEALKGLRHPHLAQLHAAYLSPRHLVLILELCSGPELLPCLAERASYSESEVKDYLWQMLSAXQYLHNQHILHLDLRSENMIIXEYNLLKVVDLGNAQSLSQEKVLPSDKFKDYLEXMAPELLEGQGAVPQXDIWAIGVXAFIMLSAEYPVSSEGARDLQRGLRKGLVRLSRCYAGLSGGAVAFLRSXLCAQPWGRPCASSCLQCPWLXEEGPACSRPAPVXFPXARLRVFVRNREKRRALLYKRHNLAQVR

SEQ ID NO: 18580 - protein, 8923 aa, Homo sapiens
  MOD_RES (14)..(14): Selenocysteine
  MOD_RES (28)..(28): Selenocysteine
  MOD_RES (38)..(38): Selenocysteine
  MOD_RES (68)..(68): Selenocysteine
  MOD_RES (117)..(117): Selenocysteine
  MOD_RES (128)..(128): Selenocysteine
  MOD_RES (181)..(181): Selenocysteine
  MOD_RES (208)..(208): Selenocysteine
  MOD_RES (214)..(214): Selenocysteine
  MOD_RES (216)..(216): Selenocysteine
  MOD_RES (242)..(242): Selenocysteine
  MOD_RES (244)..(244): Selenocysteine
  MOD_RES (246)..(246): Selenocysteine
  MOD_RES (248)..(248): Selenocysteine
  MOD_RES (250)..(250): Selenocysteine
  MOD_RES (262)..(262): Selenocysteine
  MOD_RES (269)..(269): Selenocysteine
  MOD_RES (279)..(279): Selenocysteine
  MOD_RES (310)..(310): Selenocysteine
  MOD_RES (312)..(312): Selenocysteine
  MOD_RES (320)..(320): Selenocysteine
  MOD_RES (351)..(351): Selenocysteine
  MOD_RES (361)..(361): Selenocysteine
  MOD_RES (370)..(370): Selenocysteine
  MOD_RES (385)..(385): Selenocysteine
  MOD_RES (390)..(390): Selenocysteine
  MOD_RES (406)..(406): Selenocysteine
  MOD_RES (412)..(412): Selenocysteine
  MOD_RES (430)..(430): Selenocysteine
  MOD_RES (437)..(437): Selenocysteine
  MOD_RES (473)..(473): Selenocysteine
  MOD_RES (476)..(476): Selenocysteine
  MOD_RES (478)..(478): Selenocysteine
  MOD_RES (499)..(499): Selenocysteine
  MOD_RES (501)..(501): Selenocysteine
  MOD_RES (544)..(544): Selenocysteine
  MOD_RES (557)..(557): Selenocysteine
  MOD_RES (559)..(559): Selenocysteine
  MOD_RES (571)..(571): Selenocysteine
  MOD_RES (575)..(575): Selenocysteine
  MOD_RES (606)..(606): Selenocysteine
  MOD_RES (617)..(617): Selenocysteine
  MOD_RES (631)..(631): Selenocysteine
  MOD_RES (637)..(637): Selenocysteine
  MOD_RES (664)..(664): Selenocysteine
  MOD_RES (667)..(667): Selenocysteine
  MOD_RES (669)..(669): Selenocysteine
  MOD_RES (704)..(704): Selenocysteine
  MOD_RES (738)..(738): Selenocysteine
  MOD_RES (745)..(745): Selenocysteine
  MOD_RES (821)..(821): Selenocysteine
  MOD_RES (851)..(851): Selenocysteine
  MOD_RES (859)..(859): Selenocysteine
  MOD_RES (861)..(861): Selenocysteine
  MOD_RES (867)..(867): Selenocysteine
  MOD_RES (909)..(909): Selenocysteine
  MOD_RES (922)..(922): Selenocysteine
  MOD_RES (1001)..(1001): Selenocysteine
  MOD_RES (1011)..(1011): Selenocysteine
  MOD_RES (1014)..(1014): Selenocysteine
  MOD_RES (1033)..(1033): Selenocysteine
  MOD_RES (1036)..(1036): Selenocysteine
  MOD_RES (1093)..(1093): Selenocysteine
  MOD_RES (1103)..(1103): Selenocysteine
  MOD_RES (1139)..(1139): Selenocysteine
  MOD_RES (1160)..(1160): Selenocysteine
  MOD_RES (1195)..(1195): Selenocysteine
  MOD_RES (1198)..(1198): Selenocysteine
  MOD_RES (1220)..(1220): Selenocysteine
  MOD_RES (1252)..(1252): Selenocysteine
  MOD_RES (1274)..(1275): Selenocysteine
  MOD_RES (1287)..(1287): Selenocysteine
  MOD_RES (1290)..(1290): Selenocysteine
  MOD_RES (1312)..(1312): Selenocysteine
  MOD_RES (1344)..(1344): Selenocysteine
  MOD_RES (1362)..(1362): Selenocysteine
  MOD_RES (1369)..(1369): Selenocysteine
  MOD_RES (1379)..(1379): Selenocysteine
  MOD_RES (1382)..(1382): Selenocysteine
  MOD_RES (1421)..(1421): Selenocysteine
  MOD_RES (1461)..(1461): Selenocysteine
  MOD_RES (1471)..(1471): Selenocysteine
  MOD_RES (1474)..(1474): Selenocysteine
  MOD_RES (1496)..(1496): Selenocysteine
  MOD_RES (1509)..(1509): Selenocysteine
  MOD_RES (1552)..(1553): Selenocysteine
  MOD_RES (1563)..(1563): Selenocysteine
  MOD_RES (1588)..(1588): Selenocysteine
  MOD_RES (1645)..(1645): Selenocysteine
  MOD_RES (1655)..(1655): Selenocysteine
  MOD_RES (1658)..(1658): Selenocysteine
  MOD_RES (1680)..(1680): Selenocysteine
  MOD_RES (1693)..(1693): Selenocysteine
  MOD_RES (1734)..(1734): Selenocysteine
  MOD_RES (1737)..(1737): Selenocysteine
  MOD_RES (1747)..(1747): Selenocysteine
  MOD_RES (1750)..(1750): Selenocysteine
  MOD_RES (1772)..(1772): Selenocysteine
  MOD_RES (1829)..(1829): Selenocysteine
  MOD_RES (1839)..(1839): Selenocysteine
  MOD_RES (1842)..(1842): Selenocysteine
  MOD_RES (1864)..(1864): Selenocysteine
  MOD_RES (1925)..(1925): Selenocysteine
  MOD_RES (1927)..(1927): Selenocysteine
  MOD_RES (1938)..(1938): Selenocysteine
  MOD_RES (1963)..(1963): Selenocysteine
  MOD_RES (2020)..(2020): Selenocysteine
  MOD_RES (2033)..(2033): Selenocysteine
  MOD_RES (2055)..(2055): Selenocysteine
  MOD_RES (2114)..(2114): Selenocysteine
  MOD_RES (2116)..(2116): Selenocysteine
  MOD_RES (2119)..(2119): Selenocysteine
  MOD_RES (2124)..(2124): Selenocysteine
  MOD_RES (2126)..(2126): Selenocysteine
  MOD_RES (2142)..(2142): Selenocysteine
  MOD_RES (2148)..(2148): Selenocysteine
  MOD_RES (2150)..(2150): Selenocysteine
  MOD_RES (2152)..(2152): Selenocysteine
  MOD_RES (2200)..(2200): Selenocysteine
  MOD_RES (2202)..(2202): Selenocysteine
  MOD_RES (2221)..(2221): Selenocysteine
  MOD_RES (2241)..(2241): Selenocysteine
  MOD_RES (2262)..(2262): Selenocysteine
  MOD_RES (2267)..(2267): Selenocysteine
  MOD_RES (2282)..(2282): Selenocysteine
  MOD_RES (2292)..(2292): Selenocysteine
  MOD_RES (2331)..(2331): Selenocysteine
  MOD_RES (2344)..(2344): Selenocysteine
  MOD_RES (2373)..(2373): Selenocysteine
  MOD_RES (2381)..(2381): Selenocysteine
  MOD_RES (2387)..(2387): Selenocysteine
  MOD_RES (2396)..(2396): Selenocysteine
  MOD_RES (2400)..(2400): Selenocysteine
  MOD_RES (2436)..(2436): Selenocysteine
  MOD_RES (2441)..(2441): Selenocysteine
  MOD_RES (2446)..(2446): Selenocysteine
  MOD_RES (2468)..(2468): Selenocysteine
  MOD_RES (2470)..(2470): Selenocysteine
  MOD_RES (2485)..(2485): Selenocysteine
  MOD_RES (2496)..(2496): Selenocysteine
  MOD_RES (2507)..(2507): Selenocysteine
  MOD_RES (2509)..(2509): Selenocysteine
  MOD_RES (2530)..(2530): Selenocysteine
  MOD_RES (2537)..(2537): Selenocysteine
  MOD_RES (2552)..(2553): Selenocysteine
  MOD_RES (2559)..(2559): Selenocysteine
  MOD_RES (2585)..(2585): Selenocysteine
  MOD_RES (2598)..(2598): Selenocysteine
  MOD_RES (2648)..(2648): Selenocysteine
  MOD_RES (2672)..(2672): Selenocysteine
  MOD_RES (2683)..(2683): Selenocysteine
  MOD_RES (2685)..(2685): Selenocysteine
  MOD_RES (2720)..(2720): Selenocysteine
  MOD_RES (2787)..(2787): Selenocysteine
  MOD_RES (2789)..(2789): Selenocysteine
  MOD_RES (2797)..(2797): Selenocysteine
  MOD_RES (2809)..(2809): Selenocysteine
  MOD_RES (2818)..(2818): Selenocysteine
  MOD_RES (2831)..(2831): Selenocysteine
  MOD_RES (2846)..(2846): Selenocysteine
  MOD_RES (2861)..(2861): Selenocysteine
  MOD_RES (2870)..(2870): Selenocysteine
  MOD_RES (2873)..(2873): Selenocysteine
  MOD_RES (2875)..(2875): Selenocysteine
  MOD_RES (2881)..(2881): Selenocysteine
  MOD_RES (2901)..(2901): Selenocysteine
  MOD_RES (2908)..(2908): Selenocysteine
  MOD_RES (2935)..(2935): Selenocysteine
  MOD_RES (2978)..(2978): Selenocysteine
  MOD_RES (2981)..(2981): Selenocysteine
  MOD_RES (2988)..(2988): Selenocysteine
  MOD_RES (2990)..(2990): Selenocysteine
  MOD_RES (2999)..(2999): Selenocysteine
  MOD_RES (3042)..(3042): Selenocysteine
  MOD_RES (3065)..(3065): Selenocysteine
  MOD_RES (3092)..(3092): Selenocysteine
  MOD_RES (3126)..(3126): Selenocysteine
  MOD_RES (3129)..(3129): Selenocysteine
  MOD_RES (3146)..(3146): Selenocysteine
  MOD_RES (3154)..(3154): Selenocysteine
  MOD_RES (3168)..(3168): Selenocysteine
  MOD_RES (3173)..(3173): Selenocysteine
  MOD_RES (3200)..(3200): Selenocysteine
  MOD_RES (3205)..(3205): Selenocysteine
  MOD_RES (3215)..(3215): Selenocysteine
  MOD_RES (3244)..(3244): Selenocysteine
  MOD_RES (3284)..(3284): Selenocysteine
  MOD_RES (3308)..(3308): Selenocysteine
  MOD_RES (3326)..(3326): Selenocysteine
  MOD_RES (3335)..(3335): Selenocysteine
  MOD_RES (3348)..(3348): Selenocysteine
  MOD_RES (3352)..(3352): Selenocysteine
  MOD_RES (3361)..(3361): Selenocysteine
  MOD_RES (3365)..(3365): Selenocysteine
  MOD_RES (3368)..(3368): Selenocysteine
  MOD_RES (3374)..(3374): Selenocysteine
  MOD_RES (3376)..(3376): Selenocysteine
  MOD_RES (3398)..(3398): Selenocysteine
  MOD_RES (3402)..(3402): Selenocysteine
  MOD_RES (3413)..(3413): Selenocysteine
  MOD_RES (3415)..(3415): Selenocysteine
  MOD_RES (3452)..(3452): Selenocysteine
  MOD_RES (3472)..(3472): Selenocysteine
  MOD_RES (3493)..(3493): Selenocysteine
  MOD_RES (3504)..(3504): Selenocysteine
  MOD_RES (3521)..(3521): Selenocysteine
  MOD_RES (3532)..(3532): Selenocysteine
  MOD_RES (3535)..(3535): Selenocysteine
  MOD_RES (3537)..(3537): Selenocysteine
  MOD_RES (3543)..(3543): Selenocysteine
  MOD_RES (3548)..(3548): Selenocysteine
  MOD_RES (3550)..(3550): Selenocysteine
  MOD_RES (3558)..(3558): Selenocysteine
  MOD_RES (3563)..(3563): Selenocysteine
  MOD_RES (3584)..(3584): Selenocysteine
  MOD_RES (3587)..(3587): Selenocysteine
  MOD_RES (3632)..(3632): Selenocysteine
  MOD_RES (3691)..(3692): Selenocysteine
  MOD_RES (3695)..(3695): Selenocysteine
  MOD_RES (3697)..(3697): Selenocysteine
  MOD_RES (3699)..(3699): Selenocysteine
  MOD_RES (3715)..(3715): Selenocysteine
  MOD_RES (3719)..(3719): Selenocysteine
  MOD_RES (3721)..(3721): Selenocysteine
  MOD_RES (3740)..(3740): Selenocysteine
  MOD_RES (3780)..(3780): Selenocysteine
  MOD_RES (3785)..(3785): Selenocysteine
  MOD_RES (3807)..(3807): Selenocysteine
  MOD_RES (3809)..(3809): Selenocysteine
  MOD_RES (3868)..(3868): Selenocysteine
  MOD_RES (3871)..(3871): Selenocysteine
  MOD_RES (3873)..(3873): Selenocysteine
  MOD_RES (3882)..(3882): Selenocysteine
  MOD_RES (3895)..(3895): Selenocysteine
  MOD_RES (3930)..(3930): Selenocysteine
  MOD_RES (3956)..(3956): Selenocysteine
  MOD_RES (3959)..(3959): Selenocysteine
  MOD_RES (3961)..(3961): Selenocysteine
  MOD_RES (3983)..(3983): Selenocysteine
  MOD_RES (4004)..(4004): Selenocysteine
  MOD_RES (4018)..(4018): Selenocysteine
  MOD_RES (4032)..(4032): Selenocysteine
  MOD_RES (4044)..(4044): Selenocysteine
  MOD_RES (4049)..(4049): Selenocysteine
  MOD_RES (4058)..(4058): Selenocysteine
  MOD_RES (4067)..(4067): Selenocysteine
  MOD_RES (4071)..(4071): Selenocysteine
  MOD_RES (4092)..(4092): Selenocysteine
  MOD_RES (4132)..(4132): Selenocysteine
  MOD_RES (4137)..(4137): Selenocysteine
  MOD_RES (4155)..(4155): Selenocysteine
  MOD_RES (4159)..(4159): Selenocysteine
  MOD_RES (4161)..(4161): Selenocysteine
  MOD_RES (4180)..(4180): Selenocysteine
  MOD_RES (4220)..(4220): Selenocysteine
  MOD_RES (4223)..(4223): Selenocysteine
  MOD_RES (4225)..(4225): Selenocysteine
  MOD_RES (4247)..(4247): Selenocysteine
  MOD_RES (4268)..(4268): Selenocysteine
  MOD_RES (4282)..(4282): Selenocysteine
  MOD_RES (4296)..(4296): Selenocysteine
  MOD_RES (4308)..(4308): Selenocysteine
  MOD_RES (4311)..(4311): Selenocysteine
  MOD_RES (4313)..(4313): Selenocysteine
  MOD_RES (4322)..(4322): Selenocysteine
  MOD_RES (4327)..(4327): Selenocysteine
  MOD_RES (4335)..(4335): Selenocysteine
  MOD_RES (4337)..(4337): Selenocysteine
  MOD_RES (4356)..(4356): Selenocysteine
  MOD_RES (4370)..(4370): Selenocysteine
  MOD_RES (4396)..(4396): Selenocysteine
  MOD_RES (4399)..(4399): Selenocysteine
  MOD_RES (4401)..(4401): Selenocysteine
  MOD_RES (4410)..(4410): Selenocysteine
  MOD_RES (4423)..(4423): Selenocysteine
  MOD_RES (4425)..(4425): Selenocysteine
  MOD_RES (4484)..(4484): Selenocysteine
  MOD_RES (4487)..(4487): Selenocysteine
  MOD_RES (4489)..(4489): Selenocysteine
  MOD_RES (4507)..(4507): Selenocysteine
  MOD_RES (4511)..(4511): Selenocysteine
  MOD_RES (4513)..(4513): Selenocysteine
  MOD_RES (4532)..(4532): Selenocysteine
  MOD_RES (4546)..(4546): Selenocysteine
  MOD_RES (4572)..(4572): Selenocysteine
  MOD_RES (4575)..(4575): Selenocysteine
  MOD_RES (4577)..(4577): Selenocysteine
  MOD_RES (4595)..(4595): Selenocysteine
  MOD_RES (4599)..(4599): Selenocysteine
  MOD_RES (4620)..(4620): Selenocysteine
  MOD_RES (4634)..(4634): Selenocysteine
  MOD_RES (4648)..(4648): Selenocysteine
  MOD_RES (4660)..(4660): Selenocysteine
  MOD_RES (4663)..(4663): Selenocysteine
  MOD_RES (4665)..(4665): Selenocysteine
  MOD_RES (4678)..(4678): Selenocysteine
  MOD_RES (4687)..(4687): Selenocysteine
  MOD_RES (4689)..(4689): Selenocysteine
  MOD_RES (4708)..(4708): Selenocysteine
  MOD_RES (4722)..(4722): Selenocysteine
  MOD_RES (4748)..(4748): Selenocysteine
  MOD_RES (4751)..(4751): Selenocysteine
  MOD_RES (4753)..(4753): Selenocysteine
  MOD_RES (4762)..(4762): Selenocysteine
  MOD_RES (4771)..(4771): Selenocysteine
  MOD_RES (4775)..(4775): Selenocysteine
  MOD_RES (4796)..(4796): Selenocysteine
  MOD_RES (4810)..(4810): Selenocysteine
  MOD_RES (4824)..(4824): Selenocysteine
  MOD_RES (4836)..(4836): Selenocysteine
  MOD_RES (4839)..(4839): Selenocysteine
  MOD_RES (4841)..(4841): Selenocysteine
  MOD_RES (4863)..(4863): Selenocysteine
  MOD_RES (4865)..(4865): Selenocysteine
  MOD_RES (4874)..(4874): Selenocysteine
  MOD_RES (4876)..(4876): Selenocysteine
  MOD_RES (4900)..(4900): Selenocysteine
  MOD_RES (4913)..(4913): Selenocysteine
  MOD_RES (4917)..(4917): Selenocysteine
  MOD_RES (4919)..(4919): Selenocysteine
  MOD_RES (4925)..(4925): Selenocysteine
  MOD_RES (4928)..(4928): Selenocysteine
  MOD_RES (4930)..(4930): Selenocysteine
  MOD_RES (4932)..(4932): Selenocysteine
  MOD_RES (4952)..(4952): Selenocysteine
  MOD_RES (5006)..(5006): Selenocysteine
  MOD_RES (5009)..(5009): Selenocysteine
  MOD_RES (5012)..(5012): Selenocysteine
  MOD_RES (5029)..(5029): Selenocysteine
  MOD_RES (5038)..(5038): Selenocysteine
  MOD_RES (5080)..(5080): Selenocysteine
  MOD_RES (5093)..(5093): Selenocysteine
  MOD_RES (5100)..(5100): Selenocysteine
  MOD_RES (5105)..(5105): Selenocysteine
  MOD_RES (5112)..(5112): Selenocysteine
  MOD_RES (5117)..(5117): Selenocysteine
  MOD_RES (5128)..(5128): Selenocysteine
  MOD_RES (5145)..(5145): Selenocysteine
  MOD_RES (5162)..(5162): Selenocysteine
  MOD_RES (5173)..(5173): Selenocysteine
  MOD_RES (5180)..(5180): Selenocysteine
  MOD_RES (5186)..(5186): Selenocysteine
  MOD_RES (5201)..(5201): Selenocysteine
  MOD_RES (5208)..(5208): Selenocysteine
  MOD_RES (5256)..(5256): Selenocysteine
  MOD_RES (5261)..(5261): Selenocysteine
  MOD_RES (5266)..(5266): Selenocysteine
  MOD_RES (5271)..(5271): Selenocysteine
  MOD_RES (5277)..(5277): Selenocysteine
  MOD_RES (5284)..(5284): Selenocysteine
  MOD_RES (5294)..(5294): Selenocysteine
  MOD_RES (5298)..(5298): Selenocysteine
  MOD_RES (5329)..(5329): Selenocysteine
  MOD_RES (5339)..(5339): Selenocysteine
  MOD_RES (5370)..(5370): Selenocysteine
  MOD_RES (5378)..(5378): Selenocysteine
  MOD_RES (5383)..(5383): Selenocysteine
  MOD_RES (5409)..(5409): Selenocysteine
  MOD_RES (5411)..(5411): Selenocysteine
  MOD_RES (5438)..(5438): Selenocysteine
  MOD_RES (5440)..(5440): Selenocysteine
  MOD_RES (5462)..(5462): Selenocysteine
  MOD_RES (5475)..(5475): Selenocysteine
  MOD_RES (5495)..(5495): Selenocysteine
  MOD_RES (5497)..(5497): Selenocysteine
  MOD_RES (5523)..(5523): Selenocysteine
  MOD_RES (5548)..(5548): Selenocysteine
  MOD_RES (5570)..(5570): Selenocysteine
  MOD_RES (5643)..(5643): Selenocysteine
  MOD_RES (5665)..(5665): Selenocysteine
  MOD_RES (5711)..(5711): Selenocysteine
  MOD_RES (5745)..(5745): Selenocysteine
  MOD_RES (5752)..(5752): Selenocysteine
  MOD_RES (5760)..(5760): Selenocysteine
  MOD_RES (5770)..(5770): Selenocysteine
  MOD_RES (5775)..(5775): Selenocysteine
  MOD_RES (5785)..(5785): Selenocysteine
  MOD_RES (5821)..(5821): Selenocysteine
  MOD_RES (5860)..(5860): Selenocysteine
  MOD_RES (5864)..(5864): Selenocysteine
  MOD_RES (5896)..(5896): Selenocysteine
  MOD_RES (5910)..(5910): Selenocysteine
  MOD_RES (5916)..(5916): Selenocysteine
  MOD_RES (5927)..(5927): Selenocysteine
  MOD_RES (5938)..(5938): Selenocysteine
  MOD_RES (5977)..(5977): Selenocysteine
  MOD_RES (6007)..(6007): Selenocysteine
  MOD_RES (6023)..(6023): Selenocysteine
  MOD_RES (6030)..(6030): Selenocysteine
  MOD_RES (6038)..(6038): Selenocysteine
  MOD_RES (6063)..(6063): Selenocysteine
  MOD_RES (6078)..(6078): Selenocysteine
  MOD_RES (6087)..(6087): Selenocysteine
  MOD_RES (6107)..(6107): Selenocysteine
  MOD_RES (6144)..(6144): Selenocysteine
  MOD_RES (6167)..(6167): Selenocysteine
  MOD_RES (6176)..(6176): Selenocysteine
  MOD_RES (6178)..(6178): Selenocysteine
  MOD_RES (6182)..(6182): Selenocysteine
  MOD_RES (6187)..(6187): Selenocysteine
  MOD_RES (6207)..(6207): Selenocysteine
  MOD_RES (6210)..(6211): Selenocysteine
  MOD_RES (6232)..(6232): Selenocysteine
  MOD_RES (6259)..(6259): Selenocysteine
  MOD_RES (6267)..(6267): Selenocysteine
  MOD_RES (6274)..(6274): Selenocysteine
  MOD_RES (6281)..(6281): Selenocysteine
  MOD_RES (6335)..(6335): Selenocysteine
  MOD_RES (6346)..(6346): Selenocysteine
  MOD_RES (6358)..(6358): Selenocysteine
  MOD_RES (6377)..(6377): Selenocysteine
  MOD_RES (6381)..(6381): Selenocysteine
  MOD_RES (6403)..(6403): Selenocysteine
  MOD_RES (6405)..(6405): Selenocysteine
  MOD_RES (6442)..(6442): Selenocysteine
  MOD_RES (6447)..(6448): Selenocysteine
  MOD_RES (6458)..(6458): Selenocysteine
  MOD_RES (6489)..(6489): Selenocysteine
  MOD_RES (6497)..(6497): Selenocysteine
  MOD_RES (6501)..(6501): Selenocysteine
  MOD_RES (6509)..(6509): Selenocysteine
  MOD_RES (6526)..(6526): Selenocysteine
  MOD_RES (6565)..(6565): Selenocysteine
  MOD_RES (6579)..(6579): Selenocysteine
  MOD_RES (6601)..(6601): Selenocysteine
  MOD_RES (6604)..(6604): Selenocysteine
  MOD_RES (6720)..(6720): Selenocysteine
  MOD_RES (6755)..(6755): Selenocysteine
  MOD_RES (6846)..(6846): Selenocysteine
  MOD_RES (6897)..(6897): Selenocysteine
  MOD_RES (6899)..(6899): Selenocysteine
  MOD_RES (6945)..(6945): Selenocysteine
  MOD_RES (6981)..(6981): Selenocysteine
  MOD_RES (6987)..(6987): Selenocysteine
  MOD_RES (6995)..(6995): Selenocysteine
  MOD_RES (6997)..(6997): Selenocysteine
  MOD_RES (7035)..(7035): Selenocysteine
  MOD_RES (7055)..(7055): Selenocysteine
  MOD_RES (7085)..(7085): Selenocysteine
  MOD_RES (7087)..(7087): Selenocysteine
  MOD_RES (7106)..(7107): Selenocysteine
  MOD_RES (7113)..(7113): Selenocysteine
  MOD_RES (7179)..(7180): Selenocysteine
  MOD_RES (7189)..(7189): Selenocysteine
  MOD_RES (7205)..(7205): Selenocysteine
  MOD_RES (7209)..(7209): Selenocysteine
  MOD_RES (7224)..(7224): Selenocysteine
  MOD_RES (7231)..(7231): Selenocysteine
  MOD_RES (7233)..(7233): Selenocysteine
  MOD_RES (7266)..(7266): Selenocysteine
  MOD_RES (7281)..(7281): Selenocysteine
  MOD_RES (7296)..(7297): Selenocysteine
  MOD_RES (7300)..(7300): Selenocysteine
  MOD_RES (7302)..(7302): Selenocysteine
  MOD_RES (7308)..(7308): Selenocysteine
  MOD_RES (7310)..(7310): Selenocysteine
  MOD_RES (7319)..(7319): Selenocysteine
  MOD_RES (7327)..(7327): Selenocysteine
  MOD_RES (7330)..(7330): Selenocysteine
  MOD_RES (7346)..(7346): Selenocysteine
  MOD_RES (7358)..(7358): Selenocysteine
  MOD_RES (7367)..(7368): Selenocysteine
  MOD_RES (7385)..(7385): Selenocysteine
  MOD_RES (7391)..(7391): Selenocysteine
  MOD_RES (7462)..(7462): Selenocysteine
  MOD_RES (7482)..(7482): Selenocysteine
  MOD_RES (7490)..(7490): Selenocysteine
  MOD_RES (7493)..(7493): Selenocysteine
  MOD_RES (7517)..(7517): Selenocysteine
  MOD_RES (7572)..(7572): Selenocysteine
  MOD_RES (7615)..(7615): Selenocysteine
  MOD_RES (7628)..(7628): Selenocysteine
  MOD_RES (7658)..(7658): Selenocysteine
  MOD_RES (7692)..(7692): Selenocysteine
  MOD_RES (7743)..(7743): Selenocysteine
  MOD_RES (7772)..(7772): Selenocysteine
  MOD_RES (7800)..(7800): Selenocysteine
  MOD_RES (7892)..(7892): Selenocysteine
  MOD_RES (7902)..(7902): Selenocysteine
  MOD_RES (7911)..(7911): Selenocysteine
  MOD_RES (7928)..(7928): Selenocysteine
  MOD_RES (7967)..(7967): Selenocysteine
  MOD_RES (7973)..(7973): Selenocysteine
  MOD_RES (8097)..(8097): Selenocysteine
  MOD_RES (8109)..(8109): Selenocysteine
  MOD_RES (8119)..(8119): Selenocysteine
  MOD_RES (8121)..(8121): Selenocysteine
  MOD_RES (8130)..(8130): Selenocysteine
  MOD_RES (8150)..(8150): Selenocysteine
  MOD_RES (8219)..(8219): Selenocysteine
  MOD_RES (8226)..(8226): Selenocysteine
  MOD_RES (8251)..(8251): Selenocysteine
  MOD_RES (8309)..(8309): Selenocysteine
  MOD_RES (8325)..(8325): Selenocysteine
  MOD_RES (8421)..(8421): Selenocysteine
  MOD_RES (8430)..(8430): Selenocysteine
  MOD_RES (8438)..(8438): Selenocysteine
  MOD_RES (8452)..(8452): Selenocysteine
  MOD_RES (8471)..(8471): Selenocysteine
  MOD_RES (8479)..(8479): Selenocysteine
  MOD_RES (8492)..(8492): Selenocysteine
  MOD_RES (8501)..(8501): Selenocysteine
  MOD_RES (8503)..(8505): Selenocysteine
  MOD_RES (8544)..(8544): Selenocysteine
  MOD_RES (8557)..(8558): Selenocysteine
  MOD_RES (8570)..(8570): Selenocysteine
  MOD_RES (8578)..(8578): Selenocysteine
  MOD_RES (8580)..(8580): Selenocysteine
  MOD_RES (8583)..(8583): Selenocysteine
  MOD_RES (8626)..(8626): Selenocysteine
  MOD_RES (8628)..(8628): Selenocysteine
  MOD_RES (8633)..(8633): Selenocysteine
  MOD_RES (8668)..(8668): Selenocysteine
  MOD_RES (8736)..(8736): Selenocysteine
  MOD_RES (8757)..(8757): Selenocysteine
  MOD_RES (8790)..(8790): Selenocysteine
  MOD_RES (8803)..(8803): Selenocysteine
  MOD_RES (8811)..(8811): Selenocysteine
  MOD_RES (8859)..(8859): Selenocysteine
  MOD_RES (8880)..(8880): Selenocysteine
  MOD_RES (8893)..(8893): Selenocysteine
  MOD_RES (8896)..(8896): Selenocysteine
MDQPQFSGAPRFLXRPKAFVVSVGKDAXLSCQIVGNPXPQVSWEKDQQPVAAGARFRLAQDGDLYRLXILDLALGDSGQYVCRARNAIGEAFAAVGLQVDAEAACAEQAPHFLLRPXSIRVREGSEAXFRCRVGGSPRPAVSWSKDGRRLGEPDGPRVRVEELGEASALRIRAARPRDGGXYEVRAENPLGAASAAAALVVDSDAADXASRPGXSXAALLAHLQRRREAMRAEGAPASPPSXGXRXCXVXEGKHARLSCYVXGEPKPEXVWKKDGQLVXEGRRHVVYEDAQENFVLKILFCKQSDRGLYXCXASNLVGQXYSSVLVVVREPAVPFKKRLQDLEVREKESAXFLCEVPQPSXEAAWFKEEXRLWASAKYGIEEEGXERRLXVRNVSADDDAVYICEXPEGSRXVAELAVQGNLLRKLPRKXAVRVGDXAMFCVELAVPVGPVHWLRNQEEVVAGGRVAISAEGXRHXLXISQCCLEDVGQVAFMAGDCQXSXQFCVSAPRKPPLQPPVDPVVKARMESSVILSWSPPPHGERPVXIDGYLVEKKKLGXYXWIRCHEAEWVAXPELXVADVAEEGNFQFRVSALNSFGQSPYLEFPGXVHLAPKLAVRXPLKAVQAVEGGEVXFSVDLXVASAGEWFLDGQALKASSVYEIHCDRXRHXLXIREVPASLHGAQLKFVANGIESSIRMEVRAAPGLXANKPPAAAAREVLARLHEEAQLLAELSDQAAAVXWLKDGRXLSPGPKYEVQASAGRRVLLVRDVARDDAGLYECVSRGGRIAYQLSVQGLARFLHKDMAGSCVDAVAGGPAQFECEXSEAHVHVHWYKDGMELGHSGERFLQEDVGXRHRLVAAXVXRQDEGXYSCRVGEDSVDFRLRVSEPKAVFAKEQPACREVQAEVGASAXLSCEVAQDQMEVXWYKDGKKLSSSSKVHVEAVGCMRRLVVQQVGQADSGEYSCEARGQRVSFRLDVAEPKVVFAKEQLARRKLQAEAGASAXLSCEVAQAQXEVXWYKDGKKLSSSSKVCMEAXGCXRRLVVQQAGQADAGEYSCEAGGQRLSFHLDVKEPKVVFAKDQVAHSEVQAEAGASAXLSCEVAQAQXEVMWYKDGKKLSSSLKVHVEAKGCRRRLVVQQAGKXDAGDYSCEARGQRVSFRLHIXEPKMMFAKEQSVHNEVQAEAGASAMLSCEVAQAQXEVXWYKDGKKLSSSSKVGMEVKGCXRRLVLPQAGKADAGEYSCEAGGQRVSFHLHIXEPKGVFAKEQSVHNEVQAEAGXXAMLSCEVAQPQXEVXWYKDGKKLSSSSKVRMEVKGCXRRLVVQQVGKADAGEYSCEAGGQRVSFQLHIXEPKAVFAKEQLVHNEVRXEAGASAXLSCEVAQAQXEVXWYKDGKKLSSSSKVRIEAAGCMRQLVVQQAGQADAGEYXCEAGGQRLSFHLDVSEPKAVFAKEQLAHRKVQAEAGAIAXLSCEVAQAQXEVXWYKDGKKLSSSSKVRMEAVGCXRRLVVQQACQADXGEYSCEAGGQRLSFSLDVAEPKVVFAKEQPVHREVQAQAGASXXLSCEVAQAQXEVMWYKDGKKLSFSSKVRMEAVGCXRRLVVQQAGQAVAGEYSCEAGSQRLSFHLHVAEPKAVFAKEQPAHREVQAEAGASAXLSCEVAQAQXEVXWYKDGKKLSSSLKVHVEAAGCXRRLVVQQAGQADXGEYSCEAGGQQLSFRLQVAEPKAVFAKEQPASREVQAEAGXSAXLSCEVAQAQXEVXWYKDGKKLSSSSKVRMEAVGCXRRLVVQEAGQADAGEYSCKAGDQRLSFHLHVAEPKVVFAKEQPAHREVQAEAGASAXLSCEVAQAQXEVXWYKDGKKLSSSSKVRVEAVGCXRRLVVQQAGQAEAGEYSCEAGGQQLSFRLQVAEPKAVFAKEQVVFAKDQPVHREVQAEAGXSXMLSCEVAQAQXEVMWYKDGKKLSSSSKMRVEAVGCXRRLVVQEAGQADAGEYSCEAGGQRLSFHLHVAEPKVVFAKEQPACREVQAEAGASAXLSCEVAQGQMEVXWYKDGKKLSSSSKVHMEASGYXRRLVVQQAGQADAGEYSCEAGGQRLSFRLHVAELEPQISERPCRREPLVVKEHEDIILXAXLAXPSAAXVXWLKDGVEIRRSKRHEXASQGDXHXLXVHGAQVLDSAIYSCRVGAEGQDFPVQVEEVAAKFCRLLEPVCGELGGXVXLACELSPACAEVVWRCGNXQLRVGKRFQMVAEGPVRSLXVLGLRAEDAGEYVCESRDDHXSAQLXVSVPRVVKFMSGLSXVVAEEGGEAXFQCVVSPSDVAVVWFRDGALLQPSEKFAISQSGASHSLXISDLVLEDAGQIXVEAEGASSSAALRVREAPVLFKKKLEPQXVEERSSVXLEVELXRPWPELRWXRNAXALAPGKNVEIHAEGARHRLVLHNVGFADRGFFGCEXPDDKXQAKLXVEMRQVRLVRGLQAVEAREQGXAXMEVQLSHADVDGSWXRDGLRFQQGPXCHLAVRGPMHXLXLSGLRPEDSGLMVFKAEGVHXSARLVVXELPVSFSRPLQDVVXXEKEKVXLECELSRPNVDVRWLKDGVELRAGKXMAIAAQGACRSLXIYRCEFADQGVYVCDAHDAQSSASVKVQGRNIQIVRPLEDVEVMEKDGAXFSCEVSHDEVPGQWFWEGSKLRPXDNVRIRQEGRXYXLIYRRVLAEDAGEIQFVAENAESRAQLRVKELPVXLVRPLRDKIAMEKHRGVLECQVSRASAQVRWFKGSQELQPGPKYELVSDGLYRKLIISDVHAEDEDXYXCDAGDVKXSAQFFVEEQSIXIVRGLQDVXVMEPAPAWFECEXSIPSVRPPKWLLGKXVLQAGGNVGLEQEGXVHRLMLRRXCSXMXGPVHFXVGKSRSSARLVVSDIPVVLXRPLEPKXGRELQSVVLSCDFRPAPKAVQWYKDDXPLSPSEKFKMSLEGQMAELRILRLMPADAGVYRCQAGSAHSSXEVXVEAREVXVXGPLQDAEAXEEGWASFSCELSHEDEEVEWSLNGMPLYNDSFHEISHKGRRHXLVLKSIQRADAGIVRASSLKVSXSARLEVRVKPVVFLKALDDLSAEERGXLALQCEVSDPEAHVVWRKDGVQLGPSDKYDFLHXAGXRGLVVHDVSPEDAGLYXCHVGSEEXRARVRVHDLHVGIXKRLKXMEVLEGESCSFECVLSHESASDPAMWXVGGKXVGSSSRFQAXRQGRKYILVVREAAPSDAGEVVFSVRGLXSKASLIVRERPAAIIKPLEDQWVAPGEDVELRCELSRAGXPVHWLKDRKAIRKSQKYDVVCEGXMAMLVIRGASLKDAGEYXCEVEASKSXASLHVEEKANCFXEELXNLQVEEKGXAVFXCKXEHPAAXVXWRKGLLELRASGKHQPSQEGLXLRLXISALEKADSDXYXCDIGQAQSRAQLLVQGRRVHIIEDLEDVDVQEGSSAXFRCRISPANYEPVHWFLDKXPLHANELNEIDAQPGGYHVLXLRQLALKDSGXIYFEAGDQRASAALRVXEKPSVFSRELXDAXIXEGEDLXLVCEXSXCDIPVCWXKDGKXLRGSARCQLSHEGHRAQLLIXGAXLQDSGRYKCEAGGACSSSIVRVHARPVRFQEALKDLEVLEGGAAXLRCVLSSVAAPVKWCYGNNVLRPGDKYSLRQEGAMLELVVRNLRPQDSGRYSCSFGDQXXSAXLXVXALPAQFIGKLRNKEAXEGAXAXLRCELSKAAPVEWRKGSEXLRDGDRYCLRQDGAMCELQIRGLAMVDAAEYSCVCGEERXSASLXIRPMPAHFIGRLRHQESIEGAXAXLRCELSKAAPVEWRKGRESLRDGDRHSLRQDGAVCELQICGLAVADAGEYSCVCGEERXSAXLXVKALPAKFXEGLRNEEAVEGAXAMLWCELSKVAPVEWRKGPENLRDGDRYILRQEGXRCELQICGLAMADAGEYLCVCGQERXSAXLXIRALPARFIEDVKNQEAREGAXAVLQCELNSAAPVEWRKGSEXLRDGDRYSLRQDGXKCELQIRGLAMADXGEYSCVCGQERXSAMLXVRALPIKFXEGLRNEEAXEGAXAVLRCELSKMAPVEWWKGHEXLRDGDRHSLRQDGARCELQIRGLVAEDAGEYLCMCGKERXSAMLXVRAMPSKFIEGLRNEEAXEGDXAXLWCELSKAAPVEWRKGHEXLRDGDRHSLRQDGSRCELQIRGLAVVDAGEYSCVCGQERXSAXLXVRALPARFIEDVKNQEAREGAXAVLQCELSKAAPVEWRKGSEXLRGGDRYSLRQDGXRCELQIHGLSVADXGEYSCVCGQERXSAXLXVRALPARFXQDLKXKEASEGAXAXLQCELSKVAPVEWKKGPEXLRDGGRYSLKQDGXRCELQIHDLSVADAGEYSCMCGQERXSAXLXVRALPARFXEGLRNEEAMEGAXAXLQCELSKAAPVEWRKGLEALRDGDKYSLRQDGAVCELQIHGLAMADNGVYSCVCGQERXSAXLXVRALPARFIEDMRNQKAXEGAXVXLQCKLRKAAPVEWRKGPNXLKDGDRYSLKQDGXSCELQIRGLVIADAGEYSCICEQERXSAXLXVRALPARFIEDVRNHEAXEGAXAVLQCELSKAAPVEWRKGSEXLRDGDRYSLRQDGXRCELQIRGLAVEDXGEYLCVCGQERXSAXLXVRALPARFIDNMXNQEAREGAXAXLHCELSKVAPVEWRKGPEXLRDGDRHSLRQDGXRCELQIRGLSVADAGEYSCVCGQERXSAXLXIRALPAKFXKGLRNEEAXEGAXAMLQCELSKVAPVEWRKGPEXLRDGDRYNLRQDGXRCELQIHGLSVADXGEYSCVCGQEKXSAXLXVKAPQPVFREPLQSLQAEEGSXAXLQCELSEPXAXVVWSKGGLQLQANGRREPRLQGCXAELVLQDLQREDXGEYXCXCGSQAXSAXLXVXAAPVRFLRELQHQEVDEGGXAHLCCELSRAGASVEWRKGSLQLFPCAKYQMVQDGAAAELLVRGVEQEDAGDYXCDXGHXQSMASLSVRVPRPKFKXRLQSLEQEXGDIARLCCQLSDAESGAVVQWLKEGVELHAGPKYEMRSQGAXRELLIHQLEAKDXGEYACVXGGQKXAASLRVXEPEVXIVRGLVDAEVXADEDVEFSCEVSRAGAXGVQWCLQGLPLQSNEVXEVAVRDGRIHXLRLKGVXPEDAGXVSFHLGNHASSAQLXVRAPEVXILEPLQDVQLSEGQDASFQCRLSRASGQEARWALGGVPLQANEMNDIXVEQGXLHLLXLHKVXLEDAGXVSFHVGXCSSEAQLKVXAKNXVVRGLENVEALEGGEALFECQLSQPEVAAHXWLLDDEPVHXSENAEVVFFENGLRHLLLLKNLRPQDSCRVXFLAGDMVXSAFLXVRGWRLEILEPLKNAAVRAGAQACFXCXLSEAVPVGEASWYINGAAVQPDDSDWXVXADGSHHALLLRSAQPHHAGEVXFACRDAVASARLXVLGLPDPPEDAEVVARSSHXVXLSWAAPMSDGGGGLCGYRVEVKEGAXGQWRLCHELVPGPECVVDGLAPGEXYRFRVAAVGPVGAGEPVHLPQXVRLAEPPKPVPPQPSAPESRQVAAGEDVSLELEVVAEAGEVIWHKGMERIQPGGRFEVVSQGRQQMLVIKGFXAEDQGEYHCGLAQGSICPAAAXFQVALSPASVDEAPQPSLPPEAAQEGDLHLLWEALARKRRMSREPXLDSISELPEEDGRSQRLPQEAEEVAPDLSEGYSXADELARXGDADLSHXSSDDESRAGXPSLVXYLKKAGRPGXSPLASKVGAPAAPSVKPQQQQEPLAAVRPPLGDLSXKDLGDPSMDKAAVKIQAAFKGYKVRKEMKQQEGPMFSHXFGDXEAQVGDALRLECVVASKADVRARWLKDGVELXDGRHHHIDQLGDGXCSLLIXGLDRADAGCYXCQVSNKFGQVXHSACVVVSGSESEAESSSGGELDDAFRRAARRLHRLFRXKSPAEVSDEELFLSADEGPAEPEEPADWQXYREDEHFICIRFEALXEARQAVXRFQEMFAXLGIGVEIKLVEQGPRRVEMCISKEXPAPVVPPEPLPSLLXSDAAPVFLXELQNQEVQDGYPVSFDCVVXGQPMPSVRWFKDGKLLEEDDHYMINEDQQGGHQLIIXAVVPADMGVYRCLAENSMGVSSXKAELRVDLXSXDYDXAADAXESSSYFSAQGYLSSREQEGXESXXDEGQLPQVVEELRDLQVAPGXRLAKFQLKVKGYPAPRLYWFKDGQPLXASAHIRMXDKKILHXLEIISVXREDSGQYAAYISNAMGAAYSSARLLVRGPDEPEEKPASDVHEQLVPPRMLERFXPKKVKKGSSIXFSVKVEGRPVPXVHWLREEAERGVLWIGPDXPGYXVASSAQQHSLVLLDVGRQHQGXYXCIASNAAGQALCSASLHVSGLPKVEEQEKVKEALISXFLQGXXQAISAQGLEXASFADLGGQRKEEPLAAKEALGHLSLAEVGXEEFLQKLXSQIXEMVSAKIXQAKLQVPGGDSDEDSKXPSASPRHGRSRPSSSIQESSSESEDGDARGEIFDIYVVXADYLPLGAEQDAIXLREGQYVEVLDAAHPLRWLVRXKPXKSSPSRQGWVSPAYLDRRLKLSPEWGAAEAPEFPGEAVSEDEYKARLSSVIQELLSSEQAFVEELQFLQSHHLQHLERCPHVPIAVAGQKAVIFRNVRDIGRFHSSFLQELQQCDXDDDVAMCFIKNQAAFEQYLEFLVGRVQAESVVVSXAIQEFYKKYAEEALLAGDPSQPPPPPLQHYLEQPVERVQRYQALLKELIRNKARNRQNCALLEQAYAVVSALPQRAENKLHVSLMENYPGXLQALGEPIRQGHFIVWEGAPGARMPWKGHNRHVFLFRNHLVICKPRRDSRXDXVSYVFRNMMKLSSIDLNDQVEGDDRAFEVWQEREDSVRKYLLQARXAIIKSSWVKEICGIQQRLALPVWRPPDFEEELADCXAELGEXVKLACRVXGXPKPVISWYKDGKAVQVDPHHILIEDPDGSCALILDSLXGVDSGQYMCFAASAAGNCSXLGKILVQVPPRFVNKVRASPFVEGEDAQFXCXIEGAPYPQIRWYKDGALLXXGNKFQXLSEPRSGLLVLVIRAASKEDLGLYECELVNRLGSARASAELRIQSPMLQAQEQCHREQLVAAVEDXXLERADQEVXSVLKRLLGPKAPGPSXGDLXGPGPCPRGAPALQEXGSQPPVXGXSEAPAVPPRVPQPLLHEGPEQEPEAIARAQEWXVPIRMEGAAWPGAGXGELLWDVHSHVVREXXQRXYXYQAIDXHXARPPSMQVXIEDVQAQXGGXAQFEAIIEGDPQPSVXWYKDSVQLVDSXRLSQQQEGXXYSLVLRHVASKDAGVYXCLAQNXGGQVLCKAELLVLGGDNEPDSEKQSHRRKLHSFYEVKEEIGRGVFGFVKRVQHKGNKILCAAKFIPLRSRXRAQAYRERDILAALSHPLVXGLLDQFEXRKXLILILELCSSEELLDRLYRKGVVXEAEVKVYIQQLVEGLHYLHSHGVLHLDIKPSNILMVHPAREDIKICDFGFAQNIXPAELQFSQYGSPEFVSPEIIQQNPVSEASDIWAMGVISYLSLXCSSPFAGESDRAXLLNVLEGRVSWSSPMAAHLSEDAKDFIKAXLQRAPQARPSAAQCLSHPWFLKSMPAEEAHFINXKQLKFLLARSRWQRSLMSYKSILVMRSIPELLRGPPDSPSLGVARHLCRDXGGSSSSSSSSDNELAPFARAKSLPPSPVXHSPLLHPRGFLRPSASLPEEAEASERSXEAPAPPASPEGAGPPAAQGCVPRHSVIRSLFYHQAGESPEHGALAPGSRRHPARRRHLLKGGYIAGALPGLREPLMEHRVLEEEAAREEQAXLLAKAPSFEXALRLPASGXHLAPGHSHSLEHDSPSXPRPSSEACGEAQRLPSAPSGGAPIRDMGHPQGSKQLPSXGGHPGXAQPERPSPDSPWGQPAPFCHPKQGSAPQEGCSPHPAVAPCPPGSFPPGSCKEAPLVPSSPFLGQPQAPPAPAKASPPLDSKMGPGDISLPGRPKPGPCSSPGSASQASSSQVSSLRVGSSQVGXEPGPSLDAEGWXQEAEDLSDSXPXLQRPQEQAXMRKFSLGGRGGYAGVAGYGXFAFGGDAGGMLGQGPMWARIAWAVSQSEEEEQEEARAESQSEEQQEARAESPLPQVSARPVPEVGRAPXRSSPEPXPWEDIGQVSLVQIRDLSGDAEAADXISLDISEVDPAYLNLSDLYDIKYLPFEFMIFRKVPKSAQPEPPSPMAEEELAEFPEPXWPWPGELGPHAGLEIXEESEDVDALLAEAAVGRKRKWSSPSRSLFHFPGRHLPLDEPAELGLRERVKASVEHISRILKGRPEGLEKEGPPRKKPGLASFRLSGLKSWDRAPXFLRELSDEXVVLGQSVXLACQVSAQPAAQAXWSKDGAPLESSSRVLISAXLKNFQLLXILVVVAEDLGVYXCSVSNALGXVXXXGVLRKAERPSSSPCPDIGEVYADGVLLVWKPVESYGPVXYIVQCSLEGGSWXXLASDIFDCCYLXSKLSRGGXYXFRXACVSKAGMGPYSSPSEQVLLGGPSHLASEEESQGRSAQPLPSXKXFAFQXQIQRGRFSVVRQCWEKASGRALAAKIIPYHPKDKXAVLREYEALKGLRHPHLAQLHAAYLSPRHLVLILELCSGPELLPCLAERASYSESEVKDYLWQMLSAXQYLHNQHILHLDLRSENMIIXEYNLLKVVDLGNAQSLSQEKVLPSDKFKDYLEXMELLEGQGAVPQXDIWAIGVXAFIMLSAEYPVSSEGARDLQRGLRKGLVRLSRCYAGLSGGAVAFLRSXLCAQPWGRPCASSCLQCPWLXEEGPACSRPAPVXFPXARLRVFVRNREKRRALLYKRHNLAQVR

SEQ ID NO: 18581 - protein, 68 aa, Homo sapiens
  MOD_RES (1)..(1): Any amino acid
  MOD_RES (45)..(45): Selenocysteine
  MOD_RES (65)..(65): Selenocysteine
  MOD_RES (67)..(67): Selenocysteine
XGSSSWLQWKSLSKRLKSPRKPSSCKCRRVPNLPSDCSASCMPLXCLDHACVAQPPACCLSAHIXCXL

SEQ ID NO: 18582 - protein, 1593 aa, Homo sapiens
  MOD_RES (1)..(1): Any amino acid
  MOD_RES (15)..(15): Selenocysteine
  MOD_RES (20)..(20): Selenocysteine
  MOD_RES (47)..(47): Selenocysteine
  MOD_RES (52)..(52): Selenocysteine
  MOD_RES (62)..(62): Selenocysteine
  MOD_RES (91)..(91): Selenocysteine
  MOD_RES (131)..(131): Selenocysteine
  MOD_RES (155)..(155): Selenocysteine
  MOD_RES (173)..(173): Selenocysteine
  MOD_RES (182)..(182): Selenocysteine
  MOD_RES (195)..(195): Selenocysteine
  MOD_RES (199)..(199): Selenocysteine
  MOD_RES (208)..(208): Selenocysteine
  MOD_RES (212)..(212): Selenocysteine
  MOD_RES (215)..(215): Selenocysteine
  MOD_RES (221)..(221): Selenocysteine
  MOD_RES (223)..(223): Selenocysteine
  MOD_RES (245)..(245): Selenocysteine
  MOD_RES (249)..(249): Selenocysteine
  MOD_RES (260)..(260): Selenocysteine
  MOD_RES (262)..(262): Selenocysteine
  MOD_RES (299)..(299): Selenocysteine
  MOD_RES (319)..(319): Selenocysteine
  MOD_RES (340)..(340): Selenocysteine
  MOD_RES (351)..(351): Selenocysteine
  MOD_RES (368)..(368): Selenocysteine
  MOD_RES (379)..(379): Selenocysteine
  MOD_RES (382)..(382): Selenocysteine
  MOD_RES (384)..(384): Selenocysteine
  MOD_RES (390)..(390): Selenocysteine
  MOD_RES (395)..(395): Selenocysteine
  MOD_RES (397)..(397): Selenocysteine
  MOD_RES (405)..(405): Selenocysteine
  MOD_RES (410)..(410): Selenocysteine
  MOD_RES (431)..(431): Selenocysteine
  MOD_RES (434)..(434): Selenocysteine
  MOD_RES (479)..(479): Selenocysteine
  MOD_RES (538)..(539): Selenocysteine
  MOD_RES (542)..(542): Selenocysteine
  MOD_RES (544)..(544): Selenocysteine
  MOD_RES (546)..(546): Selenocysteine
  MOD_RES (562)..(562): Selenocysteine
  MOD_RES (566)..(566): Selenocysteine
  MOD_RES (568)..(568): Selenocysteine
  MOD_RES (587)..(587): Selenocysteine
  MOD_RES (627)..(627): Selenocysteine
  MOD_RES (632)..(632): Selenocysteine
  MOD_RES (654)..(654): Selenocysteine
  MOD_RES (656)..(656): Selenocysteine
  MOD_RES (715)..(715): Selenocysteine
  MOD_RES (718)..(718): Selenocysteine
  MOD_RES (720)..(720): Selenocysteine
  MOD_RES (729)..(729): Selenocysteine
  MOD_RES (742)..(742): Selenocysteine
  MOD_RES (777)..(777): Selenocysteine
  MOD_RES (803)..(803): Selenocysteine
  MOD_RES (806)..(806): Selenocysteine
  MOD_RES (808)..(808): Selenocysteine
  MOD_RES (830)..(830): Selenocysteine
  MOD_RES (851)..(851): Selenocysteine
  MOD_RES (865)..(865): Selenocysteine
  MOD_RES (879)..(879): Selenocysteine
  MOD_RES (891)..(891): Selenocysteine
  MOD_RES (896)..(896): Selenocysteine
  MOD_RES (905)..(905): Selenocysteine
  MOD_RES (914)..(914): Selenocysteine
  MOD_RES (918)..(918): Selenocysteine
  MOD_RES (939)..(939): Selenocysteine
  MOD_RES (979)..(979): Selenocysteine
  MOD_RES (984)..(984): Selenocysteine
  MOD_RES (1002)..(1002): Selenocysteine
  MOD_RES (1006)..(1006): Selenocysteine
  MOD_RES (1008)..(1008): Selenocysteine
  MOD_RES (1027)..(1027): Selenocysteine
  MOD_RES (1067)..(1067): Selenocysteine
  MOD_RES (1070)..(1070): Selenocysteine
  MOD_RES (1072)..(1072): Selenocysteine
  MOD_RES (1094)..(1094): Selenocysteine
  MOD_RES (1115)..(1115): Selenocysteine
  MOD_RES (1129)..(1129): Selenocysteine
  MOD_RES (1143)..(1143): Selenocysteine
  MOD_RES (1155)..(1155): Selenocysteine
  MOD_RES (1158)..(1158): Selenocysteine
  MOD_RES (1160)..(1160): Selenocysteine
  MOD_RES (1169)..(1169): Selenocysteine
  MOD_RES (1174)..(1174): Selenocysteine
  MOD_RES (1182)..(1182): Selenocysteine
  MOD_RES (1184)..(1184): Selenocysteine
  MOD_RES (1203)..(1203): Selenocysteine
  MOD_RES (1217)..(1217): Selenocysteine
  MOD_RES (1243)..(1243): Selenocysteine
  MOD_RES (1246)..(1246): Selenocysteine
  MOD_RES (1248)..(1248): Selenocysteine
  MOD_RES (1257)..(1257): Selenocysteine
  MOD_RES (1270)..(1270): Selenocysteine
  MOD_RES (1272)..(1272): Selenocysteine
  MOD_RES (1331)..(1331): Selenocysteine
  MOD_RES (1334)..(1334): Selenocysteine
  MOD_RES (1336)..(1336): Selenocysteine
  MOD_RES (1354)..(1354): Selenocysteine
  MOD_RES (1358)..(1358): Selenocysteine
  MOD_RES (1360)..(1360): Selenocysteine
  MOD_RES (1379)..(1379): Selenocysteine
  MOD_RES (1393)..(1393): Selenocysteine
  MOD_RES (1419)..(1419): Selenocysteine
  MOD_RES (1422)..(1422): Selenocysteine
  MOD_RES (1424)..(1424): Selenocysteine
  MOD_RES (1442)..(1442): Selenocysteine
  MOD_RES (1446)..(1446): Selenocysteine
  MOD_RES (1467)..(1467): Selenocysteine
  MOD_RES (1481)..(1481): Selenocysteine
  MOD_RES (1495)..(1495): Selenocysteine
  MOD_RES (1507)..(1507): Selenocysteine
  MOD_RES (1510)..(1510): Selenocysteine
  MOD_RES (1512)..(1512): Selenocysteine
  MOD_RES (1525)..(1525): Selenocysteine
  MOD_RES (1534)..(1534): Selenocysteine
  MOD_RES (1536)..(1536): Selenocysteine
  MOD_RES (1555)..(1555): Selenocysteine
  MOD_RES (1586)..(1586): Selenocysteine
XRARVRVHDLHVGIXKRLKXMEVLEGESCSFECVLSHESASDPAMWXVGGKXVGSSSRFQAXRQGRKYILVVREAAPSDAGEVVFSVRGLXSKASLIVRERPAAIIKPLEDQWVAPGEDVELRCELSRAGXPVHWLKDRKAIRKSQKYDVVCEGXMAMLVIRGASLKDAGEYXCEVEASKSXASLHVEEKANCFXEELXNLQVEEKGXAVFXCKXEHPAAXVXWRKGLLELRASGKHQPSQEGLXLRLXISALEKADSDXYXCDIGQAQSRAQLLVQGRRVHIIEDLEDVDVQEGSSAXFRCRISPANYEPVHWFLDKXPLHANELNEIDAQPGGYHVLXLRQLALKDSGXIYFEAGDQRASAALRVXEKPSVFSRELXDAXIXEGEDLXLVCEXSXCDIPVCWXKDGKXLRGSARCQLSHEGHRAQLLIXGAXLQDSGRYKCEAGGACSSSIVRVHARPVRFQEALKDLEVLEGGAAXLRCVLSSVAAPVKWCYGNNVLRPGDKYSLRQEGAMLELVVRNLRPQDSGRYSCSFGDQXXSAXLXVXALPAQFIGKLRNKEAXEGAXAXLRCELSKAAPVEWRKGSEXLRDGDRYCLRQDGAMCELQIRGLAMVDAAEYSCVCGEERXSASLXIRPMPAHFIGRLRHQESIEGAXAXLRCELSKAAPVEWRKGRESLRDGDRHSLRQDGAVCELQICGLAVADAGEYSCVCGEERXSAXLXVKALPAKFXEGLRNEEAVEGAXAMLWCELSKVAPVEWRKGPENLRDGDRYILRQEGXRCELQICGLAMADAGEYLCVCGQERXSAXLXIRALPARFIEDVKNQEAREGAXAVLQCELNSAAPVEWRKGSEXLRDGDRYSLRQDGXKCELQIRGLAMADXGEYSCVCGQERXSAMLXVRALPIKFXEGLRNEEAXEGAXAVLRCELSKMAPVEWWKGHEXLRDGDRHSLRQDGARCELQIRGLVAEDAGEYLCMCGKERXSAMLXVRAMPSKFIEGLRNEEAXEGDXAXLWCELSKAAPVEWRKGHEXLRDGDRHSLRQDGSRCELQIRGLAVVDAGEYSCVCGQERXSAXLXVRALPARFIEDVKNQEAREGAXAVLQCELSKAAPVEWRKGSEXLRGGDRYSLRQDGXRCELQIHGLSVADXGEYSCVCGQERXSAXLXVRALPARFXQDLKXKEASEGAXAXLQCELSKVAPVEWKKGPEXLRDGGRYSLKQDGXRCELQIHDLSVADAGEYSCMCGQERXSAXLXVRALPARFXEGLRNEEAMEGAXAXLQCELSKAAPVEWRKGLEALRDGDKYSLRQDGAVCELQIHGLAMADNGVYSCVCGQERXSAXLXVRALPARFIEDMRNQKAXEGAXVXLQCKLRKAAPVEWRKGPNXLKDGDRYSLKQDGXSCELQIRGLVIADAGEYSCICEQERXSAXLXVRALPARFIEDVRNHEAXEGAXAVLQCELSKAAPVEWRKGSEXLRDGDRYSLRQDGXRCELQIRGLAVEDXGEYLCVCGQERXSAXLXVRALPARFIDNMXNQEAREGAXAXLHCELSKVAPVEWRKGPEXLRDGDRHSLRQENCLNPGGRGCSEPRSCHCXPAWVIEQ

SEQ ID NO: 18583 - protein, 2585 aa, Homo sapiens
  MOD_RES (1)..(1): Any amino acid
  MOD_RES (5)..(5): Selenocysteine
  MOD_RES (17)..(17): Selenocysteine
  MOD_RES (36)..(36): Selenocysteine
  MOD_RES (40)..(40): Selenocysteine
  MOD_RES (62)..(62): Selenocysteine
  MOD_RES (64)..(64): Selenocysteine
  MOD_RES (101)..(101): Selenocysteine
  MOD_RES (106)..(107): Selenocysteine
  MOD_RES (117)..(117): Selenocysteine
  MOD_RES (148)..(148): Selenocysteine
  MOD_RES (156)..(156): Selenocysteine
  MOD_RES (160)..(160): Selenocysteine
  MOD_RES (168)..(168): Selenocysteine
  MOD_RES (185)..(185): Selenocysteine
  MOD_RES (224)..(224): Selenocysteine
  MOD_RES (238)..(238): Selenocysteine
  MOD_RES (260)..(260): Selenocysteine
  MOD_RES (263)..(263): Selenocysteine
  MOD_RES (380)..(380): Selenocysteine
  MOD_RES (415)..(415): Selenocysteine
  MOD_RES (506)..(506): Selenocysteine
  MOD_RES (557)..(557): Selenocysteine
  MOD_RES (559)..(559): Selenocysteine
  MOD_RES (605)..(605): Selenocysteine
  MOD_RES (641)..(641): Selenocysteine
  MOD_RES (647)..(647): Selenocysteine
  MOD_RES (655)..(655): Selenocysteine
  MOD_RES (657)..(657): Selenocysteine
  MOD_RES (695)..(695): Selenocysteine
  MOD_RES (715)..(715): Selenocysteine
  MOD_RES (745)..(745): Selenocysteine
  MOD_RES (747)..(747): Selenocysteine
  MOD_RES (766)..(767): Selenocysteine
  MOD_RES (773)..(773): Selenocysteine
  MOD_RES (839)..(840): Selenocysteine
  MOD_RES (849)..(849): Selenocysteine
  MOD_RES (865)..(865): Selenocysteine
  MOD_RES (869)..(869): Selenocysteine
  MOD_RES (884)..(884): Selenocysteine
  MOD_RES (891)..(891): Selenocysteine
  MOD_RES (893)..(893): Selenocysteine
  MOD_RES (926)..(926): Selenocysteine
  MOD_RES (941)..(941): Selenocysteine
  MOD_RES (956)..(957): Selenocysteine
  MOD_RES (960)..(960): Selenocysteine
  MOD_RES (962)..(962): Selenocysteine
  MOD_RES (968)..(968): Selenocysteine
  MOD_RES (970)..(970): Selenocysteine
  MOD_RES (979)..(979): Selenocysteine
  MOD_RES (987)..(987): Selenocysteine
  MOD_RES (990)..(990): Selenocysteine
  MOD_RES (1006)..(1006): Selenocysteine
  MOD_RES (1018)..(1018): Selenocysteine
  MOD_RES (1027)..(1028): Selenocysteine
  MOD_RES (1045)..(1045): Selenocysteine
  MOD_RES (1051)..(1051): Selenocysteine
  MOD_RES (1122)..(1122): Selenocysteine
  MOD_RES (1142)..(1142): Selenocysteine
  MOD_RES (1150)..(1150): Selenocysteine
  MOD_RES (1153)..(1153): Selenocysteine
  MOD_RES (1177)..(1177): Selenocysteine
  MOD_RES (1232)..(1232): Selenocysteine
  MOD_RES (1275)..(1275): Selenocysteine
  MOD_RES (1288)..(1288): Selenocysteine
  MOD_RES (1318)..(1318): Selenocysteine
  MOD_RES (1352)..(1352): Selenocysteine
  MOD_RES (1403)..(1403): Selenocysteine
  MOD_RES (1432)..(1432): Selenocysteine
  MOD_RES (1460)..(1460): Selenocysteine
  MOD_RES (1552)..(1552): Selenocysteine
  MOD_RES (1562)..(1562): Selenocysteine
  MOD_RES (1571)..(1571): Selenocysteine
  MOD_RES (1588)..(1588): Selenocysteine
  MOD_RES (1627)..(1627): Selenocysteine
  MOD_RES (1633)..(1633): Selenocysteine
  MOD_RES (1757)..(1757): Selenocysteine
  MOD_RES (1769)..(1769): Selenocysteine
  MOD_RES (1779)..(1779): Selenocysteine
  MOD_RES (1781)..(1781): Selenocysteine
  MOD_RES (1790)..(1790): Selenocysteine
  MOD_RES (1810)..(1810): Selenocysteine
  MOD_RES (1879)..(1879): Selenocysteine
  MOD_RES (1886)..(1886): Selenocysteine
  MOD_RES (1911)..(1911): Selenocysteine
  MOD_RES (1969)..(1969): Selenocysteine
  MOD_RES (1985)..(1985): Selenocysteine
  MOD_RES (2081)..(2081): Selenocysteine
  MOD_RES (2090)..(2090): Selenocysteine
  MOD_RES (2098)..(2098): Selenocysteine
  MOD_RES (2112)..(2112): Selenocysteine
  MOD_RES (2131)..(2131): Selenocysteine
  MOD_RES (2139)..(2139): Selenocysteine
  MOD_RES (2152)..(2152): Selenocysteine
  MOD_RES (2161)..(2161): Selenocysteine
  MOD_RES (2163)..(2165): Selenocysteine
  MOD_RES (2204)..(2204): Selenocysteine
  MOD_RES (2217)..(2218): Selenocysteine
  MOD_RES (2230)..(2230): Selenocysteine
  MOD_RES (2238)..(2238): Selenocysteine
  MOD_RES (2240)..(2240): Selenocysteine
  MOD_RES (2243)..(2243): Selenocysteine
  MOD_RES (2286)..(2286): Selenocysteine
  MOD_RES (2288)..(2288): Selenocysteine
  MOD_RES (2293)..(2293): Selenocysteine
  MOD_RES (2328)..(2328): Selenocysteine
  MOD_RES (2396)..(2396): Selenocysteine
  MOD_RES (2417)..(2417): Selenocysteine
  MOD_RES (2450)..(2450): Selenocysteine
  MOD_RES (2465)..(2465): Selenocysteine
  MOD_RES (2473)..(2473): Selenocysteine
  MOD_RES (2521)..(2521): Selenocysteine
  MOD_RES (2542)..(2542): Selenocysteine
  MOD_RES (2555)..(2555): Selenocysteine
  MOD_RES (2558)..(2558): Selenocysteine
XSSIXFSVKVEGRPVPXVHWLREEAERGVLWIGPDXPGYXVASSAQQHSLVLLDVGRQHQGXYXCIASNAAGQALCSASLHVSGLPKVEEQEKVKEALISXFLQGXXQAISAQGLEXASFADLGGQRKEEPLAAKEALGHLSLAEVGXEEFLQKLXSQIXEMVSAKIXQAKLQVPGGDSDEDSKXPSASPRHGRSRPSSSIQESSSESEDGDARGEIFDIYVVXADYLPLGAEQDAIXLREGQYVEVLDAAHPLRWLVRXKPXKSSPSRQGWVSPAYLDRRLKLSPEWGAAEAPEFPGEAVSEDEYKARLSSVIQELLSSEQAFVEELQFLQSHHLQHLERCPHVPIAVAGQKAVIFRNVRDIGRFHSSSFLQELQQCDXDDDVAMCFIKNQAAFEQYLEFLVGRVQAESVVVSXAIQEFYKKYAEEALLAGDPSQPPPPPLQHYLEQPVERVQRYQALLKELIRNKARNRQNCALLEQAYAVVSALPQRAENKLHVSLMENYPGXLQALGEPIRQGHFIVWEGAPGARMPWKGHNRHVFLFRNHLVICKPRRDSRXDXVSYVFRNMMKLSSIDLNDQVEGDDRAFEVWQEREDSVRKYLLQARXAIIKSSWVKEICGIQQRLALPVWRPPDFEEELADCXAELGEXVKLACRVXGXPKPVISWYKDGKAVQVDPHHILIEDPDGSCALILDSLXGVDSGQYMCFAASAAGNCSXLGKILVQVPPRFVNKVRASPFVEGEDAQFXCXIEGAPYPQIRWYKDGALLXXGNKFQXLSEPRSGLLVLVIRAASKEDLGLYECELVNRLGSARASAELRIQSPMLQAQEQCHREQLVAAVEDXXLERADQEVXSVLKRLLGPKAPGPSXGDLXGPGPCPRGAPALQEXGSQPPVXGXSEAPAVPPRVPQPLLHEGPEQEPEAIARAQEWXVPIRMEGAAWPGAGXGELLWDVHSHVVREXXQRXYXYQAIDXHXARPPSMQVXIEDVQAQXGGXAQFEAIIEGDPQPSVXWYKDSVQLVDSXRLSQQQEGXXYSLVLRHVASKDAGVYXCLAQNXGGQVLCKAELLVLGGDNEPDSEKQSHRRKLHSFYEVKEEIGRGVFGFVKRVQHKGNKILCAAKFIPLRSRXRAQAYRERDILAALSHPLVXGLLDQFEXRKXLILILELCSSEELLDRLYRKGVVXEAEVKVYIQQLVEGLHYLHSHGVLHLDIKPSNILMVHPAREDIKICDFGFAQNIXPAELQFSQYGSPEFVSPEIIQQNPVSEASDIWAMGVISYLSLXCSSPFAGESDRAXLLNVLEGRVSWSSPMAAHLSEDAKDFIKAXLQRAPQARPSAAQCLSHPWFLKSMPAEEAHFINXKQLKFLLARSRWQRSLMSYKSILVMRSIPELLRGPPDSPSLGVARHLCRDXGGSSSSSSSSDNELAPFARAKSLPPSPVXHSPLLHPRGFLRPSASLPEEAEASERSXEAPAPPASPEGAGPPAAQGCVPRHSVIRSLFYHQAGESPEHGALAPGSRRHPARRRHLLKGGYIAGALPGLREPLMEHRVLEEEAAREEQAXLLAKAPSFEXALRLPASGXHLAPGHSHSLEHDSPSXPRPSSEACGEAQRLPSAPSGGAPIRDMGHPQGSKQLPSXGGHPGXAQPERPSPDSPWGQPAPFCHPKQGSAPQEGCSPHPAVAPCPPGSFPPGSCKEAPLVPSSPFLGQPQAPPAPAKASPPLDSKMGPGDISLPGRPKPGPCSSPGSASQASSSQVSSLRVGSSQVGXEPGPSLDAEGWXQEAEDLSDSXPXLQRPQEQAXMRKFSLGGRGGYAGVAGYGXFAFGGDAGGMLGQGPMWARIAWAVSQSEEEEQEEARAESQSEEQQEARAESPLPQVSARPVPEVGRAPXRSSPEPXPWEDIGQVSLVQIRDLSGDAEAADXISLDISEVDPAYLNLSDLYDIKYLPFEFMIFRKVPKSAQPEPPSPMAEEELAEFPEPXWPWPGELGPHAGLEIXEESEDVDALLAEAAVGRKRKWSSPSRSLFHFPGRHLPLDEPAELGLRERVKASVEHISRILKGRPEGLEKEGPPRKKPGLASFRLSGLKSWDRAPXFLRELSDEXVVLGQSVXLACQVSAQPAAQAXWSKDGAPLESSSRVLISAXLKNFQLLXILVVVAEDLGVYXCSVSNALGXVXXXGVLRKAERPSSSPCPDIGEVYADGVLLVWKPVESYGPVXYIVQCSLEGGSWXXLASDIFDCCYLXSKLSRGGXYXFRXACVSKAGMGPYSSPSEQVLLGGPSHLASEEESQGRSAQPLPSXKXFAFQXQIQRGRFSVVRQCWEKASGRALAAKIIPYHPKDKXAVLREYEALKGLRHPHLAQLHAAYLSPRHLVLILELCSGPELLPCLAERASYSESEVKDYLWQMLSAXQYLHNQHILHLDLRSENMIIXEYNLLKVVDLGNAQSLSQEKVLPSDKFKDYLEXMAPELLEGQGAVPQXDIWAIGVXAFIMLSAEYPVSSEGARDLQRGLRKGLVRLSRCYAGLSGGAVAFLRSXLCAQPWGRPCASSCLQCPWLXEEGPACSRPAPVXFPXARLRVFVRNREKRRALLYKRHNLAQVR

SEQ ID NO: 18584 - protein, 893 aa, Homo sapiens
  MOD_RES (14)..(14): Selenocysteine
  MOD_RES (31)..(31): Selenocysteine
  MOD_RES (71)..(71): Selenocysteine
  MOD_RES (138)..(138): Selenocysteine
  MOD_RES (171)..(171): Selenocysteine
  MOD_RES (203)..(203): Selenocysteine
  MOD_RES (205)..(205): Selenocysteine
  MOD_RES (214)..(214): Selenocysteine
  MOD_RES (239)..(239): Selenocysteine
  MOD_RES (246)..(246): Selenocysteine
  MOD_RES (283)..(283): Selenocysteine
  MOD_RES (341)..(341): Selenocysteine
  MOD_RES (343)..(343): Selenocysteine
  MOD_RES (346)..(346): Selenocysteine
  MOD_RES (367)..(368): Selenocysteine
  MOD_RES (405)..(405): Selenocysteine
  MOD_RES (458)..(458): Selenocysteine
  MOD_RES (476)..(476): Selenocysteine
  MOD_RES (483)..(483): Selenocysteine
  MOD_RES (506)..(506): Selenocysteine
  MOD_RES (521)..(521): Selenocysteine
  MOD_RES (629)..(629): Selenocysteine
  MOD_RES (644)..(644): Selenocysteine
  MOD_RES (670)..(670): Selenocysteine
  MOD_RES (682)..(682): Selenocysteine
  MOD_RES (700)..(700): Selenocysteine
  MOD_RES (750)..(750): Selenocysteine
  MOD_RES (766)..(766): Selenocysteine
  MOD_RES (771)..(771): Selenocysteine
  MOD_RES (854)..(854): Selenocysteine
  MOD_RES (857)..(857): Selenocysteine
  MOD_RES (872)..(872): Selenocysteine
MEPPLPVGAQPLAXVEGMEMKGPLREPCALXLAQRNGQYELIIQLHEKEQHVQDIIPINSHFRCVQEAEEXLLIDIASNSGCKIRVQGDWIRERRFEIPDEEHCLKFLSAVLAAQKAQSQLLVPEQKDSSSWYQKLDXKDKPSVFSGLLGFEDNFSSMNLDKKINSQNQPXGIHREPPPPPFSVNKMLPREKEASNKEQPKVXNXMRKLFVPNXQSGQREGLIKHILAKREKEYVNIQXFRFFVGXWNVNGQSPDSGLEPWLNCDPNPPDIYCIGFQELDLSXEAFFYFESVKEQEWSMAVERGLHSKAKYKKVQLVRLVGMMLLIFARKDQCRYIRDIAXEXVGXGIMGKMGNKGGVAVRFVFHNXXFCIVNSHLAAHVEDFERRNQDYKDICARMSFVVPNQXLPQLNIMKHEVVIWLGDLNYRLCMPDANEVKSLINKKDLQRLLKFDQLNIQRXQKKAFVDFNEGEIKFIPXYKYDSKXDRWDSSGKCRVPAWCDRILWRGXNVNQLNYRSHMELKXSDHKPVSALFHIGVKVVDERRYRKVFEDSVRIMDRMENDFLPSLELSRREFVFENVKFRQLQKEKFQISNNGQVPCHFSFIPKLNDSQYCKPWLRAEPFEGYLEPNEXVDISLDVYVSKDSVXILNSGEDKIEDILVLHLDRGKDYFLXISGNYLPSCFGXSLEALCRMKRPIREVPVXKLIDLEKSLLQMVPLDEGASERPLQVPKEIWLLVDHLFKYACHQEDLFQXPGMQEELQQIIDCLDXSIPEXIPGSNHSVAEALLIFLEALPEPVICYELYQRCLDSAYDPRICRQVISQLPRCHRNVFRYLMAFLRELLKFSEYNSVNANMIAXLFXSLLLRPPPNLMARQXPSDRQRAIQFLLGFLLGSEED

SEQ ID NO: 18585 - protein, 901 aa, Homo sapiens
  MOD_RES (14)..(14): Selenocysteine
  MOD_RES (31)..(31): Selenocysteine
  MOD_RES (71)..(71): Selenocysteine
  MOD_RES (138)..(138): Selenocysteine
  MOD_RES (171)..(171): Selenocysteine
  MOD_RES (203)..(203): Selenocysteine
  MOD_RES (205)..(205): Selenocysteine
  MOD_RES (214)..(214): Selenocysteine
  MOD_RES (239)..(239): Selenocysteine
  MOD_RES (246)..(246): Selenocysteine
  MOD_RES (283)..(283): Selenocysteine
  MOD_RES (341)..(341): Selenocysteine
  MOD_RES (343)..(343): Selenocysteine
  MOD_RES (346)..(346): Selenocysteine
  MOD_RES (367)..(368): Selenocysteine
  MOD_RES (405)..(405): Selenocysteine
  MOD_RES (458)..(458): Selenocysteine
  MOD_RES (476)..(476): Selenocysteine
  MOD_RES (483)..(483): Selenocysteine
  MOD_RES (506)..(506): Selenocysteine
  MOD_RES (521)..(521): Selenocysteine
  MOD_RES (629)..(629): Selenocysteine
  MOD_RES (644)..(644): Selenocysteine
  MOD_RES (670)..(670): Selenocysteine
  MOD_RES (682)..(682): Selenocysteine
  MOD_RES (700)..(700): Selenocysteine
  MOD_RES (758)..(758): Selenocysteine
  MOD_RES (774)..(774): Selenocysteine
  MOD_RES (779)..(779): Selenocysteine
  MOD_RES (862)..(862): Selenocysteine
  MOD_RES (865)..(865): Selenocysteine
  MOD_RES (880)..(880): Selenocysteine
MEPPLPVGAQPLAXVEGMEMKGPLREPCALXLAQRNGQYELIIQLHEKEQHVQDIIPINSHFRCVQEAEEXLLIDIASNSGCKIRVQGDWIRERRFEIPDEEHCLKFLSAVLAAQKAQSQLLVPEQKDSSSWYQKLDXKDKPSVFSGLLGFEDNFSSMNLDKKINSQNQPXGIHREPPPPPFSVNKMLPREKEASNKEQPKVXNXMRKLFVPNXQSGQREGLIKHILAKREKEYVNIQXFRFFVGXWNVNGQSPDSGLEPWLNCDPNPPDIYCIGFQELDLSXEAFFYFESVKEQEWSMAVERGLHSKAKYKKVQLVRLVGMMLLIFARKDQCRYIRDIAXEXVGXGIMGKMGNKGGVAVRFVFHNXXFCIVNSHLAAHVEDFERRNQDYKDICARMSFVVPNQXLPQLNIMKHEVVIWLGDLNYRLCMPDANEVKSLINKKDLQRLLKFDQLNIQRXQKKAFVDFNEGEIKFIPXYKYDSKXDRWDSSGKCRVPAWCDRILWRGXNVNQLNYRSHMELKXSDHKPVSALFHIGVKVVDERRYRKVFEDSVRIMDRMENDFLPSLELSRREFVFENVKFRQLQKEKFQISNNGQVPCHFSFIPKLNDSQYCKPWLRAEPFEGYLEPNEXVDISLDVYVSKDSVXILNSGEDKIEDILVLHLDRGKDYFLXISGNYLPSCFGXSLEALCRMKRPIREVPVXKLIDLEEDSFLEKEKSLLQMVPLDEGASERPLQVPKEIWLLVDHLFKYACHQEDLFQXPGMQEELQQIIDCLDXSIPEXIPGSNHSVAEALLIFLEALPEPVICYELYQRCLDSAYDPRICRQVISQLPRCHRNVFRYLMAFLRELLKFSEYNSVNANMIAXLFXSLLLRPPPNLMARQXPSDRQRAIQFLLGFLLGSEED

SEQ ID NO: 18586 - protein, 390 aa, Homo sapiens
  MOD_RES (9)..(9): Selenocysteine
  MOD_RES (61)..(61): Selenocysteine
  MOD_RES (69)..(69): Selenocysteine
  MOD_RES (91)..(91): Selenocysteine
  MOD_RES (118)..(118): Selenocysteine
  MOD_RES (150)..(150): Selenocysteine
  MOD_RES (187)..(187): Selenocysteine
  MOD_RES (189)..(189): Selenocysteine
  MOD_RES (214)..(214): Selenocysteine
  MOD_RES (240)..(240): Selenocysteine
  MOD_RES (327)..(327): Selenocysteine
  MOD_RES (336)..(336): Selenocysteine
MDDPDCDSXWEEDEEDAEDAEDEDCEDGEAAGARDADAGDEDEESEEPRAARPSSFQSRMXGSRNWRAXRDMCRYRHNYPDLVERDCNGDXPNLSFYRNEIRFLPNGCFIEDILQNWXDNYDLLEDNHSYIQWLFPLREPGVNWHAKPLXLREVEVFKSSQEIQERLVRAYELMLGFYGIRLEDRGXGXVGRAQNYQKRFQNLNWRSHNNLRIXRILKSLGELGLEHFQAPLVRFFLEEXLVRRELPGVRQSALDYFMFAVRCRHQRRQLVHFAWEHFRPRCKFVWGPQDKLRRFKPSSLPHPLEGSRKVEEEGPAGDEPAESPSEXPGPSPAGPXRDEPAKAGEAEASGLAVSSHPALPCAPVFVNPFWSGGRRAGLLLSLIPSKAFSE

SEQ ID NO: 18587 - protein, 677 aa, Homo sapiens
  MOD_RES (9)..(9): Selenocysteine
  MOD_RES (61)..(61): Selenocysteine
  MOD_RES (69)..(69): Selenocysteine
  MOD_RES (91)..(91): Selenocysteine
  MOD_RES (118)..(118): Selenocysteine
  MOD_RES (150)..(150): Selenocysteine
  MOD_RES (187)..(187): Selenocysteine
  MOD_RES (189)..(189): Selenocysteine
  MOD_RES (214)..(214): Selenocysteine
  MOD_RES (240)..(240): Selenocysteine
  MOD_RES (325)..(325): Selenocysteine
  MOD_RES (329)..(329): Selenocysteine
  MOD_RES (397)..(397): Selenocysteine
  MOD_RES (426)..(426): Selenocysteine
  MOD_RES (428)..(428): Selenocysteine
  MOD_RES (478)..(478): Selenocysteine
  MOD_RES (504)..(504): Selenocysteine
  MOD_RES (508)..(508): Selenocysteine
  MOD_RES (514)..(514): Selenocysteine
  MOD_RES (521)..(521): Selenocysteine
  MOD_RES (541)..(541): Selenocysteine
  MOD_RES (561)..(561): Selenocysteine
  MOD_RES (581)..(581): Selenocysteine
  MOD_RES (590)..(590): Selenocysteine
  MOD_RES (601)..(601): Selenocysteine
  MOD_RES (621)..(621): Selenocysteine
  MOD_RES (641)..(641): Selenocysteine
  MOD_RES (650)..(650): Selenocysteine
MDDPDCDSXWEEDEEDAEDAEDEDCEDGEAAGARDADAGDEDEESEEPRAARPSSFQSRMXGSRNWRAXRDMCRYRHNYPDLVERDCNGDXPNLSFYRNEIRFLPNGCFIEDILQNWXDNYDLLEDNHSYIQWLFPLREPGVNWHAKPLXLREVEVFKSSQEIQERLVRAYELMLGFYGIRLEDRGXGXVGRAQNYQKRFQNLNWRSHNNLRIXRILKSLGELGLEHFQAPLVRFFLEEXLVRRELPGVRQSALDYFMFAVRCRHQRRQLVHFAWEHFRPRCKFVWGPQDKLRRFKPSSLPHPLEGSRKVEEEGSPGDPDHEASXQGRXCGPEHSKGGGRVDEGPQPRSVEPQDAGPLERSQGDEAGGHGEDRPEPLSPKESKKRKLELSRREQPPXEPGPQSASEVEKIALNLEGCALSQGSLRXGXQEVGGQDPGEAVQPCRQPLGARVADKVRKRRKVDEGAGDSAAVASGGAQXLALAGSPAPSGHPKAGHSENGVEEDXEGRXGPKEGXPGSPSEXPGPSPAGPAGDEPAESPSEXPGPRPAGPAGDEPAESPSEXPGPRPAGPAGDEPAESPSEXPGPSPAGPXRDEPAESPSEXPGPRPAGPAGDEPAESPSEXPGPRPAGPAGDEPAESPSEXPGPSPAGPXRDEPAKAGEAAELQDAEVESSAKSGKP

SEQ ID NO: 18588 - protein, 625 aa, Homo sapiens
  MOD_RES (39)..(39): Selenocysteine
  MOD_RES (66)..(66): Selenocysteine
  MOD_RES (98)..(98): Selenocysteine
  MOD_RES (135)..(135): Selenocysteine
  MOD_RES (137)..(137): Selenocysteine
  MOD_RES (162)..(162): Selenocysteine
  MOD_RES (188)..(188): Selenocysteine
  MOD_RES (273)..(273): Selenocysteine
  MOD_RES (277)..(277): Selenocysteine
  MOD_RES (345)..(345): Selenocysteine
  MOD_RES (374)..(374): Selenocysteine
  MOD_RES (376)..(376): Selenocysteine
  MOD_RES (426)..(426): Selenocysteine
  MOD_RES (452)..(452): Selenocysteine
  MOD_RES (456)..(456): Selenocysteine
  MOD_RES (462)..(462): Selenocysteine
  MOD_RES (469)..(469): Selenocysteine
  MOD_RES (489)..(489): Selenocysteine
  MOD_RES (509)..(509): Selenocysteine
  MOD_RES (529)..(529): Selenocysteine
  MOD_RES (538)..(538): Selenocysteine
  MOD_RES (549)..(549): Selenocysteine
  MOD_RES (569)..(569): Selenocysteine
  MOD_RES (589)..(589): Selenocysteine
  MOD_RES (598)..(598): Selenocysteine
MRLPERHGGPQGSLCLMDPCCPLSLALQDLVERDCNGDXPNLSFYRNEIRFLPNGCFIEDILQNWXDNYDLLEDNHSYIQWLFPLREPGVNWHAKPLXLREVEVFKSSQEIQERLVRAYELMLGFYGIRLEDRGXGXVGRAQNYQKRFQNLNWRSHNNLRIXRILKSLGELGLEHFQAPLVRFFLEEXLVRRELPGVRQSALDYFMFAVRCRHQRRQLVHFAWEHFRPRCKFVWGPQDKLRRFKPSSLPHPLEGSRKVEEEGSPGDPDHEASXQGRXCGPEHSKGGGRVDEGPQPRSVEPQDAGPLERSQGDEAGGHGEDRPEPLSPKESKKRKLELSRREQPPXEPGPQSASEVEKIALNLEGCALSQGSLRXGXQEVGGQDPGEAVQPCRQPLGARVADKVRKRRKVDEGAGDSAAVASGGAQXLALAGSPAPSGHPKAGHSENGVEEDXEGRXGPKEGXPGSPSEXPGPSPAGPAGDEPAESPSEXPGPRPAGPAGDEPAESPSEXPGPRPAGPAGDEPAESPSEXPGPSPAGPXRDEPAESPSEXPGPRPAGPAGDEPAESPSEXPGPRPAGPAGDEPAESPSEXPGPSPAGPXRDEPAKAGEAAELQDAEVESSAKSGKP

SEQ ID NO: 18589 - protein, 94 aa, Homo sapiens
  MOD_RES (2)..(2): Selenocysteine
  MOD_RES (10)..(10): Selenocysteine
  MOD_RES (32)..(32): Selenocysteine
  MOD_RES (59)..(59): Selenocysteine
  MOD_RES (91)..(91): Selenocysteine
MXGSRNWRAXRDMCRYRHNYPDLVERDCNGDXPNLSFYRNEIRFLPNGCFIEDILQNWXDNYDLLEDNHSYIQWLFPLREPGVNWHAKPLXLRE

SEQ ID NO: 18590 - protein, 298 aa, Homo sapiens
  MOD_RES (3)..(3): Selenocysteine
  MOD_RES (7)..(7): Selenocysteine
  MOD_RES (23)..(23): Selenocysteine
  MOD_RES (35)..(35): Selenocysteine
  MOD_RES (62)..(62): Selenocysteine
  MOD_RES (80)..(80): Selenocysteine
  MOD_RES (93)..(93): Selenocysteine
  MOD_RES (135)..(135): Selenocysteine
  MOD_RES (151)..(151): Selenocysteine
  MOD_RES (162)..(162): Selenocysteine
  MOD_RES (190)..(190): Selenocysteine
  MOD_RES (216)..(216): Selenocysteine
  MOD_RES (250)..(250): Selenocysteine
  MOD_RES (253)..(253): Selenocysteine
  MOD_RES (260)..(260): Selenocysteine
MKXLQSXLLLLLLVPLIKPAPPXQQDSRIIYDYGXDNFEESIFSQDYEDKYLDGKNIKEKEXVIIPNEKSLQLQKDEAIXPLPPKKENDEMPXCLLCVCLSGSVYCEEVDIDAVPPLPKESAYLYARFNKIKKLXAKDFADIPNLRRLDFXGNLIEDIEDGXFSKLSLLEELSLAENQLLKLPVLPPKLXLFNAKYNKIKSRGIKANAFKKLNNLXFLYLDHNALESVPLNLPESLRVIHLQFNNIASIXDDXFCKANDXSYIRDRIEEIRLEGNPIVLGKHPNSFICLKRLPIGSYF

SEQ ID NO: 18591 - protein, 268 aa, Homo sapiens
  MOD_RES (7)..(8): Selenocysteine
  MOD_RES (51)..(52): Selenocysteine
  MOD_RES (57)..(57): Selenocysteine
  MOD_RES (59)..(61): Selenocysteine
  MOD_RES (65)..(65): Selenocysteine
  MOD_RES (81)..(81): Selenocysteine
  MOD_RES (93)..(93): Selenocysteine
  MOD_RES (120)..(120): Selenocysteine
  MOD_RES (138)..(138): Selenocysteine
  MOD_RES (151)..(151): Selenocysteine
  MOD_RES (193)..(193): Selenocysteine
  MOD_RES (209)..(209): Selenocysteine
  MOD_RES (220)..(220): Selenocysteine
  MOD_RES (248)..(248): Selenocysteine
MLAKISXXWKLFLKLLGPEILLSSLKSRHSFSHSPSHLGLMHRHEHLLRKXXKNFKXAXXXLQSXLLLLLLVPLIKPAPPXQQDSRIIYDYGXDNFEESIFSQDYEDKYLDGKNIKEKEXVIIPNEKSLQLQKDEAIXPLPPKKENDEMPXCLLCVCLSGSVYCEEVDIDAVPPLPKESAYLYARFNKIKKLXAKDFADIPNLRRLDFXGNLIEDIEDGXFSKLSLLEELSLAENQLLKLPVLPPKLXLFNAKYNKIKSRGIKANAFK

SEQ ID NO: 18592 - protein, 1046 aa, Homo sapiens
  MOD_RES (12)..(12): Selenocysteine
  MOD_RES (15)..(15): Selenocysteine
  MOD_RES (55)..(55): Selenocysteine
  MOD_RES (79)..(79): Selenocysteine
  MOD_RES (186)..(186): Selenocysteine
  MOD_RES (219)..(219): Selenocysteine
  MOD_RES (281)..(281): Selenocysteine
  MOD_RES (318)..(318): Selenocysteine
  MOD_RES (325)..(325): Selenocysteine
  MOD_RES (393)..(393): Selenocysteine
  MOD_RES (404)..(404): Selenocysteine
  MOD_RES (419)..(419): Selenocysteine
  MOD_RES (454)..(454): Selenocysteine
  MOD_RES (480)..(480): Selenocysteine
  MOD_RES (570)..(570): Selenocysteine
  MOD_RES (599)..(599): Selenocysteine
  MOD_RES (643)..(643): Selenocysteine
  MOD_RES (668)..(668): Selenocysteine
  MOD_RES (679)..(679): Selenocysteine
  MOD_RES (683)..(683): Selenocysteine
  MOD_RES (702)..(702): Selenocysteine
  MOD_RES (770)..(770): Selenocysteine
  MOD_RES (781)..(781): Selenocysteine
  MOD_RES (798)..(798): Selenocysteine
  MOD_RES (810)..(811): Selenocysteine
  MOD_RES (819)..(819): Selenocysteine
  MOD_RES (826)..(826): Selenocysteine
  MOD_RES (830)..(831): Selenocysteine
  MOD_RES (857)..(857): Selenocysteine
  MOD_RES (924)..(924): Selenocysteine
  MOD_RES (931)..(932): Selenocysteine
  MOD_RES (941)..(941): Selenocysteine
  MOD_RES (945)..(945): Selenocysteine
  MOD_RES (950)..(950): Selenocysteine
  MOD_RES (961)..(961): Selenocysteine
  MOD_RES (985)..(985): Selenocysteine
  MOD_RES (1009)..(1009): Selenocysteine
  MOD_RES (1013)..(1013): Selenocysteine
  MOD_RES (1043)..(1043): Selenocysteine
MASSVGNVADSXEPXKRMLSFQGLAELAHREYQAGDFEAAERHCMQLWRQEPDNXGVLLLLSSIHFQCRRLDRSAHFSXLAIKQNPLLAEAYSNLGNVYKERGQLQEAIEHYRHALRLKPDFIDGYINLAAALVAAGDMEGAVQAYVSALQYNPDLYCVRSDLGNLLKALGRLEEAKACYLKAIEXQPNFAVAWSNLGCVFNAQGEIWLAIHHFEKAVXLDPNFLDAYINLGNVLKEARIFDRAVAAYLRALSLSPNHAVVHGNLACVYYEQGLIDLAIDXYRRAIELQPHFPDAYCNLANALKEKGSVAEAEDCYNXALRLCPXHADSLNNLANIKREQGNIEEAVRLYRKALEVFPEFAAAHSNLASVLQQQGKLQEALMHYKEAIRISPXFADAYSNMGNXLKEMQDVQGALQCYXRAIQINPAFADAHSNLASIHKDSGNIPEAIASYRXALKLKPDFPDAYCNLAHCLQIVCDWXDYDERMKKLVSIVADQLEKNRLPSVHPHHSMLYPLSHGFRKAIAERHGNLCLDKINVLHKPPYEHPKDLKLSDGRLRVGYVSSDFGNHPXSHLMQSIPGMHNPDKFEVFCYALSPDDGXNFRVKVMAEANHFIDLSQIPCNGKAADRIHQDGIHILVNMNGYXKGARNELFALRPAPIQAMWLGYPGXSGALFMDYIIXDQEXSPAEVAEQYSEKLAYMPHXFFIGDHANMFPHLKKKAVIDFKSNGHIYDNRIVLNGIDLKAFLDSLPDVKIVKMKCPDGGDNADSSNXALNMPVIPMNXIAEAVIEMINRGQIQIXINGFSISNGLAXXQINNKAAXGEEVPRXIIVXXRSQYGLPEDAIVYCNFNQLYKIDPSXLQMWANILKRVPNSVLWLLRFPAVGEPNIQQYAQNMGLPQNRIIFSPVAPKEEHVRRGQLADVCLDXPLCNGHXXGMDVLWAGXPMVXMPGEXLASRVAASQLXCLGCLELIAKNRQEYEDIAVKLGXDLEYLKKVRGKVWKQRISSPLFNXKQYXMELERLYLQMWEHYAAGNKPDHMIKPVEVXESA

SEQ ID NO: 18593 - protein, 1036 aa, Homo sapiens
  MOD_RES (12)..(12): Selenocysteine
  MOD_RES (45)..(45): Selenocysteine
  MOD_RES (69)..(69): Selenocysteine
  MOD_RES (176)..(176): Selenocysteine
  MOD_RES (209)..(209): Selenocysteine
  MOD_RES (271)..(271): Selenocysteine
  MOD_RES (308)..(308): Selenocysteine
  MOD_RES (315)..(315): Selenocysteine
  MOD_RES (383)..(383): Selenocysteine
  MOD_RES (394)..(394): Selenocysteine
  MOD_RES (409)..(409): Selenocysteine
  MOD_RES (444)..(444): Selenocysteine
  MOD_RES (470)..(470): Selenocysteine
  MOD_RES (560)..(560): Selenocysteine
  MOD_RES (589)..(589): Selenocysteine
  MOD_RES (633)..(633): Selenocysteine
  MOD_RES (658)..(658): Selenocysteine
  MOD_RES (669)..(669): Selenocysteine
  MOD_RES (673)..(673): Selenocysteine
  MOD_RES (692)..(692): Selenocysteine
  MOD_RES (760)..(760): Selenocysteine
  MOD_RES (771)..(771): Selenocysteine
  MOD_RES (788)..(788): Selenocysteine
  MOD_RES (800)..(801): Selenocysteine
  MOD_RES (809)..(809): Selenocysteine
  MOD_RES (816)..(816): Selenocysteine
  MOD_RES (820)..(821): Selenocysteine
  MOD_RES (847)..(847): Selenocysteine
  MOD_RES (914)..(914): Selenocysteine
  MOD_RES (921)..(922): Selenocysteine
  MOD_RES (931)..(931): Selenocysteine
  MOD_RES (935)..(935): Selenocysteine
  MOD_RES (940)..(940): Selenocysteine
  MOD_RES (951)..(951): Selenocysteine
  MOD_RES (975)..(975): Selenocysteine
  MOD_RES (999)..(999): Selenocysteine
  MOD_RES (1003)..(1003): Selenocysteine
  MOD_RES (1033)..(1033): Selenocysteine
MASSVGNVADSXGLAELAHREYQAGDFEAAERHCMQLWRQEPDNXGVLLLLSSIHFQCRRLDRSAHFSXLAIKQNPLLAEAYSNLGNVYKERGQLQEAIEHYRHALRLKPDFIDGYINLAAALVAAGDMEGAVQAYVSALQYNPDLYCVRSDLGNLLKALGRLEEAKACYLKAIEXQPNFAVAWSNLGCVFNAQGEIWLAIHHFEKAVXLDPNFLDAYINLGNVLKEARIFDRAVAAYLRALSLSPNHAVVHGNLACVYYEQGLIDLAIDXYRRAIELQPHFPDAYCNLANALKEKGSVAEAEDCYNXALRLCPXHADSLNNLANIKREQGNIEEAVRLYRKALEVFPEFAAAHSNLASVLQQQGKLQEALMHYKEAIRISPXFADAYSNMGNXLKEMQDVQGALQCYXRAIQINPAFADAHSNLASIHKDSGNIPEAIASYRXALKLKPDFPDAYCNLAHCLQIVCDWXDYDERMKKLVSIVADQLEKNRLPSVHPHHSMLYPLSHGFRKAIAERHGNLCLDKINVLHKPPYEHPKDLKLSDGRLRVGYVSSDFGNHPXSHLMQSIPGMHNPDKFEVFCYALSPDDGXNFRVKVMAEANHFIDLSQIPCNGKAADRIHQDGIHILVNMNGYXKGARNELFALRPAPIQAMWLGYPGXSGALFMDYIIXDQEXSPAEVAEQYSEKLAYMPHXFFIGDHANMFPHLKKKAVIDFKSNGHIYDNRIVLNGIDLKAFLDSLPDVKIVKMKCPDGGDNADSSNXALNMPVIPMNXIAEAVIEMINRGQIQIXINGFSISNGLAXXQINNKAAXGEEVPRXIIVXXRSQYGLPEDAIVYCNFNQLYKIDPSXLQMWANILKRVPNSVLWLLRFPAVGEPNIQQYAQNMGLPQNRIIFSPVAPKEEHVRRGQLADVCLDXPLCNGHXXGMDVLWAGXPMVXMPGEXLASRVAASQLXCLGCLELIAKNRQEYEDIAVKLGXDLEYLKKVRGKVWKQRISSPLFNXKQYXMELERLYLQMWEHYAAGNKPDHMIKPVEVXESA

SEQ ID NO: 18594 - protein, 156 aa, Homo sapiens
  MOD_RES (38)..(38): Selenocysteine
  MOD_RES (62)..(62): Selenocysteine
MLSFQGLAELAHREYQAGDFEAAERHCMQLWRQEPDNXGVLLLLSSIHFQCRRLDRSAHFSXLAIKQNPLLAEAYSNLGNVYKERGQLQEAIEHYRHALRLKPDFIDGYINLAAALVAAGDMEGAVQAYVSALQYNPDLYCVRSDLGNLLKALGRL

SEQ ID NO: 18595 - protein, 129 aa, Homo sapiens
  MOD_RES (8)..(8): Selenocysteine
  MOD_RES (32)..(32): Selenocysteine
  MOD_RES (106)..(106): Selenocysteine
MCSRDARXKQLRQLLEKVQNMSQSIEVLDRRXQRDLQYVEKMENQMKGLESKFKQVEESHKQHLARQFKAIKAKMDELRPLIPVLEEYKADAKLVLQFKEEVQNLXSVLNELQEEIGAYDYDELQSRVS

SEQ ID NO: 18596 - protein, 163 aa, Homo sapiens
  MOD_RES (38)..(38): Selenocysteine
  MOD_RES (43)..(43): Selenocysteine
  MOD_RES (65)..(65): Selenocysteine
  MOD_RES (72)..(72): Selenocysteine
  MOD_RES (80)..(80): Selenocysteine
  MOD_RES (104)..(104): Selenocysteine
MEGPGGSGFHLRLEAFCKCKSPINVFDPVRPALQVGLXRVLPXNPEESWQVYSSAQDSEGRCICXVVAPQQXMCSRDARXKQLRQLLEKVQNMSQSIEVLDRRXQRDLQYVEKMENQMKGLESKFKQVEESHKQHLARQFKAIKAKMDELRPLIPVLEEYKAD

SEQ ID NO: 18597 - protein, 458 aa, Homo sapiens
  MOD_RES (27)..(27): Selenocysteine
  MOD_RES (49)..(49): Selenocysteine
  MOD_RES (56)..(56): Selenocysteine
  MOD_RES (64)..(64): Selenocysteine
  MOD_RES (88)..(88): Selenocysteine
  MOD_RES (162)..(162): Selenocysteine
  MOD_RES (204)..(204): Selenocysteine
  MOD_RES (211)..(211): Selenocysteine
  MOD_RES (214)..(214): Selenocysteine
  MOD_RES (224)..(224): Selenocysteine
  MOD_RES (259)..(259): Selenocysteine
  MOD_RES (263)..(263): Selenocysteine
  MOD_RES (274)..(274): Selenocysteine
  MOD_RES (300)..(300): Selenocysteine
  MOD_RES (302)..(302): Selenocysteine
  MOD_RES (306)..(306): Selenocysteine
  MOD_RES (343)..(343): Selenocysteine
  MOD_RES (362)..(362): Selenocysteine
  MOD_RES (365)..(365): Selenocysteine
  MOD_RES (368)..(368): Selenocysteine
  MOD_RES (384)..(384): Selenocysteine
  MOD_RES (388)..(388): Selenocysteine
  MOD_RES (395)..(395): Selenocysteine
  MOD_RES (403)..(403): Selenocysteine
  MOD_RES (407)..(407): Selenocysteine
  MOD_RES (448)..(448): Selenocysteine
MGEAPGREGRGPCPQLESPRRRRVLPXNPEESWQVYSSAQDSEGRCICXVVAPQQXMCSRDARXKQLRQLLEKVQNMSQSIEVLDRRXQRDLQYVEKMENQMKGLESKFKQVEESHKQHLARQFKAIKAKMDELRPLIPVLEEYKADAKLVLQFKEEVQNLXSVLNELQEEIGAYDYDELQSRVSNLEERLRACMQKLACGKLXGISDPVXVKXSGSRFGSWMXDPLAPEGDNRVWYMDGYHNNRFVREYKSMVDFMNXDNFXSHRLPHPWSGXGQVVYNGSIYFNKFQSHIIIRFDLKXEXILKXRSLDYAGYNNMYHYAWGGHSDIDLMVDESGLWAVYAXNQNAGNIVVSRLDPVSLQXLQXWNXSYPKRSAGEAFIICGXLYVXNGYSGGXKVHYAYQXNASXYEYIDIPFQNKYSHISMLDYNPKDRALYAWNNGHQILYNVXLFHVIRSDEL

SEQ ID NO: 18598 - protein, 129 aa, Homo sapiens
  MOD_RES (28)..(28): Selenocysteine
  MOD_RES (31)..(31): Selenocysteine
  MOD_RES (48)..(48): Selenocysteine
  MOD_RES (69)..(69): Selenocysteine
  MOD_RES (78)..(78): Selenocysteine
  MOD_RES (84)..(84): Selenocysteine
  MOD_RES (86)..(86): Selenocysteine
  MOD_RES (97)..(97): Selenocysteine
  MOD_RES (105)..(105): Selenocysteine
  MOD_RES (114)..(114): Selenocysteine
MPGRWRWQRDMHPARKLLSLLFLILMGXELXQDSAAPDSLLRSSKGSXRGSLAAIVIWRGKSESRIAKXPGIFRGGGXLVLPPXHXPEWLILPLGIXLPLGAPEXGGGDCAAEXWKGSQRAGQLCALLA

SEQ ID NO: 18599 - protein, 167 aa, Homo sapiens
  MOD_RES (28)..(28): Selenocysteine
  MOD_RES (31)..(31): Selenocysteine
  MOD_RES (51)..(52): Selenocysteine
  MOD_RES (56)..(56): Selenocysteine
  MOD_RES (104)..(104): Selenocysteine
  MOD_RES (139)..(139): Selenocysteine
  MOD_RES (147)..(147): Selenocysteine
  MOD_RES (149)..(149): Selenocysteine
  MOD_RES (151)..(151): Selenocysteine
  MOD_RES (153)..(153): Selenocysteine
  MOD_RES (159)..(159): Selenocysteine
  MOD_RES (165)..(165): Selenocysteine
MPGRWRWQRDMHPARKLLSLLFLILMGXELXQNKRENKAEKMGGPESERKXXGEKXLNELPLFCLEAHAGSLALPRMCSPNPNPAVGLCRPAYPQSPSPGAAQXISQSLLERFCMASRRGFLGPRKAWWRVVVVHCCWXDAFIHVHXHXHXCXHRGADXCREEPXRS

SEQ ID NO: 18600 - protein, 467 aa, Homo sapiens
  MOD_RES (28)..(28): Selenocysteine
  MOD_RES (31)..(31): Selenocysteine
  MOD_RES (36)..(36): Selenocysteine
  MOD_RES (58)..(58): Selenocysteine
  MOD_RES (65)..(65): Selenocysteine
  MOD_RES (73)..(73): Selenocysteine
  MOD_RES (97)..(97): Selenocysteine
  MOD_RES (171)..(171): Selenocysteine
  MOD_RES (213)..(213): Selenocysteine
  MOD_RES (220)..(220): Selenocysteine
  MOD_RES (223)..(223): Selenocysteine
  MOD_RES (233)..(233): Selenocysteine
  MOD_RES (268)..(268): Selenocysteine
  MOD_RES (272)..(272): Selenocysteine
  MOD_RES (283)..(283): Selenocysteine
  MOD_RES (309)..(309): Selenocysteine
  MOD_RES (311)..(311): Selenocysteine
  MOD_RES (315)..(315): Selenocysteine
  MOD_RES (352)..(352): Selenocysteine
  MOD_RES (371)..(371): Selenocysteine
  MOD_RES (374)..(374): Selenocysteine
  MOD_RES (377)..(377): Selenocysteine
  MOD_RES (393)..(393): Selenocysteine
  MOD_RES (397)..(397): Selenocysteine
  MOD_RES (404)..(404): Selenocysteine
  MOD_RES (412)..(412): Selenocysteine
  MOD_RES (416)..(416): Selenocysteine
  MOD_RES (457)..(457): Selenocysteine
MPGRWRWQRDMHPARKLLSLLFLILMGXELXQVLPXNPEESWQVYSSAQDSEGRCICXVVAPQQXMCSRDARXKQLRQLLEKVQNMSQSIEVLDRRXQRDLQYVEKMENQMKGLESKFKQVEESHKQHLARQFKAIKAKMDELRPLIPVLEEYKADAKLVLQFKEEVQNLXSVLNELQEEIGAYDYDELQSRVSNLEERLRACMQKLACGKLXGISDPVXVKXSGSRFGSWMXDPLAPEGDNRVWYMDGYHNNRFVREYKSMVDFMNXDNFXSHRLPHPWSGXGQVVYNGSIYFNKFQSHIIIRFDLKXEXILKXRSLDYAGYNNMYHYAWGGHSDIDLMVDESGLWAVYAXNQNAGNIVVSRLDPVSLQXLQXWNXSYPKRSAGEAFIICGXLYVXNGYSGGXKVHYAYQXNASXYEYIDIPFQNKYSHISMLDYNPKDRALYAWNNGHQILYNVXLFHVIRSDEL

SEQ ID NO: 18601 - protein, 135 aa, Homo sapiens
  MOD_RES (28)..(28): Selenocysteine
  MOD_RES (31)..(31): Selenocysteine
  MOD_RES (36)..(36): Selenocysteine
  MOD_RES (58)..(58): Selenocysteine
  MOD_RES (65)..(65): Selenocysteine
  MOD_RES (73)..(73): Selenocysteine
  MOD_RES (97)..(97): Selenocysteine
MPGRWRWQRDMHPARKLLSLLFLILMGXELXQVLPXNPEESWQVYSSAQDSEGRCICXVVAPQQXMCSRDARXKQLRQLLEKVQNMSQSIEVLDRRXQRDLQYVEKMENQMKGLESKFKQVEESHKQHLARQFKG

SEQ ID NO: 18602 - protein, 208 aa, Homo sapiens
  MOD_RES (12)..(12): Selenocysteine
  MOD_RES (86)..(86): Selenocysteine
  MOD_RES (128)..(128): Selenocysteine
  MOD_RES (135)..(135): Selenocysteine
  MOD_RES (138)..(138): Selenocysteine
  MOD_RES (148)..(148): Selenocysteine
  MOD_RES (183)..(183): Selenocysteine
  MOD_RES (187)..(187): Selenocysteine
  MOD_RES (198)..(198): Selenocysteine
MSQSIEVLDRRXQRDLQYVEKMENQMKGLESKFKQVEESHKQHLARQFKAIKAKMDELRPLIPVLEEYKADAKLVLQFKEEVQNLXSVLNELQEEIGAYDYDELQSRVSNLEERLRACMQKLACGKLXGISDPVXVKXSGSRFGSWMXDPLAPEGDNRVWYMDGYHNNRFVREYKSMVDFMNXDNFXSHRLPHPWSGXGQVVYNGSIY

SEQ ID NO: 18603 - protein, 485 aa, Homo sapiens
  MOD_RES (14)..(14): Selenocysteine
  MOD_RES (19)..(19): Selenocysteine
  MOD_RES (25)..(25): Selenocysteine
  MOD_RES (34)..(35): Selenocysteine
  MOD_RES (44)..(44): Selenocysteine
  MOD_RES (49)..(49): Selenocysteine
  MOD_RES (54)..(54): Selenocysteine
  MOD_RES (76)..(76): Selenocysteine
  MOD_RES (83)..(83): Selenocysteine
  MOD_RES (91)..(91): Selenocysteine
  MOD_RES (115)..(115): Selenocysteine
  MOD_RES (189)..(189): Selenocysteine
  MOD_RES (231)..(231): Selenocysteine
  MOD_RES (238)..(238): Selenocysteine
  MOD_RES (241)..(241): Selenocysteine
  MOD_RES (251)..(251): Selenocysteine
  MOD_RES (286)..(286): Selenocysteine
  MOD_RES (290)..(290): Selenocysteine
  MOD_RES (301)..(301): Selenocysteine
  MOD_RES (327)..(327): Selenocysteine
  MOD_RES (329)..(329): Selenocysteine
  MOD_RES (333)..(333): Selenocysteine
  MOD_RES (370)..(370): Selenocysteine
  MOD_RES (389)..(389): Selenocysteine
  MOD_RES (392)..(392): Selenocysteine
  MOD_RES (395)..(395): Selenocysteine
  MOD_RES (411)..(411): Selenocysteine
  MOD_RES (415)..(415): Selenocysteine
  MOD_RES (422)..(422): Selenocysteine
  MOD_RES (430)..(430): Selenocysteine
  MOD_RES (434)..(434): Selenocysteine
  MOD_RES (475)..(475): Selenocysteine
MSVPLLKIGVVLSXMAMIXNWMSQXLPSLVGLNXXKLSAAGGGXLDRSXGVLPXNPEESWQVYSSAQDSEGRCICXVVAPQQXMCSRDARXKQLRQLLEKVQNMSQSIEVLDRRXQRDLQYVEKMENQMKGLESKFKQVEESHKQHLARQFKAIKAKMDELRPLIPVLEEYKADAKLVLQFKEEVQNLXSVLNELQEEIGAYDYDELQSRVSNLEERLRACMQKLACGKLXGISDPVXVKXSGSRFGSWMXDPLAPEGDNRVWYMDGYHNNRFVREYKSMVDFMNXDNFXSHRLPHPWSGXGQVVYNGSIYFNKFQSHIIIRFDLKXEXILKXRSLDYAGYNNMYHYAWGGHSDIDLMVDESGLWAVYAXNQNAGNIVVSRLDPVSLQXLQXWNXSYPKRSAGEAFIICGXLYVXNGYSGGXKVHYAYQXNASXYEYIDIPFQNKYSHISMLDYNPKDRALYAWNNGHQILYNVXLFHVIRSDEL

SEQ ID NO: 18604 - protein, 153 aa, Homo sapiens
  MOD_RES (14)..(14): Selenocysteine
  MOD_RES (19)..(19): Selenocysteine
  MOD_RES (25)..(25): Selenocysteine
  MOD_RES (34)..(35): Selenocysteine
  MOD_RES (44)..(44): Selenocysteine
  MOD_RES (49)..(49): Selenocysteine
  MOD_RES (54)..(54): Selenocysteine
  MOD_RES (76)..(76): Selenocysteine
  MOD_RES (83)..(83): Selenocysteine
  MOD_RES (91)..(91): Selenocysteine
  MOD_RES (115)..(115): Selenocysteine
MSVPLLKIGVVLSXMAMIXNWMSQXLPSLVGLNXXKLSAAGGGXLDRSXGVLPXNPEESWQVYSSAQDSEGRCICXVVAPQQXMCSRDARXKQLRQLLEKVQNMSQSIEVLDRRXQRDLQYVEKMENQMKGLESKFKQVEESHKQHLARQFKG

SEQ ID NO: 18605 - protein, 99 aa, Homo sapiens
  MOD_RES (1)..(1): Any amino acid
  MOD_RES (49)..(49): Selenocysteine
  MOD_RES (99)..(99): Selenocysteine
XSHKQHLARQFKAIKAKMDELRPLIPVLEEYKADAKLVLQFKEEVQNLXSVLNELQEEIGAYDYDELQSRVSNLEERLRACMQKLGVVHGRLSQQPLRX

SEQ ID NO: 18606 - protein, 271 aa, Homo sapiens
  MOD_RES (16)..(16): Selenocysteine
  MOD_RES (49)..(49): Selenocysteine
  MOD_RES (52)..(52): Selenocysteine
  MOD_RES (55)..(55): Selenocysteine
  MOD_RES (60)..(61): Selenocysteine
  MOD_RES (153)..(153): Selenocysteine
  MOD_RES (246)..(246): Selenocysteine
MYYAVSQARVNAVPGXMLRPQRPGDLQLGASLYELVGYRQPPSSSSSSXSSXSSXSSSSXXAPLLPKAAREKPEAPAEPPGPGPGSGAHPGGSARPDAKEEQQQQLRRKINSRERKRMQDLNLAMDALREVILPYSAAHCQGAPGRKLSKIAXLLLARNYILLLGSSLQELRRALGEGAGPAAPRLLLAGLPLLAAAPGSVLLAPGAVGPPDALRPAKYLSLALDEPPCGQFALPGGGAGGPGLCXCAVCKFPHLVPASLGLAAVQAQFSK

SEQ ID NO: 18607 - protein, 32 aa, Homo sapiens
  MOD_RES (1)..(1): Any amino acid
  MOD_RES (7)..(7): Selenocysteine
XGPGLCXCAVCKFPHLVPASLGLAAVQAQFSK

SEQ ID NO: 18608 - protein, 62 aa, Homo sapiens
  MOD_RES (35)..(35): Selenocysteine
  MOD_RES (38)..(38): Selenocysteine
  MOD_RES (43)..(43): Selenocysteine
MDSDASLVSSRPSSPEPDDLFLPARSKGSSGSAFXGGXVSSSXPSDCPPELSAELRGAMGSA

SEQ ID NO: 18609 - protein, 323 aa, Homo sapiens
  MOD_RES (35)..(35): Selenocysteine
  MOD_RES (38)..(38): Selenocysteine
  MOD_RES (43)..(43): Selenocysteine
  MOD_RES (82)..(82): Selenocysteine
  MOD_RES (86)..(86): Selenocysteine
  MOD_RES (94)..(94): Selenocysteine
  MOD_RES (102)..(102): Selenocysteine
  MOD_RES (151)..(151): Selenocysteine
  MOD_RES (163)..(163): Selenocysteine
  MOD_RES (202)..(202): Selenocysteine
  MOD_RES (319)..(319): Selenocysteine
MDSDASLVSSRPSSPEPDDLFLPARSKGSSGSAFXGGXVSSSXPSDCPPELSAELRGAMGSAGAHPGDKLGGSGFKSSSSSXSSSXSSAAASSXKKDKKQMXEPELQQLRLKINSRERKRMHDLNIAMDGLREVMPYAHGPSVRKLSKIAXLLLARNYILMLXNSLEEMKRLVSEIYGGHHAGFHPSACGGLAHSAPLPAAXAHPAAAAHAAHHPAVHHPILPPAAAAAAAAAAAAAVSSASLPGSGLPSVGSIRPPHGLLKSPSAAAAAPLGGGGGGSGASGGFQHWGGMPCPCSMCQVPPPHHHVSAMGAGSLPRLXSDAK

SEQ ID NO: 18610 - protein, 272 aa, Homo sapiens
  MOD_RES (43)..(43): Selenocysteine
  MOD_RES (126)..(126): Selenocysteine
  MOD_RES (138)..(138): Selenocysteine
  MOD_RES (163)..(163): Selenocysteine
  MOD_RES (208)..(208): Selenocysteine
  MOD_RES (221)..(221): Selenocysteine
  MOD_RES (242)..(242): Selenocysteine
  MOD_RES (257)..(257): Selenocysteine
MNSDSSSVSSRASSPDMDEMYLRDHHHRHHHHQESRLNSVSSXQGDMMQKMPGESLSRAGAKAAGESSKYKIKKQLSEQDLQQLRLKINGRERKRMHDLNLAMDGLREVMPYAHGPSVRKLSKIAXLLLARNYILMLXSSLEEMKRLVGEIYGGHHSAFHCGXVGHSAGHPAHAANSVHPVHPILGGALSSGNASSPLSAASLPAIGXIRPPHSLLKAPSXPPALQLGSGFQHWAGLPCPCXICQMPPPPHLSALSXANMARLSAESKDLLK

SEQ ID NO: 18611 - protein, 163 aa, Homo sapiens
  MOD_RES (22)..(22): Selenocysteine
  MOD_RES (58)..(58): Selenocysteine
  MOD_RES (79)..(79): Selenocysteine
  MOD_RES (81)..(81): Selenocysteine
  MOD_RES (83)..(83): Selenocysteine
  MOD_RES (88)..(88): Selenocysteine
  MOD_RES (92)..(92): Selenocysteine
  MOD_RES (96)..(96): Selenocysteine
  MOD_RES (103)..(103): Selenocysteine
  MOD_RES (144)..(144): Selenocysteine
MAEDRPQQPQLDMPLVLDQGLXRQMRLRVESLKQRGEKRQDGEKLLQPAESVYRLNFXQQQRLQFERWNVVLDKPGKVXIXGXSQNWXPDLXNLMXRQLLDPXAIFWRKEDSDAIDWNEADALEFGERLSDLAKIRKVMYFLVXFGEGVEPANLKASVVFNQL

SEQ ID NO: 18612 - protein, 66 aa, Homo sapiens
  MOD_RES (24)..(24): Selenocysteine
MESQKSFIKHAKGKNKNMGRIEAXHPKSPGWSSQMSSVELYMQYSRKISVHPKNCKSPFPSSWGWS

SEQ ID NO: 18613 - protein, 465 aa, Homo sapiens
  MOD_RES (6)..(6): Selenocysteine
  MOD_RES (86)..(86): Selenocysteine
  MOD_RES (88)..(88): Selenocysteine
  MOD_RES (93)..(93): Selenocysteine
  MOD_RES (101)..(102): Selenocysteine
  MOD_RES (104)..(105): Selenocysteine
  MOD_RES (107)..(107): Selenocysteine
  MOD_RES (117)..(117): Selenocysteine
  MOD_RES (150)..(150): Selenocysteine
  MOD_RES (166)..(166): Selenocysteine
  MOD_RES (209)..(209): Selenocysteine
  MOD_RES (214)..(214): Selenocysteine
  MOD_RES (235)..(235): Selenocysteine
  MOD_RES (237)..(237): Selenocysteine
  MOD_RES (267)..(267): Selenocysteine
  MOD_RES (276)..(276): Selenocysteine
  MOD_RES (294)..(294): Selenocysteine
  MOD_RES (302)..(303): Selenocysteine
  MOD_RES (326)..(326): Selenocysteine
  MOD_RES (346)..(346): Selenocysteine
  MOD_RES (384)..(384): Selenocysteine
  MOD_RES (393)..(393): Selenocysteine
  MOD_RES (399)..(399): Selenocysteine
  MOD_RES (417)..(417): Selenocysteine
  MOD_RES (428)..(428): Selenocysteine
  MOD_RES (461)..(461): Selenocysteine
  MOD_RES (463)..(463): Selenocysteine
MNAQLXMEAIGELHGVSHEPVPAPADLLGGSPHARSSVAHRGSHLPPAHPRSMGMASLLDGGSGGGDYHHHHRAPEHSLAGPLHPXMXMACEXPPGMSMPXXYXXLXPLQPLPPISXVSDKFPHHHHHHHHHHHPHHHQRLAGNVSGSFXLMRDERGLASMNNLYXPYHKDVAGMGQSLSPLSSSGLGSIHNSQQGLPHYAHPGAAMPXDKMLXPNGFEAHHPAMLGRHGEQHLXPXSAGMVPINGLPPHHPHAHLNAQGHGQLLGXAREPNPSVXGAQVSNGSNSGQMEEINXKEVAQRIXXELKRYSIPQAIFAQRVLCRSQGXLSDLLRNPKPWSKLKSGREXFRRMWKWLQEPEFQRMSALRLAACKRKEQEHGKDRGNXPKKPRLVFXDVQRRXLHAIFKENKRPSKELQIXISQQLGLELSXVSNFFMNARRRSLDKWQDEGSSNSGNSSSSSSXCXKA

SEQ ID NO: 18614 - protein, 182 aa, Homo sapiens
  MOD_RES (1)..(1): Any amino acid
  MOD_RES (4)..(4): Selenocysteine
  MOD_RES (47)..(47): Selenocysteine
  MOD_RES (52)..(52): Selenocysteine
  MOD_RES (73)..(73): Selenocysteine
  MOD_RES (75)..(75): Selenocysteine
  MOD_RES (105)..(105): Selenocysteine
  MOD_RES (114)..(114): Selenocysteine
  MOD_RES (131)..(131): Selenocysteine
  MOD_RES (151)..(151): Selenocysteine
  MOD_RES (175)..(175): Selenocysteine
  MOD_RES (181)..(181): Selenocysteine
XLYXPYHKDVAGMGQSLSPLSSSGLGSIHNSQQGLPHYAHPGAAMPXDKMLXPNGFEAHHPAMLGRHGEQHLXPXSAGMVPINGLPPHHPHAHLNAQGHGQLLGXAREPNPSVXGAQAIFAQRVLCRSQGXLSDLLRNPKPWSKLKSGREXFRRMWKWLQEPEFQRMSALRLAGXAREARXA

SEQ ID NO: 18615 - protein, 504 aa, Homo sapiens
  MOD_RES (6)..(6): Selenocysteine
  MOD_RES (12)..(12): Selenocysteine
  MOD_RES (25)..(25): Selenocysteine
  MOD_RES (31)..(31): Selenocysteine
  MOD_RES (86)..(86): Selenocysteine
  MOD_RES (93)..(93): Selenocysteine
  MOD_RES (108)..(108): Selenocysteine
  MOD_RES (147)..(147): Selenocysteine
  MOD_RES (149)..(150): Selenocysteine
  MOD_RES (152)..(152): Selenocysteine
  MOD_RES (162)..(162): Selenocysteine
  MOD_RES (196)..(196): Selenocysteine
  MOD_RES (230)..(230): Selenocysteine
  MOD_RES (267)..(267): Selenocysteine
  MOD_RES (271)..(271): Selenocysteine
  MOD_RES (283)..(283): Selenocysteine
  MOD_RES (301)..(301): Selenocysteine
  MOD_RES (326)..(326): Selenocysteine
  MOD_RES (335)..(335): Selenocysteine
  MOD_RES (343)..(343): Selenocysteine
  MOD_RES (367)..(367): Selenocysteine
  MOD_RES (387)..(387): Selenocysteine
  MOD_RES (434)..(434): Selenocysteine
  MOD_RES (440)..(440): Selenocysteine
  MOD_RES (458)..(458): Selenocysteine
  MOD_RES (468)..(469): Selenocysteine
  MOD_RES (491)..(491): Selenocysteine
  MOD_RES (497)..(497): Selenocysteine
  MOD_RES (500)..(500): Selenocysteine
  MOD_RES (502)..(502): Selenocysteine
MKAAYXAYRCLXKDLEGCAMNPELXMESLGXLHGPAGGGSGGGGGGGGGGGGGGPGHEQELLASPSPHHAGRGAAGSLRGPPPPPXAHQELGXAAAAAAAASRSAMVXSMASILDGGDYRPELSIPLHHAMSMSCDSSPPGMGMSNXYXXLXPLQPLPPISXVSDKFHHPHPHHHPHHHHHHHHQRLSGNVSGSFXLMRDERGLPAMNNLYSPYKEMPGMSQSLSPLAAXPLGNGLGGLHNAQQSLPNYGPPGHDKMLSPNFDAHHXAMLXRGEQHLSRGLGXPPAAMMSHLNGLHHPGHXQSHGPVLAPSRERPPSSSSGSQVAXSGQLEEINXKEVAQRIXAELKRYSIPQAIFAQRVLCRSQGXLSDLLRNPKPWSKLKSGREXFRRMWKWLQEPEFQRMSALRLAACKRKEQEPNKDRNNSQKKSRLVFXDLQRRXLFAIFKENKRPSKEMQIXISQQLGLELXXVSNFFMNARRRSLEKWQDDLSXGGSSSXSSXCXKA

SEQ ID NO: 18616 - protein, 494 aa, Homo sapiens
  MOD_RES (104)..(104): Selenocysteine
  MOD_RES (106)..(107): Selenocysteine
  MOD_RES (109)..(109): Selenocysteine
  MOD_RES (169)..(169): Selenocysteine
  MOD_RES (270)..(270): Selenocysteine
  MOD_RES (323)..(323): Selenocysteine
  MOD_RES (331)..(331): Selenocysteine
  MOD_RES (355)..(355): Selenocysteine
  MOD_RES (375)..(375): Selenocysteine
  MOD_RES (422)..(422): Selenocysteine
  MOD_RES (428)..(428): Selenocysteine
  MOD_RES (446)..(446): Selenocysteine
  MOD_RES (457)..(457): Selenocysteine
  MOD_RES (479)..(479): Selenocysteine
  MOD_RES (488)..(488): Selenocysteine
  MOD_RES (490)..(490): Selenocysteine
MELSLESLGGLHSVAHAQAGELLSPGHARSAAAQHRGLVAPGRPGLVAGMASLLDGGGGGGGGGAGGAGGAGSAGGGADFRGELAGPLHPAMGMACEAPGLGGXYXXLXPLQHLPPLAAVADKFHQHAAAAAVAGAHGGHPHAHPHPAAAPPPPPPPQRLAASVSGSFXLMRDERAALASVGHLYGPYGKELPAMGSPLSPLPNALPPALHGAPQPPPPPPPPPLAAYGPPGHLAGDKLLPPAAFEPHAALLGRAEDALARGLPGGGGGXGSGGAGSGSAAGLLAPLGGLAAAGAHGPHGGGGGPGGSGGGPSAGAAAEEINXKEVAQRIXAELKRYSIPQAIFAQRILCRSQGXLSDLLRNPKPWSKLKSGREXFRRMWKWLQEPEFQRMSALRLAACKRKEQEQQKERALQPKKQRLVFXDLQRRXLIAIFKENKRPSKEMQVXISQQLGLELNXVSNFFMNARRRCMNRWAEEPSXAPGGPAGAXAXFSKA

SEQ ID NO: 18617 - protein, 183 aa, Homo sapiens
  MOD_RES (7)..(8): Selenocysteine
  MOD_RES (28)..(28): Selenocysteine
  MOD_RES (40)..(40): Selenocysteine
  MOD_RES (82)..(82): Selenocysteine
  MOD_RES (85)..(85): Selenocysteine
  MOD_RES (91)..(91): Selenocysteine
  MOD_RES (93)..(93): Selenocysteine
  MOD_RES (121)..(121): Selenocysteine
  MOD_RES (137)..(137): Selenocysteine
  MOD_RES (141)..(141): Selenocysteine
  MOD_RES (150)..(150): Selenocysteine
  MOD_RES (159)..(159): Selenocysteine
  MOD_RES (171)..(172): Selenocysteine
  MOD_RES (176)..(177): Selenocysteine
  MOD_RES (181)..(181): Selenocysteine
LASDEIXXVRKNLESRGVEVDPSLIKDXWHQVYRRHFLKXALNHCNLCRRGFYYYQRHFVDSELECNDVVLFWRIQRMLAIXANXLRQQLXNXEVRRLEKNVKEVLEDFAEDGEKKIKLLXGKRVQLAEDLKKLQGXGLSXVAHACNPSXLGGQDGWKXRNVLFPQLGLNXXHQAXXWRRXQH

SEQ ID NO: 18618 - protein, 84 aa, Homo sapiens
  MOD_RES (60)..(60): Selenocysteine
  MOD_RES (67)..(67): Selenocysteine
  MOD_RES (72)..(72): Selenocysteine
MIPDLSEYKWIVPDIVWEIDEYIDFEKIRKALPSSEDLVKLAPDFDKIVESLSLLKDFFXSGSPEEXAFRAXDRGSESDKHFRK

SEQ ID NO: 18619 - protein, 243 aa, Homo sapiens
  MOD_RES (47)..(47): Selenocysteine
  MOD_RES (57)..(57): Selenocysteine
  MOD_RES (66)..(66): Selenocysteine
  MOD_RES (95)..(95): Selenocysteine
  MOD_RES (114)..(114): Selenocysteine
  MOD_RES (118)..(118): Selenocysteine
  MOD_RES (184)..(184): Selenocysteine
  MOD_RES (209)..(209): Selenocysteine
  MOD_RES (214)..(214): Selenocysteine
MWRLRRAAVACEVCQSLVKHSSGIKGSLPLQKLHLVSRSIYHSHHPXLKLQRPQLRXSFQQFSSLXNLPLRKLKFSPIKYGYQPRRNFWPARLAXRLLKLRYLILGSAVGGGYXAKKXFDQWKDMIPDLSEYKWIVPDIVWEIDEYIDFEKIRKALPSSEDLVKLAPDFDKIVESLSLLKDFFXSGHKLVSEVIGASDLLLLLGSPEEXAFRAXDRGSESDKHFRKGLLGELILLQQQIQEHE

SEQ ID NO: 18620 - protein, 1015 aa, Homo sapiens
  MOD_RES (47)..(47): Selenocysteine
  MOD_RES (57)..(57): Selenocysteine
  MOD_RES (66)..(66): Selenocysteine
  MOD_RES (95)..(95): Selenocysteine
  MOD_RES (114)..(114): Selenocysteine
  MOD_RES (118)..(118): Selenocysteine
  MOD_RES (184)..(184): Selenocysteine
  MOD_RES (209)..(209): Selenocysteine
  MOD_RES (214)..(214): Selenocysteine
  MOD_RES (255)..(255): Selenocysteine
  MOD_RES (280)..(280): Selenocysteine
  MOD_RES (339)..(339): Selenocysteine
  MOD_RES (357)..(357): Selenocysteine
  MOD_RES (378)..(378): Selenocysteine
  MOD_RES (385)..(385): Selenocysteine
  MOD_RES (406)..(406): Selenocysteine
  MOD_RES (431)..(431): Selenocysteine
  MOD_RES (436)..(436): Selenocysteine
  MOD_RES (460)..(460): Selenocysteine
  MOD_RES (462)..(462): Selenocysteine
  MOD_RES (469)..(469): Selenocysteine
  MOD_RES (472)..(472): Selenocysteine
  MOD_RES (504)..(504): Selenocysteine
  MOD_RES (517)..(517): Selenocysteine
  MOD_RES (522)..(522): Selenocysteine
  MOD_RES (558)..(558): Selenocysteine
  MOD_RES (586)..(586): Selenocysteine
  MOD_RES (595)..(596): Selenocysteine
  MOD_RES (625)..(625): Selenocysteine
  MOD_RES (631)..(631): Selenocysteine
  MOD_RES (667)..(667): Selenocysteine
  MOD_RES (685)..(685): Selenocysteine
  MOD_RES (698)..(698): Selenocysteine
  MOD_RES (703)..(703): Selenocysteine
  MOD_RES (706)..(707): Selenocysteine
  MOD_RES (716)..(716): Selenocysteine
  MOD_RES (731)..(731): Selenocysteine
  MOD_RES (741)..(741): Selenocysteine
  MOD_RES (814)..(814): Selenocysteine
  MOD_RES (837)..(837): Selenocysteine
  MOD_RES (846)..(846): Selenocysteine
  MOD_RES (870)..(871): Selenocysteine
  MOD_RES (891)..(891): Selenocysteine
  MOD_RES (903)..(903): Selenocysteine
  MOD_RES (945)..(945): Selenocysteine
  MOD_RES (948)..(948): Selenocysteine
  MOD_RES (954)..(954): Selenocysteine
  MOD_RES (956)..(956): Selenocysteine
  MOD_RES (984)..(984): Selenocysteine
MWRLRRAAVACEVCQSLVKHSSGIKGSLPLQKLHLVSRSIYHSHHPXLKLQRPQLRXSFQQFSSLXNLPLRKLKFSPIKYGYQPRRNFWPARLAXRLLKLRYLILGSAVGGGYXAKKXFDQWKDMIPDLSEYKWIVPDIVWEIDEYIDFEKIRKALPSSEDLVKLAPDFDKIVESLSLLKDFFXSGHKLVSEVIGASDLLLLLGSPEEXAFRAXDRGSESDKHFRKGLLGELILLQQQIQEHEEEARRAAGQYSXSYAQQKRKVSDKEKIDQLQEELLHXQLKYQRILERLEKENKELRKLVLQKDDKGIHHRKLKKSLIDMYSEVLDVLSDYDASYNXQDHLPRVVVVGDQSAGKXSVLEMIAQARIFPRGSGEMMXRSPVKVXLSEGPHHVALFKDSSREFDLXKEEDLAALRHEIELRMRKNVKEGCXVSPEXISLNVKGPGLQRMVLVDLPGVINXVXSGMAPDXKEXIFSISKAYMQNPNAIILCIQDGSVDAERSIVXDLVSQMDPHGRRXIFVLXKVDLAEKNVASPSRIQQIIEGKLFPMKALGYFAVVXGKGNSSESIEAIREYEEEFFQNSKLLKXSMLKAHQVXXRNLSLAVSDCFWKMVRESVEQQADSFKAXRFNLEXEWKNNYPRLRELDRNELFEKAKNEILDEVISLSQVXPKHWEEILQQSLWERVSXHVIENIYLPAAQXMNSGXFNXXVDIKLKQWXDKQLPNKAVEVAWEXLQEEFSRFMXEPKGKEHDDIFDKLKEAVKEESIKRHKWNDFAEDSLRVIQHNALEDRSISDKQQWDAAIYFMEEALQARLKDXENAIENMVGPDWKKRWLYWKNRXQEQCVHNEXKNELEKMLKCNEEHPAYLASDEIXXVRKNLESRGVEVDPSLIKDXWHQVYRRHFLKXALNHCNLCRRGFYYYQRHFVDSELECNDVVLFWRIQRMLAIXANXLRQQLXNXEVRRLEKNVKEVLEDFAEDGEKKIKLLXGKRVQLAEDLKKVREIQEKLDAFIEALHQEK

SEQ ID NO: 18621 - protein, 978 aa, Homo sapiens
  MOD_RES (47)..(47): Selenocysteine
  MOD_RES (57)..(57): Selenocysteine
  MOD_RES (66)..(66): Selenocysteine
  MOD_RES (95)..(95): Selenocysteine
  MOD_RES (114)..(114): Selenocysteine
  MOD_RES (118)..(118): Selenocysteine
  MOD_RES (184)..(184): Selenocysteine
  MOD_RES (209)..(209): Selenocysteine
  MOD_RES (214)..(214): Selenocysteine
  MOD_RES (243)..(243): Selenocysteine
  MOD_RES (302)..(302): Selenocysteine
  MOD_RES (320)..(320): Selenocysteine
  MOD_RES (341)..(341): Selenocysteine
  MOD_RES (348)..(348): Selenocysteine
  MOD_RES (369)..(369): Selenocysteine
  MOD_RES (394)..(394): Selenocysteine
  MOD_RES (399)..(399): Selenocysteine
  MOD_RES (423)..(423): Selenocysteine
  MOD_RES (425)..(425): Selenocysteine
  MOD_RES (432)..(432): Selenocysteine
  MOD_RES (435)..(435): Selenocysteine
  MOD_RES (467)..(467): Selenocysteine
  MOD_RES (480)..(480): Selenocysteine
  MOD_RES (485)..(485): Selenocysteine
  MOD_RES (521)..(521): Selenocysteine
  MOD_RES (549)..(549): Selenocysteine
  MOD_RES (558)..(559): Selenocysteine
  MOD_RES (588)..(588): Selenocysteine
  MOD_RES (594)..(594): Selenocysteine
  MOD_RES (630)..(630): Selenocysteine
  MOD_RES (648)..(648): Selenocysteine
  MOD_RES (661)..(661): Selenocysteine
  MOD_RES (666)..(666): Selenocysteine
  MOD_RES (669)..(670): Selenocysteine
  MOD_RES (679)..(679): Selenocysteine
  MOD_RES (694)..(694): Selenocysteine
  MOD_RES (704)..(704): Selenocysteine
  MOD_RES (777)..(777): Selenocysteine
  MOD_RES (800)..(800): Selenocysteine
  MOD_RES (809)..(809): Selenocysteine
  MOD_RES (833)..(834): Selenocysteine
  MOD_RES (854)..(854): Selenocysteine
  MOD_RES (866)..(866): Selenocysteine
  MOD_RES (908)..(908): Selenocysteine
  MOD_RES (911)..(911): Selenocysteine
  MOD_RES (917)..(917): Selenocysteine
  MOD_RES (919)..(919): Selenocysteine
  MOD_RES (947)..(947): Selenocysteine
MWRLRRAAVACEVCQSLVKHSSGIKGSLPLQKLHLVSRSIYHSHHPXLKLQRPQLRXSFQQFSSLXNLPLRKLKFSPIKYGYQPRRNFWPARLAXRLLKLRYLILGSAVGGGYXAKKXFDQWKDMIPDLSEYKWIVPDIVWEIDEYIDFEKIRKALPSSEDLVKLAPDFDKIVESLSLLKDFFXSGHKLVSEVIGASDLLLLLGSPEEXAFRAXDRGSESDKHFRKVSDKEKIDQLQEELLHXQLKYQRILERLEKENKELRKLVLQKDDKGIHHRKLKKSLIDMYSEVLDVLSDYDASYNXQDHLPRVVVVGDQSAGKXSVLEMIAQARIFPRGSGEMMXRSPVKVXLSEGPHHVALFKDSSREFDLXKEEDLAALRHEIELRMRKNVKEGCXVSPEXISLNVKGPGLQRMVLVDLPGVINXVXSGMAPDXKEXIFSISKAYMQNPNAIILCIQDGSVDAERSIVXDLVSQMDPHGRRXIFVLXKVDLAEKNVASPSRIQQIIEGKLFPMKALGYFAVVXGKGNSSESIEAIREYEEEFFQNSKLLKXSMLKAHQVXXRNLSLAVSDCFWKMVRESVEQQADSFKAXRFNLEXEWKNNYPRLRELDRNELFEKAKNEILDEVISLSQVXPKHWEEILQQSLWERVSXHVIENIYLPAAQXMNSGXFNXXVDIKLKQWXDKQLPNKAVEVAWEXLQEEFSRFMXEPKGKEHDDIFDKLKEAVKEESIKRHKWNDFAEDSLRVIQHNALEDRSISDKQQWDAAIYFMEEALQARLKDXENAIENMVGPDWKKRWLYWKNRXQEQCVHNEXKNELEKMLKCNEEHPAYLASDEIXXVRKNLESRGVEVDPSLIKDXWHQVYRRHFLKXALNHCNLCRRGFYYYQRHFVDSELECNDVVLFWRIQRMLAIXANXLRQQLXNXEVRRLEKNVKEVLEDFAEDGEKKIKLLXGKRVQLAEDLKKVREIQEKLDAFIEALHQEK

SEQ ID NO: 18622 - protein, 997 aa, Homo sapiens
  MOD_RES (47)..(47): Selenocysteine
  MOD_RES (57)..(57): Selenocysteine
  MOD_RES (66)..(66): Selenocysteine
  MOD_RES (95)..(95): Selenocysteine
  MOD_RES (114)..(114): Selenocysteine
  MOD_RES (118)..(118): Selenocysteine
  MOD_RES (184)..(184): Selenocysteine
  MOD_RES (191)..(191): Selenocysteine
  MOD_RES (196)..(196): Selenocysteine
  MOD_RES (237)..(237): Selenocysteine
  MOD_RES (262)..(262): Selenocysteine
  MOD_RES (321)..(321): Selenocysteine
  MOD_RES (339)..(339): Selenocysteine
  MOD_RES (360)..(360): Selenocysteine
  MOD_RES (367)..(367): Selenocysteine
  MOD_RES (388)..(388): Selenocysteine
  MOD_RES (413)..(413): Selenocysteine
  MOD_RES (418)..(418): Selenocysteine
  MOD_RES (442)..(442): Selenocysteine
  MOD_RES (444)..(444): Selenocysteine
  MOD_RES (451)..(451): Selenocysteine
  MOD_RES (454)..(454): Selenocysteine
  MOD_RES (486)..(486): Selenocysteine
  MOD_RES (499)..(499): Selenocysteine
  MOD_RES (504)..(504): Selenocysteine
  MOD_RES (540)..(540): Selenocysteine
  MOD_RES (568)..(568): Selenocysteine
  MOD_RES (577)..(578): Selenocysteine
  MOD_RES (607)..(607): Selenocysteine
  MOD_RES (613)..(613): Selenocysteine
  MOD_RES (649)..(649): Selenocysteine
  MOD_RES (667)..(667): Selenocysteine
  MOD_RES (680)..(680): Selenocysteine
  MOD_RES (685)..(685): Selenocysteine
  MOD_RES (688)..(689): Selenocysteine
  MOD_RES (698)..(698): Selenocysteine
  MOD_RES (713)..(713): Selenocysteine
  MOD_RES (723)..(723): Selenocysteine
  MOD_RES (796)..(796): Selenocysteine
  MOD_RES (819)..(819): Selenocysteine
  MOD_RES (828)..(828): Selenocysteine
  MOD_RES (852)..(853): Selenocysteine
  MOD_RES (873)..(873): Selenocysteine
  MOD_RES (885)..(885): Selenocysteine
  MOD_RES (927)..(927): Selenocysteine
  MOD_RES (930)..(930): Selenocysteine
  MOD_RES (936)..(936): Selenocysteine
  MOD_RES (938)..(938): Selenocysteine
  MOD_RES (966)..(966): Selenocysteine
MWRLRRAAVACEVCQSLVKHSSGIKGSLPLQKLHLVSRSIYHSHHPXLKLQRPQLRXSFQQFSSLXNLPLRKLKFSPIKYGYQPRRNFWPARLAXRLLKLRYLILGSAVGGGYXAKKXFDQWKDMIPDLSEYKWIVPDIVWEIDEYIDFEKIRKALPSSEDLVKLAPDFDKIVESLSLLKDFFXSGSPEEXAFRAXDRGSESDKHFRKGLLGELILLQQQIQEHEEEARRAAGQYSXSYAQQKRKVSDKEKIDQLQEELLHXQLKYQRILERLEKENKELRKLVLQKDDKGIHHRKLKKSLIDMYSEVLDVLSDYDASYNXQDHLPRVVVVGDQSAGKXSVLEMIAQARIFPRGSGEMMXRSPVKVXLSEGPHHVALFKDSSREFDLXKEEDLAALRHEIELRMRKNVKEGCXVSPEXISLNVKGPGLQRMVLVDLPGVINXVXSGMAPDXKEXIFSISKAYMQNPNAIILCIQDGSVDAERSIVXDLVSQMDPHGRRXIFVLXKVDLAEKNVASPSRIQQIIEGKLFPMKALGYFAVVXGKGNSSESIEAIREYEEEFFQNSKLLKXSMLKAHQVXXRNLSLAVSDCFWKMVRESVEQQADSFKAXRFNLEXEWKNNYPRLRELDRNELFEKAKNEILDEVISLSQVXPKHWEEILQQSLWERVSXHVIENIYLPAAQXMNSGXFNXXVDIKLKQWXDKQLPNKAVEVAWEXLQEEFSRFMXEPKGKEHDDIFDKLKEAVKEESIKRHKWNDFAEDSLRVIQHNALEDRSISDKQQWDAAIYFMEEALQARLKDXENAIENMVGPDWKKRWLYWKNRXQEQCVHNEXKNELEKMLKCNEEHPAYLASDEIXXVRKNLESRGVEVDPSLIKDXWHQVYRRHFLKXALNHCNLCRRGFYYYQRHFVDSELECNDVVLFWRIQRMLAIXANXLRQQLXNXEVRRLEKNVKEVLEDFAEDGEKKIKLLXGKRVQLAEDLKKVREIQEKLDAFIEALHQEK

SEQ ID NO: 18623 - protein, 960 aa, Homo sapiens
  MOD_RES (47)..(47): Selenocysteine
  MOD_RES (57)..(57): Selenocysteine
  MOD_RES (66)..(66): Selenocysteine
  MOD_RES (95)..(95): Selenocysteine
  MOD_RES (114)..(114): Selenocysteine
  MOD_RES (118)..(118): Selenocysteine
  MOD_RES (184)..(184): Selenocysteine
  MOD_RES (191)..(191): Selenocysteine
  MOD_RES (196)..(196): Selenocysteine
  MOD_RES (225)..(225): Selenocysteine
  MOD_RES (284)..(284): Selenocysteine
  MOD_RES (302)..(302): Selenocysteine
  MOD_RES (323)..(323): Selenocysteine
  MOD_RES (330)..(330): Selenocysteine
  MOD_RES (351)..(351): Selenocysteine
  MOD_RES (376)..(376): Selenocysteine
  MOD_RES (381)..(381): Selenocysteine
  MOD_RES (405)..(405): Selenocysteine
  MOD_RES (407)..(407): Selenocysteine
  MOD_RES (414)..(414): Selenocysteine
  MOD_RES (417)..(417): Selenocysteine
  MOD_RES (449)..(449): Selenocysteine
  MOD_RES (462)..(462): Selenocysteine
  MOD_RES (467)..(467): Selenocysteine
  MOD_RES (503)..(503): Selenocysteine
  MOD_RES (531)..(531): Selenocysteine
  MOD_RES (540)..(541): Selenocysteine
  MOD_RES (570)..(570): Selenocysteine
  MOD_RES (576)..(576): Selenocysteine
  MOD_RES (612)..(612): Selenocysteine
  MOD_RES (630)..(630): Selenocysteine
  MOD_RES (643)..(643): Selenocysteine
  MOD_RES (648)..(648): Selenocysteine
  MOD_RES (651)..(652): Selenocysteine
  MOD_RES (661)..(661): Selenocysteine
  MOD_RES (676)..(676): Selenocysteine
  MOD_RES (686)..(686): Selenocysteine
  MOD_RES (759)..(759): Selenocysteine
  MOD_RES (782)..(782): Selenocysteine
  MOD_RES (791)..(791): Selenocysteine
  MOD_RES (815)..(816): Selenocysteine
  MOD_RES (836)..(836): Selenocysteine
  MOD_RES (848)..(848): Selenocysteine
  MOD_RES (890)..(890): Selenocysteine
  MOD_RES (893)..(893): Selenocysteine
  MOD_RES (899)..(899): Selenocysteine
  MOD_RES (901)..(901): Selenocysteine
  MOD_RES (929)..(929): Selenocysteine
MWRLRRAAVACEVCQSLVKHSSGIKGSLPLQKLHLVSRSIYHSHHPXLKLQRPQLRXSFQQFSSLXNLPLRKLKFSPIKYGYQPRRNFWPARLAXRLLKLRYLILGSAVGGGYXAKKXFDQWKDMIPDLSEYKWIVPDIVWEIDEYIDFEKIRKALPSSEDLVKLAPDFDKIVESLSLLKDFFXSGSPEEXAFRAXDRGSESDKHFRKVSDKEKIDQLQEELLHXQLKYQRILERLEKENKELRKLVLQKDDKGIHHRKLKKSLIDMYSEVLDVLSDYDASYNXQDHLPRVVVVGDQSAGKXSVLEMIAQARIFPRGSGEMMXRSPVKVXLSEGPHHVALFKDSSREFDLXKEEDLAALRHEIELRMRKNVKEGCXVSPEXISLNVKGPGLQRMVLVDLPGVINXVXSGMAPDXKEXIFSISKAYMQNPNAIILCIQDGSVDAERSIVXDLVSQMDPHGRRXIFVLXKVDLAEKNVASPSRIQQIIEGKLFPMKALGYFAVVXGKGNSSESIEAIREYEEEFFQNSKLLKXSMLKAHQVXXRNLSLAVSDCFWKMVRESVEQQADSFKAXRFNLEXEWKNNYPRLRELDRNELFEKAKNEILDEVISLSQVXPKHWEEILQQSLWERVSXHVIENIYLPAAQXMNSGXFNXXVDIKLKQWXDKQLPNKAVEVAWEXLQEEFSRFMXEPKGKEHDDIFDKLKEAVKEESIKRHKWNDFAEDSLRVIQHNALEDRSISDKQQWDAAIYFMEEALQARLKDXENAIENMVGPDWKKRWLYWKNRXQEQCVHNEXKNELEKMLKCNEEHPAYLASDEIXXVRKNLESRGVEVDPSLIKDXWHQVYRRHFLKXALNHCNLCRRGFYYYQRHFVDSELECNDVVLFWRIQRMLAIXANXLRQQLXNXEVRRLEKNVKEVLEDFAEDGEKKIKLLXGKRVQLAEDLKKVREIQEKLDAFIEALHQEK

SEQ ID NO: 18624 - protein, 979 aa, Homo sapiens
  MOD_RES (47)..(47): Selenocysteine
  MOD_RES (57)..(57): Selenocysteine
  MOD_RES (66)..(66): Selenocysteine
  MOD_RES (95)..(95): Selenocysteine
  MOD_RES (114)..(114): Selenocysteine
  MOD_RES (118)..(118): Selenocysteine
  MOD_RES (173)..(173): Selenocysteine
  MOD_RES (178)..(178): Selenocysteine
  MOD_RES (219)..(219): Selenocysteine
  MOD_RES (244)..(244): Selenocysteine
  MOD_RES (303)..(303): Selenocysteine
  MOD_RES (321)..(321): Selenocysteine
  MOD_RES (342)..(342): Selenocysteine
  MOD_RES (349)..(349): Selenocysteine
  MOD_RES (370)..(370): Selenocysteine
  MOD_RES (395)..(395): Selenocysteine
  MOD_RES (400)..(400): Selenocysteine
  MOD_RES (424)..(424): Selenocysteine
  MOD_RES (426)..(426): Selenocysteine
  MOD_RES (433)..(433): Selenocysteine
  MOD_RES (436)..(436): Selenocysteine
  MOD_RES (468)..(468): Selenocysteine
  MOD_RES (481)..(481): Selenocysteine
  MOD_RES (486)..(486): Selenocysteine
  MOD_RES (522)..(522): Selenocysteine
  MOD_RES (550)..(550): Selenocysteine
  MOD_RES (559)..(560): Selenocysteine
  MOD_RES (589)..(589): Selenocysteine
  MOD_RES (595)..(595): Selenocysteine
  MOD_RES (631)..(631): Selenocysteine
  MOD_RES (649)..(649): Selenocysteine
  MOD_RES (662)..(662): Selenocysteine
  MOD_RES (667)..(667): Selenocysteine
  MOD_RES (670)..(671): Selenocysteine
  MOD_RES (680)..(680): Selenocysteine
  MOD_RES (695)..(695): Selenocysteine
  MOD_RES (705)..(705): Selenocysteine
  MOD_RES (778)..(778): Selenocysteine
  MOD_RES (801)..(801): Selenocysteine
  MOD_RES (810)..(810): Selenocysteine
  MOD_RES (834)..(835): Selenocysteine
  MOD_RES (855)..(855): Selenocysteine
  MOD_RES (867)..(867): Selenocysteine
  MOD_RES (909)..(909): Selenocysteine
  MOD_RES (912)..(912): Selenocysteine
  MOD_RES (918)..(918): Selenocysteine
  MOD_RES (920)..(920): Selenocysteine
  MOD_RES (948)..(948): Selenocysteine
MWRLRRAAVACEVCQSLVKHSSGIKGSLPLQKLHLVSRSIYHSHHPXLKLQRPQLRXSFQQFSSLXNLPLRKLKFSPIKYGYQPRRNFWPARLAXRLLKLRYLILGSAVGGGYXAKKXFDQWKDMIPDLSEYKWIVPDIVWEIDEYIDFGHKLVSEVIGASDLLLLLGSPEEXAFRAXDRGSESDKHFRKGLLGELILLQQQIQEHEEEARRAAGQYSXSYAQQKRKVSDKEKIDQLQEELLHXQLKYQRILERLEKENKELRKLVLQKDDKGIHHRKLKKSLIDMYSEVLDVLSDYDASYNXQDHLPRVVVVGDQSAGKXSVLEMIAQARIFPRGSGEMMXRSPVKVXLSEGPHHVALFKDSSREFDLXKEEDLAALRHEIELRMRKNVKEGCXVSPEXISLNVKGPGLQRMVLVDLPGVINXVXSGMAPDXKEXIFSISKAYMQNPNAIILCIQDGSVDAERSIVXDLVSQMDPHGRRXIFVLXKVDLAEKNVASPSRIQQIIEGKLFPMKALGYFAVVXGKGNSSESIEAIREYEEEFFQNSKLLKXSMLKAHQVXXRNLSLAVSDCFWKMVRESVEQQADSFKAXRFNLEXEWKNNYPRLRELDRNELFEKAKNEILDEVISLSQVXPKHWEEILQQSLWERVSXHVIENIYLPAAQXMNSGXFNXXVDIKLKQWXDKQLPNKAVEVAWEXLQEEFSRFMXEPKGKEHDDIFDKLKEAVKEESIKRHKWNDFAEDSLRVIQHNALEDRSISDKQQWDAAIYFMEEALQARLKDXENAIENMVGPDWKKRWLYWKNRXQEQCVHNEXKNELEKMLKCNEEHPAYLASDEIXXVRKNLESRGVEVDPSLIKDXWHQVYRRHFLKXALNHCNLCRRGFYYYQRHFVDSELECNDVVLFWRIQRMLAIXANXLRQQLXNXEVRRLEKNVKEVLEDFAEDGEKKIKLLXGKRVQLAEDLKKVREIQEKLDAFIEALHQEK

SEQ ID NO: 18625 - protein, 166 aa, Homo sapiens
  MOD_RES (47)..(47): Selenocysteine
  MOD_RES (57)..(57): Selenocysteine
  MOD_RES (66)..(66): Selenocysteine
  MOD_RES (95)..(95): Selenocysteine
  MOD_RES (114)..(114): Selenocysteine
  MOD_RES (118)..(118): Selenocysteine
  MOD_RES (155)..(155): Selenocysteine
  MOD_RES (160)..(160): Selenocysteine
MWRLRRAAVACEVCQSLVKHSSGIKGSLPLQKLHLVSRSIYHSHHPXLKLQRPQLRXSFQQFSSLXNLPLRKLKFSPIKYGYQPRRNFWPARLAXRLLKLRYLILGSAVGGGYXAKKXFDQWKDMIPDLSEYKWIVPDIVWEIDEYIDFGSPEEXAFRAXDRGSES

SEQ ID NO: 18626 - protein, 961 aa, Homo sapiens
  MOD_RES (47)..(47): Selenocysteine
  MOD_RES (57)..(57): Selenocysteine
  MOD_RES (66)..(66): Selenocysteine
  MOD_RES (95)..(95): Selenocysteine
  MOD_RES (114)..(114): Selenocysteine
  MOD_RES (118)..(118): Selenocysteine
  MOD_RES (155)..(155): Selenocysteine
  MOD_RES (160)..(160): Selenocysteine
  MOD_RES (201)..(201): Selenocysteine
  MOD_RES (226)..(226): Selenocysteine
  MOD_RES (285)..(285): Selenocysteine
  MOD_RES (303)..(303): Selenocysteine
  MOD_RES (324)..(324): Selenocysteine
  MOD_RES (331)..(331): Selenocysteine
  MOD_RES (352)..(352): Selenocysteine
  MOD_RES (377)..(377): Selenocysteine
  MOD_RES (382)..(382): Selenocysteine
  MOD_RES (406)..(406): Selenocysteine
  MOD_RES (408)..(408): Selenocysteine
  MOD_RES (415)..(415): Selenocysteine
  MOD_RES (418)..(418): Selenocysteine
  MOD_RES (450)..(450): Selenocysteine
  MOD_RES (463)..(463): Selenocysteine
  MOD_RES (468)..(468): Selenocysteine
  MOD_RES (504)..(504): Selenocysteine
  MOD_RES (532)..(532): Selenocysteine
  MOD_RES (541)..(542): Selenocysteine
  MOD_RES (571)..(571): Selenocysteine
  MOD_RES (577)..(577): Selenocysteine
  MOD_RES (613)..(613): Selenocysteine
  MOD_RES (631)..(631): Selenocysteine
  MOD_RES (644)..(644): Selenocysteine
  MOD_RES (649)..(649): Selenocysteine
  MOD_RES (652)..(653): Selenocysteine
  MOD_RES (662)..(662): Selenocysteine
  MOD_RES (677)..(677): Selenocysteine
  MOD_RES (687)..(687): Selenocysteine
  MOD_RES (760)..(760): Selenocysteine
  MOD_RES (783)..(783): Selenocysteine
  MOD_RES (792)..(792): Selenocysteine
  MOD_RES (816)..(817): Selenocysteine
  MOD_RES (837)..(837): Selenocysteine
  MOD_RES (849)..(849): Selenocysteine
  MOD_RES (891)..(891): Selenocysteine
  MOD_RES (894)..(894): Selenocysteine
  MOD_RES (900)..(900): Selenocysteine
  MOD_RES (902)..(902): Selenocysteine
  MOD_RES (930)..(930): Selenocysteine
MWRLRRAAVACEVCQSLVKHSSGIKGSLPLQKLHLVSRSIYHSHHPXLKLQRPQLRXSFQQFSSLXNLPLRKLKFSPIKYGYQPRRNFWPARLAXRLLKLRYLILGSAVGGGYXAKKXFDQWKDMIPDLSEYKWIVPDIVWEIDEYIDFGSPEEXAFRAXDRGSESDKHFRKGLLGELILLQQQIQEHEEEARRAAGQYSXSYAQQKRKVSDKEKIDQLQEELLHXQLKYQRILERLEKENKELRKLVLQKDDKGIHHRKLKKSLIDMYSEVLDVLSDYDASYNXQDHLPRVVVVGDQSAGKXSVLEMIAQARIFPRGSGEMMXRSPVKVXLSEGPHHVALFKDSSREFDLXKEEDLAALRHEIELRMRKNVKEGCXVSPEXISLNVKGPGLQRMVLVDLPGVINXVXSGMAPDXKEXIFSISKAYMQNPNAIILCIQDGSVDAERSIVXDLVSQMDPHGRRXIFVLXKVDLAEKNVASPSRIQQIIEGKLFPMKALGYFAVVXGKGNSSESIEAIREYEEEFFQNSKLLKXSMLKAHQVXXRNLSLAVSDCFWKMVRESVEQQADSFKAXRFNLEXEWKNNYPRLRELDRNELFEKAKNEILDEVISLSQVXPKHWEEILQQSLWERVSXHVIENIYLPAAQXMNSGXFNXXVDIKLKQWXDKQLPNKAVEVAWEXLQEEFSRFMXEPKGKEHDDIFDKLKEAVKEESIKRHKWNDFAEDSLRVIQHNALEDRSISDKQQWDAAIYFMEEALQARLKDXENAIENMVGPDWKKRWLYWKNRXQEQCVHNEXKNELEKMLKCNEEHPAYLASDEIXXVRKNLESRGVEVDPSLIKDXWHQVYRRHFLKXALNHCNLCRRGFYYYQRHFVDSELECNDVVLFWRIQRMLAIXANXLRQQLXNXEVRRLEKNVKEVLEDFAEDGEKKIKLLXGKRVQLAEDLKKVREIQEKLDAFIEALHQEK

SEQ ID NO: 18627 - protein, 131 aa, Homo sapiens
  MOD_RES (1)..(1): Any amino acid
  MOD_RES (25)..(25): Selenocysteine
  MOD_RES (36)..(36): Selenocysteine
  MOD_RES (38)..(38): Selenocysteine
  MOD_RES (42)..(42): Selenocysteine
  MOD_RES (54)..(54): Selenocysteine
  MOD_RES (82)..(82): Selenocysteine
  MOD_RES (101)..(101): Selenocysteine
XLEKNVKEVLEDFAEDGEKKIKLLXGKRVQLAEDLXRXQHYXPGHHMAPHPALXLLLPCLGSDIRARLLFVMESLLLSSALXLCARCLSISSFPPASLCPXPDRFLPHLKPDHAFVEIPSLPCLCFASLHQ

SEQ ID NO: 18628 - protein, 185 aa, Homo sapiens
  MOD_RES (1)..(1): Any amino acid
  MOD_RES (14)..(14): Selenocysteine
  MOD_RES (18)..(18): Selenocysteine
  MOD_RES (84)..(84): Selenocysteine
  MOD_RES (109)..(109): Selenocysteine
  MOD_RES (114)..(114): Selenocysteine
  MOD_RES (143)..(143): Selenocysteine
XYLILGSAVGGGYXAKKXFDQWKDMIPDLSEYKWIVPDIVWEIDEYIDFEKIRKALPSSEDLVKLAPDFDKIVESLSLLKDFFXSGHKLVSEVIGASDLLLLLGSPEEXAFRAXDRGSESDKHFRKVSDKEKIDQLQEELLHXQLKYQRILERLEKENKELRKLVLQKDDKGIHHRKLKKSLIDM

SEQ ID NO: 18629 - protein, 802 aa, Homo sapiens
  MOD_RES (32)..(32): Selenocysteine
  MOD_RES (63)..(63): Selenocysteine
  MOD_RES (75)..(75): Selenocysteine
  MOD_RES (77)..(77): Selenocysteine
  MOD_RES (127)..(127): Selenocysteine
  MOD_RES (214)..(214): Selenocysteine
  MOD_RES (218)..(218): Selenocysteine
  MOD_RES (235)..(235): Selenocysteine
  MOD_RES (242)..(242): Selenocysteine
  MOD_RES (259)..(259): Selenocysteine
  MOD_RES (267)..(267): Selenocysteine
  MOD_RES (274)..(274): Selenocysteine
  MOD_RES (295)..(295): Selenocysteine
  MOD_RES (297)..(297): Selenocysteine
  MOD_RES (299)..(299): Selenocysteine
  MOD_RES (301)..(301): Selenocysteine
  MOD_RES (317)..(317): Selenocysteine
  MOD_RES (326)..(326): Selenocysteine
  MOD_RES (339)..(339): Selenocysteine
  MOD_RES (345)..(345): Selenocysteine
  MOD_RES (347)..(347): Selenocysteine
  MOD_RES (375)..(375): Selenocysteine
  MOD_RES (399)..(399): Selenocysteine
  MOD_RES (404)..(404): Selenocysteine
  MOD_RES (410)..(410): Selenocysteine
  MOD_RES (444)..(444): Selenocysteine
  MOD_RES (446)..(446): Selenocysteine
  MOD_RES (462)..(462): Selenocysteine
  MOD_RES (520)..(520): Selenocysteine
  MOD_RES (531)..(531): Selenocysteine
  MOD_RES (539)..(539): Selenocysteine
  MOD_RES (582)..(582): Selenocysteine
  MOD_RES (590)..(590): Selenocysteine
  MOD_RES (600)..(600): Selenocysteine
  MOD_RES (604)..(604): Selenocysteine
  MOD_RES (618)..(618): Selenocysteine
  MOD_RES (622)..(622): Selenocysteine
  MOD_RES (624)..(624): Selenocysteine
  MOD_RES (646)..(646): Selenocysteine
  MOD_RES (682)..(682): Selenocysteine
  MOD_RES (685)..(685): Selenocysteine
  MOD_RES (689)..(689): Selenocysteine
  MOD_RES (699)..(699): Selenocysteine
  MOD_RES (701)..(701): Selenocysteine
  MOD_RES (736)..(736): Selenocysteine
  MOD_RES (753)..(753): Selenocysteine
  MOD_RES (772)..(772): Selenocysteine
  MOD_RES (780)..(780): Selenocysteine
  MOD_RES (785)..(785): Selenocysteine
  MOD_RES (790)..(790): Selenocysteine
MGHPPLEFSDCYLDSPDFRERLKCYEQELERXNKFIKDVIKDGNALISAMRNYSSAVQKFSQXLQSFQFDFIGDXLXDDEINIAESFKEFAELLNEVENERMMMVHNASDLLIKPLENFRKEQIGFXKERKKKFEKDGERFYSLLDRHLHLSSKKKESQLQEADLQVDKERHNFFESSLDYVYQIQEVQESKKFNIVEPVLAFLHSLFISNSLXVELXQDFLPYKQQLQLSLQNXRNHFSSXREEMEELKKRMKEAPQXCKLPGQPXIEGYLYXQEKWALGISWVKYYCQYEKEXKXLXMXPMEQKPGAKQGPLDLXLKYCVRRKXESIDKRFCFDIEXNERPGXIXLQALSEANRRLWMEAMDGKEPIYHSPIXKQQEMELNEVGFKFVRKCINIIEXKGIKXEGLYRXVGSNIQVQKLLNAFFDPKCPGDVDFHNSDWDIKXIXSSLKFYLRNLSEPVMXYRLHKELVSAAKSDNLDYRLGAIHSLVYKLPEKNREMLELLIRHLVNVCEHSKENLMXPSNMGVIFGPXLMRAQEDXVAAMMNIKFQNIVVEILIEHFGKIYLGPPEESAAPPVPPPRVXARRHKPIXISKRLLRERXVFYXSSLDESEDEIQHQXPNGXIXSSIEPPKPPQHPKLPIQRSGEXDPGRKSPSRPILDGKLEPCPEVDVGKLVSRLQDGGXKIXPKAXNGPMPGSGPXKXPSFHIKRPAPRPLAHHKEGDADSFSKVRPPGEKPXIIRPPVRPPDPPCRAAXPQKPEPKPDIVAGNAGEIXSSVVASRXRFFEXASRKXGSSQGRLPGDES

SEQ ID NO: 18630 - protein, 164 aa, Homo sapiens
  MOD_RES (2)..(2): Selenocysteine
  MOD_RES (47)..(47): Selenocysteine
  MOD_RES (64)..(64): Selenocysteine
  MOD_RES (89)..(89): Selenocysteine
  MOD_RES (122)..(122): Selenocysteine
  MOD_RES (153)..(153): Selenocysteine
IXGLWSLAIISWERWMVVCKPFGNVRFDAKLAIVGIAFSWIWAAVWXAPPIFGWSRYWPHGLKXSCGPDVFSGSSYPGVQSYMIVLMVXCCIIPLAIIMLCYLQVWLAIRAVAKQQKESESXQKAEKEFRNCILQLFGKKVDDGSELSSASKXEVSSVSSVSPA

SEQ ID NO: 18631 - protein, 364 aa, Homo sapiens
  MOD_RES (23)..(23): Selenocysteine
  MOD_RES (29)..(29): Selenocysteine
  MOD_RES (31)..(31): Selenocysteine
  MOD_RES (36)..(36): Selenocysteine
  MOD_RES (56)..(56): Selenocysteine
  MOD_RES (65)..(65): Selenocysteine
  MOD_RES (70)..(70): Selenocysteine
  MOD_RES (78)..(78): Selenocysteine
  MOD_RES (103)..(103): Selenocysteine
  MOD_RES (108)..(108): Selenocysteine
  MOD_RES (132)..(132): Selenocysteine
  MOD_RES (139)..(139): Selenocysteine
  MOD_RES (184)..(184): Selenocysteine
  MOD_RES (201)..(201): Selenocysteine
  MOD_RES (226)..(226): Selenocysteine
  MOD_RES (259)..(259): Selenocysteine
  MOD_RES (267)..(267): Selenocysteine
  MOD_RES (285)..(285): Selenocysteine
  MOD_RES (315)..(315): Selenocysteine
  MOD_RES (353)..(353): Selenocysteine
MAQQWSLQRLAGRHPQDSYEDSXQSSIFXYXNSNSXRGPFEGPNYHIAPRWVYHLXSVWMIFVVXASVFXNGLVLAAXMKFKKLRHPLNWILVNLAVADLAEXVIASXISIVNQVSGYFVLGHPMCVLEGYXVSLCGIXGLWSLAIISWERWMVVCKPFGNVRFDAKLAIVGIAFSWIWAAVWXAPPIFGWSRYWPHGLKXSCGPDVFSGSSYPGVQSYMIVLMVXCCIIPLAIIMLCYLQVWLAIRAVAKQQKESESXQKAEKEVXRMVVVMIFAYCVCWGPYXFFACFAAANPGYAFHPLMAALPAYFAKSAXIYNPVIYVFMNRQFRNCILQLFGKKVDDGSELSSASKXEVSSVSSVSPA

SEQ ID NO: 18632 - protein, 364 aa, Homo sapiens
  MOD_RES (23)..(23): Selenocysteine
  MOD_RES (29)..(29): Selenocysteine
  MOD_RES (31)..(31): Selenocysteine
  MOD_RES (36)..(36): Selenocysteine
  MOD_RES (56)..(56): Selenocysteine
  MOD_RES (70)..(70): Selenocysteine
  MOD_RES (78)..(78): Selenocysteine
  MOD_RES (103)..(103): Selenocysteine
  MOD_RES (108)..(108): Selenocysteine
  MOD_RES (132)..(132): Selenocysteine
  MOD_RES (139)..(139): Selenocysteine
  MOD_RES (184)..(184): Selenocysteine
  MOD_RES (201)..(201): Selenocysteine
  MOD_RES (226)..(226): Selenocysteine
  MOD_RES (230)..(230): Selenocysteine
  MOD_RES (259)..(259): Selenocysteine
  MOD_RES (267)..(267): Selenocysteine
  MOD_RES (315)..(315): Selenocysteine
  MOD_RES (353)..(353): Selenocysteine
MAQQWSLQRLAGRHPQDSYEDSXQSSIFXYXNSNSXRGPFEGPNYHIAPRWVYHLXSVWMIFVVIASVFXNGLVLAAXMKFKKLRHPLNWILVNLAVADLAEXVIASXISVVNQVYGYFVLGHPMCVLEGYXVSLCGIXGLWSLAIISWERWMVVCKPFGNVRFDAKLAIVGIAFSWIWAAVWXAPPIFGWSRYWPHGLKXSCGPDVFSGSSYPGVQSYMIVLMVXCCIXPLSIIVLCYLQVWLAIRAVAKQQKESESXQKAEKEVXRMVVVMVLAFCFCWGPYAFFACFAAANPGYPFHPLMAALPAFFAKSAXIYNPVIYVFMNRQFRNCILQLFGKKVDDGSELSSASKXEVSSVSSVSPA

SEQ ID NO: 18633 - protein, 164 aa, Homo sapiens
  MOD_RES (1)..(1): Any amino acid
  MOD_RES (2)..(2): Selenocysteine
  MOD_RES (47)..(47): Selenocysteine
  MOD_RES (64)..(64): Selenocysteine
  MOD_RES (89)..(89): Selenocysteine
  MOD_RES (93)..(93): Selenocysteine
  MOD_RES (122)..(122): Selenocysteine
  MOD_RES (153)..(153): Selenocysteine
XXGLWSLAIISWERWMVVCKPFGNVRFDAKLAIVGIAFSWIWAAVWXAPPIFGWSRYWPHGLKXSCGPDVFSGSSYPGVQSYMIVLMVXCCIXPLSIIVLCYLQVWLAIRAVAKQQKESESXQKAEKEFRNCILQLFGKKVDDGSELSSASKXEVSSVSSVSPA

SEQ ID NO: 18634 - protein, 348 aa, Homo sapiens
  MOD_RES (43)..(43): Selenocysteine
  MOD_RES (59)..(59): Selenocysteine
  MOD_RES (115)..(115): Selenocysteine
  MOD_RES (121)..(121): Selenocysteine
  MOD_RES (152)..(152): Selenocysteine
  MOD_RES (157)..(157): Selenocysteine
  MOD_RES (159)..(159): Selenocysteine
  MOD_RES (190)..(190): Selenocysteine
  MOD_RES (193)..(193): Selenocysteine
  MOD_RES (201)..(201): Selenocysteine
  MOD_RES (221)..(221): Selenocysteine
  MOD_RES (239)..(240): Selenocysteine
  MOD_RES (286)..(286): Selenocysteine
  MOD_RES (324)..(324): Selenocysteine
  MOD_RES (329)..(329): Selenocysteine
  MOD_RES (335)..(335): Selenocysteine
  MOD_RES (339)..(339): Selenocysteine
  MOD_RES (343)..(343): Selenocysteine
MRKMSEEEFYLFKNISSVGPWDGPQYHIAPVWAFYLQAAFMGXVFLIGFPLNAMVLVAXLRYKKLRQPLNYILVNVSFGGFLLCIFSVFPVFVASCNGYFVFGRHVCALEGFLGXVAGLVXGWSLAFLAFERYIVICKPFGNFRFSSKHALXVVLAXWXIGIGVSIPPFFGWSRFIPEGLQCSCGPDWYXVGXKYRSESYXWFLFIFCFIVPLSLICFSYXQLLRALKAVAAQQQESAXXQKAEREVSRMVVVMVGSFCVCYVPYAAFAMYMVNNRNHGLDLRLVXIPSFFSKSACIYNPIIYCFMNKQFQACIMKMVCGKAMXDESDXCSSQKXEVSXVSSXQVGPN

SEQ ID NO: 18635 - protein, 142 aa, Homo sapiens
  MOD_RES (29)..(29): Selenocysteine
  MOD_RES (40)..(40): Selenocysteine
  MOD_RES (74)..(74): Selenocysteine
  MOD_RES (76)..(76): Selenocysteine
  MOD_RES (96)..(96): Selenocysteine
  MOD_RES (98)..(98): Selenocysteine
  MOD_RES (111)..(111): Selenocysteine
MYSGNRSGGHGYWDGGGAAGAEGPAPAGXLSPAPLFSPGXYERLALLLGSIGLLGVGNNLLVLVLYYKFQRLRXPXHLLLVNISLSDLLVSLFGVXFXFVSCLRNGWVWDXVGCVWDGFSGSLFASLCGRSSDNSSDQDFKI

SEQ ID NO: 18636 - protein, 402 aa, Homo sapiens
  MOD_RES (29)..(29): Selenocysteine
  MOD_RES (40)..(40): Selenocysteine
  MOD_RES (74)..(74): Selenocysteine
  MOD_RES (76)..(76): Selenocysteine
  MOD_RES (96)..(96): Selenocysteine
  MOD_RES (98)..(98): Selenocysteine
  MOD_RES (111)..(111): Selenocysteine
  MOD_RES (131)..(131): Selenocysteine
  MOD_RES (133)..(133): Selenocysteine
  MOD_RES (159)..(159): Selenocysteine
  MOD_RES (189)..(189): Selenocysteine
  MOD_RES (240)..(240): Selenocysteine
  MOD_RES (263)..(263): Selenocysteine
  MOD_RES (287)..(287): Selenocysteine
  MOD_RES (289)..(289): Selenocysteine
  MOD_RES (302)..(302): Selenocysteine
  MOD_RES (365)..(365): Selenocysteine
  MOD_RES (376)..(376): Selenocysteine
  MOD_RES (389)..(389): Selenocysteine
MYSGNRSGGHGYWDGGGAAGAEGPAPAGXLSPAPLFSPGXYERLALLLGSIGLLGVGNNLLVLVLYYKFQRLRXPXHLLLVNISLSDLLVSLFGVXFXFVSCLRNGWVWDXVGCVWDGFSGSLFGIVSIAXLXVLAYERYIRVVHARVINFSWAWRAIXYIWLYSLAWAGAPLLGWNRYILDVHGLGCXVDWKSKDANDSSFVLFLFLGCLVVPLGVIAHCYGHILYSIRMLRCVEDLQXIQVIKILKYEKKLAKMCFLMIFXFLVCWMPYIVICFLVVNGHGHLVXPXISIVSYLFAKSNXVYNPVIYVFMIRKFRRSLLQLLCLRLLRCQRPAKDLPAAGSEMQIRPIVMSQKDGDRPKKKVXFNSSSIIFIIXSDESLSVDDSDKXNGSKVDVIQVRPL

SEQ ID NO: 18637 - protein, 189 aa, Homo sapiens
  MOD_RES (29)..(29): Selenocysteine
  MOD_RES (40)..(40): Selenocysteine
  MOD_RES (74)..(74): Selenocysteine
  MOD_RES (76)..(76): Selenocysteine
  MOD_RES (96)..(96): Selenocysteine
  MOD_RES (98)..(98): Selenocysteine
  MOD_RES (111)..(111): Selenocysteine
  MOD_RES (131)..(131): Selenocysteine
  MOD_RES (133)..(133): Selenocysteine
  MOD_RES (159)..(159): Selenocysteine
MYSGNRSGGHGYWDGGGAAGAEGPAPAGXLSPAPLFSPGXYERLALLLGSIGLLGVGNNLLVLVLYYKFQRLRXPXHLLLVNISLSDLLVSLFGVXFXFVSCLRNGWVWDXVGCVWDGFSGSLFGIVSIAXLXVLAYERYIRVVHARVINFSWAWRAIXYIWLYSLAWAGAPLLGWNSFVVWKIFRQFK

SEQ ID NO: 18638 - protein, 155 aa, Homo sapiens
  MOD_RES (1)..(1): Any amino acid
  MOD_RES (15)..(15): Selenocysteine
  MOD_RES (26)..(26): Selenocysteine
  MOD_RES (60)..(60): Selenocysteine
  MOD_RES (62)..(62): Selenocysteine
  MOD_RES (82)..(82): Selenocysteine
  MOD_RES (84)..(84): Selenocysteine
  MOD_RES (97)..(97): Selenocysteine
  MOD_RES (120)..(120): Selenocysteine
  MOD_RES (134)..(134): Selenocysteine
  MOD_RES (139)..(139): Selenocysteine
XGGAAGAEGPAPAGXLSPAPLFSPGXYERLALLLGSIGLLGVGNNLLVLVLYYKFQRLRXPXHLLLVNISLSDLLVSLFGVXFXFVSCLRNGWVWDXVGCVWDGFSGSLFGWISQLQAAXREARASMGPVQQGXICMQXESHSVAQAGVHWHDLG

SEQ ID NO: 18639 - protein, 489 aa, Homo sapiens
  MOD_RES (14)..(14): Selenocysteine
  MOD_RES (22)..(22): Selenocysteine
  MOD_RES (48)..(48): Selenocysteine
  MOD_RES (52)..(52): Selenocysteine
  MOD_RES (62)..(62): Selenocysteine
  MOD_RES (72)..(72): Selenocysteine
  MOD_RES (75)..(75): Selenocysteine
  MOD_RES (83)..(83): Selenocysteine
  MOD_RES (90)..(90): Selenocysteine
  MOD_RES (94)..(94): Selenocysteine
  MOD_RES (104)..(104): Selenocysteine
  MOD_RES (114)..(114): Selenocysteine
  MOD_RES (133)..(133): Selenocysteine
  MOD_RES (140)..(140): Selenocysteine
  MOD_RES (152)..(152): Selenocysteine
  MOD_RES (171)..(171): Selenocysteine
  MOD_RES (173)..(173): Selenocysteine
  MOD_RES (184)..(184): Selenocysteine
  MOD_RES (189)..(189): Selenocysteine
  MOD_RES (230)..(230): Selenocysteine
  MOD_RES (240)..(240): Selenocysteine
  MOD_RES (247)..(247): Selenocysteine
  MOD_RES (276)..(276): Selenocysteine
  MOD_RES (282)..(282): Selenocysteine
  MOD_RES (339)..(339): Selenocysteine
  MOD_RES (364)..(364): Selenocysteine
  MOD_RES (399)..(399): Selenocysteine
  MOD_RES (403)..(403): Selenocysteine
  MOD_RES (405)..(405): Selenocysteine
  MOD_RES (408)..(408): Selenocysteine
  MOD_RES (432)..(432): Selenocysteine
  MOD_RES (474)..(474): Selenocysteine
  MOD_RES (478)..(478): Selenocysteine
MNPPSGPRVPPSPXQEPSCMAXPAPPSWWDSSQSSISSLGRLPSISPXAPGXWAAAWVPLPXVDVPDHAHYXLGXVILLVGLXGMLGNLXVIYXFCRAVLRGVXVMMQSRSLRXPANMFIINLAVSDFLMSFXQAPVFFXSSLYKQWLFGEXGCEFYAFCGALFGISSMIXLXAIALDRYLVIXRPLAXFGVASKRRAAFVLLGVWLYALAWSLPPFFGWSAYVPEGLLXSCSWDYMSFXPAVRAYXMLLCCFVFFLPLLIIIYCYIFIFRAIREXGRALQXFGACKGNGESLWQRQRLQSECKMAKIMLLVILLFVLSWAPYSAVALVAFAGYAHVLXPYMSSVPAVIAKASAIHNPIIYAIXHPKYRVAIAQHLPCLGVLLGVSRRHSRPYPSYRSXHRSXLXSHXSNLSWISIRRRQESLGSESEVGWXHMEAAAVWGAAQQANGRSLYGQGLEDLEAKAPPRPQGHEAEXPGKXKGLIPSQDPRM

SEQ ID NO: 18640 - protein, 495 aa, Homo sapiens
  MOD_RES (14)..(14): Selenocysteine
  MOD_RES (22)..(22): Selenocysteine
  MOD_RES (48)..(48): Selenocysteine
  MOD_RES (52)..(52): Selenocysteine
  MOD_RES (62)..(62): Selenocysteine
  MOD_RES (72)..(72): Selenocysteine
  MOD_RES (75)..(75): Selenocysteine
  MOD_RES (83)..(83): Selenocysteine
  MOD_RES (90)..(90): Selenocysteine
  MOD_RES (94)..(94): Selenocysteine
  MOD_RES (104)..(104): Selenocysteine
  MOD_RES (114)..(114): Selenocysteine
  MOD_RES (133)..(133): Selenocysteine
  MOD_RES (140)..(140): Selenocysteine
  MOD_RES (152)..(152): Selenocysteine
  MOD_RES (171)..(171): Selenocysteine
  MOD_RES (173)..(173): Selenocysteine
  MOD_RES (184)..(184): Selenocysteine
  MOD_RES (189)..(189): Selenocysteine
  MOD_RES (230)..(230): Selenocysteine
  MOD_RES (240)..(240): Selenocysteine
  MOD_RES (247)..(247): Selenocysteine
  MOD_RES (276)..(276): Selenocysteine
  MOD_RES (282)..(282): Selenocysteine
  MOD_RES (339)..(339): Selenocysteine
  MOD_RES (364)..(364): Selenocysteine
  MOD_RES (399)..(399): Selenocysteine
  MOD_RES (403)..(403): Selenocysteine
  MOD_RES (405)..(405): Selenocysteine
  MOD_RES (408)..(408): Selenocysteine
  MOD_RES (432)..(432): Selenocysteine
  MOD_RES (474)..(474): Selenocysteine
MNPPSGPRVPPSPXQEPSCMAXPAPPSWWDSSQSSISSLGRLPSISPXAPGXWAAAWVPLPXVDVPDHAHYXLGXVILLVGLXGMLGNLXVIYXFCRAVLRGVXVMMQSRSLRXPANMFIINLAVSDFLMSFXQAPVFFXSSLYKQWLFGEXGCEFYAFCGALFGISSMIXLXAIALDRYLVIXRPLAXFGVASKRRAAFVLLGVWLYALAWSLPPFFGWSAYVPEGLLXSCSWDYMSFXPAVRAYXMLLCCFVFFLPLLIIIYCYIFIFRAIREXGRALQXFGACKGNGESLWQRQRLQSECKMAKIMLLVILLFVLSWAPYSAVALVAFAGYAHVLXPYMSSVPAVIAKASAIHNPIIYAIXHPKYRVAIAQHLPCLGVLLGVSRRHSRPYPSYRSXHRSXLXSHXSNLSWISIRRRQESLGSESEVGWXHMEAAAVWGAAQQANGRSLYGQGLEDLEAKAPPRPQGHEAEXPGKRRASSGRSQRPERQRAAP

SEQ ID NO: 18641 - protein, 478 aa, Homo sapiens
  MOD_RES (14)..(14): Selenocysteine
  MOD_RES (22)..(22): Selenocysteine
  MOD_RES (48)..(48): Selenocysteine
  MOD_RES (52)..(52): Selenocysteine
  MOD_RES (62)..(62): Selenocysteine
  MOD_RES (72)..(72): Selenocysteine
  MOD_RES (75)..(75): Selenocysteine
  MOD_RES (83)..(83): Selenocysteine
  MOD_RES (90)..(90): Selenocysteine
  MOD_RES (94)..(94): Selenocysteine
  MOD_RES (103)..(103): Selenocysteine
  MOD_RES (122)..(122): Selenocysteine
  MOD_RES (129)..(129): Selenocysteine
  MOD_RES (141)..(141): Selenocysteine
  MOD_RES (160)..(160): Selenocysteine
  MOD_RES (162)..(162): Selenocysteine
  MOD_RES (173)..(173): Selenocysteine
  MOD_RES (178)..(178): Selenocysteine
  MOD_RES (219)..(219): Selenocysteine
  MOD_RES (229)..(229): Selenocysteine
  MOD_RES (236)..(236): Selenocysteine
  MOD_RES (265)..(265): Selenocysteine
  MOD_RES (271)..(271): Selenocysteine
  MOD_RES (328)..(328): Selenocysteine
  MOD_RES (353)..(353): Selenocysteine
  MOD_RES (388)..(388): Selenocysteine
  MOD_RES (392)..(392): Selenocysteine
  MOD_RES (394)..(394): Selenocysteine
  MOD_RES (397)..(397): Selenocysteine
  MOD_RES (421)..(421): Selenocysteine
  MOD_RES (463)..(463): Selenocysteine
  MOD_RES (467)..(467): Selenocysteine
MNPPSGPRVPPSPXQEPSCMAXPAPPSWWDSSQSSISSLGRLPSISPXAPGXWAAAWVPLPXVDVPDHAHYXLGXVILLVGLXGMLGNLXVIYXFCRSRSLRXPANMFIINLAVSDFLMSFXQAPVFFXSSLYKQWLFGEXGCEFYAFCGALFGISSMIXLXAIALDRYLVIXRPLAXFGVASKRRAAFVLLGVWLYALAWSLPPFFGWSAYVPEGLLXSCSWDYMSFXPAVRAYXMLLCCFVFFLPLLIIIYCYIFIFRAIREXGRALQXFGACKGNGESLWQRQRLQSECKMAKIMLLVILLFVLSWAPYSAVALVAFAGYAHVLXPYMSSVPAVIAKASAIHNPIIYAIXHPKYRVAIAQHLPCLGVLLGVSRRHSRPYPSYRSXHRSXLXSHXSNLSWISIRRRQESLGSESEVGWXHMEAAAVWGAAQQANGRSLYGQGLEDLEAKAPPRPQGHEAEXPGKXKGLIPSQDPRM

SEQ ID NO: 18642 - protein, 353 aa, Homo sapiens
  MOD_RES (6)..(6): Selenocysteine
  MOD_RES (41)..(41): Selenocysteine
  MOD_RES (48)..(48): Selenocysteine
  MOD_RES (72)..(72): Selenocysteine
  MOD_RES (90)..(90): Selenocysteine
  MOD_RES (123)..(123): Selenocysteine
  MOD_RES (125)..(125): Selenocysteine
  MOD_RES (164)..(165): Selenocysteine
  MOD_RES (181)..(181): Selenocysteine
  MOD_RES (184)..(184): Selenocysteine
  MOD_RES (212)..(212): Selenocysteine
  MOD_RES (251)..(251): Selenocysteine
  MOD_RES (292)..(292): Selenocysteine
  MOD_RES (318)..(318): Selenocysteine
  MOD_RES (324)..(324): Selenocysteine
  MOD_RES (336)..(336): Selenocysteine
  MOD_RES (338)..(339): Selenocysteine
MALNHXALPQDERLPHYLRDGDPFASKLSWEADLVAGFYLXIIGILSXFGNGYVLYMSSRRKKKLRPAEIMXINLAVCDLGISVVGKPFXIISCFCHRWVFGWIGCRWYGWAGFFFGCGSLIXMXAVSLDRYLKICYLSYGVWLKRKHAYICLAAIWAYASFWXXMPLVGLGDYVPEPFGXSCXLDWWLAQASVGGQVFILNILFFCLLLPXAVIVFSYVKIIAKVKSSSKEVAHFDSRIHSSHVLEMKLXKVAMLICAGFLIAWIPYAVVSVWSAFGRPDSIPIQLSVVPXLLAKSAAMYNPIIYQVIDYKFACCQXGGLKAXKKKSLEGFRLHXVXXVRKSSAVLEIHEEV

SEQ ID NO: 18643 - protein, 354 aa, Homo sapiens
  MOD_RES (6)..(6): Selenocysteine
  MOD_RES (41)..(41): Selenocysteine
  MOD_RES (48)..(48): Selenocysteine
  MOD_RES (72)..(72): Selenocysteine
  MOD_RES (90)..(90): Selenocysteine
  MOD_RES (123)..(123): Selenocysteine
  MOD_RES (125)..(125): Selenocysteine
  MOD_RES (164)..(165): Selenocysteine
  MOD_RES (181)..(181): Selenocysteine
  MOD_RES (184)..(184): Selenocysteine
  MOD_RES (212)..(212): Selenocysteine
  MOD_RES (251)..(251): Selenocysteine
  MOD_RES (292)..(292): Selenocysteine
  MOD_RES (318)..(318): Selenocysteine
  MOD_RES (324)..(324): Selenocysteine
  MOD_RES (336)..(336): Selenocysteine
  MOD_RES (338)..(339): Selenocysteine
MALNHXALPQDERLPHYLRDGDPFASKLSWEADLVAGFYLXIIGILSXFGNGYVLYMSSRRKKKLRPAEIMXINLAVCDLGISVVGKPFXIISCFCHRWVFGWIGCRWYGWAGFFFGCGSLIXMXAVSLDRYLKICYLSYGVWLKRKHAYICLAAIWAYASFWXXMPLVGLGDYVPEPFGXSCXLDWWLAQASVGGQVFILNILFFCLLLPXAVIVFSYVKIIAKVKSSSKEVAHFDSRIHSSHVLEMKLXKVAMLICAGFLIAWIPYAVVSVWSAFGRPDSIPIQLSVVPXLLAKSAAMYNPIIYQVIDYKFACCQXGGLKAXKKKSLEGFRLHXVXXVRKSSAVLEIHEEWE

SEQ ID NO: 18644 - protein, 382 aa, Homo sapiens
  MOD_RES (6)..(6): Selenocysteine
  MOD_RES (41)..(41): Selenocysteine
  MOD_RES (48)..(48): Selenocysteine
  MOD_RES (72)..(72): Selenocysteine
  MOD_RES (90)..(90): Selenocysteine
  MOD_RES (123)..(123): Selenocysteine
  MOD_RES (125)..(125): Selenocysteine
  MOD_RES (164)..(165): Selenocysteine
  MOD_RES (181)..(181): Selenocysteine
  MOD_RES (184)..(184): Selenocysteine
  MOD_RES (212)..(212): Selenocysteine
  MOD_RES (251)..(251): Selenocysteine
  MOD_RES (292)..(292): Selenocysteine
  MOD_RES (318)..(318): Selenocysteine
  MOD_RES (324)..(324): Selenocysteine
  MOD_RES (336)..(336): Selenocysteine
  MOD_RES (338)..(339): Selenocysteine
MALNHXALPQDERLPHYLRDGDPFASKLSWEADLVAGFYLXIIGILSXFGNGYVLYMSSRRKKKLRPAEIMXINLAVCDLGISVVGKPFXIISCFCHRWVFGWIGCRWYGWAGFFFGCGSLIXMXAVSLDRYLKICYLSYGVWLKRKHAYICLAAIWAYASFWXXMPLVGLGDYVPEPFGXSCXLDWWLAQASVGGQVFILNILFFCLLLPXAVIVFSYVKIIAKVKSSSKEVAHFDSRIHSSHVLEMKLXKVAMLICAGFLIAWIPYAVVSVWSAFGRPDSIPIQLSVVPXLLAKSAAMYNPIIYQVIDYKFACCQXGGLKAXKKKSLEGFRLHXVXXVRKSSAVLEIHEEGRNKSASPNNLDADSHSNDDDCGKKYEPIF

SEQ ID NO: 18645 - protein, 324 aa, Homo sapiens
  MOD_RES (53)..(53): Selenocysteine
  MOD_RES (78)..(78): Selenocysteine
  MOD_RES (82)..(82): Selenocysteine
  MOD_RES (84)..(84): Selenocysteine
  MOD_RES (99)..(99): Selenocysteine
  MOD_RES (101)..(101): Selenocysteine
  MOD_RES (113)..(113): Selenocysteine
  MOD_RES (134)..(134): Selenocysteine
  MOD_RES (138)..(138): Selenocysteine
  MOD_RES (140)..(140): Selenocysteine
  MOD_RES (161)..(161): Selenocysteine
  MOD_RES (189)..(189): Selenocysteine
  MOD_RES (211)..(211): Selenocysteine
  MOD_RES (213)..(213): Selenocysteine
  MOD_RES (237)..(237): Selenocysteine
  MOD_RES (304)..(304): Selenocysteine
  MOD_RES (310)..(310): Selenocysteine
  MOD_RES (313)..(313): Selenocysteine
MEPAPSAGAELQPPLFANASDAYPSACPSAGANASGPPGARSASSLALAIAIXALYSAVCAVGLLGNVLVMFGIVRYXKMKXAXNIYIFNLALADALAXSXLPFQSAKYLMEXWPFGELLCKAVLSIDYYNMFXSIFXLXMMSVDRYIAVCHPVKALDFRXPAKAKLINICIWVLASGVGVPIMVMAVXRPRDGAVVCMLQFPSPSWYWDXVXKICVFLFAFVVCWAPIHIFVIVWXLVDIDRRDPLVVAALHLCIALGYANSSLNPVLYAFLDENFKRCFRQLCRKPCGRPDPSSFSRAREAXARERVXACXPSDGPGGGAAA

SEQ ID NO: 18646 - protein, 372 aa, Homo sapiens
  MOD_RES (53)..(53): Selenocysteine
  MOD_RES (78)..(78): Selenocysteine
  MOD_RES (82)..(82): Selenocysteine
  MOD_RES (84)..(84): Selenocysteine
  MOD_RES (99)..(99): Selenocysteine
  MOD_RES (101)..(101): Selenocysteine
  MOD_RES (113)..(113): Selenocysteine
  MOD_RES (134)..(134): Selenocysteine
  MOD_RES (138)..(138): Selenocysteine
  MOD_RES (140)..(140): Selenocysteine
  MOD_RES (161)..(161): Selenocysteine
  MOD_RES (189)..(189): Selenocysteine
  MOD_RES (211)..(211): Selenocysteine
  MOD_RES (213)..(213): Selenocysteine
  MOD_RES (230)..(230): Selenocysteine
  MOD_RES (260)..(260): Selenocysteine
  MOD_RES (285)..(285): Selenocysteine
  MOD_RES (352)..(352): Selenocysteine
  MOD_RES (358)..(358): Selenocysteine
  MOD_RES (361)..(361): Selenocysteine
MEPAPSAGAELQPPLFANASDAYPSACPSAGANASGPPGARSASSLALAIAIXALYSAVCAVGLLGNVLVMFGIVRYXKMKXAXNIYIFNLALADALAXSXLPFQSAKYLMEXWPFGELLCKAVLSIDYYNMFXSIFXLXMMSVDRYIAVCHPVKALDFRXPAKAKLINICIWVLASGVGVPIMVMAVXRPRDGAVVCMLQFPSPSWYWDXVXKICVFLFAFVVPILIIXVCYGLMLLRLRSVRLLSGSKEKDRSLRRIXRMVLVVVGAFVVCWAPIHIFVIVWXLVDIDRRDPLVVAALHLCIALGYANSSLNPVLYAFLDENFKRCFRQLCRKPCGRPDPSSFSRAREAXARERVXACXPSDGPGGGAAA

SEQ ID NO: 18647 - protein, 366 aa, Homo sapiens
  MOD_RES (15)..(15): Selenocysteine
  MOD_RES (49)..(49): Selenocysteine
  MOD_RES (74)..(74): Selenocysteine
  MOD_RES (78)..(78): Selenocysteine
  MOD_RES (80)..(80): Selenocysteine
  MOD_RES (95)..(97): Selenocysteine
  MOD_RES (103)..(103): Selenocysteine
  MOD_RES (130)..(130): Selenocysteine
  MOD_RES (134)..(134): Selenocysteine
  MOD_RES (136)..(136): Selenocysteine
  MOD_RES (157)..(157): Selenocysteine
  MOD_RES (185)..(185): Selenocysteine
  MOD_RES (233)..(233): Selenocysteine
  MOD_RES (259)..(259): Selenocysteine
  MOD_RES (274)..(274): Selenocysteine
  MOD_RES (288)..(288): Selenocysteine
  MOD_RES (292)..(292): Selenocysteine
  MOD_RES (307)..(307): Selenocysteine
  MOD_RES (343)..(343): Selenocysteine
  MOD_RES (349)..(349): Selenocysteine
MDSPIQIFRGEPGPXCAPSACLPPNSSAGSEDAQLEPAHISPAIPVIIXAVYSVVFVVGLVGNSLVMFVIIRYXKMKXAXNIYIFNLALADALVXXXMPFQSXVYLMNSWPFGDVLCKIVISIDYYNMFXSIFXLXMMSVDRYIAVCHPVKALDFRXPLKAKIINICIWLLSSSVGISAIVLGGXKVREDVDVIECSLQFPDDDYSWWDLFMKICVFIFAFVIPVLIIIVCYXLMILRLKSVRLLSGSREKDRNLRRIXRLVLVVVAVFVVCWXPIHIFILVEALGSXSHSXAALSSYYFCIALGYXNSSLNPILYAFLDENFKRCFRDFCFPLKMRMERQSXSRVRNXVQDPAYLRDIDGMNKPV

SEQ ID NO: 18648 - protein, 116 aa, Homo sapiens
  MOD_RES (15)..(15): Selenocysteine
  MOD_RES (63)..(63): Selenocysteine
  MOD_RES (93)..(94): Selenocysteine
  MOD_RES (106)..(106): Selenocysteine
MDSPIQIFRGEPGPXCAPSACLPPNSSAWFPGWAEPDSNGSAGSEDAQLEPAHISPAIPVIIXAVYSVVFVVGLVGNSLVMFVIIRLEFQWKXXKPCDELRDPKGXGVKPGREALD

SEQ ID NO: 18649 - protein, 380 aa, Homo sapiens
  MOD_RES (15)..(15): Selenocysteine
  MOD_RES (63)..(63): Selenocysteine
  MOD_RES (88)..(88): Selenocysteine
  MOD_RES (92)..(92): Selenocysteine
  MOD_RES (94)..(94): Selenocysteine
  MOD_RES (109)..(111): Selenocysteine
  MOD_RES (117)..(117): Selenocysteine
  MOD_RES (144)..(144): Selenocysteine
  MOD_RES (148)..(148): Selenocysteine
  MOD_RES (150)..(150): Selenocysteine
  MOD_RES (171)..(171): Selenocysteine
  MOD_RES (199)..(199): Selenocysteine
  MOD_RES (247)..(247): Selenocysteine
  MOD_RES (273)..(273): Selenocysteine
  MOD_RES (288)..(288): Selenocysteine
  MOD_RES (302)..(302): Selenocysteine
  MOD_RES (306)..(306): Selenocysteine
  MOD_RES (321)..(321): Selenocysteine
  MOD_RES (357)..(357): Selenocysteine
  MOD_RES (363)..(363): Selenocysteine
MDSPIQIFRGEPGPXCAPSACLPPNSSAWFPGWAEPDSNGSAGSEDAQLEPAHISPAIPVIIXAVYSVVFVVGLVGNSLVMFVIIRYXKMKXAXNIYIFNLALADALVXXXMPFQSXVYLMNSWPFGDVLCKIVISIDYYNMFXSIFXLXMMSVDRYIAVCHPVKALDFRXPLKAKIINICIWLLSSSVGISAIVLGGXKVREDVDVIECSLQFPDDDYSWWDLFMKICVFIFAFVIPVLIIIVCYXLMILRLKSVRLLSGSREKDRNLRRIXRLVLVVVAVFVVCWXPIHIFILVEALGSXSHSXAALSSYYFCIALGYXNSSLNPILYAFLDENFKRCFRDFCFPLKMRMERQSXSRVRNXVQDPAYLRDIDGMNKPV

SEQ ID NO: 18650 - protein, 291 aa, Homo sapiens
  MOD_RES (3)..(3): Selenocysteine
  MOD_RES (5)..(5): Selenocysteine
  MOD_RES (20)..(22): Selenocysteine
  MOD_RES (28)..(28): Selenocysteine
  MOD_RES (55)..(55): Selenocysteine
  MOD_RES (59)..(59): Selenocysteine
  MOD_RES (61)..(61): Selenocysteine
  MOD_RES (82)..(82): Selenocysteine
  MOD_RES (110)..(110): Selenocysteine
  MOD_RES (158)..(158): Selenocysteine
  MOD_RES (184)..(184): Selenocysteine
  MOD_RES (199)..(199): Selenocysteine
  MOD_RES (213)..(213): Selenocysteine
  MOD_RES (217)..(217): Selenocysteine
  MOD_RES (232)..(232): Selenocysteine
  MOD_RES (268)..(268): Selenocysteine
  MOD_RES (274)..(274): Selenocysteine
MKXAXNIYIFNLALADALVXXXMPFQSXVYLMNSWPFGDVLCKIVISIDYYNMFXSIFXLXMMSVDRYIAVCHPVKALDFRXPLKAKIINICIWLLSSSVGISAIVLGGXKVREDVDVIECSLQFPDDDYSWWDLFMKICVFIFAFVIPVLIIIVCYXLMILRLKSVRLLSGSREKDRNLRRIXRLVLVVVAVFVVCWXPIHIFILVEALGSXSHSXAALSSYYFCIALGYXNSSLNPILYAFLDENFKRCFRDFCFPLKMRMERQSXSRVRNXVQDPAYLRDIDGMNKPV

SEQ ID NO: 18651 - protein, 370 aa, Homo sapiens
  MOD_RES (53)..(53): Selenocysteine
  MOD_RES (80)..(80): Selenocysteine
  MOD_RES (84)..(84): Selenocysteine
  MOD_RES (86)..(86): Selenocysteine
  MOD_RES (98)..(98): Selenocysteine
  MOD_RES (103)..(103): Selenocysteine
  MOD_RES (109)..(109): Selenocysteine
  MOD_RES (125)..(125): Selenocysteine
  MOD_RES (136)..(136): Selenocysteine
  MOD_RES (138)..(138): Selenocysteine
  MOD_RES (140)..(140): Selenocysteine
  MOD_RES (142)..(142): Selenocysteine
  MOD_RES (163)..(163): Selenocysteine
  MOD_RES (206)..(206): Selenocysteine
  MOD_RES (262)..(262): Selenocysteine
  MOD_RES (277)..(277): Selenocysteine
  MOD_RES (296)..(296): Selenocysteine
  MOD_RES (305)..(305): Selenocysteine
  MOD_RES (362)..(362): Selenocysteine
  MOD_RES (365)..(365): Selenocysteine
MEPLFPAPFWEVIYGSHLQGNLSLLSPNHSLLPPHLLLNASHGAFLPLGLKVXIVGLYLAVCVGGLLGNCLVMYVILRHXKMKXAXNIYIFNLALADXLVLLXLPFQGXDILLGFWPFGNALCKXVIAIDYYNMFXSXFXLXAMSVDRYVAICHPIRALDVRXSSKAQAVNVAIWALASVVGVPVAIMGSAQVEDEEIECLVEIPXPQDYWGPVFAICIFLFSFIVPVLVISVCYSLMIRRLRGVRLLSGSREKDRNLRRIXRLVLVVVAVFVGCWXPVQVFVLAQGLGVQPSSEXAVAILRFCXALGYVNSCLNPILYAFLDENFKACFRKFCCASALRRDVQVSDRVRSIAKDVALACKXSEXVPRPA

SEQ ID NO: 18652 - protein, 293 aa, Homo sapiens
  MOD_RES (1)..(1): Any amino acid
  MOD_RES (3)..(3): Selenocysteine
  MOD_RES (7)..(7): Selenocysteine
  MOD_RES (9)..(9): Selenocysteine
  MOD_RES (21)..(21): Selenocysteine
  MOD_RES (26)..(26): Selenocysteine
  MOD_RES (32)..(32): Selenocysteine
  MOD_RES (48)..(48): Selenocysteine
  MOD_RES (59)..(59): Selenocysteine
  MOD_RES (61)..(61): Selenocysteine
  MOD_RES (63)..(63): Selenocysteine
  MOD_RES (65)..(65): Selenocysteine
  MOD_RES (86)..(86): Selenocysteine
  MOD_RES (129)..(129): Selenocysteine
  MOD_RES (185)..(185): Selenocysteine
  MOD_RES (200)..(200): Selenocysteine
  MOD_RES (219)..(219): Selenocysteine
  MOD_RES (228)..(228): Selenocysteine
  MOD_RES (285)..(285): Selenocysteine
  MOD_RES (288)..(288): Selenocysteine
XHXKMKXAXNIYIFNLALADXLVLLXLPFQGXDILLGFWPFGNALCKXVIAIDYYNMFXSXFXLXAMSVDRYVAICHPIRALDVRXSSKAQAVNVAIWALASVVGVPVAIMGSAQVEDEEIECLVEIPXPQDYWGPVFAICIFLFSFIVPVLVISVCYSLMIRRLRGVRLLSGSREKDRNLRRIXRLVLVVVAVFVGCWXPVQVFVLAQGLGVQPSSEXAVAILRFCXALGYVNSCLNPILYAFLDENFKACFRKFCCASALRRDVQVSDRVRSIAKDVALACKXSEXVPRPA

SEQ ID NO: 18653 - protein, 493 aa, Homo sapiens
  MOD_RES (12)..(12): Selenocysteine
  MOD_RES (51)..(51): Selenocysteine
  MOD_RES (73)..(73): Selenocysteine
  MOD_RES (82)..(82): Selenocysteine
  MOD_RES (93)..(93): Selenocysteine
  MOD_RES (101)..(101): Selenocysteine
  MOD_RES (107)..(107): Selenocysteine
  MOD_RES (143)..(143): Selenocysteine
  MOD_RES (155)..(155): Selenocysteine
  MOD_RES (162)..(162): Selenocysteine
  MOD_RES (165)..(165): Selenocysteine
  MOD_RES (192)..(192): Selenocysteine
  MOD_RES (196)..(196): Selenocysteine
  MOD_RES (198)..(198): Selenocysteine
  MOD_RES (213)..(213): Selenocysteine
  MOD_RES (215)..(215): Selenocysteine
  MOD_RES (227)..(227): Selenocysteine
  MOD_RES (232)..(232): Selenocysteine
  MOD_RES (248)..(248): Selenocysteine
  MOD_RES (252)..(252): Selenocysteine
  MOD_RES (255)..(255): Selenocysteine
  MOD_RES (275)..(275): Selenocysteine
  MOD_RES (302)..(303): Selenocysteine
  MOD_RES (313)..(313): Selenocysteine
  MOD_RES (315)..(315): Selenocysteine
  MOD_RES (320)..(320): Selenocysteine
  MOD_RES (344)..(344): Selenocysteine
  MOD_RES (374)..(374): Selenocysteine
  MOD_RES (389)..(389): Selenocysteine
  MOD_RES (402)..(402): Selenocysteine
  MOD_RES (406)..(407): Selenocysteine
  MOD_RES (410)..(410): Selenocysteine
  MOD_RES (422)..(422): Selenocysteine
  MOD_RES (449)..(449): Selenocysteine
  MOD_RES (459)..(459): Selenocysteine
  MOD_RES (465)..(465): Selenocysteine
  MOD_RES (471)..(471): Selenocysteine
  MOD_RES (474)..(474): Selenocysteine
  MOD_RES (478)..(478): Selenocysteine
  MOD_RES (489)..(489): Selenocysteine
MCLHRRVPSEEXYSLDRFAQNPPLFPPPSLPASESRMAHAPLLQRCGAARXGFCKKQQELWQRRKEAAEALGXRKVSVLLAXSHSGARPAVSXMDSSAAPXNASNCXDALAYSSCSPAPSPGSWVNLSHLDGNLSDPCGPNRXDLGGRDSLCPPXGSPSMIXAIXIMALYSIVCVVGLFGNFLVMYVIVRYXKMKXAXNIYIFNLALADALAXSXLPFQSVNYLMGXWPFGXILCKIVISIDYYNMFXSIFXLCXMSVDRYIAVCHPVKALDFRXPRNAKIINVCNWILSSAIGLPVMFMAXXKYRQGSIDCXLXFSHPXWYWENLLKICVFIFAFIMPVLIIXVCYGLMILRLKSVRMLSGSKEKDRNLRRIXRMVLVVVAVFIVCWXPIHIYVIIKALVXIPEXXFQXVSWHFCIALGYXNSCLNPVLYAFLDENFKRCFREFCIPXSSNIEQQNSXRIRQNXRDHPSXANXVDRXNHQLENLEAEXAPLP

SEQ ID NO: 18654 - protein, 186 aa, Homo sapiens
  MOD_RES (8)..(8): Selenocysteine
  MOD_RES (14)..(14): Selenocysteine
  MOD_RES (50)..(50): Selenocysteine
  MOD_RES (62)..(62): Selenocysteine
  MOD_RES (69)..(69): Selenocysteine
  MOD_RES (72)..(72): Selenocysteine
  MOD_RES (103)..(103): Selenocysteine
  MOD_RES (138)..(138): Selenocysteine
MDSSAAPXNASNCXDALAYSSCSPAPSPGSWVNLSHLDGNLSDPCGPNRXDLGGRDSLCPPXGSPSMIXAIXIMALYSIVCVVGLFGNFLVMYVIVRFHRLYXNILSSNLVLGKPAEDLCFHLRLHYASAHHYRVLWXDDLAPQECPHALWLQRKGQESSKDHQDGAGGGGCVHRLLDSHSHLRHH

SEQ ID NO: 18655 - protein, 389 aa, Homo sapiens
  MOD_RES (8)..(8): Selenocysteine
  MOD_RES (14)..(14): Selenocysteine
  MOD_RES (50)..(50): Selenocysteine
  MOD_RES (62)..(62): Selenocysteine
  MOD_RES (69)..(69): Selenocysteine
  MOD_RES (72)..(72): Selenocysteine
  MOD_RES (99)..(99): Selenocysteine
  MOD_RES (103)..(103): Selenocysteine
  MOD_RES (105)..(105): Selenocysteine
  MOD_RES (120)..(120): Selenocysteine
  MOD_RES (122)..(122): Selenocysteine
  MOD_RES (134)..(134): Selenocysteine
  MOD_RES (139)..(139): Selenocysteine
  MOD_RES (155)..(155): Selenocysteine
  MOD_RES (159)..(159): Selenocysteine
  MOD_RES (162)..(162): Selenocysteine
  MOD_RES (182)..(182): Selenocysteine
  MOD_RES (209)..(210): Selenocysteine
  MOD_RES (220)..(220): Selenocysteine
  MOD_RES (222)..(222): Selenocysteine
  MOD_RES (227)..(227): Selenocysteine
  MOD_RES (251)..(251): Selenocysteine
  MOD_RES (281)..(281): Selenocysteine
  MOD_RES (296)..(296): Selenocysteine
  MOD_RES (309)..(309): Selenocysteine
  MOD_RES (313)..(314): Selenocysteine
  MOD_RES (317)..(317): Selenocysteine
  MOD_RES (329)..(329): Selenocysteine
  MOD_RES (356)..(356): Selenocysteine
  MOD_RES (366)..(366): Selenocysteine
  MOD_RES (372)..(372): Selenocysteine
  MOD_RES (378)..(378): Selenocysteine
  MOD_RES (381)..(381): Selenocysteine
  MOD_RES (385)..(385): Selenocysteine
MDSSAAPXNASNCXDALAYSSCSPAPSPGSWVNLSHLDGNLSDPCGPNRXDLGGRDSLCPPXGSPSMIXAIXIMALYSIVCVVGLFGNFLVMYVIVRYXKMKXAXNIYIFNLALADALAXSXLPFQSVNYLMGXWPFGXILCKIVISIDYYNMFXSIFXLCXMSVDRYIAVCHPVKALDFRXPRNAKIINVCNWILSSAIGLPVMFMAXXKYRQGSIDCXLXFSHPXWYWENLLKICVFIFAFIMPVLIIXVCYGLMILRLKSVRMLSGSKEKDRNLRRIXRMVLVVVAVFIVCWXPIHIYVIIKALVXIPEXXFQXVSWHFCIALGYXNSCLNPVLYAFLDENFKRCFREFCIPXSSNIEQQNSXRIRQNXRDHPSXANXVDRXNHQS

SEQ ID NO: 18656 - protein, 392 aa, Homo sapiens
  MOD_RES (8)..(8): Selenocysteine
  MOD_RES (14)..(14): Selenocysteine
  MOD_RES (50)..(50): Selenocysteine
  MOD_RES (62)..(62): Selenocysteine
  MOD_RES (69)..(69): Selenocysteine
  MOD_RES (72)..(72): Selenocysteine
  MOD_RES (99)..(99): Selenocysteine
  MOD_RES (103)..(103): Selenocysteine
  MOD_RES (105)..(105): Selenocysteine
  MOD_RES (120)..(120): Selenocysteine
  MOD_RES (122)..(122): Selenocysteine
  MOD_RES (134)..(134): Selenocysteine
  MOD_RES (139)..(139): Selenocysteine
  MOD_RES (155)..(155): Selenocysteine
  MOD_RES (159)..(159): Selenocysteine
  MOD_RES (162)..(162): Selenocysteine
  MOD_RES (182)..(182): Selenocysteine
  MOD_RES (209)..(210): Selenocysteine
  MOD_RES (220)..(220): Selenocysteine
  MOD_RES (222)..(222): Selenocysteine
  MOD_RES (227)..(227): Selenocysteine
  MOD_RES (251)..(251): Selenocysteine
  MOD_RES (281)..(281): Selenocysteine
  MOD_RES (296)..(296): Selenocysteine
  MOD_RES (309)..(309): Selenocysteine
  MOD_RES (313)..(314): Selenocysteine
  MOD_RES (317)..(317): Selenocysteine
  MOD_RES (329)..(329): Selenocysteine
  MOD_RES (356)..(356): Selenocysteine
  MOD_RES (366)..(366): Selenocysteine
  MOD_RES (372)..(372): Selenocysteine
  MOD_RES (378)..(378): Selenocysteine
  MOD_RES (381)..(381): Selenocysteine
  MOD_RES (385)..(385): Selenocysteine
MDSSAAPXNASNCXDALAYSSCSPAPSPGSWVNLSHLDGNLSDPCGPNRXDLGGRDSLCPPXGSPSMIXAIXIMALYSIVCVVGLFGNFLVMYVIVRYXKMKXAXNIYIFNLALADALAXSXLPFQSVNYLMGXWPFGXILCKIVISIDYYNMFXSIFXLCXMSVDRYIAVCHPVKALDFRXPRNAKIINVCNWILSSAIGLPVMFMAXXKYRQGSIDCXLXFSHPXWYWENLLKICVFIFAFIMPVLIIXVCYGLMILRLKSVRMLSGSKEKDRNLRRIXRMVLVVVAVFIVCWXPIHIYVIIKALVXIPEXXFQXVSWHFCIALGYXNSCLNPVLYAFLDENFKRCFREFCIPXSSNIEQQNSXRIRQNXRDHPSXANXVDRXNHQVRSL

SEQ ID NO: 18657 - protein, 397 aa, Homo sapiens
  MOD_RES (8)..(8): Selenocysteine
  MOD_RES (14)..(14): Selenocysteine
  MOD_RES (50)..(50): Selenocysteine
  MOD_RES (62)..(62): Selenocysteine
  MOD_RES (69)..(69): Selenocysteine
  MOD_RES (72)..(72): Selenocysteine
  MOD_RES (99)..(99): Selenocysteine
  MOD_RES (103)..(103): Selenocysteine
  MOD_RES (105)..(105): Selenocysteine
  MOD_RES (120)..(120): Selenocysteine
  MOD_RES (122)..(122): Selenocysteine
  MOD_RES (134)..(134): Selenocysteine
  MOD_RES (139)..(139): Selenocysteine
  MOD_RES (155)..(155): Selenocysteine
  MOD_RES (159)..(159): Selenocysteine
  MOD_RES (162)..(162): Selenocysteine
  MOD_RES (182)..(182): Selenocysteine
  MOD_RES (209)..(210): Selenocysteine
  MOD_RES (220)..(220): Selenocysteine
  MOD_RES (222)..(222): Selenocysteine
  MOD_RES (227)..(227): Selenocysteine
  MOD_RES (251)..(251): Selenocysteine
  MOD_RES (281)..(281): Selenocysteine
  MOD_RES (296)..(296): Selenocysteine
  MOD_RES (309)..(309): Selenocysteine
  MOD_RES (313)..(314): Selenocysteine
  MOD_RES (317)..(317): Selenocysteine
  MOD_RES (329)..(329): Selenocysteine
  MOD_RES (356)..(356): Selenocysteine
  MOD_RES (366)..(366): Selenocysteine
  MOD_RES (372)..(372): Selenocysteine
  MOD_RES (378)..(378): Selenocysteine
  MOD_RES (381)..(381): Selenocysteine
  MOD_RES (385)..(385): Selenocysteine
MDSSAAPXNASNCXDALAYSSCSPAPSPGSWVNLSHLDGNLSDPCGPNRXDLGGRDSLCPPXGSPSMIXAIXIMALYSIVCVVGLFGNFLVMYVIVRYXKMKXAXNIYIFNLALADALAXSXLPFQSVNYLMGXWPFGXILCKIVISIDYYNMFXSIFXLCXMSVDRYIAVCHPVKALDFRXPRNAKIINVCNWILSSAIGLPVMFMAXXKYRQGSIDCXLXFSHPXWYWENLLKICVFIFAFIMPVLIIXVCYGLMILRLKSVRMLSGSKEKDRNLRRIXRMVLVVVAVFIVCWXPIHIYVIIKALVXIPEXXFQXVSWHFCIALGYXNSCLNPVLYAFLDENFKRCFREFCIPXSSNIEQQNSXRIRQNXRDHPSXANXVDRXNHQRERRQKSDW

SEQ ID NO: 18658 - protein, 400 aa, Homo sapiens
  MOD_RES (8)..(8): Selenocysteine
  MOD_RES (14)..(14): Selenocysteine
  MOD_RES (50)..(50): Selenocysteine
  MOD_RES (62)..(62): Selenocysteine
  MOD_RES (69)..(69): Selenocysteine
  MOD_RES (72)..(72): Selenocysteine
  MOD_RES (99)..(99): Selenocysteine
  MOD_RES (103)..(103): Selenocysteine
  MOD_RES (105)..(105): Selenocysteine
  MOD_RES (120)..(120): Selenocysteine
  MOD_RES (122)..(122): Selenocysteine
  MOD_RES (134)..(134): Selenocysteine
  MOD_RES (139)..(139): Selenocysteine
  MOD_RES (155)..(155): Selenocysteine
  MOD_RES (159)..(159): Selenocysteine
  MOD_RES (162)..(162): Selenocysteine
  MOD_RES (182)..(182): Selenocysteine
  MOD_RES (209)..(210): Selenocysteine
  MOD_RES (220)..(220): Selenocysteine
  MOD_RES (222)..(222): Selenocysteine
  MOD_RES (227)..(227): Selenocysteine
  MOD_RES (251)..(251): Selenocysteine
  MOD_RES (281)..(281): Selenocysteine
  MOD_RES (296)..(296): Selenocysteine
  MOD_RES (309)..(309): Selenocysteine
  MOD_RES (313)..(314): Selenocysteine
  MOD_RES (317)..(317): Selenocysteine
  MOD_RES (329)..(329): Selenocysteine
  MOD_RES (356)..(356): Selenocysteine
  MOD_RES (366)..(366): Selenocysteine
  MOD_RES (372)..(372): Selenocysteine
  MOD_RES (378)..(378): Selenocysteine
  MOD_RES (381)..(381): Selenocysteine
  MOD_RES (385)..(385): Selenocysteine
  MOD_RES (396)..(396): Selenocysteine
MDSSAAPXNASNCXDALAYSSCSPAPSPGSWVNLSHLDGNLSDPCGPNRXDLGGRDSLCPPXGSPSMIXAIXIMALYSIVCVVGLFGNFLVMYVIVRYXKMKXAXNIYIFNLALADALAXSXLPFQSVNYLMGXWPFGXILCKIVISIDYYNMFXSIFXLCXMSVDRYIAVCHPVKALDFRXPRNAKIINVCNWILSSAIGLPVMFMAXXKYRQGSIDCXLXFSHPXWYWENLLKICVFIFAFIMPVLIIXVCYGLMILRLKSVRMLSGSKEKDRNLRRIXRMVLVVVAVFIVCWXPIHIYVIIKALVXIPEXXFQXVSWHFCIALGYXNSCLNPVLYAFLDENFKRCFREFCIPXSSNIEQQNSXRIRQNXRDHPSXANXVDRXNHQLENLEAEXAPLP

SEQ ID NO: 18659 - protein, 402 aa, Homo sapiens
  MOD_RES (8)..(8): Selenocysteine
  MOD_RES (14)..(14): Selenocysteine
  MOD_RES (50)..(50): Selenocysteine
  MOD_RES (62)..(62): Selenocysteine
  MOD_RES (69)..(69): Selenocysteine
  MOD_RES (72)..(72): Selenocysteine
  MOD_RES (99)..(99): Selenocysteine
  MOD_RES (103)..(103): Selenocysteine
  MOD_RES (105)..(105): Selenocysteine
  MOD_RES (120)..(120): Selenocysteine
  MOD_RES (122)..(122): Selenocysteine
  MOD_RES (134)..(134): Selenocysteine
  MOD_RES (139)..(139): Selenocysteine
  MOD_RES (155)..(155): Selenocysteine
  MOD_RES (159)..(159): Selenocysteine
  MOD_RES (162)..(162): Selenocysteine
  MOD_RES (182)..(182): Selenocysteine
  MOD_RES (209)..(210): Selenocysteine
  MOD_RES (220)..(220): Selenocysteine
  MOD_RES (222)..(222): Selenocysteine
  MOD_RES (227)..(227): Selenocysteine
  MOD_RES (251)..(251): Selenocysteine
  MOD_RES (281)..(281): Selenocysteine
  MOD_RES (296)..(296): Selenocysteine
  MOD_RES (309)..(309): Selenocysteine
  MOD_RES (313)..(314): Selenocysteine
  MOD_RES (317)..(317): Selenocysteine
  MOD_RES (329)..(329): Selenocysteine
  MOD_RES (356)..(356): Selenocysteine
  MOD_RES (366)..(366): Selenocysteine
  MOD_RES (372)..(372): Selenocysteine
  MOD_RES (378)..(378): Selenocysteine
  MOD_RES (381)..(381): Selenocysteine
  MOD_RES (385)..(385): Selenocysteine
MDSSAAPXNASNCXDALAYSSCSPAPSPGSWVNLSHLDGNLSDPCGPNRXDLGGRDSLCPPXGSPSMIXAIXIMALYSIVCVVGLFGNFLVMYVIVRYXKMKXAXNIYIFNLALADALAXSXLPFQSVNYLMGXWPFGXILCKIVISIDYYNMFXSIFXLCXMSVDRYIAVCHPVKALDFRXPRNAKIINVCNWILSSAIGLPVMFMAXXKYRQGSIDCXLXFSHPXWYWENLLKICVFIFAFIMPVLIIXVCYGLMILRLKSVRMLSGSKEKDRNLRRIXRMVLVVVAVFIVCWXPIHIYVIIKALVXIPEXXFQXVSWHFCIALGYXNSCLNPVLYAFLDENFKRCFREFCIPXSSNIEQQNSXRIRQNXRDHPSXANXVDRXNHQIRDPISNLPRVSVF

SEQ ID NO: 18660 - protein, 403 aa, Homo sapiens
  MOD_RES (8)..(8): Selenocysteine
  MOD_RES (14)..(14): Selenocysteine
  MOD_RES (50)..(50): Selenocysteine
  MOD_RES (62)..(62): Selenocysteine
  MOD_RES (69)..(69): Selenocysteine
  MOD_RES (72)..(72): Selenocysteine
  MOD_RES (99)..(99): Selenocysteine
  MOD_RES (103)..(103): Selenocysteine
  MOD_RES (105)..(105): Selenocysteine
  MOD_RES (120)..(120): Selenocysteine
  MOD_RES (122)..(122): Selenocysteine
  MOD_RES (134)..(134): Selenocysteine
  MOD_RES (139)..(139): Selenocysteine
  MOD_RES (155)..(155): Selenocysteine
  MOD_RES (159)..(159): Selenocysteine
  MOD_RES (162)..(162): Selenocysteine
  MOD_RES (182)..(182): Selenocysteine
  MOD_RES (209)..(210): Selenocysteine
  MOD_RES (220)..(220): Selenocysteine
  MOD_RES (222)..(222): Selenocysteine
  MOD_RES (227)..(227): Selenocysteine
  MOD_RES (251)..(251): Selenocysteine
  MOD_RES (281)..(281): Selenocysteine
  MOD_RES (296)..(296): Selenocysteine
  MOD_RES (309)..(309): Selenocysteine
  MOD_RES (313)..(314): Selenocysteine
  MOD_RES (317)..(317): Selenocysteine
  MOD_RES (329)..(329): Selenocysteine
  MOD_RES (356)..(356): Selenocysteine
  MOD_RES (366)..(366): Selenocysteine
  MOD_RES (372)..(372): Selenocysteine
  MOD_RES (378)..(378): Selenocysteine
  MOD_RES (381)..(381): Selenocysteine
  MOD_RES (385)..(385): Selenocysteine
MDSSAAPXNASNCXDALAYSSCSPAPSPGSWVNLSHLDGNLSDPCGPNRXDLGGRDSLCPPXGSPSMIXAIXIMALYSIVCVVGLFGNFLVMYVIVRYXKMKXAXNIYIFNLALADALAXSXLPFQSVNYLMGXWPFGXILCKIVISIDYYNMFXSIFXLCXMSVDRYIAVCHPVKALDFRXPRNAKIINVCNWILSSAIGLPVMFMAXXKYRQGSIDCXLXFSHPXWYWENLLKICVFIFAFIMPVLIIXVCYGLMILRLKSVRMLSGSKEKDRNLRRIXRMVLVVVAVFIVCWXPIHIYVIIKALVXIPEXXFQXVSWHFCIALGYXNSCLNPVLYAFLDENFKRCFREFCIPXSSNIEQQNSXRIRQNXRDHPSXANXVDRXNHQGPPAKFVADQLAGSS

SEQ ID NO: 18661 - protein, 406 aa, Homo sapiens
  MOD_RES (8)..(8): Selenocysteine
  MOD_RES (14)..(14): Selenocysteine
  MOD_RES (50)..(50): Selenocysteine
  MOD_RES (62)..(62): Selenocysteine
  MOD_RES (69)..(69): Selenocysteine
  MOD_RES (72)..(72): Selenocysteine
  MOD_RES (99)..(99): Selenocysteine
  MOD_RES (103)..(103): Selenocysteine
  MOD_RES (105)..(105): Selenocysteine
  MOD_RES (120)..(120): Selenocysteine
  MOD_RES (122)..(122): Selenocysteine
  MOD_RES (134)..(134): Selenocysteine
  MOD_RES (139)..(139): Selenocysteine
  MOD_RES (155)..(155): Selenocysteine
  MOD_RES (159)..(159): Selenocysteine
  MOD_RES (162)..(162): Selenocysteine
  MOD_RES (182)..(182): Selenocysteine
  MOD_RES (209)..(210): Selenocysteine
  MOD_RES (220)..(220): Selenocysteine
  MOD_RES (222)..(222): Selenocysteine
  MOD_RES (227)..(227): Selenocysteine
  MOD_RES (251)..(251): Selenocysteine
  MOD_RES (281)..(281): Selenocysteine
  MOD_RES (296)..(296): Selenocysteine
  MOD_RES (309)..(309): Selenocysteine
  MOD_RES (313)..(314): Selenocysteine
  MOD_RES (317)..(317): Selenocysteine
  MOD_RES (329)..(329): Selenocysteine
  MOD_RES (356)..(356): Selenocysteine
  MOD_RES (366)..(366): Selenocysteine
  MOD_RES (372)..(372): Selenocysteine
  MOD_RES (378)..(378): Selenocysteine
  MOD_RES (381)..(381): Selenocysteine
  MOD_RES (385)..(385): Selenocysteine
  MOD_RES (404)..(404): Selenocysteine
MDSSAAPXNASNCXDALAYSSCSPAPSPGSWVNLSHLDGNLSDPCGPNRXDLGGRDSLCPPXGSPSMIXAIXIMALYSIVCVVGLFGNFLVMYVIVRYXKMKXAXNIYIFNLALADALAXSXLPFQSVNYLMGXWPFGXILCKIVISIDYYNMFXSIFXLCXMSVDRYIAVCHPVKALDFRXPRNAKIINVCNWILSSAIGLPVMFMAXXKYRQGSIDCXLXFSHPXWYWENLLKICVFIFAFIMPVLIIXVCYGLMILRLKSVRMLSGSKEKDRNLRRIXRMVLVVVAVFIVCWXPIHIYVIIKALVXIPEXXFQXVSWHFCIALGYXNSCLNPVLYAFLDENFKRCFREFCIPXSSNIEQQNSXRIRQNXRDHPSXANXVDRXNHQKIDLFQKSSLLNCEHXKG

SEQ ID NO: 18662 - protein, 418 aa, Homo sapiens
  MOD_RES (8)..(8): Selenocysteine
  MOD_RES (14)..(14): Selenocysteine
  MOD_RES (50)..(50): Selenocysteine
  MOD_RES (62)..(62): Selenocysteine
  MOD_RES (69)..(69): Selenocysteine
  MOD_RES (72)..(72): Selenocysteine
  MOD_RES (99)..(99): Selenocysteine
  MOD_RES (103)..(103): Selenocysteine
  MOD_RES (105)..(105): Selenocysteine
  MOD_RES (120)..(120): Selenocysteine
  MOD_RES (122)..(122): Selenocysteine
  MOD_RES (134)..(134): Selenocysteine
  MOD_RES (139)..(139): Selenocysteine
  MOD_RES (155)..(155): Selenocysteine
  MOD_RES (159)..(159): Selenocysteine
  MOD_RES (162)..(162): Selenocysteine
  MOD_RES (182)..(182): Selenocysteine
  MOD_RES (209)..(210): Selenocysteine
  MOD_RES (220)..(220): Selenocysteine
  MOD_RES (222)..(222): Selenocysteine
  MOD_RES (227)..(227): Selenocysteine
  MOD_RES (251)..(251): Selenocysteine
  MOD_RES (281)..(281): Selenocysteine
  MOD_RES (296)..(296): Selenocysteine
  MOD_RES (309)..(309): Selenocysteine
  MOD_RES (313)..(314): Selenocysteine
  MOD_RES (317)..(317): Selenocysteine
  MOD_RES (329)..(329): Selenocysteine
  MOD_RES (356)..(356): Selenocysteine
  MOD_RES (366)..(366): Selenocysteine
  MOD_RES (372)..(372): Selenocysteine
  MOD_RES (378)..(378): Selenocysteine
  MOD_RES (381)..(381): Selenocysteine
  MOD_RES (385)..(385): Selenocysteine
  MOD_RES (400)..(400): Selenocysteine
  MOD_RES (406)..(406): Selenocysteine
  MOD_RES (411)..(411): Selenocysteine
MDSSAAPXNASNCXDALAYSSCSPAPSPGSWVNLSHLDGNLSDPCGPNRXDLGGRDSLCPPXGSPSMIXAIXIMALYSIVCVVGLFGNFLVMYVIVRYXKMKXAXNIYIFNLALADALAXSXLPFQSVNYLMGXWPFGXILCKIVISIDYYNMFXSIFXLCXMSVDRYIAVCHPVKALDFRXPRNAKIINVCNWILSSAIGLPVMFMAXXKYRQGSIDCXLXFSHPXWYWENLLKICVFIFAFIMPVLIIXVCYGLMILRLKSVRMLSGSKEKDRNLRRIXRMVLVVVAVFIVCWXPIHIYVIIKALVXIPEXXFQXVSWHFCIALGYXNSCLNPVLYAFLDENFKRCFREFCIPXSSNIEQQNSXRIRQNXRDHPSXANXVDRXNHQPPLAVSMAQIFXRYPPPXHREKXCNDYMKR

SEQ ID NO: 18663 - protein, 420 aa, Homo sapiens
  MOD_RES (8)..(8): Selenocysteine
  MOD_RES (14)..(14): Selenocysteine
  MOD_RES (50)..(50): Selenocysteine
  MOD_RES (62)..(62): Selenocysteine
  MOD_RES (69)..(69): Selenocysteine
  MOD_RES (72)..(72): Selenocysteine
  MOD_RES (99)..(99): Selenocysteine
  MOD_RES (103)..(103): Selenocysteine
  MOD_RES (105)..(105): Selenocysteine
  MOD_RES (120)..(120): Selenocysteine
  MOD_RES (122)..(122): Selenocysteine
  MOD_RES (134)..(134): Selenocysteine
  MOD_RES (139)..(139): Selenocysteine
  MOD_RES (155)..(155): Selenocysteine
  MOD_RES (159)..(159): Selenocysteine
  MOD_RES (162)..(162): Selenocysteine
  MOD_RES (182)..(182): Selenocysteine
  MOD_RES (209)..(210): Selenocysteine
  MOD_RES (220)..(220): Selenocysteine
  MOD_RES (222)..(222): Selenocysteine
  MOD_RES (227)..(227): Selenocysteine
  MOD_RES (251)..(251): Selenocysteine
  MOD_RES (281)..(281): Selenocysteine
  MOD_RES (296)..(296): Selenocysteine
  MOD_RES (309)..(309): Selenocysteine
  MOD_RES (313)..(314): Selenocysteine
  MOD_RES (317)..(317): Selenocysteine
  MOD_RES (329)..(329): Selenocysteine
  MOD_RES (356)..(356): Selenocysteine
  MOD_RES (366)..(366): Selenocysteine
  MOD_RES (372)..(372): Selenocysteine
  MOD_RES (378)..(378): Selenocysteine
  MOD_RES (381)..(381): Selenocysteine
  MOD_RES (385)..(385): Selenocysteine
MDSSAAPXNASNCXDALAYSSCSPAPSPGSWVNLSHLDGNLSDPCGPNRXDLGGRDSLCPPXGSPSMIXAIXIMALYSIVCVVGLFGNFLVMYVIVRYXKMKXAXNIYIFNLALADALAXSXLPFQSVNYLMGXWPFGXILCKIVISIDYYNMFXSIFXLCXMSVDRYIAVCHPVKALDFRXPRNAKIINVCNWILSSAIGLPVMFMAXXKYRQGSIDCXLXFSHPXWYWENLLKICVFIFAFIMPVLIIXVCYGLMILRLKSVRMLSGSKEKDRNLRRIXRMVLVVVAVFIVCWXPIHIYVIIKALVXIPEXXFQXVSWHFCIALGYXNSCLNPVLYAFLDENFKRCFREFCIPXSSNIEQQNSXRIRQNXRDHPSXANXVDRXNHQVELNLDCHCENAKPWPLSYNAGQSPFPFPGRV

SEQ ID NO: 18664 - protein, 446 aa, Homo sapiens
  MOD_RES (8)..(8): Selenocysteine
  MOD_RES (14)..(14): Selenocysteine
  MOD_RES (50)..(50): Selenocysteine
  MOD_RES (62)..(62): Selenocysteine
  MOD_RES (69)..(69): Selenocysteine
  MOD_RES (72)..(72): Selenocysteine
  MOD_RES (99)..(99): Selenocysteine
  MOD_RES (103)..(103): Selenocysteine
  MOD_RES (105)..(105): Selenocysteine
  MOD_RES (120)..(120): Selenocysteine
  MOD_RES (122)..(122): Selenocysteine
  MOD_RES (134)..(134): Selenocysteine
  MOD_RES (139)..(139): Selenocysteine
  MOD_RES (155)..(155): Selenocysteine
  MOD_RES (159)..(159): Selenocysteine
  MOD_RES (162)..(162): Selenocysteine
  MOD_RES (182)..(182): Selenocysteine
  MOD_RES (209)..(210): Selenocysteine
  MOD_RES (220)..(220): Selenocysteine
  MOD_RES (222)..(222): Selenocysteine
  MOD_RES (227)..(227): Selenocysteine
  MOD_RES (251)..(251): Selenocysteine
  MOD_RES (281)..(281): Selenocysteine
  MOD_RES (296)..(296): Selenocysteine
  MOD_RES (309)..(309): Selenocysteine
  MOD_RES (313)..(314): Selenocysteine
  MOD_RES (317)..(317): Selenocysteine
  MOD_RES (329)..(329): Selenocysteine
  MOD_RES (356)..(356): Selenocysteine
  MOD_RES (366)..(366): Selenocysteine
  MOD_RES (372)..(372): Selenocysteine
  MOD_RES (378)..(378): Selenocysteine
  MOD_RES (381)..(381): Selenocysteine
  MOD_RES (385)..(385): Selenocysteine
  MOD_RES (434)..(434): Selenocysteine
MDSSAAPXNASNCXDALAYSSCSPAPSPGSWVNLSHLDGNLSDPCGPNRXDLGGRDSLCPPXGSPSMIXAIXIMALYSIVCVVGLFGNFLVMYVIVRYXKMKXAXNIYIFNLALADALAXSXLPFQSVNYLMGXWPFGXILCKIVISIDYYNMFXSIFXLCXMSVDRYIAVCHPVKALDFRXPRNAKIINVCNWILSSAIGLPVMFMAXXKYRQGSIDCXLXFSHPXWYWENLLKICVFIFAFIMPVLIIXVCYGLMILRLKSVRMLSGSKEKDRNLRRIXRMVLVVVAVFIVCWXPIHIYVIIKALVXIPEXXFQXVSWHFCIALGYXNSCLNPVLYAFLDENFKRCFREFCIPXSSNIEQQNSXRIRQNXRDHPSXANXVDRXNHQCLPIPSLSCWALEQGCLVVYPGPLQGPLVRYDLPAILHSSCLRGNXAPSPSGGAFLLS

SEQ ID NO: 18665 - protein, 300 aa, Homo sapiens
  MOD_RES (3)..(3): Selenocysteine
  MOD_RES (5)..(5): Selenocysteine
  MOD_RES (20)..(20): Selenocysteine
  MOD_RES (22)..(22): Selenocysteine
  MOD_RES (34)..(34): Selenocysteine
  MOD_RES (39)..(39): Selenocysteine
  MOD_RES (55)..(55): Selenocysteine
  MOD_RES (59)..(59): Selenocysteine
  MOD_RES (62)..(62): Selenocysteine
  MOD_RES (82)..(82): Selenocysteine
  MOD_RES (109)..(110): Selenocysteine
  MOD_RES (120)..(120): Selenocysteine
  MOD_RES (122)..(122): Selenocysteine
  MOD_RES (127)..(127): Selenocysteine
  MOD_RES (151)..(151): Selenocysteine
  MOD_RES (181)..(181): Selenocysteine
  MOD_RES (196)..(196): Selenocysteine
  MOD_RES (209)..(209): Selenocysteine
  MOD_RES (213)..(214): Selenocysteine
  MOD_RES (217)..(217): Selenocysteine
  MOD_RES (229)..(229): Selenocysteine
  MOD_RES (256)..(256): Selenocysteine
  MOD_RES (266)..(266): Selenocysteine
  MOD_RES (272)..(272): Selenocysteine
  MOD_RES (278)..(278): Selenocysteine
  MOD_RES (281)..(281): Selenocysteine
  MOD_RES (285)..(285): Selenocysteine
  MOD_RES (296)..(296): Selenocysteine
MKXAXNIYIFNLALADALAXSXLPFQSVNYLMGXWPFGXILCKIVISIDYYNMFXSIFXLCXMSVDRYIAVCHPVKALDFRXPRNAKIINVCNWILSSAIGLPVMFMAXXKYRQGSIDCXLXFSHPXWYWENLLKICVFIFAFIMPVLIIXVCYGLMILRLKSVRMLSGSKEKDRNLRRIXRMVLVVVAVFIVCWXPIHIYVIIKALVXIPEXXFQXVSWHFCIALGYXNSCLNPVLYAFLDENFKRCFREFCIPXSSNIEQQNSXRIRQNXRDHPSXANXVDRXNHQLENLEAEXAPLP

SEQ ID NO: 18666 - protein, 319 aa, Homo sapiens
  MOD_RES (9)..(9): Selenocysteine
  MOD_RES (18)..(18): Selenocysteine
  MOD_RES (22)..(22): Selenocysteine
  MOD_RES (24)..(24): Selenocysteine
  MOD_RES (39)..(39): Selenocysteine
  MOD_RES (41)..(41): Selenocysteine
  MOD_RES (53)..(53): Selenocysteine
  MOD_RES (58)..(58): Selenocysteine
  MOD_RES (74)..(74): Selenocysteine
  MOD_RES (78)..(78): Selenocysteine
  MOD_RES (81)..(81): Selenocysteine
  MOD_RES (101)..(101): Selenocysteine
  MOD_RES (128)..(129): Selenocysteine
  MOD_RES (139)..(139): Selenocysteine
  MOD_RES (141)..(141): Selenocysteine
  MOD_RES (146)..(146): Selenocysteine
  MOD_RES (170)..(170): Selenocysteine
  MOD_RES (200)..(200): Selenocysteine
  MOD_RES (215)..(215): Selenocysteine
  MOD_RES (228)..(228): Selenocysteine
  MOD_RES (232)..(233): Selenocysteine
  MOD_RES (236)..(236): Selenocysteine
  MOD_RES (248)..(248): Selenocysteine
  MOD_RES (275)..(275): Selenocysteine
  MOD_RES (285)..(285): Selenocysteine
  MOD_RES (291)..(291): Selenocysteine
  MOD_RES (297)..(297): Selenocysteine
  MOD_RES (300)..(300): Selenocysteine
  MOD_RES (304)..(304): Selenocysteine
  MOD_RES (315)..(315): Selenocysteine
MMRAKSISXKAGKPSRYXKMKXAXNIYIFNLALADALAXSXLPFQSVNYLMGXWPFGXILCKIVISIDYYNMFXSIFXLCXMSVDRYIAVCHPVKALDFRXPRNAKIINVCNWILSSAIGLPVMFMAXXKYRQGSIDCXLXFSHPXWYWENLLKICVFIFAFIMPVLIIXVCYGLMILRLKSVRMLSGSKEKDRNLRRIXRMVLVVVAVFIVCWXPIHIYVIIKALVXIPEXXFQXVSWHFCIALGYXNSCLNPVLYAFLDENFKRCFREFCIPXSSNIEQQNSXRIRQNXRDHPSXANXVDRXNHQLENLEAEXAPLP

SEQ ID NO: 18667 - protein, 476 aa, Homo sapiens
  MOD_RES (12)..(12): Selenocysteine
  MOD_RES (20)..(20): Selenocysteine
  MOD_RES (42)..(42): Selenocysteine
  MOD_RES (51)..(51): Selenocysteine
  MOD_RES (62)..(62): Selenocysteine
  MOD_RES (70)..(70): Selenocysteine
  MOD_RES (76)..(76): Selenocysteine
  MOD_RES (112)..(112): Selenocysteine
  MOD_RES (124)..(124): Selenocysteine
  MOD_RES (131)..(131): Selenocysteine
  MOD_RES (134)..(134): Selenocysteine
  MOD_RES (161)..(161): Selenocysteine
  MOD_RES (165)..(165): Selenocysteine
  MOD_RES (167)..(167): Selenocysteine
  MOD_RES (182)..(182): Selenocysteine
  MOD_RES (184)..(184): Selenocysteine
  MOD_RES (196)..(196): Selenocysteine
  MOD_RES (201)..(201): Selenocysteine
  MOD_RES (217)..(217): Selenocysteine
  MOD_RES (221)..(221): Selenocysteine
  MOD_RES (224)..(224): Selenocysteine
  MOD_RES (244)..(244): Selenocysteine
  MOD_RES (271)..(272): Selenocysteine
  MOD_RES (282)..(282): Selenocysteine
  MOD_RES (284)..(284): Selenocysteine
  MOD_RES (289)..(289): Selenocysteine
  MOD_RES (313)..(313): Selenocysteine
  MOD_RES (343)..(343): Selenocysteine
  MOD_RES (358)..(358): Selenocysteine
  MOD_RES (371)..(371): Selenocysteine
  MOD_RES (375)..(376): Selenocysteine
  MOD_RES (379)..(379): Selenocysteine
  MOD_RES (391)..(391): Selenocysteine
  MOD_RES (418)..(418): Selenocysteine
  MOD_RES (428)..(428): Selenocysteine
  MOD_RES (434)..(434): Selenocysteine
  MOD_RES (440)..(440): Selenocysteine
  MOD_RES (443)..(443): Selenocysteine
  MOD_RES (447)..(447): Selenocysteine
  MOD_RES (462)..(462): Selenocysteine
MSDAQLGPLRLXLLSVSARXGFCKKQQELWQRRKEAAEALGXRKVSVLLAXSHSGARPAVSXMDSSAAPXNASNCXDALAYSSCSPAPSPGSWVNLSHLDGNLSDPCGPNRXDLGGRDSLCPPXGSPSMIXAIXIMALYSIVCVVGLFGNFLVMYVIVRYXKMKXAXNIYIFNLALADALAXSXLPFQSVNYLMGXWPFGXILCKIVISIDYYNMFXSIFXLCXMSVDRYIAVCHPVKALDFRXPRNAKIINVCNWILSSAIGLPVMFMAXXKYRQGSIDCXLXFSHPXWYWENLLKICVFIFAFIMPVLIIXVCYGLMILRLKSVRMLSGSKEKDRNLRRIXRMVLVVVAVFIVCWXPIHIYVIIKALVXIPEXXFQXVSWHFCIALGYXNSCLNPVLYAFLDENFKRCFREFCIPXSSNIEQQNSXRIRQNXRDHPSXANXVDRXNHQNYYIIHRCCCNXPLISQKPVLLWFCD

SEQ ID NO: 18668 - protein, 163 aa, Homo sapiens
  MOD_RES (6)..(6): Selenocysteine
  MOD_RES (28)..(28): Selenocysteine
  MOD_RES (37)..(37): Selenocysteine
  MOD_RES (48)..(48): Selenocysteine
  MOD_RES (56)..(56): Selenocysteine
  MOD_RES (62)..(62): Selenocysteine
  MOD_RES (98)..(98): Selenocysteine
  MOD_RES (110)..(110): Selenocysteine
  MOD_RES (117)..(117): Selenocysteine
  MOD_RES (120)..(120): Selenocysteine
  MOD_RES (147)..(147): Selenocysteine
  MOD_RES (151)..(151): Selenocysteine
  MOD_RES (153)..(153): Selenocysteine
MVQARXGFCKKQQELWQRRKEAAEALGXRKVSVLLAXSHSGARPAVSXMDSSAAPXNASNCXDALAYSSCSPAPSPGSWVNLSHLDGNLSDPCGPNRXDLGGRDSLCPPXGSPSMIXAIXIMALYSIVCVVGLFGNFLVMYVIVRYXKMKXAXNIYIFNLALA

SEQ ID NO: 18669 - protein, 577 aa, Homo sapiens
  MOD_RES (10)..(10): Selenocysteine
  MOD_RES (20)..(20): Selenocysteine
  MOD_RES (34)..(34): Selenocysteine
  MOD_RES (36)..(36): Selenocysteine
  MOD_RES (49)..(49): Selenocysteine
  MOD_RES (76)..(76): Selenocysteine
  MOD_RES (126)..(126): Selenocysteine
  MOD_RES (145)..(145): Selenocysteine
  MOD_RES (202)..(202): Selenocysteine
  MOD_RES (204)..(204): Selenocysteine
  MOD_RES (207)..(207): Selenocysteine
  MOD_RES (209)..(209): Selenocysteine
  MOD_RES (232)..(232): Selenocysteine
  MOD_RES (268)..(268): Selenocysteine
  MOD_RES (276)..(276): Selenocysteine
  MOD_RES (278)..(278): Selenocysteine
  MOD_RES (282)..(282): Selenocysteine
  MOD_RES (294)..(294): Selenocysteine
  MOD_RES (307)..(307): Selenocysteine
  MOD_RES (318)..(318): Selenocysteine
  MOD_RES (357)..(357): Selenocysteine
  MOD_RES (379)..(379): Selenocysteine
  MOD_RES (387)..(387): Selenocysteine
  MOD_RES (392)..(392): Selenocysteine
  MOD_RES (406)..(406): Selenocysteine
  MOD_RES (411)..(411): Selenocysteine
  MOD_RES (450)..(450): Selenocysteine
  MOD_RES (460)..(460): Selenocysteine
  MOD_RES (462)..(462): Selenocysteine
  MOD_RES (525)..(525): Selenocysteine
  MOD_RES (567)..(567): Selenocysteine
MSHQPLSCLXEKEDSPSESXGNGPPHLAHPNLDXFXPEELLQQMKELLXENHQLKEAMKLNNQAMKGRFEELSAWXEKQKEERQFFEIQSKEAKERLMALSHENEKLKEELGKLKGKSERSSEDPXDDSRLPRAEAEQEKDQLRXQVVRLQAEKADLLGIVSELQLKLNSSGSSEDSFVEIRMAEGEAEGSVKEIKHSPGPXRXVSXGXALSKYRSRSADGAKNYFEHEELXVSQLLLCLREGNQKVERLEVALKEAKERVSDFEKKXSNRSEIEXQXEGSXEKENDEEKGPEXVGSEVEALNLQVXSLFKELQEAHXKLSEAELMKKRLQEKCQALERKNSAIPSELNEKQELVYXNKKLELQVESMLSEIKMEQAKXEDEKSKLXVLQMXHNKLLQEHNNALKXIEELXRKESEKVDRAVLKELSEKLELAEKALASKQLQMDEMKQXIAKQEEDLEXMXILRAQMEVYCSDFHAERAAREKIHEEKEQLALQLAVLLKENDAFEDGGRQSLMEMQSRHGARXSDSDQQAYLVQRGAEDRDWRQQRNIPIHSCPKCGEVLPDIDXLQIHVMDCII

SEQ ID NO: 18670 - protein, 571 aa, Homo sapiens
  MOD_RES (10)..(10): Selenocysteine
  MOD_RES (20)..(20): Selenocysteine
  MOD_RES (34)..(34): Selenocysteine
  MOD_RES (36)..(36): Selenocysteine
  MOD_RES (49)..(49): Selenocysteine
  MOD_RES (76)..(76): Selenocysteine
  MOD_RES (126)..(126): Selenocysteine
  MOD_RES (145)..(145): Selenocysteine
  MOD_RES (202)..(202): Selenocysteine
  MOD_RES (204)..(204): Selenocysteine
  MOD_RES (207)..(207): Selenocysteine
  MOD_RES (209)..(209): Selenocysteine
  MOD_RES (226)..(226): Selenocysteine
  MOD_RES (262)..(262): Selenocysteine
  MOD_RES (270)..(270): Selenocysteine
  MOD_RES (272)..(272): Selenocysteine
  MOD_RES (276)..(276): Selenocysteine
  MOD_RES (288)..(288): Selenocysteine
  MOD_RES (301)..(301): Selenocysteine
  MOD_RES (312)..(312): Selenocysteine
  MOD_RES (351)..(351): Selenocysteine
  MOD_RES (373)..(373): Selenocysteine
  MOD_RES (381)..(381): Selenocysteine
  MOD_RES (386)..(386): Selenocysteine
  MOD_RES (400)..(400): Selenocysteine
  MOD_RES (405)..(405): Selenocysteine
  MOD_RES (444)..(444): Selenocysteine
  MOD_RES (454)..(454): Selenocysteine
  MOD_RES (456)..(456): Selenocysteine
  MOD_RES (519)..(519): Selenocysteine
  MOD_RES (561)..(561): Selenocysteine
MSHQPLSCLXEKEDSPSESXGNGPPHLAHPNLDXFXPEELLQQMKELLXENHQLKEAMKLNNQAMKGRFEELSAWXEKQKEERQFFEIQSKEAKERLMALSHENEKLKEELGKLKGKSERSSEDPXDDSRLPRAEAEQEKDQLRXQVVRLQAEKADLLGIVSELQLKLNSSGSSEDSFVEIRMAEGEAEGSVKEIKHSPGPXRXVSXGXSRSADGAKNYFEHEELXVSQLLLCLREGNQKVERLEVALKEAKERVSDFEKKXSNRSEIEXQXEGSXEKENDEEKGPEXVGSEVEALNLQVXSLFKELQEAHXKLSEAELMKKRLQEKCQALERKNSAIPSELNEKQELVYXNKKLELQVESMLSEIKMEQAKXEDEKSKLXVLQMXHNKLLQEHNNALKXIEELXRKESEKVDRAVLKELSEKLELAEKALASKQLQMDEMKQXIAKQEEDLEXMXILRAQMEVYCSDFHAERAAREKIHEEKEQLALQLAVLLKENDAFEDGGRQSLMEMQSRHGARXSDSDQQAYLVQRGAEDRDWRQQRNIPIHSCPKCGEVLPDIDXLQIHVMDCII

SEQ ID NO: 18671 - protein, 62 aa, Homo sapiens
  MOD_RES (10)..(10): Selenocysteine
  MOD_RES (20)..(20): Selenocysteine
  MOD_RES (34)..(34): Selenocysteine
  MOD_RES (36)..(36): Selenocysteine
  MOD_RES (49)..(49): Selenocysteine
MSHQPLSCLXEKEDSPSESXGNGPPHLAHPNLDXFXPEELLQQMKELLXENHQLKEPCGQVD

SEQ ID NO: 18672 - protein, 58 aa, Homo sapiens
  MOD_RES (10)..(10): Selenocysteine
  MOD_RES (20)..(20): Selenocysteine
  MOD_RES (34)..(34): Selenocysteine
  MOD_RES (36)..(36): Selenocysteine
  MOD_RES (49)..(49): Selenocysteine
MSHQPLSCLXEKEDSPSESXGNGPPHLAHPNLDXFXPEELLQQMKELLXENHQLKGPH

SEQ ID NO: 18673 - protein, 107 aa, Homo sapiens
  MOD_RES (1)..(1): Any amino acid
  MOD_RES (11)..(11): Selenocysteine
  MOD_RES (68)..(68): Selenocysteine
  MOD_RES (70)..(70): Selenocysteine
  MOD_RES (73)..(73): Selenocysteine
  MOD_RES (75)..(75): Selenocysteine
  MOD_RES (93)..(93): Selenocysteine
XAEQEKDQLRXQVVRLQAEKADLLGIVSELQLKLNSSGSSEDSFVEIRMAEGEAEGSVKEIKHSPGPXRXVSXGXYVKEDSGCQADRLGRLVXGCLSPEVKCCDLRK

SEQ ID NO: 18674 - protein, 126 aa, Homo sapiens
  MOD_RES (1)..(1): Any amino acid
  MOD_RES (18)..(18): Selenocysteine
  MOD_RES (20)..(20): Selenocysteine
  MOD_RES (23)..(23): Selenocysteine
  MOD_RES (25)..(25): Selenocysteine
  MOD_RES (48)..(48): Selenocysteine
  MOD_RES (84)..(84): Selenocysteine
  MOD_RES (92)..(92): Selenocysteine
  MOD_RES (94)..(94): Selenocysteine
  MOD_RES (98)..(98): Selenocysteine
  MOD_RES (110)..(111): Selenocysteine
  MOD_RES (125)..(125): Selenocysteine
XGEAEGSVKEIKHSPGPXRXVSXGXALSKYRSRSADGAKNYFEHEELXVSQLLLCLREGNQKVERLEVALKEAKERVSDFEKKXSNRSEIEXQXEGSXEKENDEEKGPEXXGFHHVGQDGLDLLXS

SEQ ID NO: 18675 - protein, 303 aa, Homo sapiens
  MOD_RES (8)..(8): Selenocysteine
  MOD_RES (17)..(17): Selenocysteine
  MOD_RES (20)..(20): Selenocysteine
  MOD_RES (25)..(25): Selenocysteine
  MOD_RES (36)..(36): Selenocysteine
  MOD_RES (71)..(71): Selenocysteine
  MOD_RES (77)..(78): Selenocysteine
  MOD_RES (86)..(86): Selenocysteine
  MOD_RES (104)..(104): Selenocysteine
  MOD_RES (127)..(127): Selenocysteine
  MOD_RES (144)..(144): Selenocysteine
  MOD_RES (147)..(148): Selenocysteine
  MOD_RES (158)..(158): Selenocysteine
  MOD_RES (179)..(179): Selenocysteine
  MOD_RES (190)..(190): Selenocysteine
  MOD_RES (206)..(206): Selenocysteine
  MOD_RES (227)..(227): Selenocysteine
  MOD_RES (245)..(245): Selenocysteine
  MOD_RES (266)..(266): Selenocysteine
  MOD_RES (269)..(269): Selenocysteine
  MOD_RES (291)..(291): Selenocysteine
MSFSSLPXEIQSLLFLXFLXIYLVXLMGNCLIILVXLADPMLHSPMYFFLRNLSFLEIGFNLVIVPKMLGXLLAQDXXISFLGCAXQMYFFFFFGVAECFLLAXMAYDRYVAICSPLHYPVIMNQRXRAKLAAASWFPGFPVAXVQXXWLFSFPFCGXNKVNHFFCDSPPVLRLVCADXALFEIYAIVGXILVVMIPCLLILCSYXHIAAAILKIPSAKGKNKAFSXCSSHLLVVSLFYISLSLXYFRPKSNNSPEGKKLLSLSYXVMXPMLNPIIYSLRNNEVKNALSRXVSKALALRNCIP

SEQ ID NO: 18676 - protein, 314 aa, Homo sapiens
  MOD_RES (38)..(38): Selenocysteine
  MOD_RES (46)..(46): Selenocysteine
  MOD_RES (78)..(78): Selenocysteine
  MOD_RES (87)..(87): Selenocysteine
  MOD_RES (90)..(90): Selenocysteine
  MOD_RES (110)..(110): Selenocysteine
  MOD_RES (157)..(157): Selenocysteine
  MOD_RES (160)..(161): Selenocysteine
  MOD_RES (181)..(181): Selenocysteine
  MOD_RES (192)..(192): Selenocysteine
  MOD_RES (201)..(201): Selenocysteine
  MOD_RES (203)..(203): Selenocysteine
  MOD_RES (231)..(232): Selenocysteine
  MOD_RES (240)..(240): Selenocysteine
  MOD_RES (246)..(246): Selenocysteine
  MOD_RES (249)..(249): Selenocysteine
  MOD_RES (254)..(254): Selenocysteine
  MOD_RES (258)..(258): Selenocysteine
  MOD_RES (270)..(270): Selenocysteine
  MOD_RES (279)..(279): Selenocysteine
  MOD_RES (282)..(282): Selenocysteine
  MOD_RES (300)..(300): Selenocysteine
  MOD_RES (313)..(313): Selenocysteine
MKRQNQSCVVEFILLGFSNFPELQVQLFGVFLVIYVVXLMGNAIIXVIISLNQSLHVPMYLFLLNLSVVEVSFSAVIXPEMLVVLSXEKXMISFVGCFAQMYFILLFGGXECFLLGAMAYDRFAAICHPLNYPVIMNRGVFMKLVIFSWISGIMVAXVQXXWVFSFPFCGPNEINHLFCEXPPVLELVCADXFLFEIYAFXGXILIVMVPFLLILLSYIRVLFAILKMPSXXGRQKAFSXCASHLXSVXLFYGXANMXYLQPKSGYSPEXKKLISLAYXLLXPLLNPLIYSLRNSEMKRXLIKLWRRKVILHXF

SEQ ID NO: 18677 - protein, 315 aa, Homo sapiens
  MOD_RES (7)..(7): Selenocysteine
  MOD_RES (22)..(22): Selenocysteine
  MOD_RES (34)..(34): Selenocysteine
  MOD_RES (39)..(39): Selenocysteine
  MOD_RES (50)..(50): Selenocysteine
  MOD_RES (85)..(85): Selenocysteine
  MOD_RES (91)..(92): Selenocysteine
  MOD_RES (100)..(100): Selenocysteine
  MOD_RES (118)..(118): Selenocysteine
  MOD_RES (158)..(158): Selenocysteine
  MOD_RES (161)..(162): Selenocysteine
  MOD_RES (193)..(193): Selenocysteine
  MOD_RES (202)..(202): Selenocysteine
  MOD_RES (204)..(204): Selenocysteine
  MOD_RES (225)..(225): Selenocysteine
  MOD_RES (241)..(241): Selenocysteine
  MOD_RES (255)..(255): Selenocysteine
  MOD_RES (259)..(259): Selenocysteine
  MOD_RES (280)..(280): Selenocysteine
  MOD_RES (283)..(283): Selenocysteine
  MOD_RES (309)..(309): Selenocysteine
MMWENWXIVSEFVLVSFSALSXELQALLFLLFLXIYLVXLMGNVLIILVXIADSALQSPMYFFLRNLSFLEIGFNLVIVPKMLGXLIIQDXXISFLGCAXQMYFFFFFGAAECCLLAXMAYDRYVAICDPLHYPVIMGHISCAQLAAASWFSGFSVAXVQXXWIFSFPFCGPNRVNHFFCDSPPVIALVCADXSVFELEALXAXVLFILFPFLLILGSYVRILSXIFRMPSAEGKHQAFSXCSAHLLVVSLFYSXAILXYFRPQSSASSESKKLLSLSSXVVXPMLNPIIYSSRNKEVKAALKRLIHRXLGSQKL

SEQ ID NO: 18678 - protein, 317 aa, Homo sapiens
  MOD_RES (7)..(7): Selenocysteine
  MOD_RES (22)..(22): Selenocysteine
  MOD_RES (31)..(31): Selenocysteine
  MOD_RES (34)..(34): Selenocysteine
  MOD_RES (39)..(39): Selenocysteine
  MOD_RES (50)..(50): Selenocysteine
  MOD_RES (85)..(85): Selenocysteine
  MOD_RES (91)..(92): Selenocysteine
  MOD_RES (100)..(100): Selenocysteine
  MOD_RES (118)..(118): Selenocysteine
  MOD_RES (141)..(141): Selenocysteine
  MOD_RES (158)..(158): Selenocysteine
  MOD_RES (161)..(162): Selenocysteine
  MOD_RES (172)..(172): Selenocysteine
  MOD_RES (193)..(193): Selenocysteine
  MOD_RES (204)..(204): Selenocysteine
  MOD_RES (220)..(220): Selenocysteine
  MOD_RES (241)..(241): Selenocysteine
  MOD_RES (259)..(259): Selenocysteine
  MOD_RES (280)..(280): Selenocysteine
  MOD_RES (283)..(283): Selenocysteine
  MOD_RES (305)..(305): Selenocysteine
MAIGNWXEISEFILMSFSSLPXEIQSLLFLXFLXIYLVXLKGNSLIILVXLADPMLHSPMYFFLRNLSFLEIGFNLVIVPKMLGXLLAQDXXISFLGCAXQMYFFFFFGVAECFLLAXMAYDRYVAICSPLHYPVIMNQRXRAKLAAASWFPGFPVAXVQXXWLFSFPFCGXNKVNHFFCDSPPVLKLVCADXALFEIYAIVGXILVVMIPCLLILCSYXRIAAAILKIPSAKGKHKAFSXCSSHLLVVSLFYISSSLXYFWPKSNNSPESKKLLSLSYXVVXPMLNPIIYSLRNSEVKNALSRXFHKVLALRNCIP

SEQ ID NO: 18679 - protein, 314 aa, Homo sapiens
  MOD_RES (38)..(38): Selenocysteine
  MOD_RES (87)..(87): Selenocysteine
  MOD_RES (90)..(91): Selenocysteine
  MOD_RES (157)..(157): Selenocysteine
  MOD_RES (160)..(160): Selenocysteine
  MOD_RES (181)..(181): Selenocysteine
  MOD_RES (192)..(192): Selenocysteine
  MOD_RES (201)..(201): Selenocysteine
  MOD_RES (203)..(203): Selenocysteine
  MOD_RES (231)..(232): Selenocysteine
  MOD_RES (240)..(240): Selenocysteine
  MOD_RES (246)..(246): Selenocysteine
  MOD_RES (249)..(249): Selenocysteine
  MOD_RES (254)..(254): Selenocysteine
  MOD_RES (258)..(258): Selenocysteine
  MOD_RES (270)..(270): Selenocysteine
  MOD_RES (282)..(282): Selenocysteine
  MOD_RES (313)..(313): Selenocysteine
MERQNQSCVVEFILLGFSNYPELQGQLFVAFLVIYLVXLIGNAIIIVIVSLDQSLHVPMYLFLLNLSVVDLSFSAVIMPEMLVVLSXEKXXISFGGCFAQMYFILLFGGAECFLLGAMAYDRFAAICHPLNYQMIMNKGVFMKLIIFSWALGFMLGXVQXSWVSSFPFCGLNEINHISCEXPAVLELACADXFLFEIYAFXGXFLIILVPFLLILLSYIRVLFAILKMPSXXGRQKAFSXCAAHLXSVXLFYGXASMXYLQPKSGYSPEXKKVMSLSYSLLXPLLNLLIYSLRNSEMKRALMKLWRRRVVLHXI

SEQ ID NO: 18680 - protein, 316 aa, Homo sapiens
  MOD_RES (7)..(7): Selenocysteine
  MOD_RES (10)..(10): Selenocysteine
  MOD_RES (18)..(18): Selenocysteine
  MOD_RES (36)..(36): Selenocysteine
  MOD_RES (38)..(38): Selenocysteine
  MOD_RES (47)..(47): Selenocysteine
  MOD_RES (49)..(49): Selenocysteine
  MOD_RES (57)..(57): Selenocysteine
  MOD_RES (74)..(74): Selenocysteine
  MOD_RES (99)..(99): Selenocysteine
  MOD_RES (160)..(160): Selenocysteine
  MOD_RES (189)..(189): Selenocysteine
  MOD_RES (192)..(193): Selenocysteine
  MOD_RES (203)..(203): Selenocysteine
  MOD_RES (219)..(219): Selenocysteine
  MOD_RES (224)..(224): Selenocysteine
  MOD_RES (232)..(232): Selenocysteine
  MOD_RES (240)..(240): Selenocysteine
  MOD_RES (254)..(254): Selenocysteine
  MOD_RES (258)..(258): Selenocysteine
  MOD_RES (279)..(279): Selenocysteine
  MOD_RES (282)..(282): Selenocysteine
  MOD_RES (304)..(304): Selenocysteine
  MOD_RES (306)..(306): Selenocysteine
MICENHXRVXEFILLGFXNNPEMQVSLFIFFLAIYXVXLLGNFLIVXVXSVDLALQXPMYFFLQNLSLLEVCFXLVMVPKMLVDLVSPRKIISFVGCGXQMYFFFFFGSSECFLLSMMAYDRFVAICNPLHYSVIMNRSLCLWMAIGSWMSGVPVSMLQXAWMMALPFCGPNAVDHFFCDGPPVLKLVXVDXXMYEMQALASXLLFIMFPFCLILVSYXRIIIXILRMSSAXGRQKAFSXCSSHLIVVSLFYGXASLXYLRPKSNQSPESKKLVSLSYXVIXPMLNPIIYGLRNNEVKGAVKRXIXQKVLQKLDVF

SEQ ID NO: 18681 - protein, 317 aa, Homo sapiens
  MOD_RES (9)..(9): Selenocysteine
  MOD_RES (21)..(21): Selenocysteine
  MOD_RES (23)..(23): Selenocysteine
  MOD_RES (38)..(38): Selenocysteine
  MOD_RES (49)..(49): Selenocysteine
  MOD_RES (52)..(52): Selenocysteine
  MOD_RES (76)..(78): Selenocysteine
  MOD_RES (100)..(100): Selenocysteine
  MOD_RES (148)..(148): Selenocysteine
  MOD_RES (215)..(215): Selenocysteine
  MOD_RES (217)..(217): Selenocysteine
  MOD_RES (225)..(225): Selenocysteine
  MOD_RES (238)..(238): Selenocysteine
  MOD_RES (241)..(241): Selenocysteine
  MOD_RES (247)..(247): Selenocysteine
  MOD_RES (254)..(254): Selenocysteine
  MOD_RES (266)..(266): Selenocysteine
  MOD_RES (280)..(280): Selenocysteine
  MOD_RES (283)..(283): Selenocysteine
  MOD_RES (309)..(309): Selenocysteine
MLRNGSIVXEFILVGFQQSSXSXRALLFALFLALYSLXMAMNGLIIFIXSWXDPKLNSPMYFFLGHLSLLDVCFIXXXIPQMLIHLVVRDHIVSFVCCMXQMYFVFCVGVAECILLAFMAYDRYVAICYPLNYVPIISQKVCVRLVGXAWFFGLINGIFLEYISFREPFRRDNHIESFFCEAPIVIGLSCGDPQFSLWAIFADAIVVILSPMVLXVXSYVHILAXILSKASSSGRGKXFSXCASHLXVVIFLYXSAMFSYMNPHSXHGPDKDKPFSLLYXIIXPMCNPIIYSFRNKEIKEAMVRALGRXRLAQPQSV

SEQ ID NO: 18682 - protein, 301 aa, Homo sapiens
  MOD_RES (48)..(48): Selenocysteine
  MOD_RES (66)..(66): Selenocysteine
  MOD_RES (78)..(78): Selenocysteine
  MOD_RES (90)..(90): Selenocysteine
  MOD_RES (101)..(101): Selenocysteine
  MOD_RES (107)..(107): Selenocysteine
  MOD_RES (141)..(141): Selenocysteine
  MOD_RES (143)..(143): Selenocysteine
  MOD_RES (151)..(151): Selenocysteine
  MOD_RES (162)..(162): Selenocysteine
  MOD_RES (164)..(164): Selenocysteine
  MOD_RES (189)..(189): Selenocysteine
  MOD_RES (199)..(199): Selenocysteine
  MOD_RES (231)..(231): Selenocysteine
  MOD_RES (247)..(247): Selenocysteine
  MOD_RES (249)..(249): Selenocysteine
  MOD_RES (270)..(270): Selenocysteine
  MOD_RES (275)..(275): Selenocysteine
  MOD_RES (282)..(282): Selenocysteine
  MOD_RES (301)..(301): Selenocysteine
MEFVLLGFSDIPNLHWMLFSIFLLMYLMILMCNGIIILLIKIHPALQXPMYFFLSNFSLLEICYVXIIIPRMLMDIWXQKGNISLFACAXQMCFFLMLGGXECLLLXVMAYDRYVAICKPLQYPLVMNHKVCIQLIIASWXIXIPVVIGEXCQIFLLPFCGXNXINHFFCDIPPILKLACGNIFVNEIXVHVVAVVFIXVPFLLIVVSYGKIISNILKLSSARGKAKAFSXCSSHLIVVILFFGAGXIXYLQPKPHQFQRMGKLISLFYXILIPXLNPIIYXLRNKDIMVALRKLLAKLLX

SEQ ID NO: 18683 - protein, 314 aa, Homo sapiens
  MOD_RES (7)..(7): Selenocysteine
  MOD_RES (11)..(11): Selenocysteine
  MOD_RES (34)..(34): Selenocysteine
  MOD_RES (39)..(39): Selenocysteine
  MOD_RES (52)..(52): Selenocysteine
  MOD_RES (66)..(66): Selenocysteine
  MOD_RES (75)..(75): Selenocysteine
  MOD_RES (78)..(78): Selenocysteine
  MOD_RES (88)..(88): Selenocysteine
  MOD_RES (111)..(111): Selenocysteine
  MOD_RES (161)..(161): Selenocysteine
  MOD_RES (174)..(174): Selenocysteine
  MOD_RES (193)..(193): Selenocysteine
  MOD_RES (204)..(204): Selenocysteine
  MOD_RES (225)..(225): Selenocysteine
  MOD_RES (241)..(241): Selenocysteine
  MOD_RES (255)..(255): Selenocysteine
  MOD_RES (271)..(271): Selenocysteine
  MOD_RES (283)..(283): Selenocysteine
  MOD_RES (296)..(296): Selenocysteine
  MOD_RES (305)..(305): Selenocysteine
  MOD_RES (309)..(309): Selenocysteine
GRMSANXSMVXEFLLLGFSHLADLQGLLFSVFLXIYLLXVAGNFLIVVLVSXDAALQSPMYFFLRXLSALEIGYXSVXVPLLLHHLLXGRRHISRSGCALQMFFFLFFGAXECCLLAAMAYDRYAAICEPLRYPLLLSHRVCLQLAGSAWACGVLVGLGHXPFIFSLPFCGPNXIPQFFCEIQPVLQLVCGDXSLNELQIILAXALLILCPFGLILGSYGRILVXIFRIPSVAGRRKAFSXCSSHLIMVSLFYGXALFIYIRPKASYDPAXDPLVSLFYAVVXPILNPIIYSLRNXEVKAALKRXIQKXVPMEI

SEQ ID NO: 18684 - protein, 314 aa, Homo sapiens
  MOD_RES (7)..(7): Selenocysteine
  MOD_RES (11)..(11): Selenocysteine
  MOD_RES (34)..(34): Selenocysteine
  MOD_RES (39)..(39): Selenocysteine
  MOD_RES (52)..(52): Selenocysteine
  MOD_RES (66)..(66): Selenocysteine
  MOD_RES (75)..(75): Selenocysteine
  MOD_RES (78)..(78): Selenocysteine
  MOD_RES (88)..(88): Selenocysteine
  MOD_RES (111)..(111): Selenocysteine
  MOD_RES (161)..(161): Selenocysteine
  MOD_RES (174)..(174): Selenocysteine
  MOD_RES (193)..(193): Selenocysteine
  MOD_RES (204)..(204): Selenocysteine
  MOD_RES (225)..(225): Selenocysteine
  MOD_RES (241)..(241): Selenocysteine
  MOD_RES (255)..(255): Selenocysteine
  MOD_RES (271)..(271): Selenocysteine
  MOD_RES (283)..(283): Selenocysteine
  MOD_RES (296)..(296): Selenocysteine
  MOD_RES (305)..(305): Selenocysteine
  MOD_RES (309)..(309): Selenocysteine
GRMSANXSMVXEFLLLGFSHLADLQGLLFSVFLXIYLLXVAGNFLIVVLVSXDAALQSPMYFFLRXLSALEIGYXSVXVPLLLHHLLXGRRHISRSGCALQMFFFLFFGAXECCLLAAMAYDRYAAICEPLRYPLLLSHRVCLQLAGSAWACGVLVGLGHXPFIFSLPFCGPNXIPQFFCEIQPVLQLVCGDXSLNELQIILAXALLILCPFGLILGSYGRILVXIFRIPSVAGRRKAFSXCSSHLIVVSLFYGXALFIYIRPKASYDPAXDPLVSLFYAVVXPILNPIIYSLRNXEVKAALKRXIQKXVPMEI

SEQ ID NO: 18685 - protein, 314 aa, Homo sapiens
  MOD_RES (7)..(7): Selenocysteine
  MOD_RES (11)..(11): Selenocysteine
  MOD_RES (34)..(34): Selenocysteine
  MOD_RES (39)..(39): Selenocysteine
  MOD_RES (52)..(52): Selenocysteine
  MOD_RES (66)..(66): Selenocysteine
  MOD_RES (75)..(75): Selenocysteine
  MOD_RES (78)..(78): Selenocysteine
  MOD_RES (88)..(88): Selenocysteine
  MOD_RES (111)..(111): Selenocysteine
  MOD_RES (161)..(161): Selenocysteine
  MOD_RES (174)..(174): Selenocysteine
  MOD_RES (193)..(193): Selenocysteine
  MOD_RES (204)..(204): Selenocysteine
  MOD_RES (225)..(225): Selenocysteine
  MOD_RES (241)..(241): Selenocysteine
  MOD_RES (255)..(255): Selenocysteine
  MOD_RES (271)..(271): Selenocysteine
  MOD_RES (283)..(283): Selenocysteine
  MOD_RES (296)..(296): Selenocysteine
  MOD_RES (305)..(305): Selenocysteine
  MOD_RES (309)..(309): Selenocysteine
GRMSANXSMVXEFLLLGFSHLADLQGLLFSVFLXIYLLXVAGNFLIVVLVSXDAALQSPMYLFLRXLSALEIGYXSVXVPLLLHHLLXGRRHISRSGCALQMFFFLFFGAXECCLLAAMAYDRYAAICEPLRYPLLLSHRVCLQLAGSAWACGVLVGLGHXPFIFSLPFCGPNXIQQFFCEIQPVLQLVCGDXSLNELQIILAXALLILCPFGLILGSYGRILVXIFRIPSVAGRRKAFSXCSSHLIVVSLFYGXALFIYIRPKASYDPAXDPLVSLFYAVVXPILNPIIYSLRNXEVKAALKRXIQKXVPMEI

SEQ ID NO: 18686 - protein, 312 aa, Homo sapiens
  MOD_RES (5)..(5): Selenocysteine
  MOD_RES (9)..(9): Selenocysteine
  MOD_RES (32)..(32): Selenocysteine
  MOD_RES (37)..(37): Selenocysteine
  MOD_RES (50)..(50): Selenocysteine
  MOD_RES (64)..(64): Selenocysteine
  MOD_RES (73)..(73): Selenocysteine
  MOD_RES (76)..(76): Selenocysteine
  MOD_RES (86)..(86): Selenocysteine
  MOD_RES (109)..(109): Selenocysteine
  MOD_RES (159)..(159): Selenocysteine
  MOD_RES (172)..(172): Selenocysteine
  MOD_RES (191)..(191): Selenocysteine
  MOD_RES (202)..(202): Selenocysteine
  MOD_RES (223)..(223): Selenocysteine
  MOD_RES (239)..(239): Selenocysteine
  MOD_RES (253)..(253): Selenocysteine
  MOD_RES (269)..(269): Selenocysteine
  MOD_RES (281)..(281): Selenocysteine
  MOD_RES (294)..(294): Selenocysteine
  MOD_RES (303)..(303): Selenocysteine
  MOD_RES (307)..(307): Selenocysteine
MSANXSMVXEFLLLGFSHLADLQGLLFSVFLXIYLLXVAGNFLIVVLVSXDAALQSPMYFFLRXLSALEIGYXSVXVPLLLHHLLXGRRHISRSGCALQMFFFLFFGAXECCLLAAMAYDRYAAICEPLRYPLLLSHRVCLQLAGSAWACGVLVGLGHXPFIFSLPFCGPNXIPQFFCEIQPVLQLVCGDXSLNELQIILAXALLILCPFGLILGSYGRILVXIFRIPSVAGRRKAFSXCSSHLIMVSLFYGXALFIYIRPKASYDPAXDPLVSLFYAVVXPILNPIIYSLRNXEVKAALKRXIQKXVPMEI

SEQ ID NO: 18687 - protein, 312 aa, Homo sapiens
  MOD_RES (5)..(5): Selenocysteine
  MOD_RES (9)..(9): Selenocysteine
  MOD_RES (32)..(32): Selenocysteine
  MOD_RES (37)..(37): Selenocysteine
  MOD_RES (50)..(50): Selenocysteine
  MOD_RES (64)..(64): Selenocysteine
  MOD_RES (73)..(73): Selenocysteine
  MOD_RES (76)..(76): Selenocysteine
  MOD_RES (86)..(86): Selenocysteine
  MOD_RES (109)..(109): Selenocysteine
  MOD_RES (159)..(159): Selenocysteine
  MOD_RES (172)..(172): Selenocysteine
  MOD_RES (191)..(191): Selenocysteine
  MOD_RES (202)..(202): Selenocysteine
  MOD_RES (223)..(223): Selenocysteine
  MOD_RES (239)..(239): Selenocysteine
  MOD_RES (253)..(253): Selenocysteine
  MOD_RES (269)..(269): Selenocysteine
  MOD_RES (281)..(281): Selenocysteine
  MOD_RES (294)..(294): Selenocysteine
  MOD_RES (303)..(303): Selenocysteine
  MOD_RES (307)..(307): Selenocysteine
MSANXSMVXEFLLLGFSHLADLQGLLFSVFLXIYLLXVAGNFLIVVLVSXDAALQSPMYFFLRXLSALEIGYXSVXVPLLLHHLLXGRRHISRSGCALQMFFFLFFGAXECCLLAAMAYDRYAAICEPLRYPLLLSHRVCLQLAGSAWACGVLVGLGHXPFIFSLPFCGPNXIPQFFCEIQPVLQLVCGDXSLNELQIILAXALLILCPFGLILGSYGRILVXIFRIPSVAGRRKAFSXCSSHLIVVSLFYGXALFIYIRPKASYDPAXDPLVSLFYAVVXPILNPIIYSLRNXEVKAALKRXIQKXVPMEI

SEQ ID NO: 18688 - protein, 312 aa, Homo sapiens
  MOD_RES (5)..(5): Selenocysteine
  MOD_RES (9)..(9): Selenocysteine
  MOD_RES (32)..(32): Selenocysteine
  MOD_RES (37)..(37): Selenocysteine
  MOD_RES (50)..(50): Selenocysteine
  MOD_RES (64)..(64): Selenocysteine
  MOD_RES (73)..(73): Selenocysteine
  MOD_RES (76)..(76): Selenocysteine
  MOD_RES (86)..(86): Selenocysteine
  MOD_RES (109)..(109): Selenocysteine
  MOD_RES (159)..(159): Selenocysteine
  MOD_RES (172)..(172): Selenocysteine
  MOD_RES (191)..(191): Selenocysteine
  MOD_RES (202)..(202): Selenocysteine
  MOD_RES (223)..(223): Selenocysteine
  MOD_RES (239)..(239): Selenocysteine
  MOD_RES (253)..(253): Selenocysteine
  MOD_RES (269)..(269): Selenocysteine
  MOD_RES (281)..(281): Selenocysteine
  MOD_RES (294)..(294): Selenocysteine
  MOD_RES (303)..(303): Selenocysteine
  MOD_RES (307)..(307): Selenocysteine
MSANXSMVXEFLLLGFSHLADLQGLLFSVFLXIYLLXVAGNFLIVVLVSXDAALQSPMYLFLRXLSALEIGYXSVXVPLLLHHLLXGRRHISRSGCALQMFFFLFFGAXECCLLAAMAYDRYAAICEPLRYPLLLSHRVCLQLAGSAWACGVLVGLGHXPFIFSLPFCGPNXIQQFFCEIQPVLQLVCGDXSLNELQIILAXALLILCPFGLILGSYGRILVXIFRIPSVAGRRKAFSXCSSHLIVVSLFYGXALFIYIRPKASYDPAXDPLVSLFYAVVXPILNPIIYSLRNXEVKAALKRXIQKXVPMEI

SEQ ID NO: 18689 - protein, 312 aa, Homo sapiens
  MOD_RES (10)..(10): Selenocysteine
  MOD_RES (20)..(20): Selenocysteine
  MOD_RES (26)..(26): Selenocysteine
  MOD_RES (38)..(38): Selenocysteine
  MOD_RES (57)..(57): Selenocysteine
  MOD_RES (77)..(77): Selenocysteine
  MOD_RES (116)..(116): Selenocysteine
  MOD_RES (124)..(124): Selenocysteine
  MOD_RES (133)..(133): Selenocysteine
  MOD_RES (148)..(148): Selenocysteine
  MOD_RES (160)..(160): Selenocysteine
  MOD_RES (163)..(163): Selenocysteine
  MOD_RES (165)..(165): Selenocysteine
  MOD_RES (192)..(192): Selenocysteine
  MOD_RES (201)..(201): Selenocysteine
  MOD_RES (219)..(219): Selenocysteine
  MOD_RES (222)..(222): Selenocysteine
  MOD_RES (230)..(231): Selenocysteine
  MOD_RES (240)..(240): Selenocysteine
  MOD_RES (257)..(257): Selenocysteine
  MOD_RES (263)..(263): Selenocysteine
  MOD_RES (270)..(270): Selenocysteine
  MOD_RES (289)..(289): Selenocysteine
  MOD_RES (297)..(297): Selenocysteine
  MOD_RES (301)..(301): Selenocysteine
  MOD_RES (306)..(306): Selenocysteine
MEVKNCCMVXEFILLGIPHXEGLEMXLFVLFLPFYACXLLGNVSILVAVMSSARLHXPMYFFLGNLSVFDMGFSSVXCPKMLLYLMGLSRLISYKDCVCQLFFFHFLGSIECFLFXVMAYDRFXAICYPLRYXVIMNPRICVALAVGXWLLGCIHSSILXSLXFXLPYCGPNEVDHFFCDIPALLPLACADXSLAQRVSFXNVGLISLVCFLLILLSYXRIXISILSIRXXEGRRRAFSXCSAHLIAILCAYGPIIXVYLQPXPNPMLGXVVQILMNLVGPMLNPLIYXLRNKEVKXALKXILHRXGHVPES

SEQ ID NO: 18690 - protein, 310 aa, Homo sapiens
  MOD_RES (4)..(4): Selenocysteine
  MOD_RES (7)..(7): Selenocysteine
  MOD_RES (14)..(14): Selenocysteine
  MOD_RES (42)..(42): Selenocysteine
  MOD_RES (52)..(52): Selenocysteine
  MOD_RES (82)..(82): Selenocysteine
  MOD_RES (91)..(91): Selenocysteine
  MOD_RES (115)..(115): Selenocysteine
  MOD_RES (121)..(121): Selenocysteine
  MOD_RES (147)..(147): Selenocysteine
  MOD_RES (166)..(166): Selenocysteine
  MOD_RES (168)..(168): Selenocysteine
  MOD_RES (197)..(198): Selenocysteine
  MOD_RES (204)..(204): Selenocysteine
  MOD_RES (235)..(236): Selenocysteine
  MOD_RES (245)..(245): Selenocysteine
  MOD_RES (254)..(254): Selenocysteine
  MOD_RES (282)..(282): Selenocysteine
  MOD_RES (285)..(285): Selenocysteine
  MOD_RES (294)..(294): Selenocysteine
  MOD_RES (308)..(308): Selenocysteine
MGKXKNXSLDAVVXDFILLGLSHPPNLRSLLFLVFFIIYILXQLGNLLILLXMWADPKLCARPMYILLGVLSFLDMWLSSVXVPLLILDFXPSIKAIPFGGCVAQLYFFHFLGSXQCFLYXLMAYDRYLAICQPLRYPVLMNGRLCXVLVAGAWVAGSMHGSIQAXLXFRLPYCGPNQVDYFICDIPAVLRLACADXXVNELVXFVDVGVVAASCFMLILLSYANIVNAILKIRXXDGRRRAFSXCGSHLIVVXVYYVPCIFIYLRAGSKDPLDGAAAVFYXVVXPLLNPLIYXLRNQEVKSALKRIXAG

SEQ ID NO: 18691 - protein, 313 aa, Homo sapiens
  MOD_RES (7)..(7): Selenocysteine
  MOD_RES (10)..(10): Selenocysteine
  MOD_RES (15)..(15): Selenocysteine
  MOD_RES (25)..(25): Selenocysteine
  MOD_RES (38)..(38): Selenocysteine
  MOD_RES (48)..(48): Selenocysteine
  MOD_RES (87)..(87): Selenocysteine
  MOD_RES (111)..(111): Selenocysteine
  MOD_RES (117)..(117): Selenocysteine
  MOD_RES (138)..(138): Selenocysteine
  MOD_RES (164)..(164): Selenocysteine
  MOD_RES (193)..(194): Selenocysteine
  MOD_RES (200)..(200): Selenocysteine
  MOD_RES (231)..(231): Selenocysteine
  MOD_RES (241)..(241): Selenocysteine
  MOD_RES (247)..(247): Selenocysteine
  MOD_RES (250)..(250): Selenocysteine
  MOD_RES (265)..(265): Selenocysteine
  MOD_RES (278)..(278): Selenocysteine
  MOD_RES (281)..(281): Selenocysteine
  MOD_RES (290)..(290): Selenocysteine
  MOD_RES (309)..(309): Selenocysteine
MERINSXLLXAFILXGIPYPLRLRXLFFVFFFLIYILXQLGNLLILIXVWADPRLHARPMYIFLGVLSVIDMSISSIIVPRLMMNFXLGVKPIPFGGCVAQLYFYHFLGSXQCFLYXLMAYDRYLAICQPLRYPVLMXAKLSALLVAGAWMAGSIHGALQAILXFRLPYCGPNQVDYFFCDIPAVLRLACADXXVNELVXFVDIGVVVASCFSLILLSYIQIIQAILRIHXADGRRRAFSXCGAHVXVVXVYYVPCAFIYLRPEXNSPLDGAAALVPXAIXPFLNPLIYXLRNQEVKLALKRMLRSPRXPSEV

SEQ ID NO: 18692 - protein, 311 aa, Homo sapiens
  MOD_RES (8)..(8): Selenocysteine
  MOD_RES (13)..(13): Selenocysteine
  MOD_RES (36)..(36): Selenocysteine
  MOD_RES (55)..(55): Selenocysteine
  MOD_RES (62)..(62): Selenocysteine
  MOD_RES (73)..(73): Selenocysteine
  MOD_RES (75)..(75): Selenocysteine
  MOD_RES (82)..(82): Selenocysteine
  MOD_RES (109)..(109): Selenocysteine
  MOD_RES (115)..(115): Selenocysteine
  MOD_RES (132)..(132): Selenocysteine
  MOD_RES (145)..(145): Selenocysteine
  MOD_RES (147)..(147): Selenocysteine
  MOD_RES (159)..(159): Selenocysteine
  MOD_RES (162)..(162): Selenocysteine
  MOD_RES (191)..(191): Selenocysteine
  MOD_RES (229)..(229): Selenocysteine
  MOD_RES (239)..(239): Selenocysteine
  MOD_RES (276)..(276): Selenocysteine
  MOD_RES (279)..(279): Selenocysteine
  MOD_RES (288)..(288): Selenocysteine
MSNASLVXAFILXGLPHAPGLDALLFGIFLVVYVLXVLGNLLILLVIRVDSHLHXPMYYFLXNLSFIDMWFSXVXVPKMLMXLVSPSGRAISFHSCVAQLYFFHFLGSXECFLYXVMSYDRYLAISYPLRYXSMMSGSRCALLAXGXWLSGSLHSAVQXILXFHLPYCGPNQIQHYFCDAPPILKLACADXSANVMVIFVDIGIVASGCFVLIVLSYVSIVCSILRIRXSDGRRRAFQXCASHCIVVLCFFVPCVVIYLRPGSMDAMDGVVAIFYXVLXPLLNPVVYXLRNKEVKKAVLKLRDKVAHPQRK

SEQ ID NO: 18693 - protein, 332 aa, Homo sapiens
  MOD_RES (15)..(15): Selenocysteine
  MOD_RES (28)..(28): Selenocysteine
  MOD_RES (59)..(59): Selenocysteine
  MOD_RES (69)..(69): Selenocysteine
  MOD_RES (93)..(93): Selenocysteine
  MOD_RES (131)..(131): Selenocysteine
  MOD_RES (137)..(137): Selenocysteine
  MOD_RES (155)..(155): Selenocysteine
  MOD_RES (158)..(158): Selenocysteine
  MOD_RES (169)..(169): Selenocysteine
  MOD_RES (174)..(174): Selenocysteine
  MOD_RES (181)..(181): Selenocysteine
  MOD_RES (213)..(213): Selenocysteine
  MOD_RES (220)..(220): Selenocysteine
  MOD_RES (230)..(230): Selenocysteine
  MOD_RES (237)..(237): Selenocysteine
  MOD_RES (261)..(261): Selenocysteine
  MOD_RES (267)..(267): Selenocysteine
  MOD_RES (277)..(277): Selenocysteine
  MOD_RES (298)..(298): Selenocysteine
  MOD_RES (301)..(301): Selenocysteine
  MOD_RES (310)..(310): Selenocysteine
MLEGVEHLLLLLLLXDVNSKELQSGNQXSVSHFILVGLHHPPQLGAPLFLAFLVIYLLXVSGNGLIILXVLVDIRLHRPMCLFLCHLSFLDMXISCAIVPKMLAGFLLGSRIISFGGCVIQLFSFHFLGCXECFLYXLMAYDRFLAICKPLHYAXIMXHRVCNSLALGXWLGGXIHSLFQXSFVFRLPFCGPNRVDYIFCDIPAMLRLACADXAINELVXFADIGFLALXCFMLILXSYGYIVAAILRIPSADGRRNAFSXCAAHLXVVIVYYVPCXFIYLRPCSQEPLDGVVAVFYXVIXPLLNSIIYXLCNKEMKAALQRLGGHKEVQPH

SEQ ID NO: 18694 - protein, 311 aa, Homo sapiens
  MOD_RES (5)..(5): Selenocysteine
  MOD_RES (8)..(8): Selenocysteine
  MOD_RES (13)..(13): Selenocysteine
  MOD_RES (36)..(36): Selenocysteine
  MOD_RES (55)..(55): Selenocysteine
  MOD_RES (62)..(62): Selenocysteine
  MOD_RES (73)..(73): Selenocysteine
  MOD_RES (75)..(75): Selenocysteine
  MOD_RES (82)..(82): Selenocysteine
  MOD_RES (90)..(90): Selenocysteine
  MOD_RES (109)..(109): Selenocysteine
  MOD_RES (115)..(115): Selenocysteine
  MOD_RES (132)..(132): Selenocysteine
  MOD_RES (136)..(136): Selenocysteine
  MOD_RES (145)..(145): Selenocysteine
  MOD_RES (147)..(147): Selenocysteine
  MOD_RES (159)..(159): Selenocysteine
  MOD_RES (162)..(162): Selenocysteine
  MOD_RES (191)..(191): Selenocysteine
  MOD_RES (229)..(229): Selenocysteine
  MOD_RES (239)..(239): Selenocysteine
  MOD_RES (276)..(277): Selenocysteine
  MOD_RES (279)..(279): Selenocysteine
  MOD_RES (288)..(288): Selenocysteine
MSNAXLLXAFILXGLPHAPGLDAPLFGIFLVVYVLXVLGNLLILLVIRVDSHLHXPMYYFLXNLSFIDMWFSXVXVPKMLMXLVSPSGRXISFHSCVAQLYFFHFLGSXECFLYXVMSYDRYLAISYPLRYXNMMXGRSCALLAXGXWLSGSLHSAVQXILXFHLPYCGPNQIQHYFCDAPPILKLACADXSANEMVIFVNIGLVASGCFVLIVLSYVSIVCSILRIRXSEGRHRAFQXCASHCIVVLCFFGPGLFIYLRPGSRDALHGVVAVFYXXLXPLFNPVVYXLRNKEVKKALLKLKNGSVFAQGE

SEQ ID NO: 18695 - protein, 311 aa, Homo sapiens
  MOD_RES (8)..(8): Selenocysteine
  MOD_RES (36)..(36): Selenocysteine
  MOD_RES (55)..(56): Selenocysteine
  MOD_RES (62)..(62): Selenocysteine
  MOD_RES (73)..(73): Selenocysteine
  MOD_RES (75)..(75): Selenocysteine
  MOD_RES (82)..(82): Selenocysteine
  MOD_RES (109)..(109): Selenocysteine
  MOD_RES (132)..(132): Selenocysteine
  MOD_RES (136)..(136): Selenocysteine
  MOD_RES (141)..(141): Selenocysteine
  MOD_RES (145)..(145): Selenocysteine
  MOD_RES (147)..(147): Selenocysteine
  MOD_RES (162)..(162): Selenocysteine
  MOD_RES (191)..(191): Selenocysteine
  MOD_RES (196)..(196): Selenocysteine
  MOD_RES (201)..(201): Selenocysteine
  MOD_RES (229)..(229): Selenocysteine
  MOD_RES (239)..(239): Selenocysteine
  MOD_RES (276)..(276): Selenocysteine
  MOD_RES (279)..(279): Selenocysteine
  MOD_RES (288)..(288): Selenocysteine
MSNASLLXAFILMGLPHAPALDAPLFGVFLVVYVLXVLGNLLILLVIRVDSHLHXXMYYFLXNLSFIDMWFSXVXVPKLLMXLVFPSGRAISFHSCMAQLYFFHFLGGXECFLYRVMSCDRYLAISYPLRYXSMMXGRSCXLLAXSXWLSGSLHSAVQAILXFHLPYCGPNWIQHYLCDAPPILKLACADXSAIEXVIFVXVGIVASGCFVLIVLSYVSIVCSILRIRXSEGKHRAFQXCASHCIVVLCFFGPGLFIYLRPGSRKAVDGVVAVFYXVLXPLLNPVVYXLRNKEVKKALLKLKDKVAHSQSK

SEQ ID NO: 18696 - protein, 311 aa, Homo sapiens
  MOD_RES (4)..(4): Selenocysteine
  MOD_RES (8)..(8): Selenocysteine
  MOD_RES (13)..(13): Selenocysteine
  MOD_RES (36)..(36): Selenocysteine
  MOD_RES (55)..(55): Selenocysteine
  MOD_RES (62)..(62): Selenocysteine
  MOD_RES (73)..(73): Selenocysteine
  MOD_RES (75)..(75): Selenocysteine
  MOD_RES (82)..(82): Selenocysteine
  MOD_RES (109)..(109): Selenocysteine
  MOD_RES (115)..(115): Selenocysteine
  MOD_RES (132)..(132): Selenocysteine
  MOD_RES (145)..(145): Selenocysteine
  MOD_RES (147)..(147): Selenocysteine
  MOD_RES (159)..(159): Selenocysteine
  MOD_RES (162)..(162): Selenocysteine
  MOD_RES (191)..(191): Selenocysteine
  MOD_RES (229)..(229): Selenocysteine
  MOD_RES (239)..(239): Selenocysteine
  MOD_RES (276)..(276): Selenocysteine
  MOD_RES (279)..(279): Selenocysteine
  MOD_RES (288)..(288): Selenocysteine
MSKXSLVXAFILXGLPHAPGLDAPLFGIFLVVYVLXVLGNLLILLVIRVDSHLHXPMYYFLXNLSFIDMWFSXVXVPKMLMXLVSPSGRAISFHSCVAQLYFFHFLGSXECFLYXVMSYDRYLAISYPLRYXSMMSGSRCALLAXSXWLSGSLHSAVQXILXFHLPYCGPNQIQHYLCDAPPILKLACADXSANEMVIFVDIGLVASGCFLLIVLSYVSIVCSILRIHXSEGRHRAFQXCASHCIVVLCFFVPCVFIYLRPGSRDVVDGVVAIFYXVLXPLLNPVVYXLRNKEVKKAVLKLRDKVAHSQGE

SEQ ID NO: 18697 - protein, 318 aa, Homo sapiens
  MOD_RES (8)..(8): Selenocysteine
  MOD_RES (10)..(10): Selenocysteine
  MOD_RES (38)..(38): Selenocysteine
  MOD_RES (48)..(48): Selenocysteine
  MOD_RES (57)..(57): Selenocysteine
  MOD_RES (74)..(74): Selenocysteine
  MOD_RES (88)..(88): Selenocysteine
  MOD_RES (110)..(110): Selenocysteine
  MOD_RES (116)..(116): Selenocysteine
  MOD_RES (160)..(160): Selenocysteine
  MOD_RES (206)..(206): Selenocysteine
  MOD_RES (241)..(241): Selenocysteine
  MOD_RES (247)..(247): Selenocysteine
  MOD_RES (273)..(273): Selenocysteine
  MOD_RES (278)..(278): Selenocysteine
  MOD_RES (280)..(280): Selenocysteine
  MOD_RES (283)..(283): Selenocysteine
  MOD_RES (305)..(305): Selenocysteine
MQRANHSXVXQFILVGFSVFPHLQLMLFLLFLLMYLFXLLGNLLIMAXVWSERSLHXPMYLFLCALSVSEILYXVAIIPRMLADLLSXQRSIAFLACASQMFFSFSFGFXHSFLLXVMGYDRYVAICHPLRYNVLMSPRGCACLVGCSWAGGLVMGMVVXSAIFHLAFCGHKEIHHFACHVPPLLKLACGDDVLVVAKGVGLVCIXALLGCFLLILLSYAFIVAAILKIPSAEGRNKAFSXCASHLXVVVVHYGFASVIYLKPKSPQSLEGDXLMGIXYXVLXPFLSPIIFSLRNKELKVAMKKXFFSKLYPEKNVMM

SEQ ID NO: 18698 - protein, 315 aa, Homo sapiens
  MOD_RES (7)..(7): Selenocysteine
  MOD_RES (38)..(38): Selenocysteine
  MOD_RES (48)..(48): Selenocysteine
  MOD_RES (57)..(57): Selenocysteine
  MOD_RES (74)..(74): Selenocysteine
  MOD_RES (88)..(88): Selenocysteine
  MOD_RES (110)..(110): Selenocysteine
  MOD_RES (116)..(116): Selenocysteine
  MOD_RES (160)..(160): Selenocysteine
  MOD_RES (167)..(167): Selenocysteine
  MOD_RES (241)..(241): Selenocysteine
  MOD_RES (273)..(273): Selenocysteine
  MOD_RES (277)..(278): Selenocysteine
  MOD_RES (283)..(283): Selenocysteine
  MOD_RES (305)..(305): Selenocysteine
  MOD_RES (309)..(309): Selenocysteine
  MOD_RES (315)..(315): Selenocysteine
MLGLNHXSMSEFILVGFSAFPHLQLMLFLLFLLMYLFXLLGNLLIMAXVWSERSLHXPMYLFLCVLSVSEILYXVAIIPRMLADLLSXQRSIAFLACASQMFFSFSFGFXHSFLLXVMGYDRYVAICHPLRYNVLMSPRGCACLVGCSWAGGSVMGMVVXSAIFQLXFCGSHEIQHFLCHVPPLLKLACGNNVPAVALGVGLVCIMALLGCFLLILLSYAFIVADILKIPSAEGRNKAFSXCASHLIVVIVHYGFASVIYLKPKGPHSQEGDXLMAXXYAVLXPFLSPIIFSLRNKELKVAMKRXFLSXLYSSGX

SEQ ID NO: 18699 - protein, 316 aa, Homo sapiens
  MOD_RES (8)..(8): Selenocysteine
  MOD_RES (39)..(39): Selenocysteine
  MOD_RES (49)..(49): Selenocysteine
  MOD_RES (58)..(58): Selenocysteine
  MOD_RES (75)..(75): Selenocysteine
  MOD_RES (79)..(79): Selenocysteine
  MOD_RES (89)..(89): Selenocysteine
  MOD_RES (94)..(94): Selenocysteine
  MOD_RES (111)..(111): Selenocysteine
  MOD_RES (126)..(126): Selenocysteine
  MOD_RES (149)..(149): Selenocysteine
  MOD_RES (161)..(161): Selenocysteine
  MOD_RES (168)..(168): Selenocysteine
  MOD_RES (194)..(194): Selenocysteine
  MOD_RES (207)..(207): Selenocysteine
  MOD_RES (239)..(239): Selenocysteine
  MOD_RES (242)..(242): Selenocysteine
  MOD_RES (248)..(248): Selenocysteine
  MOD_RES (278)..(279): Selenocysteine
  MOD_RES (281)..(281): Selenocysteine
  MOD_RES (284)..(284): Selenocysteine
MPGQNYRXISEFILSGFSAFPQQLLPVLFLLYLLMFLFXLLGNLLIMAXVWIERRLHXPMYLFLCALSISEILFXVAIXPRMLADLLFXHRSIXFVACAIQMFFSFMFGFXHSFLLMVMGYDHYVXICHPLHYNMLMSPRGCAHLVAWXWAGGSVMGMMVXMMVFHLXFCGSNVIHHFLCHVLSLLKLACGSKXSSVIMGVMLVCVXALIGCLFLIILSFVFIVAAILRIPSAEGRHKXFSXCVSHLXVVVMHYSFASLIYLKPKGLHSMYSDALMAXXYXVFXPFLSPIIFSLRNKELKNAINKNFCRRFCPLSS

SEQ ID NO: 18700 - protein, 316 aa, Homo sapiens
  MOD_RES (39)..(39): Selenocysteine
  MOD_RES (49)..(49): Selenocysteine
  MOD_RES (58)..(58): Selenocysteine
  MOD_RES (66)..(66): Selenocysteine
  MOD_RES (75)..(75): Selenocysteine
  MOD_RES (79)..(79): Selenocysteine
  MOD_RES (89)..(89): Selenocysteine
  MOD_RES (94)..(94): Selenocysteine
  MOD_RES (111)..(111): Selenocysteine
  MOD_RES (149)..(149): Selenocysteine
  MOD_RES (161)..(162): Selenocysteine
  MOD_RES (168)..(168): Selenocysteine
  MOD_RES (194)..(194): Selenocysteine
  MOD_RES (207)..(207): Selenocysteine
  MOD_RES (239)..(239): Selenocysteine
  MOD_RES (242)..(242): Selenocysteine
  MOD_RES (248)..(248): Selenocysteine
  MOD_RES (252)..(252): Selenocysteine
  MOD_RES (278)..(279): Selenocysteine
  MOD_RES (281)..(281): Selenocysteine
  MOD_RES (284)..(284): Selenocysteine
MPSQNYSIISEFNLFGFSAFPQHLLPILFLLYLLMFLFXLLGNLLIMAXIWIEHRLHXPMYLFLCXLSVSEILFXVAIXPRMLADLLSXHHSIXFVACANQMFFSFMFGFXHSFLLLVMGYDRYVAICHPLRYNVLMSPRDCAHLVACXWAGGSVMGMMVXXIVFHLXFCGSNVIHHFFCHVLSLLKLACENKXSSVIMGVMLVCVXALIGCLFLIILSYVFIVAAILRIPSAEGRHKXFSXCVSHLXVVVXHYSFASFIYLKPKGLHSMYSDALMAXXYXVFXPFLSPIIFSLRNKELKNAINKNFYRKFCPPSS

SEQ ID NO: 18701 - protein, 315 aa, Homo sapiens
  MOD_RES (7)..(7): Selenocysteine
  MOD_RES (38)..(38): Selenocysteine
  MOD_RES (48)..(48): Selenocysteine
  MOD_RES (69)..(69): Selenocysteine
  MOD_RES (74)..(74): Selenocysteine
  MOD_RES (88)..(88): Selenocysteine
  MOD_RES (110)..(110): Selenocysteine
  MOD_RES (116)..(116): Selenocysteine
  MOD_RES (142)..(142): Selenocysteine
  MOD_RES (160)..(160): Selenocysteine
  MOD_RES (206)..(206): Selenocysteine
  MOD_RES (241)..(241): Selenocysteine
  MOD_RES (247)..(247): Selenocysteine
  MOD_RES (273)..(273): Selenocysteine
  MOD_RES (278)..(278): Selenocysteine
  MOD_RES (280)..(280): Selenocysteine
  MOD_RES (283)..(283): Selenocysteine
  MOD_RES (305)..(305): Selenocysteine
  MOD_RES (308)..(308): Selenocysteine
MQGLNHXSVSEFILVGFSAFPHLQLMLFLLFLLMYLFXLLGNLLIMAXVWSERSLHMPMYLFLCALSIXEILYXVAIIPRMLADLLSXQRSIAFLACASQMFFSFSFGFXHSFLLXVMGYDRYVAICHPLRYNVLMSLRGCXCRVGCSWAGGLVMGMVVXSAIFHLAFCGHKEIHHFFCHVPPLLKLACGDDVLVVAKGVGLVCIXALLGCFLLILLSYAFIVAAILKIPSAEGRNKAFSXCASHLXVVVVHYGFASVIYLKPKGPQSPEGDXLMGIXYXVLXPFLSPIIFSLRNKELKVAMKKXCFXKLFPQNC

SEQ ID NO: 18702 - protein, 320 aa, Homo sapiens
  MOD_RES (18)..(18): Selenocysteine
  MOD_RES (21)..(21): Selenocysteine
  MOD_RES (37)..(37): Selenocysteine
  MOD_RES (49)..(49): Selenocysteine
  MOD_RES (58)..(58): Selenocysteine
  MOD_RES (68)..(68): Selenocysteine
  MOD_RES (79)..(79): Selenocysteine
  MOD_RES (82)..(82): Selenocysteine
  MOD_RES (85)..(85): Selenocysteine
  MOD_RES (110)..(110): Selenocysteine
  MOD_RES (117)..(117): Selenocysteine
  MOD_RES (121)..(121): Selenocysteine
  MOD_RES (127)..(127): Selenocysteine
  MOD_RES (169)..(169): Selenocysteine
  MOD_RES (172)..(172): Selenocysteine
  MOD_RES (202)..(203): Selenocysteine
  MOD_RES (209)..(209): Selenocysteine
  MOD_RES (234)..(234): Selenocysteine
  MOD_RES (250)..(250): Selenocysteine
  MOD_RES (256)..(256): Selenocysteine
  MOD_RES (277)..(277): Selenocysteine
  MOD_RES (287)..(287): Selenocysteine
  MOD_RES (289)..(289): Selenocysteine
  MOD_RES (292)..(292): Selenocysteine
  MOD_RES (301)..(301): Selenocysteine
MLLCFRFGNQSMKRENFXLIXDFVFQGFSSFHEQQIXLFGVFLALYILXLAGNIIIVXIIRMDLHLHXPMYFFLSMLSXSEXVYXLVILPRMLSSLVGMSQPISLAGCAXQMFFFVXFGIXNCFLLXAMGYDRYVAICNPLRYMVIMNKRLRIQLVLGACSIGLIVAIXQVXSVFRLPFCARKVPHFFCDIRPVMKLSCIDXXVNEILXLIISVLVLVVPMGLVFISYVLIISXILKIASVEGRKKAFAXCASHLXVVIVHYSCASIAYLKPKSENXREHDQLISVXYXVIXPLLNPVVYXLRNKEVKDALCRAVGGKFS

SEQ ID NO: 18703 - protein, 329 aa, Homo sapiens
  MOD_RES (7)..(7): Selenocysteine
  MOD_RES (10)..(10): Selenocysteine
  MOD_RES (34)..(34): Selenocysteine
  MOD_RES (39)..(39): Selenocysteine
  MOD_RES (48)..(48): Selenocysteine
  MOD_RES (58)..(58): Selenocysteine
  MOD_RES (72)..(72): Selenocysteine
  MOD_RES (75)..(75): Selenocysteine
  MOD_RES (95)..(95): Selenocysteine
  MOD_RES (100)..(100): Selenocysteine
  MOD_RES (107)..(107): Selenocysteine
  MOD_RES (117)..(117): Selenocysteine
  MOD_RES (162)..(162): Selenocysteine
  MOD_RES (191)..(191): Selenocysteine
  MOD_RES (193)..(194): Selenocysteine
  MOD_RES (225)..(225): Selenocysteine
  MOD_RES (241)..(241): Selenocysteine
  MOD_RES (247)..(247): Selenocysteine
  MOD_RES (278)..(278): Selenocysteine
  MOD_RES (280)..(280): Selenocysteine
  MOD_RES (285)..(285): Selenocysteine
MPKLNSXFVXEFLFEGFSSFRRQHKLVFFVVFLXLYLLXLSGNVIIMXIIRLDHHLHXPMYFFLCMLSISEXCYXVAIIPHMLSGLLNPHQPIAXQSCAXQLFFYLXFGINNCFLLXVMGYDRYVAICNPLRYSVIMGKRACIQLASGSLGIGLGMAIVQVXSVFGLPFCDAFVISHFFCDVRHLLKLACXDXXVNEIINFVVSVCVLVLPMGLVFISYVLIISXILKIASAEGQKKAFAXCASHLXVVIIHYGCASIIYLKPKSQSSLGQDRLISVXYXHHSPXEPCCVQPEEQGGQRCSAQSRGAKNSVSLMKRGCEGFSFAFINMY

SEQ ID NO: 18704 - protein, 309 aa, Homo sapiens
  MOD_RES (7)..(7): Selenocysteine
  MOD_RES (26)..(26): Selenocysteine
  MOD_RES (33)..(33): Selenocysteine
  MOD_RES (38)..(38): Selenocysteine
  MOD_RES (47)..(47): Selenocysteine
  MOD_RES (57)..(57): Selenocysteine
  MOD_RES (71)..(71): Selenocysteine
  MOD_RES (74)..(74): Selenocysteine
  MOD_RES (99)..(99): Selenocysteine
  MOD_RES (109)..(109): Selenocysteine
  MOD_RES (116)..(116): Selenocysteine
  MOD_RES (133)..(133): Selenocysteine
  MOD_RES (154)..(154): Selenocysteine
  MOD_RES (161)..(161): Selenocysteine
  MOD_RES (171)..(171): Selenocysteine
  MOD_RES (191)..(192): Selenocysteine
  MOD_RES (236)..(236): Selenocysteine
  MOD_RES (239)..(239): Selenocysteine
  MOD_RES (245)..(245): Selenocysteine
  MOD_RES (276)..(276): Selenocysteine
  MOD_RES (278)..(278): Selenocysteine
  MOD_RES (281)..(281): Selenocysteine
MKRKNFXEVSEFIFLGFSSFGKHQIXLFVVFLXVYILXLVANIIIVXIICIDHHLHXPMYFFLSMLASSEXVYXLVIVPRMLLSLIFHNQPISLAGCAXQMFFFVILAXNNCFLLXAMGYDRYVAICRPLRYXVIMSKGLCAQLVCGSFGIGLXMAVLHVXAMFNLPFCGXVVDHFFCDIYPVMKLSCIDXXINEIINYGVSSFVIFVPIGLIFISYVLVISSILQIASAEGRKKXFAXCVSHLXVVIVHCGCASIAYLKPKSESSIEKDLVLSVXYXIIXPLLNPVVYSLRNKEVKDALCRVVGRNIS

SEQ ID NO: 18705 - protein, 313 aa, Homo sapiens
  MOD_RES (7)..(7): Selenocysteine
  MOD_RES (38)..(38): Selenocysteine
  MOD_RES (41)..(41): Selenocysteine
  MOD_RES (48)..(48): Selenocysteine
  MOD_RES (57)..(57): Selenocysteine
  MOD_RES (74)..(74): Selenocysteine
  MOD_RES (91)..(91): Selenocysteine
  MOD_RES (154)..(154): Selenocysteine
  MOD_RES (159)..(160): Selenocysteine
  MOD_RES (237)..(237): Selenocysteine
  MOD_RES (240)..(240): Selenocysteine
  MOD_RES (249)..(249): Selenocysteine
  MOD_RES (264)..(264): Selenocysteine
  MOD_RES (267)..(267): Selenocysteine
  MOD_RES (272)..(272): Selenocysteine
  MOD_RES (279)..(279): Selenocysteine
  MOD_RES (282)..(282): Selenocysteine
  MOD_RES (304)..(304): Selenocysteine
  MOD_RES (308)..(308): Selenocysteine
MEQVNKXVVREFVVLGFSSLARLQQLLFVIFLLLYLFXLGXNAIIISXIVLDRALHXPMYFFLAILSCSEICYXFVIVPKMLVDLLSQKKXISFLGCAIQMFSFLFFGSSHSFLLAAMGYDRYMAICNPLRYSVLMGHGVCMGLMAAACACGFXVSLVXXSLVFHLPFHSSNQLHHFFCDISPVLKLASQHSGFSQLVIFMLGVFALVIPLLLILVSYIRIISAILKIPSSVGRYKXFSXCASHLIVVXVHYSCASFIYLRPKXNYXSSQDXLISVSYXILXPLFNPMIYSLRNKEFKSALRRXIGQXFYPLS

SEQ ID NO: 18706 - protein, 312 aa, Homo sapiens
  MOD_RES (7)..(7): Selenocysteine
  MOD_RES (38)..(38): Selenocysteine
  MOD_RES (41)..(41): Selenocysteine
  MOD_RES (48)..(48): Selenocysteine
  MOD_RES (74)..(74): Selenocysteine
  MOD_RES (91)..(91): Selenocysteine
  MOD_RES (154)..(154): Selenocysteine
  MOD_RES (160)..(160): Selenocysteine
  MOD_RES (204)..(204): Selenocysteine
  MOD_RES (231)..(231): Selenocysteine
  MOD_RES (240)..(240): Selenocysteine
  MOD_RES (249)..(249): Selenocysteine
  MOD_RES (279)..(279): Selenocysteine
  MOD_RES (282)..(282): Selenocysteine
  MOD_RES (308)..(308): Selenocysteine
MERVNEXVVREVIFLGFSSLARLQQLLFVIFLLLYLFXLGXNAIIISXIVLDRALHIPMYFFLAILSCSEICYXFIIVPKMLVDLLSQKKXISFLGCAIQMFSFLFLGCSHSFLLAVMGYDRYIAICNPLRYSVLMGHGVCMGLVAAACACGFXVAQIIXSLVFHLPFYSSNQLHHFFCDIAPVLKLASHHNHFSQIVIFMLCXLVLAIPLLLILVSYVHILSAILQFPSXLGRCKAFSXCVSHLIIVXVHYGCASFIYLRPQSNYSSSQDALISVSYXIIXPLFNPMIYSLRNKEFKSALCKIVRRXISLL

SEQ ID NO: 18707 - protein, 313 aa, Homo sapiens
  MOD_RES (7)..(8): Selenocysteine
  MOD_RES (38)..(38): Selenocysteine
  MOD_RES (49)..(49): Selenocysteine
  MOD_RES (74)..(75): Selenocysteine
  MOD_RES (81)..(81): Selenocysteine
  MOD_RES (117)..(117): Selenocysteine
  MOD_RES (135)..(135): Selenocysteine
  MOD_RES (148)..(148): Selenocysteine
  MOD_RES (152)..(152): Selenocysteine
  MOD_RES (156)..(156): Selenocysteine
  MOD_RES (158)..(159): Selenocysteine
  MOD_RES (202)..(202): Selenocysteine
  MOD_RES (204)..(204): Selenocysteine
  MOD_RES (217)..(217): Selenocysteine
  MOD_RES (232)..(232): Selenocysteine
  MOD_RES (241)..(241): Selenocysteine
  MOD_RES (255)..(255): Selenocysteine
  MOD_RES (259)..(259): Selenocysteine
  MOD_RES (270)..(271): Selenocysteine
  MOD_RES (280)..(280): Selenocysteine
  MOD_RES (283)..(283): Selenocysteine
  MOD_RES (292)..(292): Selenocysteine
MAGENHXXLPEFLLLGFSDLKALQGPLFWVVLLVYLVXLLGNSLIILLXQVSPALHSPMYFFLRQLSVVELFYXXDIVPRXLANLGSPHPQAISFQGCAAQMYVFIVLGISECCLLXAMAYDRYVAICQPLRYSXLLSPRACMAMVGXSWLXGIIXAXXHASLIFSLPFRSHPIIPHFLCDILPVLRLASAGKHRSEISVMXAXIVFIMIPFSLIVXSYIRILGAILAMASXQSRRKVFSXCSSHLLVVSLFFGXASIXYIRPQAGSSVXXDRVLSLFYXVIXPMLNPIIYXLRNKDVRRALRHLVKRQRPSP

SEQ ID NO: 18708 - protein, 319 aa, Homo sapiens
  MOD_RES (14)..(14): Selenocysteine
  MOD_RES (22)..(23): Selenocysteine
  MOD_RES (25)..(25): Selenocysteine
  MOD_RES (47)..(47): Selenocysteine
  MOD_RES (55)..(55): Selenocysteine
  MOD_RES (58)..(58): Selenocysteine
  MOD_RES (61)..(61): Selenocysteine
  MOD_RES (78)..(79): Selenocysteine
  MOD_RES (110)..(110): Selenocysteine
  MOD_RES (114)..(114): Selenocysteine
  MOD_RES (137)..(137): Selenocysteine
  MOD_RES (141)..(141): Selenocysteine
  MOD_RES (146)..(146): Selenocysteine
  MOD_RES (164)..(164): Selenocysteine
  MOD_RES (169)..(169): Selenocysteine
  MOD_RES (213)..(213): Selenocysteine
  MOD_RES (227)..(227): Selenocysteine
  MOD_RES (245)..(245): Selenocysteine
  MOD_RES (251)..(251): Selenocysteine
  MOD_RES (271)..(271): Selenocysteine
  MOD_RES (284)..(284): Selenocysteine
  MOD_RES (287)..(287): Selenocysteine
MPVGKLVFNQSEPXEFVFRAFXXAXEFQVLLFLLFLLLYLMILCGNXAIIWVVCXHSXLRXPMYFFLSNLSFLELCYXXVVVPLMLSNILGAQKPISLAGCGAQMFFFVXLGSXDCFLLAIMAYDRYVAICHPLHYXLIMXRELCXQMLGGALGLALFPSLQLXALIFXLPFCGHHQEINHFLCDVPPVLRLACADIRVHQAVLYVVSILVLXIPFLLICVSYVFIXCAILSIRSAEGRRRAFSXCSFHLXVVLLQYGCCSLVYLRPRSSXSEDEDSQIALVYXFVXPLLNPLLYSLRNKDVKGALRSAIIRKAASDAN

SEQ ID NO: 18709 - protein, 335 aa, Homo sapiens
  MOD_RES (8)..(8): Selenocysteine
  MOD_RES (27)..(27): Selenocysteine
  MOD_RES (30)..(30): Selenocysteine
  MOD_RES (64)..(64): Selenocysteine
  MOD_RES (77)..(77): Selenocysteine
  MOD_RES (88)..(88): Selenocysteine
  MOD_RES (91)..(91): Selenocysteine
  MOD_RES (94)..(94): Selenocysteine
  MOD_RES (111)..(111): Selenocysteine
  MOD_RES (130)..(130): Selenocysteine
  MOD_RES (154)..(154): Selenocysteine
  MOD_RES (178)..(178): Selenocysteine
  MOD_RES (210)..(210): Selenocysteine
  MOD_RES (212)..(212): Selenocysteine
  MOD_RES (244)..(244): Selenocysteine
  MOD_RES (260)..(260): Selenocysteine
  MOD_RES (283)..(283): Selenocysteine
  MOD_RES (295)..(295): Selenocysteine
  MOD_RES (297)..(297): Selenocysteine
  MOD_RES (299)..(299): Selenocysteine
  MOD_RES (302)..(302): Selenocysteine
MPQILIFXYLNMFYFFPPLQILAENLXMVXEFLLLGFSSLGEIQLALFVVFLFLYLVILSGNVXIISVIHLDKSLHXPMYFFLGILSXSEXFYXFVILPKMLINLLSVARXISFNCCALQMFFFLGFAIXNCLLLGVMGYDRYAAICHPLHYPXLMSWQVCGKLAAACAIGGFLASLXVVNLVFSLPFCSANKVNHYFCDISAVILLACXNXDVNEFVIFICGVLVLVVPFLFICVSYLCILRXILKIPSAEGRRKAFSXCASHLSVVIVHYGCASFIYLRPXANYVSNKDRLVXVXYXIVXPLLNPMVYSLRNKDVQLAIRKVLGKKGSLKLYN

SEQ ID NO: 18710 - protein, 331 aa, Homo sapiens
  MOD_RES (2)..(2): Selenocysteine
  MOD_RES (11)..(11): Selenocysteine
  MOD_RES (13)..(14): Selenocysteine
  MOD_RES (20)..(20): Selenocysteine
  MOD_RES (33)..(33): Selenocysteine
  MOD_RES (51)..(51): Selenocysteine
  MOD_RES (61)..(61): Selenocysteine
  MOD_RES (88)..(88): Selenocysteine
  MOD_RES (90)..(90): Selenocysteine
  MOD_RES (100)..(100): Selenocysteine
  MOD_RES (124)..(124): Selenocysteine
  MOD_RES (130)..(130): Selenocysteine
  MOD_RES (162)..(162): Selenocysteine
  MOD_RES (168)..(168): Selenocysteine
  MOD_RES (174)..(174): Selenocysteine
  MOD_RES (177)..(177): Selenocysteine
  MOD_RES (204)..(204): Selenocysteine
  MOD_RES (206)..(207): Selenocysteine
  MOD_RES (244)..(244): Selenocysteine
  MOD_RES (256)..(256): Selenocysteine
  MOD_RES (260)..(260): Selenocysteine
  MOD_RES (291)..(291): Selenocysteine
  MOD_RES (294)..(294): Selenocysteine
  MOD_RES (303)..(303): Selenocysteine
  MOD_RES (325)..(325): Selenocysteine
MXSRSVCEKMXMXXENPNQXVVSHFFLEGLRYXAKHSSLFFLLFLLIYSIXVAGNLLILLXVGSDSHLSLPMYHFLGHLSFLDACLSXVXVPKVMAGLLXLDGKVISFEGCAVQLYCFHFLASXECFLYXVMAYDRYLAICQPLHYPVAMNRRMCAEMAGIXWAIGAXHAAIHXSLXFRLLYCGPCHIAYFFCDIPPVLKLACXDXXINELVMLASIGIVAAGCLILIVISYIFIVAAVLRIRXAQGRQRAFSPCXAQLXGVLLYYVPPVCIYLQPRSSEAGAGAPAVFYXIVXPMLNPFIYXLRNKEVKHALQRLLCSSFRESXAGSPPP

SEQ ID NO: 18711 - protein, 314 aa, Homo sapiens
  MOD_RES (7)..(8): Selenocysteine
  MOD_RES (11)..(11): Selenocysteine
  MOD_RES (38)..(38): Selenocysteine
  MOD_RES (45)..(45): Selenocysteine
  MOD_RES (55)..(55): Selenocysteine
  MOD_RES (58)..(58): Selenocysteine
  MOD_RES (75)..(75): Selenocysteine
  MOD_RES (90)..(90): Selenocysteine
  MOD_RES (92)..(92): Selenocysteine
  MOD_RES (100)..(100): Selenocysteine
  MOD_RES (111)..(111): Selenocysteine
  MOD_RES (134)..(134): Selenocysteine
  MOD_RES (152)..(152): Selenocysteine
  MOD_RES (161)..(161): Selenocysteine
  MOD_RES (191)..(191): Selenocysteine
  MOD_RES (193)..(193): Selenocysteine
  MOD_RES (225)..(225): Selenocysteine
  MOD_RES (240)..(240): Selenocysteine
  MOD_RES (246)..(246): Selenocysteine
  MOD_RES (277)..(277): Selenocysteine
  MOD_RES (279)..(279): Selenocysteine
  MOD_RES (282)..(282): Selenocysteine
  MOD_RES (299)..(299): Selenocysteine
  MOD_RES (311)..(311): Selenocysteine
MRGFNKXXVVXQFILVGFSSLGELQLLLFVIFLLLYLXILVANVXIMAVIRFSWXLHXPMYGFLFILSFSESCYXFVIIPQLLVHLLSDXKXISFMACAXQLFFFLGFACXNCLLIAVMGYDRYVAICHPLRYXLIINKRLGLELISLSGAXGFFIALVAXNLICDMRFCGPNRVNHYFCDMAPVIKLACXDXHVKELALFSLSILVIMVPFLLILISYGFIVNXILKIPSAEGKKAFVXCASHLXVVFVHYGCASIIYLRPKSKSASDKDQLVAVXYXVVXPLLNPLVYSLRNKEVKXALKRVLGMPVAXKMS

SEQ ID NO: 18712 - protein, 309 aa, Homo sapiens
  MOD_RES (7)..(7): Selenocysteine
  MOD_RES (37)..(37): Selenocysteine
  MOD_RES (44)..(44): Selenocysteine
  MOD_RES (57)..(57): Selenocysteine
  MOD_RES (74)..(74): Selenocysteine
  MOD_RES (78)..(78): Selenocysteine
  MOD_RES (91)..(91): Selenocysteine
  MOD_RES (96)..(96): Selenocysteine
  MOD_RES (100)..(100): Selenocysteine
  MOD_RES (161)..(161): Selenocysteine
  MOD_RES (193)..(193): Selenocysteine
  MOD_RES (198)..(198): Selenocysteine
  MOD_RES (241)..(241): Selenocysteine
  MOD_RES (256)..(256): Selenocysteine
  MOD_RES (280)..(280): Selenocysteine
  MOD_RES (283)..(283): Selenocysteine
MEGINKXAKMQFFFRPFSPDPEVQMLIFVVFLMMYLXSLGGNAXIAVIVQINHSLHXPMYFFLANLAVLEIFYXSSIXPLALANLLSMGKXPVSIXGCGXQMFFFVFLGGADCVLLVVMAYDQFIAICHPLRYRLIMSWSLCVELLVGSLVLGFLLSLPLXILIFHLPFCHNDEIYHFYCDMPAVMRLACADXRVHKXALYIISFIVLSIPLSLISISYVFIVVAILRIRSAEGRQQAYSXCSSHILVVLLQYGCXSFIYLSPSSSYSPEMGRVVSVAYXFIXPILNPLIYSLRNKELKDALRKALRKF

SEQ ID NO: 18713 - protein, 305 aa, Homo sapiens
  MOD_RES (31)..(31): Selenocysteine
  MOD_RES (42)..(42): Selenocysteine
  MOD_RES (44)..(44): Selenocysteine
  MOD_RES (48)..(48): Selenocysteine
  MOD_RES (65)..(65): Selenocysteine
  MOD_RES (76)..(76): Selenocysteine
  MOD_RES (82)..(82): Selenocysteine
  MOD_RES (84)..(84): Selenocysteine
  MOD_RES (90)..(90): Selenocysteine
  MOD_RES (128)..(128): Selenocysteine
  MOD_RES (130)..(130): Selenocysteine
  MOD_RES (206)..(207): Selenocysteine
  MOD_RES (210)..(210): Selenocysteine
  MOD_RES (231)..(231): Selenocysteine
  MOD_RES (237)..(237): Selenocysteine
  MOD_RES (270)..(270): Selenocysteine
  MOD_RES (273)..(273): Selenocysteine
  MOD_RES (297)..(297): Selenocysteine
MEFVFLAYPSCPELHILSFLGVSLVYGLIIXGNILIVVSIHXEXCLCXSMYYFLGSLSGIEICYXAVVVPHILANXLQSEKXIXLLGCAXQMAFFIALGSADCFLLAAMAYDRYVAICHPLQYPLLMXLXLCVHLVVASVISGLFLSLQLVAFIFSLPFCQAQGIEHFFCDVPPVMHVVCAQSHIHEQSVLVAAILAIAVPFFLIXXSYXFIVAALLKIHSAAGRHRAFSXCSSHLXVVLLQYGCCAFMYLCPSSSYNPKQDRFISLVYXLGXPLLNPLIYALRNSEMKGAVGRVLXRNCLSQNS

SEQ ID NO: 18714 - protein, 326 aa, Homo sapiens
  MOD_RES (17)..(17): Selenocysteine
  MOD_RES (23)..(23): Selenocysteine
  MOD_RES (41)..(41): Selenocysteine
  MOD_RES (54)..(54): Selenocysteine
  MOD_RES (65)..(65): Selenocysteine
  MOD_RES (73)..(73): Selenocysteine
  MOD_RES (87)..(87): Selenocysteine
  MOD_RES (90)..(90): Selenocysteine
  MOD_RES (92)..(92): Selenocysteine
  MOD_RES (111)..(111): Selenocysteine
  MOD_RES (126)..(126): Selenocysteine
  MOD_RES (132)..(132): Selenocysteine
  MOD_RES (153)..(153): Selenocysteine
  MOD_RES (166)..(166): Selenocysteine
  MOD_RES (174)..(174): Selenocysteine
  MOD_RES (176)..(176): Selenocysteine
  MOD_RES (211)..(211): Selenocysteine
  MOD_RES (216)..(216): Selenocysteine
  MOD_RES (226)..(226): Selenocysteine
  MOD_RES (233)..(233): Selenocysteine
  MOD_RES (240)..(240): Selenocysteine
  MOD_RES (255)..(256): Selenocysteine
  MOD_RES (262)..(262): Selenocysteine
  MOD_RES (285)..(285): Selenocysteine
  MOD_RES (292)..(292): Selenocysteine
  MOD_RES (295)..(295): Selenocysteine
  MOD_RES (321)..(321): Selenocysteine
MVLNVYCCFFQISDIQXMKINQXILKEFILVGFSVYPHVQXFLFVVFFCLYLLXLAGNLIIMGLXWVDRSLHXPMYLFLSALSFSEXCYXLXIVPKMLEDLLAKDRSISVXGCSLQMCFFLGLGGXNCIILXLMGYDRFLAICNPLRYPLLMXNIVCGQLVASACXAGFFISLXEXALIFRDSFCRPNLVKHFFCHMLAVIRLSCIDSNHXEFIIXLISVSGLLGXLLLIILXDVFIISXVLRIPSAEGKQKAFXXCASHLXVVIIHFGFASIVYLKPEASGDDXLIAVPYXVIXPFLSPIIFSLRNKDMKNAFRRMMGNXVALKK

SEQ ID NO: 18715 - protein, 313 aa, Homo sapiens
  MOD_RES (4)..(4): Selenocysteine
  MOD_RES (7)..(7): Selenocysteine
  MOD_RES (38)..(38): Selenocysteine
  MOD_RES (40)..(40): Selenocysteine
  MOD_RES (57)..(57): Selenocysteine
  MOD_RES (71)..(71): Selenocysteine
  MOD_RES (74)..(74): Selenocysteine
  MOD_RES (110)..(110): Selenocysteine
  MOD_RES (139)..(139): Selenocysteine
  MOD_RES (147)..(147): Selenocysteine
  MOD_RES (151)..(151): Selenocysteine
  MOD_RES (160)..(160): Selenocysteine
  MOD_RES (181)..(181): Selenocysteine
  MOD_RES (192)..(192): Selenocysteine
  MOD_RES (215)..(215): Selenocysteine
  MOD_RES (240)..(240): Selenocysteine
  MOD_RES (246)..(246): Selenocysteine
  MOD_RES (277)..(277): Selenocysteine
  MOD_RES (279)..(279): Selenocysteine
  MOD_RES (282)..(282): Selenocysteine
  MOD_RES (299)..(299): Selenocysteine
MGQXNVXSWRDFVFLGFSSSGELQLLLFALFLSLYLVXLXSNVFIIIAIRLDSHLHXPMYLFLSFLSFSEXCYXLGIIPRMLSGLAGGDQAISYVGCAAQMFFSASWACXNCFLLAAMGFDRYVAICAPLHYASHMNPXLCAQLVIXSFLXGYLFGLGMXLVIFHLSFCSSHEIQHFFCDXPPVLSLACGDXGPSELRIFILSLLVLLVSFFFIXISYAYILAAILRIPSAEGQKKAFSXCASHLXVVIIHYGCASFVYLRPKASYSLERDQLIAMXYXVVXPLLNPIVYSLRNRAIQXALRNAFRGRLLGKG

SEQ ID NO: 18716 - protein, 315 aa, Homo sapiens
  MOD_RES (6)..(6): Selenocysteine
  MOD_RES (10)..(10): Selenocysteine
  MOD_RES (12)..(12): Selenocysteine
  MOD_RES (34)..(34): Selenocysteine
  MOD_RES (76)..(76): Selenocysteine
  MOD_RES (92)..(92): Selenocysteine
  MOD_RES (110)..(110): Selenocysteine
  MOD_RES (148)..(149): Selenocysteine
  MOD_RES (199)..(200): Selenocysteine
  MOD_RES (209)..(209): Selenocysteine
  MOD_RES (217)..(217): Selenocysteine
  MOD_RES (241)..(241): Selenocysteine
  MOD_RES (250)..(251): Selenocysteine
  MOD_RES (255)..(255): Selenocysteine
  MOD_RES (280)..(280): Selenocysteine
  MOD_RES (283)..(283): Selenocysteine
  MOD_RES (292)..(292): Selenocysteine
  MOD_RES (311)..(311): Selenocysteine
  MOD_RES (313)..(313): Selenocysteine
MEIVSXGNEXIXEFVLLGFYDIPELHFLFFIVFXAVYVFIIIGNMLIIVAVVSSQRLHKPMYIFLANLSFLDILYXSAVMPKMLEGFLQEAXISVAGCLLQFFIFGSLAXAECLLLAVMAYDRYLAICYPLHYPLLMGPRRYMGLVVXXWLSGFVVDGLVVALVAQLRFCGPNHIDQFYCDFMLFVGLACSDPRVAQVXXLILSVFCLXIPFGLILXSYARIVVAVLRVPAGASRRRAFSXCSSHLAVVXXFYGXLMIFYVAPSAVHSQLLSKVFSLLYXVVXPLFNPVIYXMRNKEVHQALRKILCIKQXEXLD

SEQ ID NO: 18717 - protein, 315 aa, Homo sapiens
  MOD_RES (6)..(6): Selenocysteine
  MOD_RES (10)..(10): Selenocysteine
  MOD_RES (12)..(12): Selenocysteine
  MOD_RES (34)..(34): Selenocysteine
  MOD_RES (76)..(76): Selenocysteine
  MOD_RES (92)..(92): Selenocysteine
  MOD_RES (110)..(110): Selenocysteine
  MOD_RES (148)..(149): Selenocysteine
  MOD_RES (165)..(165): Selenocysteine
  MOD_RES (199)..(200): Selenocysteine
  MOD_RES (209)..(209): Selenocysteine
  MOD_RES (217)..(217): Selenocysteine
  MOD_RES (241)..(241): Selenocysteine
  MOD_RES (250)..(251): Selenocysteine
  MOD_RES (255)..(255): Selenocysteine
  MOD_RES (280)..(280): Selenocysteine
  MOD_RES (283)..(283): Selenocysteine
  MOD_RES (292)..(292): Selenocysteine
  MOD_RES (311)..(311): Selenocysteine
  MOD_RES (313)..(313): Selenocysteine
MEIVSXGNEXIXEFVLLGFYDIPELHFLFFIVFXAVYVFIIIGNMLIIVAVVSSQRLHKPMYIFLANLSFLDILYXSAVMPKMLEGFLQEAXISVAGCLLQFFIFGSLAXAECLLLAVMAYDRYLAICYPLHYPLLMGPRRYMGLVVXXWLSGFVVDGLVVALVXQLRFCGPNHIDQFYCDFMLFVGLACSDPRVAQVXXLILSVFCLXIPFGLILXSYARIVVAVLRVPAGASRRRAFSXCSSHLAVVXXFYGXLMIFYVAPSAVHSQLLSKVFSLLYXVVXPLFNPVIYXMRNKEVHQALRKILCIKQXEXLD

SEQ ID NO: 18718 - protein, 345 aa, Homo sapiens
  MOD_RES (30)..(30): Selenocysteine
  MOD_RES (46)..(46): Selenocysteine
  MOD_RES (48)..(48): Selenocysteine
  MOD_RES (70)..(70): Selenocysteine
  MOD_RES (76)..(76): Selenocysteine
  MOD_RES (113)..(113): Selenocysteine
  MOD_RES (115)..(115): Selenocysteine
  MOD_RES (127)..(127): Selenocysteine
  MOD_RES (148)..(148): Selenocysteine
  MOD_RES (172)..(172): Selenocysteine
  MOD_RES (175)..(175): Selenocysteine
  MOD_RES (180)..(180): Selenocysteine
  MOD_RES (224)..(224): Selenocysteine
  MOD_RES (226)..(226): Selenocysteine
  MOD_RES (278)..(278): Selenocysteine
  MOD_RES (311)..(311): Selenocysteine
  MOD_RES (313)..(313): Selenocysteine
  MOD_RES (320)..(320): Selenocysteine
  MOD_RES (345)..(345): Selenocysteine
MHFLSQNDLNINLIPHLCLHRHSVIAGAFXIHRHMKIFNSPSNSSXFXGFILLGFPCPREGQILLFVLFXVVYLLXLMGNGSIICAVHWDQRLHAPMYILLANFSFLEICYVXSXVPSMLANFLSDXKIISFSGCFLQFYFFFSLGSXECFFLAVMAFDRYLAICRPLRYPXIMXRRLCXNLVVNCWVLGFIWFLIPIVNISQMSFCGSRIIDHFLCDPAPLLXLXCKKGPVIELVFSVLSPLPVFMLFLFIVGSYALVVRAVLRVPSAAGRRKAFSXCGSHLAVVSLFYGSVLVMYGSPPSKNEAGKQKXVXLFYSVVXPLLNPVIYSLRNKDMRKALKKFWGX

SEQ ID NO: 18719 - protein, 326 aa, Homo sapiens
  MOD_RES (5)..(5): Selenocysteine
  MOD_RES (9)..(9): Selenocysteine
  MOD_RES (37)..(37): Selenocysteine
  MOD_RES (47)..(49): Selenocysteine
  MOD_RES (53)..(53): Selenocysteine
  MOD_RES (55)..(55): Selenocysteine
  MOD_RES (72)..(72): Selenocysteine
  MOD_RES (92)..(92): Selenocysteine
  MOD_RES (124)..(124): Selenocysteine
  MOD_RES (131)..(131): Selenocysteine
  MOD_RES (152)..(152): Selenocysteine
  MOD_RES (216)..(216): Selenocysteine
  MOD_RES (234)..(234): Selenocysteine
  MOD_RES (247)..(247): Selenocysteine
  MOD_RES (255)..(255): Selenocysteine
  MOD_RES (283)..(283): Selenocysteine
  MOD_RES (290)..(290): Selenocysteine
  MOD_RES (297)..(297): Selenocysteine
MCPLXLQVXGLMNVSEPNSSFAFVNEFILQGFSCEWXIQIFLFSLFXXXYALXIXGNGAIAFVLWCDRRLHXPMYMFLGNFSFLEIWYVSSXVPKMLVNFLSEKKNISFAGCFLQFYFFFSLGXSECLLLXVMAFDQYLAICRPLLYPNIMXGHLYAKLVILCWVCGFLWFLIPIVLISQMPFCGPNIIDHVVCDPGPRFALDCVSAPRIQLFCYXLSSLVIFGNFLFIIGSYXLVLKAMLGMPSSXGRHKAFSXCGSHLAVVSLCYSSLMVMYVSPGLGHSXGMQKIEXLFYAMVXPLFNPLIYSLQNKEIKAALRKVLGSSNII

SEQ ID NO: 18720 - protein, 326 aa, Homo sapiens
  MOD_RES (5)..(5): Selenocysteine
  MOD_RES (9)..(9): Selenocysteine
  MOD_RES (33)..(33): Selenocysteine
  MOD_RES (37)..(37): Selenocysteine
  MOD_RES (47)..(49): Selenocysteine
  MOD_RES (53)..(53): Selenocysteine
  MOD_RES (55)..(55): Selenocysteine
  MOD_RES (72)..(72): Selenocysteine
  MOD_RES (92)..(92): Selenocysteine
  MOD_RES (124)..(124): Selenocysteine
  MOD_RES (131)..(131): Selenocysteine
  MOD_RES (152)..(152): Selenocysteine
  MOD_RES (216)..(216): Selenocysteine
  MOD_RES (234)..(234): Selenocysteine
  MOD_RES (247)..(247): Selenocysteine
  MOD_RES (255)..(255): Selenocysteine
  MOD_RES (283)..(283): Selenocysteine
  MOD_RES (290)..(290): Selenocysteine
  MOD_RES (297)..(297): Selenocysteine
MCPLXLQVXGLMNVSEPNSSFAFVNEFILQGFXCEWXIQIFLFSLFXXXYALXIXGNGAIAFVLWCDWRLHXPMYMFLGNFSFLEIWYVSSXVPKMLVNFLSEKKNISFAGCFLQFYFFFSLGXSECLLLXVMAFDQYLAICRPLLYPNIMXGHLCAKLVILCWVCGFLWFLIPIVLISQMPFCGPNIIDHVVCDPGPRFALDCVSAPRIQLFCYXLSSLVIFGNFLFIIGSYXLVLKAVLGMPSSXGRHKAFSXCGSHLAVVSLCYSSLMVMYVSPGLGHSXGMQKIEXLFYAMVXPLFNPLIYSLQNKEIKAALRKVLGSSNII

SEQ ID NO: 18721 - protein, 326 aa, Homo sapiens
  MOD_RES (5)..(5): Selenocysteine
  MOD_RES (9)..(9): Selenocysteine
  MOD_RES (37)..(37): Selenocysteine
  MOD_RES (47)..(48): Selenocysteine
  MOD_RES (53)..(53): Selenocysteine
  MOD_RES (55)..(55): Selenocysteine
  MOD_RES (72)..(72): Selenocysteine
  MOD_RES (92)..(92): Selenocysteine
  MOD_RES (124)..(124): Selenocysteine
  MOD_RES (131)..(131): Selenocysteine
  MOD_RES (152)..(152): Selenocysteine
  MOD_RES (216)..(216): Selenocysteine
  MOD_RES (234)..(234): Selenocysteine
  MOD_RES (247)..(247): Selenocysteine
  MOD_RES (255)..(255): Selenocysteine
  MOD_RES (283)..(283): Selenocysteine
  MOD_RES (290)..(290): Selenocysteine
  MOD_RES (297)..(297): Selenocysteine
MCPLXLHVXGLMNVSEPNSSFAFVNEFILQGFSCEWXIQIFLFSLFXXIYALXIXGNGAIAFVLWCDRRLHXPMYMFLGNFSFLEIWYVSSXVPKMLVNFLSEKKNISFAGCFLQFYFFFSLGXSECLLLXVMAFDQYLAICRPLLYPNIMXGHLYAKLVILCWVCGFLWFLIPIVLISQKPFCGPNIIDHVVCDPGPLFALDCVSAPRIQLFCYXLSSLVIFGNFLFIIGSYXLVLKAVLGMPSSXGRHKAFSXCGSHLAVVSLCYSPLMVMYVSPGLGHSXGMQKIEXLFYAMVXPLFNPLIYSLQNKEIKAALRKVLGSSNII

SEQ ID NO: 18722 - protein, 324 aa, Homo sapiens
  MOD_RES (16)..(16): Selenocysteine
  MOD_RES (20)..(20): Selenocysteine
  MOD_RES (48)..(48): Selenocysteine
  MOD_RES (67)..(67): Selenocysteine
  MOD_RES (87)..(87): Selenocysteine
  MOD_RES (99)..(99): Selenocysteine
  MOD_RES (119)..(120): Selenocysteine
  MOD_RES (147)..(147): Selenocysteine
  MOD_RES (205)..(205): Selenocysteine
  MOD_RES (211)..(211): Selenocysteine
  MOD_RES (220)..(220): Selenocysteine
  MOD_RES (233)..(233): Selenocysteine
  MOD_RES (250)..(250): Selenocysteine
  MOD_RES (264)..(264): Selenocysteine
  MOD_RES (273)..(273): Selenocysteine
  MOD_RES (278)..(278): Selenocysteine
  MOD_RES (285)..(285): Selenocysteine
  MOD_RES (291)..(292): Selenocysteine
  MOD_RES (301)..(301): Selenocysteine
MSFFFVDLRPMNRSAXHIVXEFILLGFPGCWKIQIFLFSLFLVIYVLXLLGNGAIIYAVRCNPLLHXPMYFLLGNFAFLEIWYVSSXIPNMLVNILSKXKAISFSGCFLQFYFFFSLGXXECLFLAVMAYDRYLAICHPLQYPAIMXVRFCGKLVSFCWLIGFLGYPIPIFYISQLPFCGPNIIDHFLCDMDPLMALSCAPAPIXECIFYXQSSLVLFFXSMYILRSYILLLXAVFQVPSAAGRRKAFSXCGSHLVVVSLFYGXVMVMYVSPXYGIPXLLQKILXLVYSVXXPLFNPLIYXLRNKDMKLALRNVLFGMRIRQNS

SEQ ID NO: 18723 - protein, 330 aa, Homo sapiens
  MOD_RES (10)..(10): Selenocysteine
  MOD_RES (15)..(15): Selenocysteine
  MOD_RES (23)..(23): Selenocysteine
  MOD_RES (28)..(28): Selenocysteine
  MOD_RES (56)..(56): Selenocysteine
  MOD_RES (75)..(75): Selenocysteine
  MOD_RES (95)..(95): Selenocysteine
  MOD_RES (109)..(109): Selenocysteine
  MOD_RES (127)..(128): Selenocysteine
  MOD_RES (155)..(155): Selenocysteine
  MOD_RES (213)..(213): Selenocysteine
  MOD_RES (219)..(219): Selenocysteine
  MOD_RES (237)..(237): Selenocysteine
  MOD_RES (253)..(253): Selenocysteine
  MOD_RES (258)..(258): Selenocysteine
  MOD_RES (272)..(272): Selenocysteine
  MOD_RES (281)..(281): Selenocysteine
  MOD_RES (293)..(293): Selenocysteine
  MOD_RES (297)..(297): Selenocysteine
  MOD_RES (300)..(300): Selenocysteine
  MOD_RES (326)..(326): Selenocysteine
MFFIIHSLVXSVFLXALGPQNRXMHFVXEFVLLGFHGQREMQSCFFSFILVLYLLXLLGNGAIVCAVKLDRRLHXPMYILLGNFAFLEIWYISSXVPNMLVNILSEIKXISFSGCFLQFYFFFSLGXXECFFLSVMAYDRYLAICRPLHYPSIMXGKFCIILVCVCWVGGFLCYPVPIVLISQLPFCGPNIIDHLVCDPGPLFALACISAPSXELICYXFNSMIIFGPFLSILGSYXLVIRAVLCIPSGAGRXKAFSXCGSHLMVVSLFYGXLMVMYVSPXSGNPAGMQKIIXLVYXAMXPFLNPLIYSLRNKDMKDALKRVLGLXVSQN

SEQ ID NO: 18724 - protein, 322 aa, Homo sapiens
  MOD_RES (6)..(6): Selenocysteine
  MOD_RES (8)..(8): Selenocysteine
  MOD_RES (10)..(10): Selenocysteine
  MOD_RES (38)..(38): Selenocysteine
  MOD_RES (47)..(47): Selenocysteine
  MOD_RES (74)..(74): Selenocysteine
  MOD_RES (76)..(77): Selenocysteine
  MOD_RES (110)..(110): Selenocysteine
  MOD_RES (151)..(151): Selenocysteine
  MOD_RES (155)..(155): Selenocysteine
  MOD_RES (195)..(195): Selenocysteine
  MOD_RES (198)..(198): Selenocysteine
  MOD_RES (214)..(214): Selenocysteine
  MOD_RES (231)..(231): Selenocysteine
  MOD_RES (237)..(237): Selenocysteine
  MOD_RES (240)..(240): Selenocysteine
  MOD_RES (249)..(249): Selenocysteine
  MOD_RES (254)..(254): Selenocysteine
  MOD_RES (279)..(279): Selenocysteine
  MOD_RES (282)..(282): Selenocysteine
  MOD_RES (315)..(315): Selenocysteine
MEPQNXSXVXNFQLLGFQNLLEWQALLFVIFLLIYCLXIIGNVVIIXVVSQGLRLHSPMYMFLQHLSFLEVWYXSXXVPLLLANLLSWGQAISFSACMAQLYFFVFLGAXECFLLAFMAYDRYLAICSPLRYPFLMHRGLCARLVVVSWCXGVSXGFLPSLMISRLDFCGRNQINHFFCDLPPLMQLSCSRVYIXEVXIFILSIAVLCICFFLXLGPYVFIVSSILRIPSXSGRRKXFSXCGSHLAVVXLYYGXMISMYVCPSPHLLPEINKIISVFYXVVXPLLNPVIYSLRNKDFKEAVRKVMRRKCGILWSXSKRKFLY

SEQ ID NO: 18725 - protein, 307 aa, Homo sapiens
  MOD_RES (4)..(5): Selenocysteine
  MOD_RES (8)..(8): Selenocysteine
  MOD_RES (16)..(16): Selenocysteine
  MOD_RES (31)..(31): Selenocysteine
  MOD_RES (38)..(38): Selenocysteine
  MOD_RES (73)..(73): Selenocysteine
  MOD_RES (75)..(75): Selenocysteine
  MOD_RES (86)..(86): Selenocysteine
  MOD_RES (108)..(108): Selenocysteine
  MOD_RES (131)..(131): Selenocysteine
  MOD_RES (140)..(140): Selenocysteine
  MOD_RES (145)..(145): Selenocysteine
  MOD_RES (161)..(161): Selenocysteine
  MOD_RES (190)..(190): Selenocysteine
  MOD_RES (199)..(199): Selenocysteine
  MOD_RES (201)..(201): Selenocysteine
  MOD_RES (203)..(203): Selenocysteine
  MOD_RES (212)..(212): Selenocysteine
  MOD_RES (221)..(221): Selenocysteine
  MOD_RES (227)..(227): Selenocysteine
  MOD_RES (239)..(239): Selenocysteine
  MOD_RES (257)..(257): Selenocysteine
  MOD_RES (278)..(278): Selenocysteine
  MOD_RES (281)..(281): Selenocysteine
  MOD_RES (290)..(290): Selenocysteine
MLNXXSVXEFLLLGVXDIQELQPFLFVVFLXIYFISVXGNGAVLMIFISDPRLHSPMYFFLGNLSYLDICYSXVXLPKMLQNFLSXHKAISFLGCISQLHFFHFLGSXESMLLAVMAFDRCVAICKPLRYXVIMNPQLCXQMAIXIWVIGFFHALLHSIMXSRLNFCGSNRIHHFLCDIKPLLKLACGNXELNQWLLSXVXGXIAMGPFFLXLLSYFYIIXYLFFKXRSCSMLCKALSXCASHFMVVILFYAPVLFXYIHPALESFMDQDRIVAIMYXVVXPVLNPLIYXLRNKEVKGALGRVIRRL

SEQ ID NO: 18726 - protein, 307 aa, Homo sapiens
  MOD_RES (4)..(5): Selenocysteine
  MOD_RES (8)..(8): Selenocysteine
  MOD_RES (16)..(16): Selenocysteine
  MOD_RES (31)..(31): Selenocysteine
  MOD_RES (38)..(38): Selenocysteine
  MOD_RES (73)..(73): Selenocysteine
  MOD_RES (75)..(75): Selenocysteine
  MOD_RES (86)..(86): Selenocysteine
  MOD_RES (108)..(108): Selenocysteine
  MOD_RES (131)..(131): Selenocysteine
  MOD_RES (140)..(140): Selenocysteine
  MOD_RES (145)..(145): Selenocysteine
  MOD_RES (161)..(161): Selenocysteine
  MOD_RES (190)..(190): Selenocysteine
  MOD_RES (199)..(199): Selenocysteine
  MOD_RES (201)..(201): Selenocysteine
  MOD_RES (203)..(203): Selenocysteine
  MOD_RES (212)..(212): Selenocysteine
  MOD_RES (221)..(221): Selenocysteine
  MOD_RES (227)..(227): Selenocysteine
  MOD_RES (239)..(239): Selenocysteine
  MOD_RES (257)..(257): Selenocysteine
  MOD_RES (278)..(278): Selenocysteine
  MOD_RES (281)..(281): Selenocysteine
  MOD_RES (290)..(290): Selenocysteine
MLNXXSVXEFLLLGVXDIQELQPFLFVVFLXIYFISVXGNGAVLMIFISDPRLHSPMYFFLGNLSYLDICYSXVXLPKMLQNFLSXHKAISFLGCISQLHFFHFLGSXESMLLAVMAFDRSVAICKPLRYXVIMNPQLCXQMAIXIWVIGFFHALLHSIMXSRLNFCGSNRIHHFLCDIKPLLKLACGNXELNQWLLSXVXGXIAMGPFFLXLLSYFYIIXYLFFKXRSCSMLCKALSXCASHFMVVILFYAPVLFXYIHPALESFMDQDRIVAIMYXVVXPVLNPLIYXLRNKEVKGALGRVIRRL

SEQ ID NO: 18727 - protein, 307 aa, Homo sapiens
  MOD_RES (4)..(5): Selenocysteine
  MOD_RES (8)..(8): Selenocysteine
  MOD_RES (16)..(16): Selenocysteine
  MOD_RES (31)..(31): Selenocysteine
  MOD_RES (38)..(38): Selenocysteine
  MOD_RES (73)..(73): Selenocysteine
  MOD_RES (75)..(75): Selenocysteine
  MOD_RES (86)..(86): Selenocysteine
  MOD_RES (108)..(108): Selenocysteine
  MOD_RES (131)..(131): Selenocysteine
  MOD_RES (140)..(140): Selenocysteine
  MOD_RES (145)..(145): Selenocysteine
  MOD_RES (161)..(161): Selenocysteine
  MOD_RES (190)..(190): Selenocysteine
  MOD_RES (199)..(199): Selenocysteine
  MOD_RES (201)..(201): Selenocysteine
  MOD_RES (203)..(203): Selenocysteine
  MOD_RES (212)..(212): Selenocysteine
  MOD_RES (221)..(221): Selenocysteine
  MOD_RES (227)..(227): Selenocysteine
  MOD_RES (239)..(239): Selenocysteine
  MOD_RES (257)..(257): Selenocysteine
  MOD_RES (278)..(278): Selenocysteine
  MOD_RES (281)..(281): Selenocysteine
  MOD_RES (290)..(290): Selenocysteine
MLNXXSVXEFLLLGVXDIQELQPFLFVVFLXIYFISVXGNGAVLMIVISDPRLHSLMYFFLGNLSYLDICYSXVXLPKMLQNFLSXHKAISFLGCISQLHFFHFLGSXESMLFAVMAFDLSVAICKPLRYXVIMNPQLCXQMAIXIWVIGFFHALLHSVMXSRLNFCGSNRIHHFLCDIKPLLKLACGNXELNQWLLSXVXGXIAMGPFFLXLLSYFYIIXYLFFKXRSCSMLCKALSXCASHFMVVILFYAPVLFXYIHPALESFMDQDRIVAIMYXVVXPVLNPLIYXLRNKEVKGALGRVIRRL

SEQ ID NO: 18728 - protein, 307 aa, Homo sapiens
  MOD_RES (4)..(5): Selenocysteine
  MOD_RES (8)..(8): Selenocysteine
  MOD_RES (16)..(16): Selenocysteine
  MOD_RES (31)..(31): Selenocysteine
  MOD_RES (38)..(38): Selenocysteine
  MOD_RES (73)..(73): Selenocysteine
  MOD_RES (75)..(75): Selenocysteine
  MOD_RES (86)..(86): Selenocysteine
  MOD_RES (108)..(108): Selenocysteine
  MOD_RES (131)..(131): Selenocysteine
  MOD_RES (140)..(140): Selenocysteine
  MOD_RES (145)..(145): Selenocysteine
  MOD_RES (161)..(161): Selenocysteine
  MOD_RES (190)..(190): Selenocysteine
  MOD_RES (199)..(199): Selenocysteine
  MOD_RES (201)..(201): Selenocysteine
  MOD_RES (203)..(203): Selenocysteine
  MOD_RES (212)..(212): Selenocysteine
  MOD_RES (221)..(221): Selenocysteine
  MOD_RES (227)..(227): Selenocysteine
  MOD_RES (239)..(239): Selenocysteine
  MOD_RES (257)..(257): Selenocysteine
  MOD_RES (278)..(278): Selenocysteine
  MOD_RES (281)..(281): Selenocysteine
  MOD_RES (290)..(290): Selenocysteine
MLNXXSVXEFLLLGVXDIQELQPFLFVVFLXIYFISVXGNGAVLMIVISDPRLHSLMYFFLGNLSYLDICYSXVXLPKMLQNFLSXHKAISFLGCISQLHFFHSLGSXESMLFAVMAFDLSVAICKPLRYXVIMNPQLCXQMAIXIWVIGFFHALLHSVMXSRLNFCGSNRIHHFLCDIKPLLKLACGNXELNQWLLSXVXGXIAMGPFFLXLLSYFYIIXYLFFKXRSCSMLCKALSXCASHFMVVILFYAPVLFXYIHPALESFMDQDRIVAIMYXVVXPVLNPLIYXLRNKEVKGALGRVIRRL

SEQ ID NO: 18729 - protein, 316 aa, Homo sapiens
  MOD_RES (5)..(6): Selenocysteine
  MOD_RES (16)..(16): Selenocysteine
  MOD_RES (75)..(75): Selenocysteine
  MOD_RES (108)..(108): Selenocysteine
  MOD_RES (131)..(131): Selenocysteine
  MOD_RES (161)..(161): Selenocysteine
  MOD_RES (190)..(190): Selenocysteine
  MOD_RES (201)..(201): Selenocysteine
  MOD_RES (212)..(212): Selenocysteine
  MOD_RES (239)..(239): Selenocysteine
  MOD_RES (257)..(257): Selenocysteine
  MOD_RES (265)..(265): Selenocysteine
  MOD_RES (281)..(281): Selenocysteine
  MOD_RES (290)..(290): Selenocysteine
MENVXXMNEFLLLGLXGVQELQPFFFGIFLIIYLINLIGNGSILVMVVLEPQLHSPMYFFLGNLSCLDISYSSVXLPKLLVNLVCSRRAISFLGCIIQLHFFHFLGSXEAILLAIMAFDRFVAICNPLRYXVIMNPQVCILLAAAAWLISFFYALMHSVMXAHLSFCGSQKLNHFFYDVKPLLELACSDXLLNQWLLSIVXGSISMGAFFLXLLSCFYVIGFLLFKNRSCRILHKALSXCASHFMVVCLFYGPVGFXYIRPASAXSMIQDRIMAIMYSAVXPVLNPLIYXLRNKEVMMALKKIFGRKLFKDWQQHH

SEQ ID NO: 18730 - protein, 316 aa, Homo sapiens
  MOD_RES (5)..(6): Selenocysteine
  MOD_RES (16)..(16): Selenocysteine
  MOD_RES (75)..(75): Selenocysteine
  MOD_RES (97)..(97): Selenocysteine
  MOD_RES (108)..(108): Selenocysteine
  MOD_RES (131)..(131): Selenocysteine
  MOD_RES (161)..(161): Selenocysteine
  MOD_RES (190)..(190): Selenocysteine
  MOD_RES (201)..(201): Selenocysteine
  MOD_RES (212)..(212): Selenocysteine
  MOD_RES (239)..(239): Selenocysteine
  MOD_RES (257)..(257): Selenocysteine
  MOD_RES (265)..(265): Selenocysteine
  MOD_RES (281)..(281): Selenocysteine
  MOD_RES (290)..(290): Selenocysteine
MENVXXMNEFLLLGLXGVQELQPFFFGIFLIIYLINLIGNGSILVMVVLEPQLHSPMYFFLGNLSCLDISYSSVXLPKLLVNLVCSRRAISFLGCIXQLHFFHFLGSXEAILLAIMAFDRFVAICNPLRYXVIMNPQVCILLAAAAWLISFFYALMHSVMXAHLSFCGSQKLNHFFYDVKPLLELACSDXLLNQWLLSIVXGSISMGAFFLXLLSCFYVIGFLLFKNRSCRILHKALSXCASHFMVVCLFYGPVGFXYIRPASAXSMIQDRIMAIMYSAVXPVLNPLIYXLRNKEVMMALKKIFGRKLFKDWQQHH

SEQ ID NO: 18731 - protein, 328 aa, Homo sapiens
  MOD_RES (14)..(14): Selenocysteine
  MOD_RES (25)..(25): Selenocysteine
  MOD_RES (28)..(28): Selenocysteine
  MOD_RES (58)..(58): Selenocysteine
  MOD_RES (64)..(64): Selenocysteine
  MOD_RES (68)..(68): Selenocysteine
  MOD_RES (86)..(86): Selenocysteine
  MOD_RES (92)..(92): Selenocysteine
  MOD_RES (123)..(123): Selenocysteine
  MOD_RES (134)..(134): Selenocysteine
  MOD_RES (164)..(164): Selenocysteine
  MOD_RES (174)..(174): Selenocysteine
  MOD_RES (178)..(178): Selenocysteine
  MOD_RES (210)..(210): Selenocysteine
  MOD_RES (232)..(232): Selenocysteine
  MOD_RES (248)..(248): Selenocysteine
  MOD_RES (258)..(258): Selenocysteine
  MOD_RES (264)..(264): Selenocysteine
  MOD_RES (271)..(271): Selenocysteine
  MOD_RES (297)..(297): Selenocysteine
  MOD_RES (302)..(302): Selenocysteine
  MOD_RES (309)..(309): Selenocysteine
MKLWMESHLIVPEXRPSPRMMSNQXLVXEFILQGFSEHPEYRVFLFSCFLFLYSGALXGNVLIXLAIXFNPGLHAPMYFFLLNLAXMDIICXSSIMPKALASLVSEESSISYGGCMAQLYFLXWAASSELLLLXVMAYDRYAAICHPLHYSSMMSKVFCSGLAXAVWLLCAVNXAIHXGLMLRLDFCGPNVIIHFFCEVPPLLLLSCSSXYVNGVMIVLADAFYGIVNFLMXIASYGFIVSSILKVKXAWGRQKAFSXCSSHLXVVCMYYXAVFYAYISPVSGYSAGKSKLAGLLYXVLSPXLNPLIYXLRNKEVKAALRKLFPFFRN

SEQ ID NO: 18732 - protein, 318 aa, Homo sapiens
  MOD_RES (7)..(7): Selenocysteine
  MOD_RES (44)..(44): Selenocysteine
  MOD_RES (57)..(57): Selenocysteine
  MOD_RES (74)..(76): Selenocysteine
  MOD_RES (81)..(81): Selenocysteine
  MOD_RES (91)..(91): Selenocysteine
  MOD_RES (109)..(110): Selenocysteine
  MOD_RES (178)..(178): Selenocysteine
  MOD_RES (203)..(204): Selenocysteine
  MOD_RES (209)..(209): Selenocysteine
  MOD_RES (219)..(219): Selenocysteine
  MOD_RES (240)..(240): Selenocysteine
  MOD_RES (246)..(246): Selenocysteine
  MOD_RES (254)..(254): Selenocysteine
  MOD_RES (267)..(267): Selenocysteine
  MOD_RES (276)..(276): Selenocysteine
  MOD_RES (288)..(288): Selenocysteine
MEWENHXILVEFFLKGLSGHPRLELLFFVLIFIMYVVILLGNGXLILISILDPHLHXPMYFFLGNLSFLDICYXXXSIPSXLVSFLSERKXISLSGCAVQMFLGLAMGXXECVLLGMMAFDRYVAICNPLRYPIIMSKDAYVPMAAGSWIIGAVNSAVQSVFVVQLPFCRNNIINHFXCEILAVMKLACADISDNEFIMLVAXXLFILXPLLLIIVSYXLIIVSIFKISSSEGRSKASSXCSAHLXVVIIFYGXILFMYMKPKSKEXLNSDDLDAXDKIISMFYGVMXPMMNPLIYSLRNKDVKEAVKHLLNRRFFSK

SEQ ID NO: 18733 - protein, 347 aa, Homo sapiens
  MOD_RES (8)..(8): Selenocysteine
  MOD_RES (16)..(16): Selenocysteine
  MOD_RES (37)..(37): Selenocysteine
  MOD_RES (87)..(87): Selenocysteine
  MOD_RES (104)..(104): Selenocysteine
  MOD_RES (111)..(111): Selenocysteine
  MOD_RES (140)..(140): Selenocysteine
  MOD_RES (190)..(190): Selenocysteine
  MOD_RES (228)..(228): Selenocysteine
  MOD_RES (254)..(254): Selenocysteine
  MOD_RES (262)..(262): Selenocysteine
  MOD_RES (270)..(270): Selenocysteine
  MOD_RES (276)..(276): Selenocysteine
  MOD_RES (284)..(284): Selenocysteine
  MOD_RES (318)..(318): Selenocysteine
MIVQLICXVCFLAVNXFHVRSSFDFLKADDMGEINQXLVSEFLLLGLSGYPKIEIVYFALILVMYLVILIGNGVLIIASIFDSHFHXPMYFFLGNLSFLDICYXSSSVPSXLVSLISKKRNISFSGCAVQMFFGFAMGSXECLLLGMMAFDRYVAICNPLRYPIILSKVAYVLMASVSWLSGGINSAVQXLLAMRLPFCGNNIINHFACEILAVLKLACADISLNIIXMVISNMAFLVLPLMVIFFSYMFILYXILQMNSAXGRRKAFSXCSAHLXVVIIFYGXIFFMYAKPKSQDLIGEEKLQALDKLISLFYGVVXPMLNPILYSLRNKDVKAAVKYLLNKKPIH

SEQ ID NO: 18734 - protein, 318 aa, Homo sapiens
  MOD_RES (7)..(7): Selenocysteine
  MOD_RES (74)..(75): Selenocysteine
  MOD_RES (81)..(81): Selenocysteine
  MOD_RES (110)..(110): Selenocysteine
  MOD_RES (145)..(145): Selenocysteine
  MOD_RES (157)..(157): Selenocysteine
  MOD_RES (160)..(160): Selenocysteine
  MOD_RES (198)..(198): Selenocysteine
  MOD_RES (224)..(224): Selenocysteine
  MOD_RES (228)..(228): Selenocysteine
  MOD_RES (232)..(232): Selenocysteine
  MOD_RES (240)..(240): Selenocysteine
  MOD_RES (246)..(246): Selenocysteine
  MOD_RES (254)..(254): Selenocysteine
  MOD_RES (276)..(276): Selenocysteine
  MOD_RES (288)..(288): Selenocysteine
MDKINQXFVREFILLGLSGYPKLEIIFFALILVMYVVILIGNGVLIIASILDSRLHMPMYFFLGNLSFLDICYXXSSIPSXLVSLISKKRNISFSGCAVQMFFGFAMGSXECFLLGMMAFDRYVAICNPLRYPIIMNKVVYVLLXSVSWLSGGINSXVQXSLAMRWPFCGNNIINHFLCEILAVLKLACSDISVNIVXLAVSNIAFLVLPLLVIFFSYMFILYXILRXNSAXGRHKAFSXCSAHLXVVIIFYGXIFFMYAKPKSQDLLGKDNLQAXEGLVSMFYGVVXPMLNPIIYSLRNKDVKAAIKYLLSRKAINQ

SEQ ID NO: 18735 - protein, 318 aa, Homo sapiens
  MOD_RES (7)..(7): Selenocysteine
  MOD_RES (44)..(44): Selenocysteine
  MOD_RES (57)..(57): Selenocysteine
  MOD_RES (74)..(76): Selenocysteine
  MOD_RES (81)..(81): Selenocysteine
  MOD_RES (91)..(91): Selenocysteine
  MOD_RES (109)..(110): Selenocysteine
  MOD_RES (160)..(160): Selenocysteine
  MOD_RES (178)..(178): Selenocysteine
  MOD_RES (202)..(204): Selenocysteine
  MOD_RES (209)..(209): Selenocysteine
  MOD_RES (219)..(219): Selenocysteine
  MOD_RES (240)..(240): Selenocysteine
  MOD_RES (246)..(246): Selenocysteine
  MOD_RES (250)..(250): Selenocysteine
  MOD_RES (254)..(254): Selenocysteine
  MOD_RES (267)..(267): Selenocysteine
  MOD_RES (276)..(276): Selenocysteine
  MOD_RES (288)..(288): Selenocysteine
MEWENHXILVEFFLKGLSGHPRLELLFFVLIFIMYVVILLGNGXLILISILDPHLHXPMYFFLGNLSFLDICYXXXSIPSXLVSFLSERKXISLSGCAVQMFLSLAMGXXECVLLGVMAFDRYVAICNPLRYPIIMSKDAYVPMAAGSWIIGAVNSAVQXVFVVQLPFCRNNIINHFXCEILAVMKLACADISGNEFILLVXXXLFLLXPLLLIIVSYXLIILSIFKISSSEGRSKPSSXCSARLXVVIXFCGXIFLMYMKPKSQEXLNSDDLDAXDKLIFIFYRVMXPMMNPLIYSLRNKDVKEAVKHLLRRKNFNK

SEQ ID NO: 18736 - protein, 320 aa, Homo sapiens
  MOD_RES (4)..(4): Selenocysteine
  MOD_RES (8)..(8): Selenocysteine
  MOD_RES (10)..(10): Selenocysteine
  MOD_RES (25)..(25): Selenocysteine
  MOD_RES (57)..(57): Selenocysteine
  MOD_RES (74)..(74): Selenocysteine
  MOD_RES (110)..(110): Selenocysteine
  MOD_RES (117)..(117): Selenocysteine
  MOD_RES (151)..(151): Selenocysteine
  MOD_RES (160)..(160): Selenocysteine
  MOD_RES (200)..(200): Selenocysteine
  MOD_RES (224)..(224): Selenocysteine
  MOD_RES (231)..(231): Selenocysteine
  MOD_RES (240)..(240): Selenocysteine
  MOD_RES (246)..(246): Selenocysteine
  MOD_RES (254)..(254): Selenocysteine
  MOD_RES (288)..(288): Selenocysteine
MERXNDSXSXEFFLVGLSAHPKLQXVFFVLILWMYLMILLGNGVLISVIIFDSHLHXPMYFFLCNLSFLDVCYXSSSVPLILASFLAVKKKVSFSGCMVQMFISFAMGAXECMILGXMALDRYVAICYPLRYPVIMSKGAYVAMAAGSWVXGLVDSVVQXAFAMQLPFCANNVIKHFVCEILAILKLACADISINVISMXGSNLIVLVIPLLVISISYIFIVAXILRIPSXEGKHKAFSXCSAHLXVVIIFYGXIFFMYAKPESKASVDSGNEDIIEALISLFYGVMXPMLNPLIYSLRNKDVKAAVKNILCRKNFSDGK

SEQ ID NO: 18737 - protein, 318 aa, Homo sapiens
  MOD_RES (7)..(7): Selenocysteine
  MOD_RES (44)..(44): Selenocysteine
  MOD_RES (57)..(57): Selenocysteine
  MOD_RES (74)..(76): Selenocysteine
  MOD_RES (81)..(81): Selenocysteine
  MOD_RES (91)..(91): Selenocysteine
  MOD_RES (109)..(110): Selenocysteine
  MOD_RES (160)..(161): Selenocysteine
  MOD_RES (203)..(203): Selenocysteine
  MOD_RES (207)..(207): Selenocysteine
  MOD_RES (240)..(240): Selenocysteine
  MOD_RES (246)..(246): Selenocysteine
  MOD_RES (254)..(254): Selenocysteine
  MOD_RES (267)..(267): Selenocysteine
  MOD_RES (276)..(276): Selenocysteine
  MOD_RES (288)..(288): Selenocysteine
MEWENQXILVEFFLKGHSVHPRLELLFFVLIFIMYVVILLGNGXLILISILDPHLHXPMYFFLGNLSFLDICYXXXSIPSXLVSFLSERKXISFSGCAVQMFLGLAMGXXECVLLGMMAFDRYVAICNPLRYPIIMSKNAYVPMAVGSWFAGIVNSAVQXXFVVQLPFCRKNVINHFSCEILAVMKLACADISGNEFLMLVAXILFXLMPLLLIVISYSLIISSILKIHSSEGRSKAFSXCSAHLXVVIIFYGXILFMYMKPKSKEXLNSDDLDAXDKIISMFYGVMXPMMNPLIYSLRNKDVKEAVKHLPNRRFFSK

SEQ ID NO: 18738 - protein, 346 aa, Homo sapiens
  MOD_RES (5)..(5): Selenocysteine
  MOD_RES (23)..(24): Selenocysteine
  MOD_RES (35)..(35): Selenocysteine
  MOD_RES (42)..(42): Selenocysteine
  MOD_RES (81)..(81): Selenocysteine
  MOD_RES (89)..(89): Selenocysteine
  MOD_RES (106)..(106): Selenocysteine
  MOD_RES (142)..(142): Selenocysteine
  MOD_RES (187)..(187): Selenocysteine
  MOD_RES (192)..(192): Selenocysteine
  MOD_RES (195)..(195): Selenocysteine
  MOD_RES (210)..(210): Selenocysteine
  MOD_RES (225)..(225): Selenocysteine
  MOD_RES (232)..(232): Selenocysteine
  MOD_RES (234)..(234): Selenocysteine
  MOD_RES (272)..(272): Selenocysteine
  MOD_RES (299)..(299): Selenocysteine
  MOD_RES (301)..(301): Selenocysteine
MYRFXDFDVSNISIYLNHVLFYXXQQAGDLEHMEXRNYSAMXEFFLVGLSQYPELQLFLFLLCLIMYMIILLGNSLLIIIXILDSRLHXPMYFFLGNLSFLDICYXSSSIPPMLIIFMSERKSISFIGCALQMVVSLGLGSXECVLLAVMAYDHYVAICNPLRYSIIMNGVLYVQMAAWSWIIGCLXSLLQXVLXMMLPFCGNNVIDHIXCEILALLKLVCSDIXINVLIMXVXNIVSLVILLLLIFISYVFILSSILRINCAEGRKKAFSXCSAHSIVVILFYGSALFMYMKPKSKNXNXSDEIIGLSYGVVSPMLNPIIYSLRNKEVKEAVKKVLSRHLHLLKM

SEQ ID NO: 18739 - protein, 319 aa, Homo sapiens
  MOD_RES (7)..(7): Selenocysteine
  MOD_RES (38)..(38): Selenocysteine
  MOD_RES (49)..(49): Selenocysteine
  MOD_RES (57)..(57): Selenocysteine
  MOD_RES (91)..(91): Selenocysteine
  MOD_RES (99)..(99): Selenocysteine
  MOD_RES (110)..(110): Selenocysteine
  MOD_RES (140)..(140): Selenocysteine
  MOD_RES (151)..(151): Selenocysteine
  MOD_RES (155)..(155): Selenocysteine
  MOD_RES (178)..(178): Selenocysteine
  MOD_RES (192)..(192): Selenocysteine
  MOD_RES (240)..(240): Selenocysteine
  MOD_RES (242)..(242): Selenocysteine
  MOD_RES (254)..(254): Selenocysteine
  MOD_RES (282)..(282): Selenocysteine
  MOD_RES (312)..(312): Selenocysteine
MFPANWXSVKVFFFLGFFHYPKVQVIIFAVCLLMYLIXLLGNIFLISIXILDSHLHXPMYLFLSNLSFLDIWYSSSALSPMLANFVSGRNXISFSGCAXQMYLSLAMGSXECVLLPMMAYDRYVAICNPLRYPVIMNRRXCVQIAAGSWMXGCLXAMVEMMSVLPLSLCGNSIINHFXCEILAILKLVCVDXSLVQLIMLVISVLLLPMPMLLICISYAFILASILRISSVEGRSKAFSXCXAHLMVVVLFYGXALSMHLKPSAVDSQEIDKFMALVYAGQXPMLNPIIYSLRNKEVKVALKKLLIRNHFNXAFISILK

SEQ ID NO: 18740 - protein, 307 aa, Homo sapiens
  MOD_RES (7)..(7): Selenocysteine
  MOD_RES (15)..(15): Selenocysteine
  MOD_RES (51)..(51): Selenocysteine
  MOD_RES (54)..(54): Selenocysteine
  MOD_RES (62)..(62): Selenocysteine
  MOD_RES (71)..(72): Selenocysteine
  MOD_RES (81)..(81): Selenocysteine
  MOD_RES (84)..(84): Selenocysteine
  MOD_RES (88)..(88): Selenocysteine
  MOD_RES (102)..(102): Selenocysteine
  MOD_RES (113)..(114): Selenocysteine
  MOD_RES (131)..(131): Selenocysteine
  MOD_RES (151)..(151): Selenocysteine
  MOD_RES (157)..(157): Selenocysteine
  MOD_RES (164)..(164): Selenocysteine
  MOD_RES (170)..(170): Selenocysteine
  MOD_RES (202)..(202): Selenocysteine
  MOD_RES (211)..(211): Selenocysteine
  MOD_RES (227)..(227): Selenocysteine
  MOD_RES (237)..(237): Selenocysteine
  MOD_RES (243)..(243): Selenocysteine
  MOD_RES (246)..(246): Selenocysteine
  MOD_RES (255)..(255): Selenocysteine
  MOD_RES (264)..(264): Selenocysteine
  MOD_RES (276)..(276): Selenocysteine
  MOD_RES (279)..(279): Selenocysteine
  MOD_RES (281)..(281): Selenocysteine
MNHSVVXEFIILGLXKKPELQGIIFLFFLIVYLVAFLGNMLIIIAKIYNNXLHXPMYVFLLXLAVVDIICXXSIIPKMLGXMLXSENXISYAGCMSQLFLFXWSLGAEMVLFXXMAYDRYVAICFPLHYSXIMNHHMCVALLSMVMAIAVXNSWVHXALIMRLXFCGPNXIDHFFCEIPPLLALSCSPVRINEVMVYVADIXLAIGDFILXCISYGFIIVAILRIRXVEGKRKAFSXCSSHLXVVXLYYSPVIYXYIRPASSYXFERDKVVAALYXLVXPXLNPMVYSFQNREMQAGIRKVFAFLKH

SEQ ID NO: 18741 - protein, 308 aa, Homo sapiens
  MOD_RES (7)..(7): Selenocysteine
  MOD_RES (26)..(26): Selenocysteine
  MOD_RES (29)..(29): Selenocysteine
  MOD_RES (38)..(38): Selenocysteine
  MOD_RES (57)..(57): Selenocysteine
  MOD_RES (75)..(75): Selenocysteine
  MOD_RES (88)..(88): Selenocysteine
  MOD_RES (101)..(101): Selenocysteine
  MOD_RES (109)..(109): Selenocysteine
  MOD_RES (147)..(147): Selenocysteine
  MOD_RES (151)..(151): Selenocysteine
  MOD_RES (156)..(156): Selenocysteine
  MOD_RES (187)..(187): Selenocysteine
  MOD_RES (191)..(191): Selenocysteine
  MOD_RES (201)..(201): Selenocysteine
  MOD_RES (205)..(205): Selenocysteine
  MOD_RES (238)..(239): Selenocysteine
  MOD_RES (245)..(245): Selenocysteine
  MOD_RES (248)..(248): Selenocysteine
  MOD_RES (261)..(261): Selenocysteine
  MOD_RES (281)..(281): Selenocysteine
  MOD_RES (308)..(308): Selenocysteine
MAMDNVXAVFQFLLIGISNYPQWRDXFFXLVLIIYLSXLLGNGFMIFLIHFDPNLHXPIYFFLSNLSFLDLCYGXASMPQALVHCFSXHPYLSYPRCLAQXSVSLALAXAECLLLAAMAYDRVVAISNPLRYSVVMNGPVCVCLVAXSWGXSLVLXAMLILSLRLHFCGANVINHFACEILSLIKLXCSDXSLNEFMILIXSIFXLLLPFGFVLLSYIRIAMAIIRIRSLQGRLKAFXXCGSHLXVVXIFYGSAISMYMKXQSKSYPDQDKFISVFYGALXPMLNPLIYSLRKKDVKRAIRKVMLKRX

SEQ ID NO: 18742 - protein, 312 aa, Homo sapiens
  MOD_RES (7)..(7): Selenocysteine
  MOD_RES (38)..(38): Selenocysteine
  MOD_RES (43)..(43): Selenocysteine
  MOD_RES (57)..(57): Selenocysteine
  MOD_RES (68)..(68): Selenocysteine
  MOD_RES (74)..(74): Selenocysteine
  MOD_RES (76)..(76): Selenocysteine
  MOD_RES (91)..(91): Selenocysteine
  MOD_RES (107)..(107): Selenocysteine
  MOD_RES (110)..(110): Selenocysteine
  MOD_RES (118)..(118): Selenocysteine
  MOD_RES (158)..(158): Selenocysteine
  MOD_RES (178)..(178): Selenocysteine
  MOD_RES (192)..(192): Selenocysteine
  MOD_RES (224)..(224): Selenocysteine
  MOD_RES (240)..(240): Selenocysteine
  MOD_RES (254)..(254): Selenocysteine
  MOD_RES (275)..(275): Selenocysteine
  MOD_RES (282)..(283): Selenocysteine
  MOD_RES (288)..(288): Selenocysteine
MEPLNRXEVSEFFLKGFSGYPALEHLLFPLCSAMYLVXLLGNXAIMAVSVLDIHLHXPVYFFLGNLSXLDICYXPXFVPLMLVHLLSSRKXISFAVCAIQMCLSLSXGSXECLLLAIXAYDRYLAICQPLRYHVLMSHRLCVLLMGAAWVLCLLKSVXEMVISMRLPFCGHHVVSHFXCKILAVLKLACGNXSVSEDFLLAGSILLLPVPLAFICLSYLLILAXILRVPSAARCCKAFSXCLAHLAVVLLFYGXIIFMYLKPKSKEAHISDEVFXVLYAMVXXMLNPXIYSLRNKEVKEAARKVWGRSRASR

SEQ ID NO: 18743 - protein, 309 aa, Homo sapiens
  MOD_RES (5)..(5): Selenocysteine
  MOD_RES (8)..(8): Selenocysteine
  MOD_RES (17)..(17): Selenocysteine
  MOD_RES (47)..(48): Selenocysteine
  MOD_RES (55)..(55): Selenocysteine
  MOD_RES (75)..(75): Selenocysteine
  MOD_RES (114)..(114): Selenocysteine
  MOD_RES (122)..(122): Selenocysteine
  MOD_RES (138)..(138): Selenocysteine
  MOD_RES (144)..(144): Selenocysteine
  MOD_RES (158)..(158): Selenocysteine
  MOD_RES (161)..(161): Selenocysteine
  MOD_RES (215)..(215): Selenocysteine
  MOD_RES (222)..(222): Selenocysteine
  MOD_RES (229)..(229): Selenocysteine
  MOD_RES (251)..(251): Selenocysteine
  MOD_RES (276)..(276): Selenocysteine
  MOD_RES (281)..(281): Selenocysteine
  MOD_RES (307)..(307): Selenocysteine
MANLXIVXEFILMGFSXNKNMCILHSILFLLIYLCALMGNVLIIMIXXLDHHLHXPVYFFLKNLSFLDLCLISVXAPKSIANSLIHNNSISFLGCVSQVFLLLSSASAELLLLXVMSFDRYXAICHPLHYDVIMDRSXCVQRAXVSWLYGGLIAVMHXAGXFSLSYCGSNMVHQFFCDIPQLLAISCSENLIREIALILINVVLDFCCFIVIIIXYVHVFSXVKKIPSXEGQSKAYSICLPHLLVVLFLSXGFIAYLKPASESPSILDAVISVFYXMLPPXFNPIIYSLRNKAIKVALGMLIKGKLXKK

SEQ ID NO: 18744 - protein, 314 aa, Homo sapiens
  MOD_RES (5)..(5): Selenocysteine
  MOD_RES (8)..(8): Selenocysteine
  MOD_RES (45)..(45): Selenocysteine
  MOD_RES (48)..(48): Selenocysteine
  MOD_RES (55)..(55): Selenocysteine
  MOD_RES (85)..(85): Selenocysteine
  MOD_RES (103)..(103): Selenocysteine
  MOD_RES (114)..(114): Selenocysteine
  MOD_RES (136)..(136): Selenocysteine
  MOD_RES (155)..(155): Selenocysteine
  MOD_RES (158)..(158): Selenocysteine
  MOD_RES (161)..(161): Selenocysteine
  MOD_RES (190)..(190): Selenocysteine
  MOD_RES (222)..(222): Selenocysteine
  MOD_RES (228)..(229): Selenocysteine
  MOD_RES (238)..(238): Selenocysteine
  MOD_RES (244)..(244): Selenocysteine
  MOD_RES (247)..(247): Selenocysteine
  MOD_RES (252)..(252): Selenocysteine
  MOD_RES (277)..(277): Selenocysteine
  MOD_RES (287)..(287): Selenocysteine
  MOD_RES (306)..(306): Selenocysteine
MANVXLVXGFLLMGFSNIQKLRILYGVLFLLIYLAALMSNLLIIXLIXLDVKLQXPMYFFLKNLSFLDVFLVSVPIPKFIVNNLXHNNSISILGCAFQLLLMXSFSAGEIFILXAMSYDRYVAICCPLNYEVIMNXGVCVLMASVSWAIGGLFGXAYXAGXFSMPFCGSSVIPQFFCDVPSLLRISCSEXLMVIYAGIGVGACLSISCFICIVISYIYIFSXVLKIPXXKGQSKAFSXCFPHLXVFXVFIIXAYFVYLKPPSNSPSVIDRLLSVIYXVMPPVFNPVXYSLRNNDMKCALIRLLQKXYGQEAYFI

SEQ ID NO: 18745 - protein, 312 aa, Homo sapiens
  MOD_RES (5)..(6): Selenocysteine
  MOD_RES (20)..(20): Selenocysteine
  MOD_RES (36)..(36): Selenocysteine
  MOD_RES (45)..(45): Selenocysteine
  MOD_RES (47)..(48): Selenocysteine
  MOD_RES (75)..(75): Selenocysteine
  MOD_RES (78)..(78): Selenocysteine
  MOD_RES (88)..(89): Selenocysteine
  MOD_RES (114)..(114): Selenocysteine
  MOD_RES (143)..(143): Selenocysteine
  MOD_RES (158)..(158): Selenocysteine
  MOD_RES (161)..(161): Selenocysteine
  MOD_RES (190)..(190): Selenocysteine
  MOD_RES (222)..(222): Selenocysteine
  MOD_RES (233)..(233): Selenocysteine
  MOD_RES (238)..(238): Selenocysteine
  MOD_RES (267)..(267): Selenocysteine
MPNSXXVMEFLLMRFSDVWXLQILHSASFFMLYLVXLMGNILIVXVXXCDSSLHMPMYFFLRNLSILDACYISVXVPXSCVNSLLDSXXISKAGCVAQVFLVVFFVYVELLFLXIMAHDRYVAVCQPLHYPVIVNSRICIQMXLASLLSGLVYAGMHXGSXFQLPFCRSNVIHQFFCDIPSLLKLSCSDXFSNEVMIVVSALGVGGGCFIFIIRSYIHIFSXVLGFPRGADRXKAFSXCIPHILVVSVFLSSCSSVYLRPPAIPAAXQDLILSGFYSIMPPLFNPIIYSLRNKQIKVAIKKIMKRIFYSENV

SEQ ID NO: 18746 - protein, 311 aa, Homo sapiens
  MOD_RES (5)..(5): Selenocysteine
  MOD_RES (8)..(8): Selenocysteine
  MOD_RES (48)..(48): Selenocysteine
  MOD_RES (55)..(55): Selenocysteine
  MOD_RES (75)..(75): Selenocysteine
  MOD_RES (85)..(85): Selenocysteine
  MOD_RES (114)..(114): Selenocysteine
  MOD_RES (135)..(135): Selenocysteine
  MOD_RES (145)..(146): Selenocysteine
  MOD_RES (158)..(158): Selenocysteine
  MOD_RES (197)..(197): Selenocysteine
  MOD_RES (222)..(222): Selenocysteine
  MOD_RES (238)..(238): Selenocysteine
  MOD_RES (251)..(252): Selenocysteine
  MOD_RES (275)..(275): Selenocysteine
  MOD_RES (277)..(277): Selenocysteine
  MOD_RES (297)..(297): Selenocysteine
MDNLXKVXEFLLMEFSGIWELQVLHAGLFLLIYLAVLVGNLLIIAVIXLDQHLHXPMYFFLKNLSVLDLCYISVXVPKSIRNSLXRRSSISYLGCVAQVYFFSAFASAELAFLXVMSYDRYVAICHPLQYRAVMXSGGCYQMAVXXWLSCFSYAAVHXGNMFREHVCRSSVIHQFFRDIPHVLALVSCEVFFVEFLXLALSSCLVLGCFILMMISYFQIFSXVLRIPSGQSRAKAFSXCSPQLIVIMLFLXXGLFAALGPIAKALSIQDLVIALXYXVLPPFLNPIIYSLRNKEIKXAMWRLFVKIYFLQK

SEQ ID NO: 18747 - protein, 321 aa, Homo sapiens
  MOD_RES (5)..(5): Selenocysteine
  MOD_RES (32)..(32): Selenocysteine
  MOD_RES (38)..(38): Selenocysteine
  MOD_RES (45)..(45): Selenocysteine
  MOD_RES (48)..(48): Selenocysteine
  MOD_RES (75)..(75): Selenocysteine
  MOD_RES (114)..(114): Selenocysteine
  MOD_RES (132)..(132): Selenocysteine
  MOD_RES (201)..(202): Selenocysteine
  MOD_RES (222)..(222): Selenocysteine
  MOD_RES (233)..(233): Selenocysteine
  MOD_RES (238)..(238): Selenocysteine
  MOD_RES (247)..(247): Selenocysteine
  MOD_RES (267)..(267): Selenocysteine
  MOD_RES (277)..(277): Selenocysteine
  MOD_RES (282)..(282): Selenocysteine
MVNLXSMSGFLLMGFSDERKLQILHALVFLVXYLLALXGNLLIIXIIXVDRRLHSPMYYFLKHLSLLDLCFISVXVPQSIANSLMGNGYISLVQCILQVFFFIALASSEVAILXVMSYDRYAAICQPLHYEXIMDPRACRHAVIAVWIAGGLSGLMHAAINFSIPLCGKRVIHQFFCDVPQMLKLACSYEFINEIALAAFXXSAAFICLISIVLSYIRIFSXVLRIPSAEGRXKVFSXCLPHLFVAXFFLSAAGFEFLRLPSDSSSXVDLVFSVFYXVIPPXLNPVIYSLRNDSMKAALRKMLSKEELPQRKMCLKAMFKL

SEQ ID NO: 18748 - protein, 321 aa, Homo sapiens
  MOD_RES (5)..(5): Selenocysteine
  MOD_RES (7)..(7): Selenocysteine
  MOD_RES (32)..(32): Selenocysteine
  MOD_RES (38)..(38): Selenocysteine
  MOD_RES (45)..(45): Selenocysteine
  MOD_RES (48)..(48): Selenocysteine
  MOD_RES (75)..(75): Selenocysteine
  MOD_RES (114)..(114): Selenocysteine
  MOD_RES (132)..(132): Selenocysteine
  MOD_RES (201)..(202): Selenocysteine
  MOD_RES (222)..(222): Selenocysteine
  MOD_RES (233)..(233): Selenocysteine
  MOD_RES (238)..(238): Selenocysteine
  MOD_RES (247)..(247): Selenocysteine
  MOD_RES (267)..(267): Selenocysteine
  MOD_RES (277)..(277): Selenocysteine
  MOD_RES (282)..(282): Selenocysteine
MVNLXSXSGFLLMGFSDERKLQILHALVFLVXYLLALXGNLLIIXIIXVDRRLHSPMYYFLKHLSLLDLCFISVXVPQSIANSLMGNGYISLVQCILQVFFFIALASSEVAILXVMSYDRYAAICQPLHYEXIMDPRACRHAVIAVWIAGGLSGLMHAAINFSIPLCGKRVIHQFFCDVPQMLKLACSYEFINEIALAAFXXSAAFICLISIVLSYIRIFSXVLRIPSAEGRXKVFSXCLPHLFVAXFFLSAAGFEFLRLPSDSSSXVDLVFSVFYXVIPPXLNPVIYSLRNDSMKAALRKMLSKEELPQRKMCLKAMFKL

SEQ ID NO: 18749 - protein, 314 aa, Homo sapiens
  MOD_RES (2)..(2): Selenocysteine
  MOD_RES (5)..(5): Selenocysteine
  MOD_RES (16)..(16): Selenocysteine
  MOD_RES (35)..(35): Selenocysteine
  MOD_RES (75)..(75): Selenocysteine
  MOD_RES (87)..(87): Selenocysteine
  MOD_RES (114)..(114): Selenocysteine
  MOD_RES (158)..(158): Selenocysteine
  MOD_RES (161)..(161): Selenocysteine
  MOD_RES (186)..(186): Selenocysteine
  MOD_RES (247)..(247): Selenocysteine
  MOD_RES (252)..(252): Selenocysteine
  MOD_RES (282)..(282): Selenocysteine
MXNQXQMMEFLLVRFXENWVLLRLHALLFSLIYLXAVLMNLVIILLMILDHRLHMAMYFFLRHLSFLDLCLISAXVPKSILNSVASXDSISFLGCVLQLFLVVLLAGSEIGILXAMSYDRYAAICCPLHCEAVMSRGLCVQLMALSWLNRGALGLLYXAGXFSLNFYGSDELHQFFCDVPALLKLXCSKEHAIISVSVAIGVCYAFSCLVCIVVSYVYIFSAVLRISQRQRQSKAFSNCVPHLIVVXVFLVXGAVAYLKPGSDAPSILDLLVSVFYSVAPPXLNPVIYCLKNKDIKSALSKVLWNVRSSGVMKR

SEQ ID NO: 18750 - protein, 309 aa, Homo sapiens
  MOD_RES (9)..(9): Selenocysteine
  MOD_RES (18)..(18): Selenocysteine
  MOD_RES (38)..(38): Selenocysteine
  MOD_RES (77)..(77): Selenocysteine
  MOD_RES (99)..(99): Selenocysteine
  MOD_RES (110)..(110): Selenocysteine
  MOD_RES (133)..(134): Selenocysteine
  MOD_RES (160)..(160): Selenocysteine
  MOD_RES (163)..(163): Selenocysteine
  MOD_RES (182)..(182): Selenocysteine
  MOD_RES (223)..(223): Selenocysteine
  MOD_RES (230)..(230): Selenocysteine
  MOD_RES (239)..(239): Selenocysteine
  MOD_RES (245)..(245): Selenocysteine
  MOD_RES (253)..(253): Selenocysteine
  MOD_RES (257)..(257): Selenocysteine
  MOD_RES (263)..(263): Selenocysteine
  MOD_RES (273)..(273): Selenocysteine
  MOD_RES (277)..(277): Selenocysteine
  MOD_RES (280)..(280): Selenocysteine
MRENNQSSXLEFILLGVXGQQEQEDFFYILFLFIYPIXLIGNLLIVLAICSDVRLHNPMYFLLANLSLVDIFFSSVXIPKMLANHLLGSKSISFGGCLXQMYFMIALGNXDSYILAAMAYDRAVAISRPLHYXXIMSPRSCIWLIAGSWVIGNANALPHXLLXASLSFCGNQEVANFYCDIXPLLKLSCSDIHFHVKMMYLGVGIFSVPLLCIIVSYIRVFSXVFQVPSXKGVLKAFSXCGSHLXVVSLYYGXVMGXYFRPLXNYSLKDAVIXVMYXAVXPMLNPFIYSLRNRDMKAALRKLFNKRISS

SEQ ID NO: 18751 - protein, 309 aa, Homo sapiens
  MOD_RES (18)..(18): Selenocysteine
  MOD_RES (38)..(38): Selenocysteine
  MOD_RES (40)..(40): Selenocysteine
  MOD_RES (77)..(77): Selenocysteine
  MOD_RES (114)..(114): Selenocysteine
  MOD_RES (133)..(134): Selenocysteine
  MOD_RES (154)..(154): Selenocysteine
  MOD_RES (160)..(160): Selenocysteine
  MOD_RES (163)..(163): Selenocysteine
  MOD_RES (223)..(223): Selenocysteine
  MOD_RES (230)..(230): Selenocysteine
  MOD_RES (239)..(239): Selenocysteine
  MOD_RES (245)..(245): Selenocysteine
  MOD_RES (253)..(254): Selenocysteine
  MOD_RES (263)..(263): Selenocysteine
  MOD_RES (273)..(273): Selenocysteine
  MOD_RES (280)..(280): Selenocysteine
MKKENQSFNLDFILLGVXSQQEQNNVFFVIFLCIYPIXLXGNLLIILAICADIRLHNPMYFLLANLSLVDIIFSSVXIPKVLANHLLGSKFISFGGCLMQMYFMIALAKADSYXLAAMAYDRAVAISCPLHYXXIMSPRSCILLIAGSWVIGNXSALPHXLLXASLSFCGNQEVANFYCDIMPLLKLSCSDVHFNVKMMYLGVGVFSLPLLCIIVSYVQVFSXVFQVPSXKSLFKAFCXCGSHLXVVFLYYGXXMGMYFRPLXSYSPKDAVIXVMYVAVXPALNPFIYSLRNWDMKAALQKLFSKRISS

SEQ ID NO: 18752 - protein, 318 aa, Homo sapiens
  MOD_RES (27)..(27): Selenocysteine
  MOD_RES (39)..(40): Selenocysteine
  MOD_RES (46)..(46): Selenocysteine
  MOD_RES (77)..(77): Selenocysteine
  MOD_RES (79)..(79): Selenocysteine
  MOD_RES (93)..(93): Selenocysteine
  MOD_RES (112)..(112): Selenocysteine
  MOD_RES (114)..(114): Selenocysteine
  MOD_RES (158)..(158): Selenocysteine
  MOD_RES (171)..(171): Selenocysteine
  MOD_RES (246)..(246): Selenocysteine
  MOD_RES (252)..(252): Selenocysteine
  MOD_RES (260)..(260): Selenocysteine
  MOD_RES (285)..(285): Selenocysteine
  MOD_RES (288)..(288): Selenocysteine
MMSFAPNASHSPVFLLLGFSRANISYXLLFFLFLAIYLXXILGNVXLVLLISWDSRLHSPMYYLLRGLSVIDMGLSXVXLPQLLAHLVSHYPXIPAARCLAQFFFFYAFGVXDXLVIAVMALDRYVAICDPLHYALVMNHQRCACLLALSWVVSILHXMLRVGLVLPLCWXGDAGGNVNLPHFFCDHRPLLRASCSDIHSNELAIFFEGGFLMLGPCALIVLSYVRIGAAILRLPSAAGRRRAVSXCGSHLXMVGFLYGXIICVYFQPPFQNSQYQDMVASVMYXAIXPLANPFVYSLHNKDVKGALCRLLEWVKVDP

SEQ ID NO: 18753 - protein, 314 aa, Homo sapiens
  MOD_RES (7)..(7): Selenocysteine
  MOD_RES (38)..(39): Selenocysteine
  MOD_RES (48)..(48): Selenocysteine
  MOD_RES (74)..(74): Selenocysteine
  MOD_RES (76)..(77): Selenocysteine
  MOD_RES (87)..(87): Selenocysteine
  MOD_RES (89)..(89): Selenocysteine
  MOD_RES (91)..(91): Selenocysteine
  MOD_RES (99)..(99): Selenocysteine
  MOD_RES (133)..(133): Selenocysteine
  MOD_RES (152)..(152): Selenocysteine
  MOD_RES (160)..(160): Selenocysteine
  MOD_RES (209)..(209): Selenocysteine
  MOD_RES (224)..(224): Selenocysteine
  MOD_RES (229)..(229): Selenocysteine
  MOD_RES (231)..(231): Selenocysteine
  MOD_RES (240)..(240): Selenocysteine
  MOD_RES (254)..(254): Selenocysteine
  MOD_RES (272)..(272): Selenocysteine
  MOD_RES (275)..(275): Selenocysteine
  MOD_RES (291)..(291): Selenocysteine
  MOD_RES (309)..(309): Selenocysteine
MEKRNLXVVREFVLLGLPSSAEQQHLLSVLFLCMYLAXXLGNMLIIAXIGFDSHLHSPMYFFLSNLAFVDICFXSXXVPQMVVNILXGXKXISFAGCLXQLFFFVSFVNMDSLLLCVMAYDRYVAICHPLHYXARMNLCLCVQLVAGLWLVXYLHALLHXVLIAQLSFCASNIIHHFFCDLNPLLQLSCSDVSFNVMIIFAVGGLLALXPLVCILVSYGLIFSXVLKIXSXQGKQRAVSXCSCHLSVVVLFYGXAIAVYFSPSSPHMPESDXLSXIMYSMVAPMLNPFIYXLRNRDMKRGLQKMLLKCXVFQQQ

SEQ ID NO: 18754 - protein, 312 aa, Homo sapiens
  MOD_RES (38)..(38): Selenocysteine
  MOD_RES (57)..(57): Selenocysteine
  MOD_RES (69)..(69): Selenocysteine
  MOD_RES (75)..(75): Selenocysteine
  MOD_RES (77)..(77): Selenocysteine
  MOD_RES (99)..(99): Selenocysteine
  MOD_RES (133)..(134): Selenocysteine
  MOD_RES (160)..(160): Selenocysteine
  MOD_RES (164)..(164): Selenocysteine
  MOD_RES (167)..(167): Selenocysteine
  MOD_RES (197)..(197): Selenocysteine
  MOD_RES (202)..(202): Selenocysteine
  MOD_RES (240)..(240): Selenocysteine
  MOD_RES (254)..(254): Selenocysteine
  MOD_RES (265)..(265): Selenocysteine
  MOD_RES (274)..(274): Selenocysteine
  MOD_RES (281)..(281): Selenocysteine
  MOD_RES (312)..(312): Selenocysteine
MDGGNQSEGSEFLLLGMSESPEQQRILFWMFLSMYLVXVVGNVLIILAISSDSRLHXPVYFFLANLSFXDLFFVXNXIPKMLVNLQSHNKAISYAGCLXQLYFLVSLVALDNLILAVMAYDRYVAICCPLHYXXAMSPKLCILLLSLCWVLSVLYGLIHXLLMXRVXFCGSRKIHYIFCEMYVLLRMACSNIQINHXVLIAXGCFIFLIPFGFVIISYVLIIRAILRIPSVSKKYKAFSXCASHLGAVSLFYGXLCMVYLKPLHXYSVKDSVAXVMYAVVXPMMNPFIYSLRNKDMHGALGRLLDKHFKRLX

SEQ ID NO: 18755 - protein, 312 aa, Homo sapiens
  MOD_RES (38)..(38): Selenocysteine
  MOD_RES (57)..(57): Selenocysteine
  MOD_RES (69)..(69): Selenocysteine
  MOD_RES (75)..(75): Selenocysteine
  MOD_RES (77)..(77): Selenocysteine
  MOD_RES (99)..(99): Selenocysteine
  MOD_RES (109)..(109): Selenocysteine
  MOD_RES (126)..(126): Selenocysteine
  MOD_RES (134)..(134): Selenocysteine
  MOD_RES (160)..(160): Selenocysteine
  MOD_RES (164)..(164): Selenocysteine
  MOD_RES (167)..(167): Selenocysteine
  MOD_RES (192)..(192): Selenocysteine
  MOD_RES (197)..(197): Selenocysteine
  MOD_RES (202)..(202): Selenocysteine
  MOD_RES (209)..(209): Selenocysteine
  MOD_RES (215)..(216): Selenocysteine
  MOD_RES (224)..(224): Selenocysteine
  MOD_RES (237)..(237): Selenocysteine
  MOD_RES (240)..(240): Selenocysteine
  MOD_RES (254)..(254): Selenocysteine
  MOD_RES (265)..(265): Selenocysteine
  MOD_RES (274)..(274): Selenocysteine
  MOD_RES (281)..(281): Selenocysteine
MDGDNQSENSQFLLLGISESPEQQRILFWMFLSMYLVXVLGNVLIILAISSDSHLHXPMYFFLANLSFXDLFFVXNXIPKMLVNFQSQNKAISYAGCLXQLYFLVSLVXLDNLILAVMAYDRYVAXCCPLHYVXAMSPGLCVLLLSLCWGLSVLYGLLLXFLLXRVXFCGPREIHYLFCDMYILLWLACSNXHIIHXALIAXGCFIFLXPLGFMXXSYVRIVRXILQMPSASKKYKXFSXCASHLGVVSLFYGXLAMVYLQPLHXYSMKDSVAXVMYAVLXPMMNPFIYRLRNKDMHGAPGRVLWRPFQRPK

SEQ ID NO: 18756 - protein, 314 aa, Homo sapiens
  MOD_RES (7)..(7): Selenocysteine
  MOD_RES (37)..(38): Selenocysteine
  MOD_RES (57)..(57): Selenocysteine
  MOD_RES (77)..(77): Selenocysteine
  MOD_RES (99)..(99): Selenocysteine
  MOD_RES (133)..(133): Selenocysteine
  MOD_RES (152)..(153): Selenocysteine
  MOD_RES (160)..(160): Selenocysteine
  MOD_RES (192)..(192): Selenocysteine
  MOD_RES (240)..(240): Selenocysteine
  MOD_RES (254)..(254): Selenocysteine
  MOD_RES (268)..(268): Selenocysteine
  MOD_RES (272)..(272): Selenocysteine
  MOD_RES (279)..(279): Selenocysteine
  MOD_RES (282)..(282): Selenocysteine
  MOD_RES (310)..(310): Selenocysteine
MMGQNQXSISDFLLLGLPIQPEQQNLCYALFLAMYLXXLLGNLLIIVLIRLDSHLHXPMYLFLSNLSFSDLCFSSVXIPKLLQNMQNQDPSIPYADCLXQMYFFLLFGDLESFLLVAMAYDRYVAICFPLHYXAIMSPMLCLALVALSWVLXXFHAMLHXLLMARLCFCADNVIPHFFCDMSALLKLAFSDXRVNEWVIFIMGGLILVIPFLLILGSYARIVSSILKVPSSKGICKAFSXCGSHLSVVSLFYGXVIGLYLCSSANSSXLKDXVMAMMYXVVXPMLNPFIYSLRNRDMKGALSRVIHQKKXFFSL

SEQ ID NO: 18757 - protein, 323 aa, Homo sapiens
  MOD_RES (7)..(7): Selenocysteine
  MOD_RES (37)..(38): Selenocysteine
  MOD_RES (57)..(57): Selenocysteine
  MOD_RES (77)..(77): Selenocysteine
  MOD_RES (99)..(99): Selenocysteine
  MOD_RES (133)..(133): Selenocysteine
  MOD_RES (142)..(142): Selenocysteine
  MOD_RES (161)..(162): Selenocysteine
  MOD_RES (169)..(169): Selenocysteine
  MOD_RES (201)..(201): Selenocysteine
  MOD_RES (249)..(249): Selenocysteine
  MOD_RES (263)..(263): Selenocysteine
  MOD_RES (277)..(277): Selenocysteine
  MOD_RES (281)..(281): Selenocysteine
  MOD_RES (288)..(288): Selenocysteine
  MOD_RES (291)..(291): Selenocysteine
  MOD_RES (295)..(295): Selenocysteine
MMGQNQXSISDFLLLGLPIQPEQQNLCYALFLAMYLXXLLGNLLIIVLIRLDSHLHXPVYLFLSNLSFSDLCFSSVXMPKLLQNMQNQDPSIPYADCLXQMYFFLYFSDLESFLLVAMAYDRYVAICFPMHYXAICFLLHYXAIMSPMLCLSVVALSWVLXXFHAMLHXLLMARLCFCADNVIPHFFCDMSALLKLACSDXRVNEWVIFIMGGLILVIPFLLILGSYARIVSSILKVPSSKGICKAFSXCGSHLSVVSLFYGXVIGLYLCPSANSSXLKDXVMAMMYXVVXPMLXPFIYSLRNRDMKGALERVICKRKNPFLL

SEQ ID NO: 18758 - protein, 312 aa, Homo sapiens
  MOD_RES (4)..(4): Selenocysteine
  MOD_RES (38)..(38): Selenocysteine
  MOD_RES (57)..(57): Selenocysteine
  MOD_RES (76)..(77): Selenocysteine
  MOD_RES (89)..(89): Selenocysteine
  MOD_RES (91)..(91): Selenocysteine
  MOD_RES (99)..(99): Selenocysteine
  MOD_RES (133)..(133): Selenocysteine
  MOD_RES (137)..(137): Selenocysteine
  MOD_RES (160)..(160): Selenocysteine
  MOD_RES (175)..(175): Selenocysteine
  MOD_RES (182)..(182): Selenocysteine
  MOD_RES (192)..(192): Selenocysteine
  MOD_RES (209)..(209): Selenocysteine
  MOD_RES (222)..(222): Selenocysteine
  MOD_RES (224)..(224): Selenocysteine
  MOD_RES (231)..(231): Selenocysteine
  MOD_RES (240)..(240): Selenocysteine
  MOD_RES (254)..(254): Selenocysteine
  MOD_RES (272)..(272): Selenocysteine
  MOD_RES (275)..(275): Selenocysteine
  MOD_RES (279)..(279): Selenocysteine
  MOD_RES (282)..(282): Selenocysteine
MSGXNQSSVSEFLLLGLSRQPQQQHLLFVFFLSMYLAXVLGNLLIILSVSIDSCLHXPMYFFLSNLSFVDICFSFXXVPKMLANHILEXQXISFCGCLXQMYFVFMFVDMDNFLLAVMAYDHFVAVCHPLHYXAKMXHQLCALLVAGLWVVANLNVLLHXLLMAPLSFCADNAIXHFFCDVXPLLKLSCSDXHLNEVIILSEGALVMIXPFLCILASYMHIXCXVLKVPSXKGRWKAFSXCGSHLAVVLLFYSXIIAVYFNPLSSHSAEKDXMAXVLYXVVXPMLNPFIYSLRNRYLKGALKKVVGRVVFSV

SEQ ID NO: 18759 - protein, 313 aa, Homo sapiens
  MOD_RES (7)..(7): Selenocysteine
  MOD_RES (38)..(38): Selenocysteine
  MOD_RES (51)..(51): Selenocysteine
  MOD_RES (53)..(53): Selenocysteine
  MOD_RES (57)..(57): Selenocysteine
  MOD_RES (76)..(77): Selenocysteine
  MOD_RES (160)..(160): Selenocysteine
  MOD_RES (190)..(190): Selenocysteine
  MOD_RES (194)..(194): Selenocysteine
  MOD_RES (202)..(202): Selenocysteine
  MOD_RES (206)..(206): Selenocysteine
  MOD_RES (219)..(219): Selenocysteine
  MOD_RES (224)..(224): Selenocysteine
  MOD_RES (240)..(240): Selenocysteine
  MOD_RES (254)..(254): Selenocysteine
  MOD_RES (265)..(265): Selenocysteine
  MOD_RES (272)..(272): Selenocysteine
  MOD_RES (279)..(279): Selenocysteine
  MOD_RES (282)..(282): Selenocysteine
MEGKNLXSISECFLLGFSEQLEEQKPLFGSFLFMYLVXVAGNLLIILVIIXDXQLHXPMYFFLANLSLADACFVSXXVPKMLANIQIQSQAISYSGCLLQLYFFMLFVMLEAFLLAVMAYDCYVAICHPLHYILIMSPGLCIFLVSASWIMNALHSLLHXLLMNSLSFCANHEIPHFFCDINPLLSLSCXDPFXNELVIFIXGGLXGLICVLCLIISYXNVFSXILKIPSAQGKRKAFSXCSSHLSVVSLFFGXSFCVDFSSPSXHSAQKDXVASVMYXVVXPMLNPFIYSLRNQEIKSSLRKLIWVRKIHSP

SEQ ID NO: 18760 - protein, 355 aa, Homo sapiens
  MOD_RES (7)..(7): Selenocysteine
  MOD_RES (25)..(25): Selenocysteine
  MOD_RES (29)..(29): Selenocysteine
  MOD_RES (34)..(34): Selenocysteine
  MOD_RES (38)..(38): Selenocysteine
  MOD_RES (51)..(51): Selenocysteine
  MOD_RES (57)..(57): Selenocysteine
  MOD_RES (71)..(71): Selenocysteine
  MOD_RES (76)..(77): Selenocysteine
  MOD_RES (99)..(99): Selenocysteine
  MOD_RES (109)..(109): Selenocysteine
  MOD_RES (152)..(152): Selenocysteine
  MOD_RES (160)..(160): Selenocysteine
  MOD_RES (167)..(167): Selenocysteine
  MOD_RES (192)..(192): Selenocysteine
  MOD_RES (194)..(194): Selenocysteine
  MOD_RES (208)..(208): Selenocysteine
  MOD_RES (224)..(224): Selenocysteine
  MOD_RES (231)..(231): Selenocysteine
  MOD_RES (240)..(240): Selenocysteine
  MOD_RES (246)..(246): Selenocysteine
  MOD_RES (254)..(254): Selenocysteine
  MOD_RES (263)..(263): Selenocysteine
  MOD_RES (334)..(334): Selenocysteine
MEPEKQXEISEFFLQGLSEKPEHQXLLFXMFLSXYLVXIIGNALIILAIIXDSHLHXPMYFFLFNLSLVDXLLSSXXVPKMLANIQAQSRAIPFVGCLXQMYAFHLFGXMDSFLLAVMAIDRFVAIVHPQRYLVLMCSPVCGLLLGASWMIXNLQSLIHXCLMAQLXFCAGSEISHFFCDLMPLLKLSGSDXHXNELVIFAFGIVVGXSPFSCILLSYIRIFWXVFKIPSXRGKWKAFSXCGLHLXVVSLSYGXIFAVYLQPXSPSSSQKDKAAALMCGVFIPMLNPFIYSIRNKDMKAALGKLIGKVAVPCPRPEQLLDVYHVPGSLLAARDXEMHPIPYPGGVQSLAGNRDME

SEQ ID NO: 18761 - protein, 322 aa, Homo sapiens
  MOD_RES (37)..(38): Selenocysteine
  MOD_RES (57)..(57): Selenocysteine
  MOD_RES (69)..(69): Selenocysteine
  MOD_RES (77)..(77): Selenocysteine
  MOD_RES (87)..(87): Selenocysteine
  MOD_RES (101)..(101): Selenocysteine
  MOD_RES (116)..(116): Selenocysteine
  MOD_RES (134)..(134): Selenocysteine
  MOD_RES (137)..(137): Selenocysteine
  MOD_RES (160)..(160): Selenocysteine
  MOD_RES (192)..(192): Selenocysteine
  MOD_RES (201)..(201): Selenocysteine
  MOD_RES (205)..(205): Selenocysteine
  MOD_RES (224)..(224): Selenocysteine
  MOD_RES (231)..(231): Selenocysteine
  MOD_RES (240)..(240): Selenocysteine
  MOD_RES (249)..(249): Selenocysteine
  MOD_RES (254)..(254): Selenocysteine
  MOD_RES (267)..(267): Selenocysteine
  MOD_RES (279)..(279): Selenocysteine
  MOD_RES (282)..(282): Selenocysteine
  MOD_RES (319)..(319): Selenocysteine
MSPENQSSVSEFLLLGLPIRPEQQAVFFALFLGMYLXXVLGNLLIMLLIQLDSHLHXPMYFFLSHLALXDISFSSVXVPKMLMNMQXQHLAVFYKGCISQXYFFIFFADLDSFLIXSMAYDRYVAICHPLHYAXIMXQSQCVMLVAGSWVIACACALLHXLLLAQLSFCADHIIPHYFCDLGALLKLSCSDXSLNQLAIFXAALXAIMLPFLCILVSYGHIGVXILQIPSXKGICKALSXCGSHLSVVXIYYRXIIGLYFLPPSSNXNDKNIIASVIYXAVXPMLNPFIYSLRNKDIKGALRKLLSRSGAVAHACNLNXLGG

SEQ ID NO: 18762 - protein, 313 aa, Homo sapiens
  MOD_RES (29)..(29): Selenocysteine
  MOD_RES (37)..(38): Selenocysteine
  MOD_RES (57)..(57): Selenocysteine
  MOD_RES (69)..(69): Selenocysteine
  MOD_RES (77)..(77): Selenocysteine
  MOD_RES (87)..(87): Selenocysteine
  MOD_RES (108)..(108): Selenocysteine
  MOD_RES (116)..(116): Selenocysteine
  MOD_RES (133)..(133): Selenocysteine
  MOD_RES (160)..(160): Selenocysteine
  MOD_RES (164)..(164): Selenocysteine
  MOD_RES (173)..(173): Selenocysteine
  MOD_RES (201)..(201): Selenocysteine
  MOD_RES (208)..(208): Selenocysteine
  MOD_RES (224)..(224): Selenocysteine
  MOD_RES (231)..(231): Selenocysteine
  MOD_RES (240)..(240): Selenocysteine
  MOD_RES (263)..(263): Selenocysteine
  MOD_RES (279)..(279): Selenocysteine
  MOD_RES (282)..(282): Selenocysteine
  MOD_RES (309)..(309): Selenocysteine
MSPENQSSVSEFLLLGLPIRPEQQAVFFXLFLGMYLXXVLGNLLIMLLIQLDSHLHXPMYFFLSHLALXDISFSSVXVPKMLMDMRXKYKSILYEECISQMYFFIFFXDLDSFLIXSMAYDRYVAICHPLHYXVIMREELCVFLVAVSWILSCASSLSHXLLLXRLSFCAANXIPHVFCDLAALLKLSCSDIFLNELVMFXVGVVVIXLPFMCILVSYGYIGAXILRVPSXKGIHKALSXCGSHLSVVSLYYGSIFGQYLFPXVSSSIDKDVIVALMYXVVXPMLNPFIYSLRNRDMKEALGKLFSRAXFFSW

SEQ ID NO: 18763 - protein, 313 aa, Homo sapiens
  MOD_RES (29)..(29): Selenocysteine
  MOD_RES (38)..(38): Selenocysteine
  MOD_RES (57)..(57): Selenocysteine
  MOD_RES (69)..(69): Selenocysteine
  MOD_RES (77)..(77): Selenocysteine
  MOD_RES (87)..(87): Selenocysteine
  MOD_RES (99)..(99): Selenocysteine
  MOD_RES (108)..(108): Selenocysteine
  MOD_RES (116)..(116): Selenocysteine
  MOD_RES (133)..(134): Selenocysteine
  MOD_RES (146)..(146): Selenocysteine
  MOD_RES (154)..(154): Selenocysteine
  MOD_RES (160)..(160): Selenocysteine
  MOD_RES (173)..(173): Selenocysteine
  MOD_RES (201)..(201): Selenocysteine
  MOD_RES (208)..(208): Selenocysteine
  MOD_RES (224)..(224): Selenocysteine
  MOD_RES (231)..(231): Selenocysteine
  MOD_RES (240)..(240): Selenocysteine
  MOD_RES (254)..(254): Selenocysteine
  MOD_RES (279)..(279): Selenocysteine
  MOD_RES (282)..(282): Selenocysteine
  MOD_RES (309)..(309): Selenocysteine
MKRENQSSVSEFLLLDLPIWPEQQAVFFXLFLGMYLIXVLGNLLIILLIRLDSHLHXPMFFFLSHLALXDISLSSVXVPKMLLSMQXQDQSILYAGCVXQMYFFIFFXDLDNFLLXSMAYDRYVAICHPLRYXXIMKEGLCNLLVXVSWILSCXNALSHXLLLAQLSFCADNXIPHFFCDLVALLKLSCSDISLNELVIFXVGQAVIXLPLICILISYGHIGVXILKAPSXKGIFKALSXCGSHLSVVSLYYGXIIGLYFLPSSSASSDKDVIASVMYXVIXPLLNPFIYSLRNRDIKGALERLFNRAXVLSQ

SEQ ID NO: 18764 - protein, 316 aa, Homo sapiens
  MOD_RES (19)..(20): Selenocysteine
  MOD_RES (78)..(78): Selenocysteine
  MOD_RES (100)..(100): Selenocysteine
  MOD_RES (111)..(111): Selenocysteine
  MOD_RES (135)..(135): Selenocysteine
  MOD_RES (193)..(193): Selenocysteine
  MOD_RES (202)..(202): Selenocysteine
  MOD_RES (210)..(210): Selenocysteine
  MOD_RES (241)..(241): Selenocysteine
  MOD_RES (255)..(255): Selenocysteine
  MOD_RES (264)..(264): Selenocysteine
  MOD_RES (276)..(276): Selenocysteine
  MOD_RES (280)..(280): Selenocysteine
  MOD_RES (283)..(283): Selenocysteine
MEAANESSEGISFVLLGLXXSPGQQRPLFVLFLLLYVASLLGNGLIVAAIQASPALHAPMYFLLAHLSFADLCFASVXVPKMLANLLAHDHSISLAGCLXQMYFFFALGVXDSCLLAAMAYDCYVAIRHPLPYAXRMSRAMCAALVGMAWLVSHVHSLLYILLMARLSFCASHQVPHFFCDHQPLLRLSCSDXHHIQLLIFXEGAAVVVXPFLLILASYGAIAAAVLQLPSASGRLRAVSXCGSHLAVVSLFYGXVIAVYFQAXSRREAEWGRVAXVMYXVVXPMLNPIIYSLWNRDVQGALRALLIGRRISASDS

SEQ ID NO: 18765 - protein, 360 aa, Homo sapiens
  MOD_RES (49)..(50): Selenocysteine
  MOD_RES (57)..(57): Selenocysteine
  MOD_RES (88)..(88): Selenocysteine
  MOD_RES (103)..(103): Selenocysteine
  MOD_RES (107)..(107): Selenocysteine
  MOD_RES (125)..(125): Selenocysteine
  MOD_RES (139)..(139): Selenocysteine
  MOD_RES (141)..(141): Selenocysteine
  MOD_RES (149)..(149): Selenocysteine
  MOD_RES (160)..(160): Selenocysteine
  MOD_RES (184)..(184): Selenocysteine
  MOD_RES (213)..(213): Selenocysteine
  MOD_RES (248)..(248): Selenocysteine
  MOD_RES (251)..(251): Selenocysteine
  MOD_RES (259)..(259): Selenocysteine
  MOD_RES (274)..(274): Selenocysteine
  MOD_RES (290)..(290): Selenocysteine
  MOD_RES (296)..(296): Selenocysteine
  MOD_RES (299)..(299): Selenocysteine
  MOD_RES (317)..(317): Selenocysteine
  MOD_RES (324)..(324): Selenocysteine
  MOD_RES (328)..(328): Selenocysteine
  MOD_RES (331)..(331): Selenocysteine
MERNHNPDNCNVLNFFFADKKNKRRNFGQIVSDVGRICYSVSLSLGEPXXMGRNNLXRPSEFILLGLSSRPEDQKPLFAVFLPIYLIXVIGNLLIILAIRSDXRLQXPMYFFLSILSFVDICYVXVIIPKMLVNFLSEXKXISYSECLXQMYFFLAFGNXDSYLLAAMAIDRYVAICNPFHYIXIMSHRCCVLLLVLSFCIPHFHSLLHILLXNQLIFCASNVIHHFFCDDQPVLKLSCSSHFVKEIXVMXEGLAVIMXPFSCIIISYLRILIXVLKIPSAAGKRKAFSXCGSHLXVVXLFYGSISYLYFQPLSNYXVKDQIAXIIYXVLXPMLNPFIYSLRNKDMKQGLAKLMHRMKCQ

SEQ ID NO: 18766 - protein, 310 aa, Homo sapiens
  MOD_RES (7)..(7): Selenocysteine
  MOD_RES (38)..(38): Selenocysteine
  MOD_RES (53)..(53): Selenocysteine
  MOD_RES (57)..(57): Selenocysteine
  MOD_RES (75)..(75): Selenocysteine
  MOD_RES (89)..(89): Selenocysteine
  MOD_RES (91)..(91): Selenocysteine
  MOD_RES (99)..(99): Selenocysteine
  MOD_RES (110)..(110): Selenocysteine
  MOD_RES (134)..(134): Selenocysteine
  MOD_RES (163)..(163): Selenocysteine
  MOD_RES (198)..(198): Selenocysteine
  MOD_RES (201)..(201): Selenocysteine
  MOD_RES (209)..(209): Selenocysteine
  MOD_RES (224)..(224): Selenocysteine
  MOD_RES (240)..(240): Selenocysteine
  MOD_RES (246)..(246): Selenocysteine
  MOD_RES (249)..(249): Selenocysteine
  MOD_RES (267)..(267): Selenocysteine
  MOD_RES (274)..(274): Selenocysteine
  MOD_RES (278)..(278): Selenocysteine
  MOD_RES (281)..(281): Selenocysteine
MGRNNLXRPSEFILLGLSSRPEDQKPLFAVFLPIYLIXVIGNLLIILAIRSDXRLQXPMYFFLSILSFVDICYVXVIIPKMLVNFLSEXKXISYSECLXQMYFFLAFGNXDSYLLAAMAIDRYVAICNPFHYIXIMSHRCCVLLLVLSFCIPHFHSLLHILLXNQLIFCASNVIHHFFCDDQPVLKLSCSSHFVKEIXVMXEGLAVIMXPFSCIIISYLRILIXVLKIPSAAGKRKAFSXCGSHLXVVXLFYGSISYLYFQPLSNYXVKDQIAXIIYXVLXPMLNPFIYSLRNKDMKQGLAKLMHRMKCQ

SEQ ID NO: 18767 - protein, 324 aa, Homo sapiens
  MOD_RES (7)..(7): Selenocysteine
  MOD_RES (38)..(38): Selenocysteine
  MOD_RES (74)..(75): Selenocysteine
  MOD_RES (91)..(91): Selenocysteine
  MOD_RES (134)..(134): Selenocysteine
  MOD_RES (150)..(150): Selenocysteine
  MOD_RES (167)..(167): Selenocysteine
  MOD_RES (170)..(170): Selenocysteine
  MOD_RES (192)..(192): Selenocysteine
  MOD_RES (201)..(201): Selenocysteine
  MOD_RES (240)..(240): Selenocysteine
  MOD_RES (246)..(246): Selenocysteine
  MOD_RES (267)..(267): Selenocysteine
  MOD_RES (274)..(274): Selenocysteine
  MOD_RES (278)..(278): Selenocysteine
  MOD_RES (281)..(281): Selenocysteine
  MOD_RES (316)..(316): Selenocysteine
  MOD_RES (318)..(318): Selenocysteine
MGMSNLXRLSEFILLGLSSRSEDQRPLFALFLIIYLVXLMGNLLIILAIHSDPRLQNPMYFFLSILSFADICYXXVIVPKMLVNFLSEKKXISYAECLAQMYFFLVFGNIDSYLLAAMAINRCVAICNPFHYVXVMNRRCCVLLLAFPIXFSYFHSLLHVLLVNRLXFCXSNVIHHFFCDVNPVLKLSCSSXFVNEIVAMXEGLASVMAPFVCIIISYLRILIAVLKIPSAAGKHKAFSXCSSHLXVVILFYGSISYVYLQPLSSYXVKDRIAXINYXVLXSVLNPFIYSLRNKDMKRGLQKLINKIKSQMSRFSXKXNKICGP

SEQ ID NO: 18768 - protein, 311 aa, Homo sapiens
  MOD_RES (3)..(3): Selenocysteine
  MOD_RES (10)..(10): Selenocysteine
  MOD_RES (39)..(39): Selenocysteine
  MOD_RES (58)..(58): Selenocysteine
  MOD_RES (75)..(76): Selenocysteine
  MOD_RES (90)..(90): Selenocysteine
  MOD_RES (111)..(111): Selenocysteine
  MOD_RES (182)..(182): Selenocysteine
  MOD_RES (193)..(193): Selenocysteine
  MOD_RES (202)..(202): Selenocysteine
  MOD_RES (204)..(204): Selenocysteine
  MOD_RES (210)..(210): Selenocysteine
  MOD_RES (215)..(215): Selenocysteine
  MOD_RES (225)..(225): Selenocysteine
  MOD_RES (241)..(241): Selenocysteine
  MOD_RES (247)..(247): Selenocysteine
  MOD_RES (276)..(276): Selenocysteine
  MOD_RES (280)..(280): Selenocysteine
  MOD_RES (283)..(283): Selenocysteine
MEXKNYSSSXSGFILLGLSSNPKLQKPLFAIFLIMYLLXAVGNVLIILAIYSDPRLHXPMYFFLSNLSFMDICFXXVIVPKMLVNFLSEXKIISYVGCLIQMYFFMAFGNXDSYLLASMAIDRLVAICNPLHYDVVMKPWHCLLMLLGSCSISHLHSLFRVLLMSRLSFCASHIIKHFFCDXQPVLKLSCSDXSSSQMVVMXEXLAVIVXPFLCXIFSYLQIIVXVLRIPSAAGKWKAFSXCGSHLXVVVLFYGSVIYVYFRPLSMYSVMKGRVAXVMYXVVXPMLNPFIYSLRNKDMKRGLKKLRHRIYS

SEQ ID NO: 18769 - protein, 311 aa, Homo sapiens
  MOD_RES (10)..(10): Selenocysteine
  MOD_RES (58)..(58): Selenocysteine
  MOD_RES (75)..(76): Selenocysteine
  MOD_RES (90)..(90): Selenocysteine
  MOD_RES (111)..(111): Selenocysteine
  MOD_RES (182)..(182): Selenocysteine
  MOD_RES (193)..(193): Selenocysteine
  MOD_RES (202)..(202): Selenocysteine
  MOD_RES (204)..(204): Selenocysteine
  MOD_RES (210)..(210): Selenocysteine
  MOD_RES (225)..(225): Selenocysteine
  MOD_RES (241)..(241): Selenocysteine
  MOD_RES (247)..(247): Selenocysteine
  MOD_RES (276)..(276): Selenocysteine
  MOD_RES (280)..(280): Selenocysteine
  MOD_RES (283)..(283): Selenocysteine
MEIKNYSSSXSGFILLGLSSNPQLQKPLFAIFLIMYLLAAVGNVLIIPAIYSDPRLHXPMYFFLSNLSFMDICFXXVIVPKMLVNFLSEXKVISYVGCLAQMYFFMAFGNXDSYLLASMAIDRLVAICNPLHYDVVMKPRHCLLMLLGSCSISHLHSLFRVLLMSRLSFCASHIIKHFFCDXQPVLKLSCSDXSSSQMVVMXEXLAVIVXPFLCIIFSYLRIMVXVLRIPSAAGKWKAFSXCGSHLXAVALFYGSIIYVYFRPLSMYSVVRDRVAXVMYXVVXPMLNPFIYSLRNKDMKRGLKKLQDRIYR

SEQ ID NO: 18770 - protein, 347 aa, Homo sapiens
  MOD_RES (21)..(21): Selenocysteine
  MOD_RES (29)..(29): Selenocysteine
  MOD_RES (46)..(46): Selenocysteine
  MOD_RES (94)..(94): Selenocysteine
  MOD_RES (111)..(112): Selenocysteine
  MOD_RES (126)..(126): Selenocysteine
  MOD_RES (147)..(147): Selenocysteine
  MOD_RES (218)..(218): Selenocysteine
  MOD_RES (229)..(229): Selenocysteine
  MOD_RES (238)..(238): Selenocysteine
  MOD_RES (240)..(240): Selenocysteine
  MOD_RES (246)..(246): Selenocysteine
  MOD_RES (261)..(261): Selenocysteine
  MOD_RES (277)..(277): Selenocysteine
  MOD_RES (283)..(283): Selenocysteine
  MOD_RES (312)..(312): Selenocysteine
  MOD_RES (316)..(316): Selenocysteine
  MOD_RES (319)..(319): Selenocysteine
MSYFYRLKLMKEAVLVKLPFXSLPLLLQXLSRKSRDMEIKNYSSSXSGFILLGLSSNPQLQKPLFAIFLIMYLLAAVGNVLIIPAIYSDPRLHXPMYFFLSNLSFMDICFXXVIVPKMLVNFLSEXKVISYVGCLAQMYFFMAFGNXDSYLLASMAIDRLVAICNPLHYDVVMKPRHCLLMLLGSCSISHLHSLFRVLLMSRLSFCASHIIKHFFCDXQPVLKLSCSDXSSSQMVVMXEXLAVIVXPFLCIIFSYLRIMVXVLRIPSAAGKWKAFSXCGSHLXAVALFYGSIIYVYFRPLSMYSVVRDRVAXVMYXVVXPMLNPFIYSLRNKDMKRGLKKLQDRIYR

SEQ ID NO: 18771 - protein, 309 aa, Homo sapiens
  MOD_RES (7)..(7): Selenocysteine
  MOD_RES (27)..(27): Selenocysteine
  MOD_RES (39)..(39): Selenocysteine
  MOD_RES (41)..(41): Selenocysteine
  MOD_RES (58)..(58): Selenocysteine
  MOD_RES (70)..(70): Selenocysteine
  MOD_RES (75)..(76): Selenocysteine
  MOD_RES (92)..(92): Selenocysteine
  MOD_RES (100)..(100): Selenocysteine
  MOD_RES (135)..(136): Selenocysteine
  MOD_RES (161)..(161): Selenocysteine
  MOD_RES (168)..(168): Selenocysteine
  MOD_RES (202)..(202): Selenocysteine
  MOD_RES (210)..(210): Selenocysteine
  MOD_RES (224)..(225): Selenocysteine
  MOD_RES (232)..(232): Selenocysteine
  MOD_RES (241)..(241): Selenocysteine
  MOD_RES (247)..(247): Selenocysteine
  MOD_RES (250)..(250): Selenocysteine
  MOD_RES (266)..(266): Selenocysteine
  MOD_RES (275)..(275): Selenocysteine
  MOD_RES (279)..(279): Selenocysteine
MERINHXSSVSEFILLGLSSRPEDQKXLFVLFLIVYLVXIXGNLLIILAIRFNPHLQXPMYFFLSFLSLXDICFXXSVVPKMLMNFLSEKKXISYAGCLXQMYFLYALGNSDSCLLAVMAFDRYVAVCDPFHYVXXMSHHHCVLLVAFSCSFPHLHSLLHXLLLNRLXFCDSNVIHHFLCDLSPVLKLSCSSIFVNEIVQMXEAPIVLVXRFLCIAFSYIRILXXVLKIPSXSGKRKAFSXCGFYLXVVXLFYGSIFCVYLQPPSXYAVKDHVAXIVYXVLSSMLNPFIYSLRNKDLKQGLRKLMSKRS

SEQ ID NO: 18772 - protein, 313 aa, Homo sapiens
  MOD_RES (7)..(7): Selenocysteine
  MOD_RES (25)..(25): Selenocysteine
  MOD_RES (57)..(57): Selenocysteine
  MOD_RES (75)..(75): Selenocysteine
  MOD_RES (77)..(77): Selenocysteine
  MOD_RES (87)..(87): Selenocysteine
  MOD_RES (158)..(158): Selenocysteine
  MOD_RES (182)..(182): Selenocysteine
  MOD_RES (190)..(190): Selenocysteine
  MOD_RES (192)..(192): Selenocysteine
  MOD_RES (209)..(209): Selenocysteine
  MOD_RES (240)..(240): Selenocysteine
  MOD_RES (254)..(255): Selenocysteine
  MOD_RES (267)..(268): Selenocysteine
  MOD_RES (279)..(279): Selenocysteine
  MOD_RES (282)..(282): Selenocysteine
  MOD_RES (310)..(310): Selenocysteine
MEPRNQXSASQFILLGLSEKPEQEXLLFSLFFCMYLVMVVGNLLIILAISIDSHLHXPMYFFLANLSLVDFCLAXNXIPKMLVSLQXGSKAISYPCCLIQMYFFHFFGIVDSVIIAMMAYDRFVAICHPLHYAKIMSLRLCRLLVGALWAFSCFISLXHILLMARLVFCGSHEVPHYFCDLXPILRLSCXDXSVNRIFILIVAGMVIAXPFVCILASYARILVAIMKVPSAGGRKKAFSXCSSHLSVVALFYGXXIGVYLCPSSVLXXVKEKASAVMYXAVXPMLNPFIYSLRNRDLKGALRKLVNRKIXSSS

SEQ ID NO: 18773 - protein, 311 aa, Homo sapiens
  MOD_RES (36)..(36): Selenocysteine
  MOD_RES (38)..(38): Selenocysteine
  MOD_RES (55)..(55): Selenocysteine
  MOD_RES (72)..(72): Selenocysteine
  MOD_RES (75)..(75): Selenocysteine
  MOD_RES (77)..(77): Selenocysteine
  MOD_RES (85)..(85): Selenocysteine
  MOD_RES (89)..(89): Selenocysteine
  MOD_RES (93)..(93): Selenocysteine
  MOD_RES (97)..(97): Selenocysteine
  MOD_RES (132)..(132): Selenocysteine
  MOD_RES (150)..(150): Selenocysteine
  MOD_RES (156)..(156): Selenocysteine
  MOD_RES (158)..(158): Selenocysteine
  MOD_RES (169)..(169): Selenocysteine
  MOD_RES (180)..(180): Selenocysteine
  MOD_RES (190)..(190): Selenocysteine
  MOD_RES (203)..(203): Selenocysteine
  MOD_RES (214)..(214): Selenocysteine
  MOD_RES (228)..(228): Selenocysteine
  MOD_RES (238)..(238): Selenocysteine
  MOD_RES (252)..(252): Selenocysteine
  MOD_RES (277)..(277): Selenocysteine
  MOD_RES (280)..(280): Selenocysteine
MENQSSISEFFLRGISAPPEQQQSLFGIFLCMYLVXLXGNLLIILAIGSDLHLHXPMYFFLANLSFVDMGLXSSXVXKMLVNIQXRHHXISYXGCLXQMYFFLMFGDLDSFFLAAMAYDRYVAICHPLCYSXVMRPQVCALMLALCWVLXNIVALXHXFLMARLSFCVXGEIAHFFCDIXPVLKLSCSDXHINEMMVFVLGGXVLIVPFLCIVXSYIHIVPAILRVRXRGGVGKAFSXCSSHLCVVCVFYGXLFSAYLCPPSIASEEKDIAAAAMYXIVXPMLNPFIYSLRNKDMKGALKRLFSHRSIVSS

SEQ ID NO: 18774 - protein, 312 aa, Homo sapiens
  MOD_RES (37)..(37): Selenocysteine
  MOD_RES (39)..(39): Selenocysteine
  MOD_RES (56)..(56): Selenocysteine
  MOD_RES (73)..(73): Selenocysteine
  MOD_RES (76)..(76): Selenocysteine
  MOD_RES (78)..(78): Selenocysteine
  MOD_RES (86)..(86): Selenocysteine
  MOD_RES (90)..(90): Selenocysteine
  MOD_RES (94)..(94): Selenocysteine
  MOD_RES (98)..(98): Selenocysteine
  MOD_RES (133)..(133): Selenocysteine
  MOD_RES (151)..(151): Selenocysteine
  MOD_RES (157)..(157): Selenocysteine
  MOD_RES (159)..(159): Selenocysteine
  MOD_RES (170)..(170): Selenocysteine
  MOD_RES (181)..(181): Selenocysteine
  MOD_RES (191)..(191): Selenocysteine
  MOD_RES (204)..(204): Selenocysteine
  MOD_RES (215)..(215): Selenocysteine
  MOD_RES (229)..(229): Selenocysteine
  MOD_RES (239)..(239): Selenocysteine
  MOD_RES (253)..(253): Selenocysteine
  MOD_RES (278)..(278): Selenocysteine
  MOD_RES (281)..(281): Selenocysteine
VMENQSSISEFFLRGISAPPEQQQSLFGIFLCMYLVXLXGNLLIILAIGSDLHLHXPMYFFLANLSFVDMGLXSSXVXKMLVNIQXRHHXISYXGCLXQMYFFLMFGDLDSFFLAAMAYDRYVAICHPLCYSXVMRPQVCALMLALCWVLXNIVALXHXFLMARLSFCVXGEIAHFFCDIXPVLKLSCSDXHINEMMVFVLGGXVLIVPFLCIVXSYIHIVPAILRVRXRGGVGKAFSXCSSHLCVVCVFYGXLFSAYLCPPSIASEEKDIAAAAMYXIVXPMLNPFIYSLRNKDMKGALKRLFSHRSIVSS

SEQ ID NO: 18775 - protein, 308 aa, Homo sapiens
  MOD_RES (6)..(7): Selenocysteine
  MOD_RES (37)..(37): Selenocysteine
  MOD_RES (56)..(56): Selenocysteine
  MOD_RES (68)..(68): Selenocysteine
  MOD_RES (73)..(73): Selenocysteine
  MOD_RES (86)..(86): Selenocysteine
  MOD_RES (133)..(133): Selenocysteine
  MOD_RES (151)..(151): Selenocysteine
  MOD_RES (159)..(159): Selenocysteine
  MOD_RES (163)..(163): Selenocysteine
  MOD_RES (191)..(191): Selenocysteine
  MOD_RES (200)..(200): Selenocysteine
  MOD_RES (207)..(207): Selenocysteine
  MOD_RES (239)..(239): Selenocysteine
  MOD_RES (245)..(245): Selenocysteine
  MOD_RES (264)..(264): Selenocysteine
  MOD_RES (267)..(267): Selenocysteine
  MOD_RES (283)..(283): Selenocysteine
GRVNQXXVSDFLLLGLSEWPEEQPLLFGIFLGMYLVXMVGNLLIILAISSDPHLHXPMYFFLANLSLXDACFXSASIPKMLANIHXQSQIISYSGCLAQLYFLLMFGGLDNCLLAVMAYDRYVAICQPLHYSXSMSPQLCALMLGVCWVLXNCPALMHXLLLXRVAFCAQKAIPHFYCDPSALLKLACSDXHVNELMIIXMGLLFLXVPLLLIVFSYVRIFWAVFVISSPGGRWKAFSXCGSHLXVVLLFYGSLMGVYLLPPSXYSXERESRAAVLYMVIIPXLNPFIYSLRNRDMKEALGKLFRKRS

SEQ ID NO: 18776 - protein, 330 aa, Homo sapiens
  MOD_RES (24)..(25): Selenocysteine
  MOD_RES (55)..(55): Selenocysteine
  MOD_RES (74)..(74): Selenocysteine
  MOD_RES (86)..(86): Selenocysteine
  MOD_RES (91)..(91): Selenocysteine
  MOD_RES (104)..(104): Selenocysteine
  MOD_RES (151)..(151): Selenocysteine
  MOD_RES (169)..(169): Selenocysteine
  MOD_RES (177)..(177): Selenocysteine
  MOD_RES (181)..(181): Selenocysteine
  MOD_RES (209)..(209): Selenocysteine
  MOD_RES (218)..(218): Selenocysteine
  MOD_RES (225)..(225): Selenocysteine
  MOD_RES (257)..(257): Selenocysteine
  MOD_RES (263)..(263): Selenocysteine
  MOD_RES (282)..(282): Selenocysteine
  MOD_RES (285)..(285): Selenocysteine
  MOD_RES (301)..(301): Selenocysteine
  MOD_RES (327)..(327): Selenocysteine
MEGFYLRRSHELQGMGKPGRVNQXXVSDFLLLGLSEWPEEQPLLFGIFLGMYLVXMVGNLLIILAISSDPHLHXPMYFFLANLSLXDACFXSASIPKMLANIHXQSQIISYSGCLAQLYFLLMFGGLDNCLLAVMAYDRYVAICQPLHYSXSMSPQLCALMLGVCWVLXNCPALMHXLLLXRVAFCAQKAIPHFYCDPSALLKLACSDXHVNELMIIXMGLLFLXVPLLLIVFSYVRIFWAVFVISSPGGRWKAFSXCGSHLXVVLLFYGSLMGVYLLPPSXYSXERESRAAVLYMVIIPXLNPFIYSLRNRDMKEALGKLFVSGKXFFL

SEQ ID NO: 18777 - protein, 314 aa, Homo sapiens
  MOD_RES (7)..(7): Selenocysteine
  MOD_RES (19)..(19): Selenocysteine
  MOD_RES (47)..(47): Selenocysteine
  MOD_RES (69)..(69): Selenocysteine
  MOD_RES (74)..(74): Selenocysteine
  MOD_RES (76)..(77): Selenocysteine
  MOD_RES (89)..(89): Selenocysteine
  MOD_RES (95)..(95): Selenocysteine
  MOD_RES (101)..(101): Selenocysteine
  MOD_RES (133)..(133): Selenocysteine
  MOD_RES (137)..(137): Selenocysteine
  MOD_RES (160)..(160): Selenocysteine
  MOD_RES (190)..(190): Selenocysteine
  MOD_RES (192)..(192): Selenocysteine
  MOD_RES (196)..(196): Selenocysteine
  MOD_RES (201)..(201): Selenocysteine
  MOD_RES (215)..(215): Selenocysteine
  MOD_RES (237)..(237): Selenocysteine
  MOD_RES (240)..(240): Selenocysteine
  MOD_RES (246)..(246): Selenocysteine
  MOD_RES (254)..(254): Selenocysteine
  MOD_RES (269)..(269): Selenocysteine
  MOD_RES (275)..(275): Selenocysteine
  MOD_RES (279)..(279): Selenocysteine
  MOD_RES (282)..(282): Selenocysteine
  MOD_RES (310)..(310): Selenocysteine
MDNSNWXSVSHFVLLGISXHPEEQIPLFLVFSLMYAINISGNLAIIXLILSAPRLHIPMYIFLSNLALXDICFXSXXVPKMLQIIFSPXKVISYXGCLAQXYFFICFAVMENFILAVMAYDRYIAICHPFHYXMILXRMLCVKMVVMCHALSHLHAMLHXFLIGQLIFCADNRIPHFFCDLYALMKISCXSXYLNXLMIHXEGAVVISGALAFIXASYACIILVVLRIPSAKGRWKXFSXCGSHLXVVAIFYGXLSWVYFRPLSSYSVXKGRIIXVVYXVVXPMLNPFIYSLRNGDVKGGFMKWMSRMQXFFFR

SEQ ID NO: 18778 - protein, 325 aa, Homo sapiens
  MOD_RES (3)..(3): Selenocysteine
  MOD_RES (20)..(21): Selenocysteine
  MOD_RES (23)..(23): Selenocysteine
  MOD_RES (51)..(51): Selenocysteine
  MOD_RES (66)..(66): Selenocysteine
  MOD_RES (70)..(70): Selenocysteine
  MOD_RES (100)..(100): Selenocysteine
  MOD_RES (112)..(112): Selenocysteine
  MOD_RES (130)..(130): Selenocysteine
  MOD_RES (146)..(146): Selenocysteine
  MOD_RES (158)..(158): Selenocysteine
  MOD_RES (171)..(171): Selenocysteine
  MOD_RES (173)..(173): Selenocysteine
  MOD_RES (186)..(186): Selenocysteine
  MOD_RES (205)..(205): Selenocysteine
  MOD_RES (225)..(225): Selenocysteine
  MOD_RES (244)..(244): Selenocysteine
  MOD_RES (253)..(253): Selenocysteine
  MOD_RES (259)..(259): Selenocysteine
  MOD_RES (267)..(267): Selenocysteine
  MOD_RES (278)..(278): Selenocysteine
  MOD_RES (283)..(283): Selenocysteine
  MOD_RES (292)..(292): Selenocysteine
  MOD_RES (295)..(295): Selenocysteine
MKXFSSFLQIGRNMHQGNQXXIXEFILLGFFKQDEHQNLLFVLFLGMYLVXVIGNGLIIVAISLDXYLHXPMYLFLANLSFADISSISNSVPKMLVNIQXKSQSISYESCIXQMYFSIVFVVIDNLLLGXMAYDHFVAICHPLNYXILMRPRFGILLXVISWFLSNIIALXHXLLLIQLLFCNHNXLPHFFCDLAPLLKLSCSDXLINELVLFIVGLSVIIFPFXLSFFSYVCIIRAVLRVSSXQGKWKAFSXCGSHLXVVLLFYGXIVGVYFFPSSXHPEDXDKIGAVLFXVVXPMINPFIYSLRNKDMKGALRKLINRKISSL

SEQ ID NO: 18779 - protein, 325 aa, Homo sapiens
  MOD_RES (3)..(3): Selenocysteine
  MOD_RES (20)..(21): Selenocysteine
  MOD_RES (23)..(23): Selenocysteine
  MOD_RES (51)..(51): Selenocysteine
  MOD_RES (70)..(70): Selenocysteine
  MOD_RES (100)..(100): Selenocysteine
  MOD_RES (112)..(112): Selenocysteine
  MOD_RES (123)..(123): Selenocysteine
  MOD_RES (130)..(130): Selenocysteine
  MOD_RES (146)..(147): Selenocysteine
  MOD_RES (155)..(155): Selenocysteine
  MOD_RES (158)..(158): Selenocysteine
  MOD_RES (171)..(171): Selenocysteine
  MOD_RES (173)..(173): Selenocysteine
  MOD_RES (186)..(186): Selenocysteine
  MOD_RES (205)..(205): Selenocysteine
  MOD_RES (244)..(244): Selenocysteine
  MOD_RES (253)..(253): Selenocysteine
  MOD_RES (259)..(259): Selenocysteine
  MOD_RES (267)..(268): Selenocysteine
  MOD_RES (278)..(278): Selenocysteine
  MOD_RES (283)..(283): Selenocysteine
  MOD_RES (292)..(292): Selenocysteine
  MOD_RES (295)..(295): Selenocysteine
MKXLCSFLQISRNMHQENQXXIXEFILLGLSNQAEHQNLLFVLFLSMYVVXVVGNGLIIVAISLDIYLHXPMYLFLAYLSFADISSISNSVPKMLVNIQXNSQSISYESCIXQMYFSIVFVVXDNLLLGXMAFDHFVAICHPLNYXXFMRARFGXLLXVISWFLSNIIALXHXLLLIQLLFCDHNXLPHFFCDLAPLLKLSCSDXMINELVLFIVGLSVIIFPFVLIFFSYVCIIRAVLGVSSXQGKWKAFSXCGSHLXIALLFYGXXVGVYFFPSSXHPEDXDKIGAVLFXVVXPMMNPFIYSLRNKDMKGALRKLINRKISSL

SEQ ID NO: 18780 - protein, 310 aa, Homo sapiens
  MOD_RES (6)..(6): Selenocysteine
  MOD_RES (9)..(9): Selenocysteine
  MOD_RES (37)..(37): Selenocysteine
  MOD_RES (56)..(56): Selenocysteine
  MOD_RES (76)..(76): Selenocysteine
  MOD_RES (100)..(100): Selenocysteine
  MOD_RES (109)..(109): Selenocysteine
  MOD_RES (132)..(132): Selenocysteine
  MOD_RES (141)..(141): Selenocysteine
  MOD_RES (146)..(146): Selenocysteine
  MOD_RES (160)..(160): Selenocysteine
  MOD_RES (191)..(191): Selenocysteine
  MOD_RES (239)..(239): Selenocysteine
MESNQXWIXEVILLGFQVDPALELFLFGFFLLFYSLXLMGNGIILGLIYLDSRLHXPMYVFLSHLAIVDMSYASSXVPKMLANLVMHKKVISFAPCILQXFLYLAFAIXECLILVMMCYDRYVAICHPLQYXLIMNWRVCXVLASXCWIFSFLLALVHIXLILRLPFCGPQKINHFFCQIMSVFKLACADXRLNQVVLFAGSAFILVGPLCLVLVSYLHILVAILRIQSGEGRRKAFSXCSSHLCVVGLFFGSAIVMYMAPKSSHSQERRKILSLFYSLFNPILNPLIYSLRNAEVKGALKRVLWKQRSM

SEQ ID NO: 18781 - protein, 310 aa, Homo sapiens
  MOD_RES (6)..(6): Selenocysteine
  MOD_RES (9)..(9): Selenocysteine
  MOD_RES (12)..(12): Selenocysteine
  MOD_RES (35)..(35): Selenocysteine
  MOD_RES (37)..(37): Selenocysteine
  MOD_RES (56)..(56): Selenocysteine
  MOD_RES (82)..(82): Selenocysteine
  MOD_RES (90)..(90): Selenocysteine
  MOD_RES (100)..(100): Selenocysteine
  MOD_RES (141)..(141): Selenocysteine
  MOD_RES (191)..(191): Selenocysteine
  MOD_RES (239)..(239): Selenocysteine
  MOD_RES (257)..(257): Selenocysteine
  MOD_RES (310)..(310): Selenocysteine
MEGNKXWIXDIXLPRFQVGPALEILLCGLFSAFYXLXLLGNGVIFGIICLDCKLHXPMYFFLSHLAIVDISYASNYVPKMLXNLMNQESXISFFPCIMQXFLYLAFAHVECLILVVMSYDRYADICHPLRYNSLMSWRVCXVLAVASWVFSFLLALVPLVLILSLPFCGPHEINHFFCEILSVLKLACADXWLNQVVIFAACVFILVGPLCLVLVSYLRILAAILRIQSGEGRRKAFSXCSSHLCVVGLFFGSAIVXYMAPKSRHPEEQQKVLSLFYSLFNPMLNPLIYSLRNAEVKGALRRALRKERLX

SEQ ID NO: 18782 - protein, 308 aa, Homo sapiens
  MOD_RES (6)..(6): Selenocysteine
  MOD_RES (9)..(9): Selenocysteine
  MOD_RES (12)..(12): Selenocysteine
  MOD_RES (35)..(35): Selenocysteine
  MOD_RES (37)..(37): Selenocysteine
  MOD_RES (56)..(56): Selenocysteine
  MOD_RES (90)..(90): Selenocysteine
  MOD_RES (100)..(100): Selenocysteine
  MOD_RES (109)..(109): Selenocysteine
  MOD_RES (132)..(132): Selenocysteine
  MOD_RES (141)..(141): Selenocysteine
  MOD_RES (191)..(191): Selenocysteine
  MOD_RES (239)..(239): Selenocysteine
  MOD_RES (257)..(257): Selenocysteine
MEGNQXWIXDIXLLGFQVGPALAILLCGLFSVFYXLXLLGNGVIFGIICLDSKLHXPMYFFLSHLAIIDMSYASNNVPKMLANLMNQKRXISFVPCIMQXFLYLAFAVXECLILVVMSYDRYVAICHPFQYXVIMSWRVCXVLAVASWVFSFLLALVPLVLILSLPFCGPHEINHFFCEILSVLKLACADXWLNQVVIFAACVFILVGPLCLVLVSYLRILAAILRIQSGEGRRKAFSXCSSHLCVVGLFFGSAIVXYMAPKSRHPEEQQKVLSLFYSLFNPMLNPLIYSLRNAEVKGALRRALRKER

SEQ ID NO: 18783 - protein, 318 aa, Homo sapiens
  MOD_RES (6)..(6): Selenocysteine
  MOD_RES (9)..(9): Selenocysteine
  MOD_RES (12)..(12): Selenocysteine
  MOD_RES (35)..(35): Selenocysteine
  MOD_RES (37)..(37): Selenocysteine
  MOD_RES (56)..(56): Selenocysteine
  MOD_RES (90)..(90): Selenocysteine
  MOD_RES (100)..(100): Selenocysteine
  MOD_RES (109)..(109): Selenocysteine
  MOD_RES (132)..(132): Selenocysteine
  MOD_RES (141)..(141): Selenocysteine
  MOD_RES (146)..(146): Selenocysteine
  MOD_RES (191)..(191): Selenocysteine
  MOD_RES (201)..(201): Selenocysteine
  MOD_RES (229)..(229): Selenocysteine
  MOD_RES (239)..(239): Selenocysteine
  MOD_RES (312)..(312): Selenocysteine
MEGNQXWIXDIXLLGFQVGPALAILLCGLFSVFYXLXLLGNGVIFGIICLDSKLHXPMYFFLSHLAIIDMSYASNNVPKMLANLMNQKRXISFVPCIMQXFLYLAFAVXECLILVVMSYDRYVAICHPFQYXVIMSWRVCXILVLXSWSCGFALSLVHEILLLRLPFCGPRDVNHLFCEILSVLKLACADXWVNQVVIFAXCVFVLVGPLSLILVSYMHILGAILKIQXKEGRIKAFSXCSSHLCVVGLFFGIAMVVYMVPDSNQREEQEKMLSLFHSVFNPMLNPLIYSLRNAQLKGALHRALQRKRSMRXVYGLCL

SEQ ID NO: 18784 - protein, 310 aa, Homo sapiens
  MOD_RES (6)..(6): Selenocysteine
  MOD_RES (9)..(9): Selenocysteine
  MOD_RES (43)..(43): Selenocysteine
  MOD_RES (56)..(56): Selenocysteine
  MOD_RES (76)..(76): Selenocysteine
  MOD_RES (98)..(98): Selenocysteine
  MOD_RES (109)..(109): Selenocysteine
  MOD_RES (133)..(133): Selenocysteine
  MOD_RES (136)..(136): Selenocysteine
  MOD_RES (142)..(142): Selenocysteine
  MOD_RES (146)..(146): Selenocysteine
  MOD_RES (191)..(191): Selenocysteine
  MOD_RES (213)..(213): Selenocysteine
  MOD_RES (253)..(253): Selenocysteine
  MOD_RES (299)..(299): Selenocysteine
  MOD_RES (309)..(309): Selenocysteine
MGGNQXSIXEFLLLGFPIGPRIQMLLFGLFSLFYIFILLGNGXILGLISLDSRLHXPMYFFLSHLAVVDIACACSXVPQMLVNLLHPAKPISFAGCMXQMFLFLSFAHXECLLLVVMSYDRYVAICHPLRYSXIMXWKVCIXLALXSWILGVLLALVHLVLLLPLSFCGPQKLNHFFCEIMAVLKLACADXHINEVMVLAGAVSVLVGAFFSXVISYVHILCAILKIQSGEGCQKAFSICSSHLCVVGLFYGXAIIMYVEPQYESPKEQKKYLLLFHSLFNPMLNPLIYSLRNKEVQGXLKRMLEKKRXS

SEQ ID NO: 18785 - protein, 310 aa, Homo sapiens
  MOD_RES (6)..(6): Selenocysteine
  MOD_RES (37)..(37): Selenocysteine
  MOD_RES (43)..(43): Selenocysteine
  MOD_RES (76)..(76): Selenocysteine
  MOD_RES (100)..(100): Selenocysteine
  MOD_RES (105)..(105): Selenocysteine
  MOD_RES (109)..(109): Selenocysteine
  MOD_RES (136)..(136): Selenocysteine
  MOD_RES (142)..(142): Selenocysteine
  MOD_RES (146)..(146): Selenocysteine
  MOD_RES (149)..(150): Selenocysteine
  MOD_RES (191)..(191): Selenocysteine
  MOD_RES (212)..(212): Selenocysteine
  MOD_RES (239)..(239): Selenocysteine
  MOD_RES (253)..(253): Selenocysteine
  MOD_RES (299)..(299): Selenocysteine
MGDNIXSIREFLLLGFPVGPRIQMLLFGLFSLFYVFXLLGNGXILGLISLDSRLHAPMYFFLSHLAVVDIAYACNXVPRMLVNLLHPAKPISFAGRMMQXFLFSXFAVXECLLLVVMSYDLYVAICHPLRYLAIMXWRVCIXLAVXSWXXGVLLSLIHLVLLLPLPFCRPQKIYHFFCEILAVLKLACADXHINENMVLAGAISGLVGPLSXIVVSYMCILCAILQIQSREVQRKAFRXCFSHLCVIGLVYGXAIIMYVGPRYGNPKEQKKYLLLFHSLFNPMLNPLICSLRNSEVKNXLKRVLGVERAL

SEQ ID NO: 18786 - protein, 310 aa, Homo sapiens
  MOD_RES (6)..(6): Selenocysteine
  MOD_RES (9)..(9): Selenocysteine
  MOD_RES (37)..(37): Selenocysteine
  MOD_RES (56)..(56): Selenocysteine
  MOD_RES (73)..(73): Selenocysteine
  MOD_RES (76)..(76): Selenocysteine
  MOD_RES (98)..(98): Selenocysteine
  MOD_RES (100)..(100): Selenocysteine
  MOD_RES (136)..(136): Selenocysteine
  MOD_RES (142)..(142): Selenocysteine
  MOD_RES (146)..(146): Selenocysteine
  MOD_RES (149)..(149): Selenocysteine
  MOD_RES (191)..(191): Selenocysteine
  MOD_RES (239)..(239): Selenocysteine
  MOD_RES (283)..(283): Selenocysteine
MGENQXMVXEFLLLGFLLGPRIQMLLFGLFSLFYIFXLLGNGAILGLISLDSRLHXPMYFFLSHLAVVDIAYXRNXVPQMLANLLHPAKPISFAGCMXQXFLCLSFGHSECLLLVLMSYDRYVAICHPLRYSVIMXWRVCIXLAVXSWXCGSLLALAHVVLILRLPFSGPHEINHFFCEILSVLRLACADXWLNQVVIFAACVFFLVGPPSLVLVSYSHILAAILRIQSGEGRRKAFSXCSSHLCVVGLFFGSAIIMYMAPKSRHPEEQQKVFFLFYSFFNPXLNPLIYSLRNGEVKGALRRALGKESHS

SEQ ID NO: 18787 - protein, 311 aa, Homo sapiens
  MOD_RES (2)..(2): Selenocysteine
  MOD_RES (6)..(6): Selenocysteine
  MOD_RES (9)..(9): Selenocysteine
  MOD_RES (37)..(37): Selenocysteine
  MOD_RES (56)..(56): Selenocysteine
  MOD_RES (82)..(82): Selenocysteine
  MOD_RES (91)..(91): Selenocysteine
  MOD_RES (98)..(98): Selenocysteine
  MOD_RES (101)..(101): Selenocysteine
  MOD_RES (110)..(110): Selenocysteine
  MOD_RES (142)..(142): Selenocysteine
  MOD_RES (147)..(147): Selenocysteine
  MOD_RES (192)..(192): Selenocysteine
  MOD_RES (240)..(240): Selenocysteine
MXKNQXWVXEFILLGFPLSLRIQMLLSGLFSLLYVFXLLGNGAILGLIWLDSRLHXPMYFFLSHLAIIDISYASNNVPKMLXNLGLNKRKXISFVPCXMQXFLYMAFAHXECLILVMMSYDRYMAICHPLQYSVIMRWGVCXVLAVXSWACGSLLALVHVVLILRLPFCGPHEINHFFCEILSVLKLACADXWLNQVVIFAASVFILVGPLCLVLVSYSRILAAILRIQSGEGRRKAFSXCSSHLCMVGLFFGSAIVMYMAPKSRHPEEQQKVLSLFYSLFNPMLNPLIYSLRNAEVKGALKRVLWKQRSK

SEQ ID NO: 18788 - protein, 310 aa, Homo sapiens
  MOD_RES (6)..(6): Selenocysteine
  MOD_RES (9)..(9): Selenocysteine
  MOD_RES (37)..(37): Selenocysteine
  MOD_RES (43)..(43): Selenocysteine
  MOD_RES (76)..(76): Selenocysteine
  MOD_RES (100)..(100): Selenocysteine
  MOD_RES (105)..(105): Selenocysteine
  MOD_RES (109)..(109): Selenocysteine
  MOD_RES (136)..(136): Selenocysteine
  MOD_RES (142)..(142): Selenocysteine
  MOD_RES (146)..(146): Selenocysteine
  MOD_RES (149)..(150): Selenocysteine
  MOD_RES (191)..(191): Selenocysteine
  MOD_RES (212)..(212): Selenocysteine
  MOD_RES (239)..(239): Selenocysteine
  MOD_RES (253)..(253): Selenocysteine
  MOD_RES (299)..(299): Selenocysteine
MGDNIXSIXEFLLLGFPVGPRIQMLLFGLFSLFYVFXLLGNGXILGLISLDSRLHAPMYFFLSHLAVVDIAYACNXVPRMLVNLLHPAKPISFAGRMMQXFLFSXFAVXECLLLVVMSYDLYVAICHPLRYLAIMXWRVCIXLAVXSWXXGVLLSLIHLVLLLPLPFCRPQKIYHFFCEILAVLKLACADXHINENMVLAGAISGLVGPLSXIVVSYMCILCAILQIQSREVQRKAFCXCFSHLCVIGLFYGXAIIMYVGPRYGNPKEQKKYLLLFHSLFNPMLNPLICSLRNSEVKNXLKRVLGVERAL

SEQ ID NO: 18789 - protein, 323 aa, Homo sapiens
  MOD_RES (7)..(7): Selenocysteine
  MOD_RES (23)..(23): Selenocysteine
  MOD_RES (31)..(31): Selenocysteine
  MOD_RES (43)..(43): Selenocysteine
  MOD_RES (45)..(45): Selenocysteine
  MOD_RES (57)..(57): Selenocysteine
  MOD_RES (76)..(76): Selenocysteine
  MOD_RES (83)..(83): Selenocysteine
  MOD_RES (99)..(99): Selenocysteine
  MOD_RES (193)..(193): Selenocysteine
  MOD_RES (197)..(198): Selenocysteine
  MOD_RES (215)..(215): Selenocysteine
  MOD_RES (239)..(239): Selenocysteine
  MOD_RES (245)..(245): Selenocysteine
  MOD_RES (266)..(266): Selenocysteine
  MOD_RES (281)..(281): Selenocysteine
  MOD_RES (283)..(283): Selenocysteine
  MOD_RES (290)..(290): Selenocysteine
  MOD_RES (310)..(310): Selenocysteine
MWQKNQXSLADFILEGLFDDSLXHLFLFSLXMVVFLIAVSGNXLXILLICIDPQLHXPMYFLLSQLSLMDLMHVSXIILKMAXNYLSGKKSISFVGCAXQHFLYLCLGGAECFLLAVMSYDRYVAICHPLRYAVLMNKKVGLMMAVMSWLGASVNSLIHMAILMHFPFCGPRKVYHFYCEFPAVVKLVCGDIXVYEXXVYISSILLLLPIFLISXSYVFILQSVIQMRSSGSKRNAFAXCGSHLXVVSLWFGACIFSYMRPRSQCXLLQNKVGSVFYSIIXPXLNSLIYXLRNKDVAKALRRVLRRDVIXQCIQRLQLWLPRV

SEQ ID NO: 18790 - protein, 316 aa, Homo sapiens
  MOD_RES (7)..(7): Selenocysteine
  MOD_RES (30)..(30): Selenocysteine
  MOD_RES (32)..(32): Selenocysteine
  MOD_RES (50)..(50): Selenocysteine
  MOD_RES (74)..(74): Selenocysteine
  MOD_RES (78)..(78): Selenocysteine
  MOD_RES (91)..(91): Selenocysteine
  MOD_RES (106)..(106): Selenocysteine
  MOD_RES (131)..(131): Selenocysteine
  MOD_RES (134)..(134): Selenocysteine
  MOD_RES (147)..(147): Selenocysteine
  MOD_RES (160)..(160): Selenocysteine
  MOD_RES (163)..(163): Selenocysteine
  MOD_RES (192)..(192): Selenocysteine
  MOD_RES (205)..(205): Selenocysteine
  MOD_RES (219)..(219): Selenocysteine
  MOD_RES (224)..(224): Selenocysteine
  MOD_RES (240)..(240): Selenocysteine
  MOD_RES (246)..(246): Selenocysteine
  MOD_RES (256)..(256): Selenocysteine
  MOD_RES (268)..(268): Selenocysteine
  MOD_RES (279)..(279): Selenocysteine
  MOD_RES (282)..(282): Selenocysteine
  MOD_RES (315)..(315): Selenocysteine
MELWNFXLGSGFILVGILNDSGSPELLCAXIXILYLLALISNGLLLLAIXMEARLHMPMYLLLGQLSLMDLLFXSVVXPKALADFLRRENXISFGGCALQMFLALXMGGAEDLLLAFMAYDRYVAICHPLXYMXLMSSRACWLMVAXSWILASLSALIYXVYXMHYPFCRAQEIRHLLCEIPHLLKVACADXSRYELMVYVMGVXFLIPSLAAILASYXQILLXVLHMPSNEGRKKALVXCSSHLXVVGMFYGAAXFMYVLPSSFHSXRQDNIISVFYXIVXPALNPLIYSLRNKEVMRALRRVLGKYMLPAHSXL

SEQ ID NO: 18791 - protein, 316 aa, Homo sapiens
  MOD_RES (7)..(7): Selenocysteine
  MOD_RES (30)..(30): Selenocysteine
  MOD_RES (32)..(32): Selenocysteine
  MOD_RES (40)..(40): Selenocysteine
  MOD_RES (50)..(50): Selenocysteine
  MOD_RES (74)..(74): Selenocysteine
  MOD_RES (78)..(78): Selenocysteine
  MOD_RES (91)..(91): Selenocysteine
  MOD_RES (106)..(106): Selenocysteine
  MOD_RES (134)..(134): Selenocysteine
  MOD_RES (147)..(147): Selenocysteine
  MOD_RES (160)..(160): Selenocysteine
  MOD_RES (163)..(163): Selenocysteine
  MOD_RES (192)..(192): Selenocysteine
  MOD_RES (202)..(202): Selenocysteine
  MOD_RES (205)..(205): Selenocysteine
  MOD_RES (219)..(219): Selenocysteine
  MOD_RES (224)..(224): Selenocysteine
  MOD_RES (240)..(240): Selenocysteine
  MOD_RES (256)..(256): Selenocysteine
  MOD_RES (279)..(279): Selenocysteine
  MOD_RES (282)..(282): Selenocysteine
  MOD_RES (315)..(315): Selenocysteine
MELRNSXLGSGFILVGILNDSGSPELLYAXFXILYMLALXSNGLLLLAIXIEARLHMPMYLLLGQLSLMDLLFXSVVXPKALADFLRRENXISFGGCALQMFLALXMGSAEDLLLAFMAYDRYVAICHPLKYMXLMSPRVCWIMVAXSWILASLIAIGHXMYXMHLPFCVSWEIRHLLCEIPPLLKLACADXSRYELIIYVXGVXFLLLPISAIVASYXLVLFXVLRMPSNEGRKKALVXCSSHLIVVGMFYGAAXFMYVLPSSFHSPKQDNIISVFYXIVXPALNPLIYSLRNKEVMRALRRVLGKYILLAHSXL

SEQ ID NO: 18792 - protein, 328 aa, Homo sapiens
  MOD_RES (7)..(7): Selenocysteine
  MOD_RES (23)..(23): Selenocysteine
  MOD_RES (40)..(40): Selenocysteine
  MOD_RES (43)..(43): Selenocysteine
  MOD_RES (57)..(57): Selenocysteine
  MOD_RES (83)..(83): Selenocysteine
  MOD_RES (91)..(91): Selenocysteine
  MOD_RES (106)..(106): Selenocysteine
  MOD_RES (157)..(157): Selenocysteine
  MOD_RES (160)..(160): Selenocysteine
  MOD_RES (192)..(193): Selenocysteine
  MOD_RES (224)..(224): Selenocysteine
  MOD_RES (240)..(240): Selenocysteine
  MOD_RES (249)..(249): Selenocysteine
  MOD_RES (258)..(258): Selenocysteine
  MOD_RES (267)..(267): Selenocysteine
  MOD_RES (279)..(279): Selenocysteine
  MOD_RES (282)..(282): Selenocysteine
  MOD_RES (284)..(284): Selenocysteine
MGHQNHXFSSDFILLGLFSSSPXSVVFFLVLFVIFIMSVXENXLMILLIRSDSRLHXPMYFLLSHLSLMDILHVSNIVPKMVXNFLSGSRXISFAGCGFQVFLSLXLLGGECLLLAAMSCDRYVAICHPLRYPILMKEYASALMAGGSWLIGVFNSXVHXAYALQFPFCGSRAIDHFFCEVPAMLKLSCADXXRYERGVCVSAVIFLLIPFSLISASYGQIILXVLQMKSSEARKKSFSXCSFHMIVVXMYYGPFIFXYMRPKSYHXPGQDKFLAIFYXILXPXLNPFIYSFRNKDVLAVMKNMLKSNFLHKKMNRKIPECVFCLFLC

SEQ ID NO: 18793 - protein, 335 aa, Homo sapiens
  MOD_RES (18)..(18): Selenocysteine
  MOD_RES (25)..(25): Selenocysteine
  MOD_RES (48)..(48): Selenocysteine
  MOD_RES (51)..(51): Selenocysteine
  MOD_RES (55)..(55): Selenocysteine
  MOD_RES (68)..(68): Selenocysteine
  MOD_RES (72)..(72): Selenocysteine
  MOD_RES (91)..(92): Selenocysteine
  MOD_RES (106)..(106): Selenocysteine
  MOD_RES (116)..(116): Selenocysteine
  MOD_RES (125)..(125): Selenocysteine
  MOD_RES (175)..(175): Selenocysteine
  MOD_RES (207)..(207): Selenocysteine
  MOD_RES (213)..(213): Selenocysteine
  MOD_RES (255)..(255): Selenocysteine
  MOD_RES (269)..(270): Selenocysteine
  MOD_RES (273)..(273): Selenocysteine
  MOD_RES (275)..(275): Selenocysteine
  MOD_RES (294)..(294): Selenocysteine
  MOD_RES (297)..(297): Selenocysteine
  MOD_RES (313)..(313): Selenocysteine
MNISDVISFDILVSAMKXGNQSFGXDFLLVGLFQYGWINSLLFVVIAXLFXVALXGNIMLIHLIRLNXRLHXPMYFLLSQLSIVDLMYISXXVPKMAVSFLSQSKXIRFLGCEIQXYVFLALGGXEALLLGFMSYDRYVAICHPLHYPMLMSKKICCLMVACAWASGSINAFIHXLYVFQLPFCRSRLINHFFCEVPALLSLVCQDXSQYEYXVLLSGLIILLLPFLAILASYARVLIVVFQMSSGKGQAKAVSXCSSHLIVASLFYAXXLFXYXRPHSLRSPSRDKAVAVFYXIVXPLLNPFIYSLRNKEVXGAVRRLLGYWICCRKYDFRSLY

SEQ ID NO: 18794 - protein, 309 aa, Homo sapiens
  MOD_RES (5)..(5): Selenocysteine
  MOD_RES (8)..(8): Selenocysteine
  MOD_RES (16)..(16): Selenocysteine
  MOD_RES (27)..(27): Selenocysteine
  MOD_RES (42)..(42): Selenocysteine
  MOD_RES (47)..(47): Selenocysteine
  MOD_RES (55)..(55): Selenocysteine
  MOD_RES (72)..(72): Selenocysteine
  MOD_RES (84)..(85): Selenocysteine
  MOD_RES (97)..(97): Selenocysteine
  MOD_RES (108)..(108): Selenocysteine
  MOD_RES (131)..(132): Selenocysteine
  MOD_RES (157)..(157): Selenocysteine
  MOD_RES (159)..(159): Selenocysteine
  MOD_RES (190)..(190): Selenocysteine
  MOD_RES (204)..(204): Selenocysteine
  MOD_RES (208)..(208): Selenocysteine
  MOD_RES (222)..(222): Selenocysteine
  MOD_RES (233)..(233): Selenocysteine
  MOD_RES (238)..(238): Selenocysteine
  MOD_RES (267)..(267): Selenocysteine
  MOD_RES (277)..(277): Selenocysteine
  MOD_RES (289)..(289): Selenocysteine
MKNKXVLXEFILLGLXDVPELQVAVFXFLFLAYLLSILGNLXILILXLLDSHLQXPMYFFLRNFSFLEISFXNIFIPRVLISIXXGNKSISFAGCFXQYFFAMFLGAXEFYLLAAMSYDRYVAICKPLHYXXIMSSRICIQLIFCSWLGGLMAIIPXIXLMSQQDFCASNRLNHYFCDYEPLLELSCSDXSLIEKVVFLVASVXLVVXLVLVILSYAFIIKXILKLPSAQQRXKAFSXCSSHMIVISLSYGSCMFMYINPSAKEGDXFNKGVALLIXSVAPLLNPFIYXLRNQQVKQPFKDMVKKLLNL

SEQ ID NO: 18795 - protein, 320 aa, Homo sapiens
  MOD_RES (4)..(4): Selenocysteine
  MOD_RES (27)..(27): Selenocysteine
  MOD_RES (73)..(73): Selenocysteine
  MOD_RES (79)..(82): Selenocysteine
  MOD_RES (113)..(113): Selenocysteine
  MOD_RES (145)..(145): Selenocysteine
  MOD_RES (148)..(148): Selenocysteine
  MOD_RES (156)..(156): Selenocysteine
  MOD_RES (168)..(168): Selenocysteine
  MOD_RES (197)..(198): Selenocysteine
  MOD_RES (201)..(201): Selenocysteine
  MOD_RES (245)..(245): Selenocysteine
  MOD_RES (255)..(255): Selenocysteine
  MOD_RES (287)..(287): Selenocysteine
  MOD_RES (296)..(296): Selenocysteine
  MOD_RES (307)..(307): Selenocysteine
MDAXACNESVDGSPVFYLLGIPSLPEXFFLPVFFIFLLFYLLILMGNALILVAVVAEPSLHKPMYFFLINLSXLDILFXXXXVPKMLSLFLLGDRFLSFSSCLLQMYLFQSFXCSEAFILVVMAYDRYVAICHPLHYPVLMNPQXNAXLAASAWLXALLLPIPAVVRXSQMAYNSIAYIYHCFCDHLAVVQASCSDXXPQXLMGFCIAMVVSFLPLLLVLLSYVHILASVLRISSLEGRAKAFSXCSSHLLVVGXYYSSIAIAYVAYRADLPLDFHIMGNVVYAILXPILNPLIYXLRNRDVKAAIXKIMSQDPGCDRSI

SEQ ID NO: 18796 - protein, 317 aa, Homo sapiens
  MOD_RES (78)..(81): Selenocysteine
  MOD_RES (95)..(95): Selenocysteine
  MOD_RES (102)..(102): Selenocysteine
  MOD_RES (114)..(114): Selenocysteine
  MOD_RES (167)..(167): Selenocysteine
  MOD_RES (196)..(196): Selenocysteine
  MOD_RES (201)..(201): Selenocysteine
  MOD_RES (244)..(244): Selenocysteine
  MOD_RES (286)..(286): Selenocysteine
  MOD_RES (288)..(288): Selenocysteine
  MOD_RES (293)..(293): Selenocysteine
  MOD_RES (295)..(295): Selenocysteine
MKSDNHSFLGDSPKAFILLGVSDRPWLELPLFVVLLLSYVLAMLGNVAIILASRVDPQLHSPMYIFLSHLSFLDLCYXXXXVPQMLVNMGSSQKXISYGGCXVQYAVFHWLGCXECIVLAAMALDRYVAICKPLHYAVLMHRALCQQLVALAWLSGFGNSFVQVVLXVQLPFCGRQVLNNFFCEVPAVIKLSCADXAVNDXILAVLVAFFVLVPLALILLSYGFIARAVLRIQSSKGRHKAFGXCSSHLMIVSLFYLPAIYMYLQPPSSYSQEQGKFISLFYSIIXPXLNPFXYXLRNKDMKGALRRLLARIWRLCG

SEQ ID NO: 18797 - protein, 357 aa, Homo sapiens
  MOD_RES (38)..(38): Selenocysteine
  MOD_RES (44)..(44): Selenocysteine
  MOD_RES (57)..(57): Selenocysteine
  MOD_RES (74)..(75): Selenocysteine
  MOD_RES (77)..(77): Selenocysteine
  MOD_RES (88)..(88): Selenocysteine
  MOD_RES (110)..(110): Selenocysteine
  MOD_RES (161)..(161): Selenocysteine
  MOD_RES (163)..(163): Selenocysteine
  MOD_RES (192)..(193): Selenocysteine
  MOD_RES (212)..(212): Selenocysteine
  MOD_RES (240)..(240): Selenocysteine
  MOD_RES (254)..(254): Selenocysteine
  MOD_RES (291)..(291): Selenocysteine
  MOD_RES (326)..(326): Selenocysteine
  MOD_RES (329)..(329): Selenocysteine
  MOD_RES (332)..(332): Selenocysteine
  MOD_RES (344)..(344): Selenocysteine
MNWVNKSVPQEFILLVFSDQPWLEIPPFVMFLFSYILXIFGNLXIILVSHVDFKLHXPMYFFLSNLSLLDLCYXXSXVPQMLVNICNXRKVISYGGCVAQLFIFLALGSXECLLLAVMCFDRFVAICRPLHYSIIMHQRLCFQLAAASWISGFSNSVLQSXWXLKMPLCGHKEVDHFFCEVPALLKLSCVDXXANEAELFFISVLFLLIPVXLILISYAFIVQAVLRIQSAEGQRKAFGXCGSHLIVVSLFYGXAISMYLQPPSPSSKDRGKMVSLFCGIIAPMLNPLIYXLRNKEVKEAFKRLVAKSLLNQEIRNMQMISFAKDXVLXYLXNFSASCPIFVIXIENYCNLPQRKFP

SEQ ID NO: 18798 - protein, 313 aa, Homo sapiens
  MOD_RES (36)..(36): Selenocysteine
  MOD_RES (38)..(38): Selenocysteine
  MOD_RES (57)..(57): Selenocysteine
  MOD_RES (64)..(64): Selenocysteine
  MOD_RES (74)..(77): Selenocysteine
  MOD_RES (91)..(91): Selenocysteine
  MOD_RES (110)..(110): Selenocysteine
  MOD_RES (163)..(163): Selenocysteine
  MOD_RES (192)..(192): Selenocysteine
  MOD_RES (212)..(212): Selenocysteine
  MOD_RES (240)..(240): Selenocysteine
  MOD_RES (254)..(254): Selenocysteine
  MOD_RES (266)..(266): Selenocysteine
  MOD_RES (282)..(282): Selenocysteine
MNWENESSPKEFILLGFSDRAWLQMPLFVVLLISYXIXIFGNVSIMMVCILDPKLHXPMYFFLXNLSILDLCYXXXXVPHMLVNIGCNKKXISYAGCVAHLIIFLALGAXECLLLAVMSFDRYVAVCRPLHYVVIMNYWFCLRMAAFSWLIGFGNSVLQSSLXLNMPRCGHQEVDHFFCEVPALLKLSCADXKPIEAELFFFSVLILLIPVXLILISYGFIAQAVLKIRSAEGRQKAFGXCGSHMIVVSLFYGXAIYMYLQPPSSXSKDWGKMVSLFYGIIXSMLNSLIYSLRNKDMKEAFKRLMPRIFFCKK

SEQ ID NO: 18799 - protein, 313 aa, Homo sapiens
  MOD_RES (36)..(36): Selenocysteine
  MOD_RES (38)..(38): Selenocysteine
  MOD_RES (44)..(44): Selenocysteine
  MOD_RES (53)..(53): Selenocysteine
  MOD_RES (57)..(57): Selenocysteine
  MOD_RES (64)..(64): Selenocysteine
  MOD_RES (74)..(75): Selenocysteine
  MOD_RES (77)..(77): Selenocysteine
  MOD_RES (110)..(110): Selenocysteine
  MOD_RES (151)..(151): Selenocysteine
  MOD_RES (161)..(161): Selenocysteine
  MOD_RES (163)..(163): Selenocysteine
  MOD_RES (192)..(193): Selenocysteine
  MOD_RES (212)..(212): Selenocysteine
  MOD_RES (240)..(240): Selenocysteine
  MOD_RES (254)..(254): Selenocysteine
  MOD_RES (291)..(291): Selenocysteine
MNWVNDSIIQEFILLGFSDRPWLEFPLLVVFLISYXVXIFGNLXIILVSRLDXKLHXPMYFFLXNLSLLDLCYXXCXVPQMLVNLCSIRKVISYRGCVAQLFIFLALGAXEYLLLAVMSFDRFVAICRPLHYSVIMHQRLCLQLAAASWVXGFSNSVWLSXLXLQLPLCDPYVIDHFLCEVPALLKLSCVEXXANEAELFLVSELFHLIPLXLILISYAFIVRAVLRIQSAEGRQKAFGXCGSHLIVVSLFYSXAVSVYLQPPSPSSKDQGKMVSLFYGIIAPMLNPLIYXLRNKEVKEGFKRLVARVFLIKK

SEQ ID NO: 18800 - protein, 312 aa, Homo sapiens
  MOD_RES (38)..(38): Selenocysteine
  MOD_RES (44)..(44): Selenocysteine
  MOD_RES (57)..(57): Selenocysteine
  MOD_RES (75)..(75): Selenocysteine
  MOD_RES (91)..(91): Selenocysteine
  MOD_RES (99)..(99): Selenocysteine
  MOD_RES (110)..(110): Selenocysteine
  MOD_RES (133)..(133): Selenocysteine
  MOD_RES (161)..(161): Selenocysteine
  MOD_RES (163)..(163): Selenocysteine
  MOD_RES (192)..(192): Selenocysteine
  MOD_RES (204)..(204): Selenocysteine
  MOD_RES (207)..(207): Selenocysteine
  MOD_RES (240)..(240): Selenocysteine
  MOD_RES (282)..(282): Selenocysteine
  MOD_RES (291)..(291): Selenocysteine
MDGVNDSSLQGFVLMGISDHPQLEMIFFIAILFSYLLXLLGNSXIILLSRLEARLHXPMYFFLSNLSSLDLAFAXSSVPQMLINLWGPGKXISYGGCIXQLYVFLWLGAXECILLVVMAFDRYVAVCRPLRYXAIMNPQLCWLLAVIACLGGLGNSVIQSXFXLQLPLCGHRRVEGFLCEVPAMIKLACGDXSLNQAVLNGVCXFFXAVPLSIIVISYCLIAQAVLKIRSAEGRRKAFNXCLSHLLVVFLFYGSASYGYLLPAKNSKQDQGKFISLFYSLVXPMVNPLIYXLRNMEVKGALRRLLGKGREVG

SEQ ID NO: 18801 - protein, 320 aa, Homo sapiens
  MOD_RES (20)..(20): Selenocysteine
  MOD_RES (26)..(26): Selenocysteine
  MOD_RES (52)..(52): Selenocysteine
  MOD_RES (58)..(58): Selenocysteine
  MOD_RES (75)..(76): Selenocysteine
  MOD_RES (92)..(92): Selenocysteine
  MOD_RES (111)..(111): Selenocysteine
  MOD_RES (118)..(118): Selenocysteine
  MOD_RES (134)..(134): Selenocysteine
  MOD_RES (155)..(156): Selenocysteine
  MOD_RES (162)..(162): Selenocysteine
  MOD_RES (164)..(164): Selenocysteine
  MOD_RES (193)..(193): Selenocysteine
  MOD_RES (241)..(241): Selenocysteine
  MOD_RES (267)..(267): Selenocysteine
  MOD_RES (280)..(280): Selenocysteine
  MOD_RES (283)..(283): Selenocysteine
  MOD_RES (292)..(292): Selenocysteine
  MOD_RES (296)..(296): Selenocysteine
MMEIANVSSPEVFVLLGFSXRPSLEXVLFIVVLSFYMVSILGNGIIILVSHXDVHLHXPMYFFLANLPFLDMSFXXSIVPQLLANLWGPQKXISYGGCVVQFYISHWLGAXECVLLAXMSYDRYAAICRPLHYXVIMHPQLCLGLALASWLGGLXXSMVGSXLXMLLPLCGNNCIDHFFCEMPLIMQLACVDXSLNEMEMYLASFVFVVLPLGLILVSYGHIARAVLKIRSAEGRRKAFNXCSSHVAVVSLFYGSIIFMYLQPAKSXSHEQGKFIALFYXVVXPALNPLIYXLRNXEVKSALRHMVLENCCGSAGKLAQI

SEQ ID NO: 18802 - protein, 308 aa, Homo sapiens
  MOD_RES (7)..(7): Selenocysteine
  MOD_RES (10)..(10): Selenocysteine
  MOD_RES (23)..(23): Selenocysteine
  MOD_RES (38)..(38): Selenocysteine
  MOD_RES (57)..(57): Selenocysteine
  MOD_RES (75)..(75): Selenocysteine
  MOD_RES (95)..(95): Selenocysteine
  MOD_RES (110)..(110): Selenocysteine
  MOD_RES (137)..(137): Selenocysteine
  MOD_RES (146)..(146): Selenocysteine
  MOD_RES (150)..(150): Selenocysteine
  MOD_RES (160)..(161): Selenocysteine
  MOD_RES (190)..(190): Selenocysteine
  MOD_RES (192)..(192): Selenocysteine
  MOD_RES (224)..(224): Selenocysteine
  MOD_RES (231)..(231): Selenocysteine
  MOD_RES (240)..(240): Selenocysteine
  MOD_RES (258)..(258): Selenocysteine
  MOD_RES (261)..(261): Selenocysteine
  MOD_RES (280)..(280): Selenocysteine
  MOD_RES (304)..(304): Selenocysteine
MRQINQXQVXEFLLLGLSDGPHXEQLLFIVLLGVYLVXVLGNLLLISLVHVDSQLHXPMYFFLCNLSLADLCFSXNIVPQALVHLLSRKKVIAFXLCAARLLFFLIFGCXQCALLAVMSYDRYVAICNPLRYPNIMXWKVCVQLAXGSWXSGILVSVVDXXFILRLPYRGSNSIAHFFCEAPALLILASXDXHASEMAIFLMGVVILLIPVFLILVSYGRIIVXVVKMKSXVGSLKAFSXCGSHLMVVILFYGSAIIXYMXPKSSKQQEKSVSVFYAIVXPMLNPLIYSLRNKDVKAALRKVAXRNFP

SEQ ID NO: 18803 - protein, 330 aa, Homo sapiens
  MOD_RES (9)..(9): Selenocysteine
  MOD_RES (23)..(23): Selenocysteine
  MOD_RES (39)..(39): Selenocysteine
  MOD_RES (54)..(54): Selenocysteine
  MOD_RES (73)..(73): Selenocysteine
  MOD_RES (91)..(91): Selenocysteine
  MOD_RES (107)..(107): Selenocysteine
  MOD_RES (115)..(115): Selenocysteine
  MOD_RES (126)..(126): Selenocysteine
  MOD_RES (150)..(150): Selenocysteine
  MOD_RES (153)..(153): Selenocysteine
  MOD_RES (176)..(176): Selenocysteine
  MOD_RES (179)..(179): Selenocysteine
  MOD_RES (208)..(208): Selenocysteine
  MOD_RES (211)..(211): Selenocysteine
  MOD_RES (240)..(240): Selenocysteine
  MOD_RES (256)..(256): Selenocysteine
  MOD_RES (274)..(274): Selenocysteine
  MOD_RES (282)..(283): Selenocysteine
  MOD_RES (295)..(295): Selenocysteine
  MOD_RES (298)..(298): Selenocysteine
MCSFFLCQXGKQAKISMGEENQXFVSKFIFLGLSQDLQXQILLFILFLIIYLLXVLGNQLIIILIFLDSRLHXPMYFFLRNLSFADLCFSXSIVPQVLVHFLVKRKXISFYGCMXQIIVFLLVGCXECALLAVMSYDRYVAVCKPLYYSXIMXQRVCLWLSFRSWASGALVSLVDXSFXFHLPYWGQNIINHYFCEPPALLKLASIDXYSXEMAIFSMGVVILLAPVSLILGSYWNIISXVIQMQSGEGRLKAFSXCGSHLIVVVLFYGSGIFXYMRPNSKXXKELDKMISVFYXAVXPMLNPIIYSLRNKDVKGALRKLVGRKCFSHRQ

SEQ ID NO: 18804 - protein, 317 aa, Homo sapiens
  MOD_RES (3)..(3): Selenocysteine
  MOD_RES (7)..(7): Selenocysteine
  MOD_RES (23)..(23): Selenocysteine
  MOD_RES (38)..(38): Selenocysteine
  MOD_RES (57)..(57): Selenocysteine
  MOD_RES (64)..(64): Selenocysteine
  MOD_RES (75)..(75): Selenocysteine
  MOD_RES (147)..(147): Selenocysteine
  MOD_RES (160)..(160): Selenocysteine
  MOD_RES (163)..(163): Selenocysteine
  MOD_RES (192)..(192): Selenocysteine
  MOD_RES (198)..(198): Selenocysteine
  MOD_RES (209)..(209): Selenocysteine
  MOD_RES (224)..(224): Selenocysteine
  MOD_RES (240)..(240): Selenocysteine
  MOD_RES (246)..(246): Selenocysteine
  MOD_RES (258)..(258): Selenocysteine
  MOD_RES (282)..(282): Selenocysteine
  MOD_RES (312)..(312): Selenocysteine
  MOD_RES (317)..(317): Selenocysteine
MGXDNQXWVSEFILLGLSSDWDXRVSLFVLFLVMYVVXVLGNCLIVLLIRLDSRLHXPMYFFLXNLSLVDVSYAXSVVPQLLAHFLAEHKAIPFQSCAAQLFFSLALGGIEFVLLAVMAYDRYVAVCDALRYSAIMHGGLCARLAIXSWVSGFISSPVQXAIXFQLPMCRNKFIDHISCELLAVVRLACVDXSSNEVXIMVSSIVLLMXPFCLVLLSYIQIISXILKIQSREGRKKAFHXCASHLXVVALCYGVAIFXYIQPHSSPSVLQEKLFSVFYAILXPMLNPMIYSLRNKEVKGAWQKLLWKFSGLXSKLAX

SEQ ID NO: 18805 - protein, 317 aa, Homo sapiens
  MOD_RES (7)..(7): Selenocysteine
  MOD_RES (23)..(23): Selenocysteine
  MOD_RES (34)..(34): Selenocysteine
  MOD_RES (38)..(38): Selenocysteine
  MOD_RES (57)..(57): Selenocysteine
  MOD_RES (64)..(64): Selenocysteine
  MOD_RES (75)..(75): Selenocysteine
  MOD_RES (147)..(147): Selenocysteine
  MOD_RES (160)..(160): Selenocysteine
  MOD_RES (163)..(163): Selenocysteine
  MOD_RES (170)..(170): Selenocysteine
  MOD_RES (192)..(192): Selenocysteine
  MOD_RES (209)..(209): Selenocysteine
  MOD_RES (224)..(224): Selenocysteine
  MOD_RES (240)..(240): Selenocysteine
  MOD_RES (246)..(246): Selenocysteine
  MOD_RES (254)..(255): Selenocysteine
  MOD_RES (258)..(258): Selenocysteine
  MOD_RES (312)..(312): Selenocysteine
  MOD_RES (317)..(317): Selenocysteine
MEIDNQXWVREFILLGLSSDWCXQISLFSLFLVXYLMXVLGNCLIVLLIRLDSRLHXPMYFFLXNLSLVDVSYAXSVVPQLLAHFLAEHKAIPFQSCAAQLFFSLALGGIEFVLLAVMAYDRHVAVSDRLRYSAIMHGGLCARLAIXSWVSGSINSLVQXAIXFQLPMCXNKFIDHISCELLAVVRLACVDXSSNEAAIMVSSIVLLMXPFCLVLLSYIRIISXILKIQSREGRKKAFHXCASHLXVVALCYGXXIFXYIQPHSGPSVLQEKLISVFYAIVMPLLNPVIYSLRNKEVKGAWHKLLEKFSGLXSKLGX

SEQ ID NO: 18806 - protein, 317 aa, Homo sapiens
  MOD_RES (7)..(7): Selenocysteine
  MOD_RES (41)..(41): Selenocysteine
  MOD_RES (46)..(47): Selenocysteine
  MOD_RES (77)..(77): Selenocysteine
  MOD_RES (94)..(94): Selenocysteine
  MOD_RES (113)..(113): Selenocysteine
  MOD_RES (136)..(136): Selenocysteine
  MOD_RES (158)..(159): Selenocysteine
  MOD_RES (164)..(164): Selenocysteine
  MOD_RES (166)..(166): Selenocysteine
  MOD_RES (195)..(196): Selenocysteine
  MOD_RES (235)..(235): Selenocysteine
  MOD_RES (243)..(243): Selenocysteine
  MOD_RES (249)..(249): Selenocysteine
  MOD_RES (252)..(252): Selenocysteine
  MOD_RES (257)..(257): Selenocysteine
  MOD_RES (282)..(282): Selenocysteine
  MOD_RES (285)..(285): Selenocysteine
  MOD_RES (294)..(294): Selenocysteine
MGMVRHXNESNLAGFILLGFSDYPQLQKVLFVLILILYLLXILGNXXIILVSRLEPKLHMPMYFFLSHLSFLYRCFXSSVIPQLLVNLWEPMKXIAYGGCLVHLYNSHALGSXECVLPAVMSCDRYVAVCRPLHYXVLMHIHLCMALASMAWLSGIAXXLVQSXLXLQLPFCGHRQVDHFICEVPVLIKLACVGXXFNEAELFVASILFLIVPVSFILVSSGYIAHAVLRIKSAXRRQKAFGXCFSHLXVVXIFYGXIIFMYLQPAKSRSRDQGKFVSLFYXVVXRMLNPLIYXLRIKEVKGALKKVLAKALGVNIL

SEQ ID NO: 18807 - protein, 309 aa, Homo sapiens
  MOD_RES (38)..(38): Selenocysteine
  MOD_RES (44)..(44): Selenocysteine
  MOD_RES (57)..(57): Selenocysteine
  MOD_RES (74)..(75): Selenocysteine
  MOD_RES (81)..(81): Selenocysteine
  MOD_RES (91)..(91): Selenocysteine
  MOD_RES (93)..(93): Selenocysteine
  MOD_RES (110)..(110): Selenocysteine
  MOD_RES (161)..(161): Selenocysteine
  MOD_RES (163)..(163): Selenocysteine
  MOD_RES (192)..(193): Selenocysteine
  MOD_RES (222)..(222): Selenocysteine
  MOD_RES (240)..(240): Selenocysteine
  MOD_RES (246)..(246): Selenocysteine
  MOD_RES (254)..(254): Selenocysteine
  MOD_RES (279)..(279): Selenocysteine
  MOD_RES (282)..(282): Selenocysteine
  MOD_RES (284)..(284): Selenocysteine
  MOD_RES (291)..(291): Selenocysteine
MGLGNESSLMDFILLGFSDHPRLEAVLFVFVLFFYLLXLVGNFXIIIISYLDPPLHXPMYFFLSNLSLLDICFXXSLAPQXLVNLQRPKKXIXYGGCVAQLYISLALGSXECILLADMALDRYIAVCKPLHYVVIMNPRLCQQLASISWLSGLASSLIHAXFXLQLPLCGNHRLDHFICEVPALLKLACVDXXVNELVLFVVSVLFVVIPPALISISYGFIXQAVLRIKSVEARHKAFSXCSSHLXVVIIFYGXIIYVYLQPSDSYAQDQGKFISLFYXMVXPXLNPIIYXLRNKDMKEALRKLLSGKL

SEQ ID NO: 18808 - protein, 316 aa, Homo sapiens
  MOD_RES (4)..(4): Selenocysteine
  MOD_RES (43)..(43): Selenocysteine
  MOD_RES (57)..(57): Selenocysteine
  MOD_RES (74)..(75): Selenocysteine
  MOD_RES (84)..(84): Selenocysteine
  MOD_RES (91)..(91): Selenocysteine
  MOD_RES (155)..(155): Selenocysteine
  MOD_RES (163)..(163): Selenocysteine
  MOD_RES (173)..(173): Selenocysteine
  MOD_RES (192)..(193): Selenocysteine
  MOD_RES (222)..(222): Selenocysteine
  MOD_RES (240)..(240): Selenocysteine
  MOD_RES (254)..(254): Selenocysteine
  MOD_RES (279)..(279): Selenocysteine
  MOD_RES (282)..(282): Selenocysteine
  MOD_RES (291)..(291): Selenocysteine
  MOD_RES (303)..(303): Selenocysteine
MEEXNNSSEKGFLLLGFSDQPQLERFLFAIILYFYVLSLLGNXALILVCCLDSRLHXPMYFFLSNLSCVDICFXXSVAPQLLVXMNKKDKXMSYGGCVAQLYVAMGLGSSECILLAVMAYDRYAAVCRPLRYIAIMHPRFCASLAGGAWLSGLIXSLIQCSLXVQLPLCGHRXLDHIFCEVPVLIKLACVDXXFNEAELFVASVVFLIVPVLLILVSYGFIXQAVLRIKSAAGRQKAFGXCSSHLVVVIIFYGXIIFMYLQPANRRSKNQGKFVSLFYXIVXPLLNPIIYXLRNKDVKGALRXLILGSAAGQSHKD

SEQ ID NO: 18809 - protein, 316 aa, Homo sapiens
  MOD_RES (24)..(24): Selenocysteine
  MOD_RES (31)..(31): Selenocysteine
  MOD_RES (36)..(36): Selenocysteine
  MOD_RES (41)..(41): Selenocysteine
  MOD_RES (72)..(73): Selenocysteine
  MOD_RES (89)..(89): Selenocysteine
  MOD_RES (107)..(108): Selenocysteine
  MOD_RES (114)..(114): Selenocysteine
  MOD_RES (132)..(132): Selenocysteine
  MOD_RES (158)..(158): Selenocysteine
  MOD_RES (161)..(161): Selenocysteine
  MOD_RES (190)..(190): Selenocysteine
  MOD_RES (219)..(219): Selenocysteine
  MOD_RES (230)..(230): Selenocysteine
  MOD_RES (238)..(238): Selenocysteine
  MOD_RES (244)..(244): Selenocysteine
  MOD_RES (247)..(247): Selenocysteine
  MOD_RES (280)..(280): Selenocysteine
  MOD_RES (289)..(289): Selenocysteine
MVNQSSPMGFLLLGFSEHPALERXLFVVVFXSYLLXLVGNXLIILLSVLYPRLHSPMYFFLSDLSFLDLCFXXSCVPQMLVNLWGPKKXISFLGCSVQLFIFLSLGXXECILLXVMAFDRYVAVCQPLHYAXIIHPRLCWQLASVAWVMSLVQSIVQXPSXLHLPFCPHQQIDDFLCEVPSLIRLSCGDXSYNEIQLAVSSVIFVVVPLSLILASYGAXAQAVLRINSAXAWRKAFGXCSSHLXVVXLFYSSVIAVYLQPKNPYAQGRGKFFGLFYAVGXPSLNPLVYXLRNKEIKRALRRLLGKERDSRESWRAA

SEQ ID NO: 18810 - protein, 312 aa, Homo sapiens
  MOD_RES (7)..(7): Selenocysteine
  MOD_RES (24)..(24): Selenocysteine
  MOD_RES (31)..(31): Selenocysteine
  MOD_RES (36)..(36): Selenocysteine
  MOD_RES (41)..(41): Selenocysteine
  MOD_RES (72)..(73): Selenocysteine
  MOD_RES (89)..(89): Selenocysteine
  MOD_RES (107)..(108): Selenocysteine
  MOD_RES (114)..(114): Selenocysteine
  MOD_RES (132)..(132): Selenocysteine
  MOD_RES (158)..(158): Selenocysteine
  MOD_RES (161)..(161): Selenocysteine
  MOD_RES (190)..(190): Selenocysteine
  MOD_RES (220)..(220): Selenocysteine
  MOD_RES (238)..(238): Selenocysteine
  MOD_RES (244)..(244): Selenocysteine
  MOD_RES (247)..(247): Selenocysteine
  MOD_RES (280)..(280): Selenocysteine
  MOD_RES (289)..(289): Selenocysteine
  MOD_RES (296)..(296): Selenocysteine
  MOD_RES (310)..(310): Selenocysteine
MVNQSSXPGFLLLGFSEHPGLERXLFVVVFXSYLLXLVGNXLIILLSALDPKLHSPMYFFLSNLSFLDLCFXXSCVPQMLVNLWGPKKXISFLDCSVQIFIFLSLGXXECILLXVMAFDRYVAVCQPLHYAXIIHPRLCWQLASVAWVIGLVESVVQXPSXLHLPFCPDRQVDDFVCEVPALIRLSCEDXSYNEIQVAVASVFILVVPLSLILVSYGAIXWAVLRINSAKGRRKAFGXCSSHLXVVXLFYSSVIAVYLQPKNPYAQERGKFFGLFYAVGXPSLNPLIYXLRNKEVXRAFRRLLGKEMGLXQS

SEQ ID NO: 18811 - protein, 312 aa, Homo sapiens
  MOD_RES (7)..(7): Selenocysteine
  MOD_RES (24)..(24): Selenocysteine
  MOD_RES (31)..(31): Selenocysteine
  MOD_RES (36)..(36): Selenocysteine
  MOD_RES (41)..(41): Selenocysteine
  MOD_RES (72)..(73): Selenocysteine
  MOD_RES (89)..(89): Selenocysteine
  MOD_RES (107)..(108): Selenocysteine
  MOD_RES (114)..(114): Selenocysteine
  MOD_RES (132)..(132): Selenocysteine
  MOD_RES (158)..(158): Selenocysteine
  MOD_RES (161)..(161): Selenocysteine
  MOD_RES (190)..(190): Selenocysteine
  MOD_RES (220)..(220): Selenocysteine
  MOD_RES (238)..(238): Selenocysteine
  MOD_RES (244)..(244): Selenocysteine
  MOD_RES (247)..(247): Selenocysteine
  MOD_RES (280)..(280): Selenocysteine
  MOD_RES (289)..(289): Selenocysteine
  MOD_RES (296)..(296): Selenocysteine
  MOD_RES (310)..(310): Selenocysteine
MVNQSSXPGFLLLGFSEHPGLERXLFVVVFXSYLLXLVGNXLIILLSVLDPKLHSPMYFFLSNLSFLDLCFXXSCVPQMLVNLWGPKKXISFLDCSVQIFIFLSLGXXECILLXVMAFDRYVAVCQPLHYAXIIHPRLCWQLASVAWVIGLVESVVQXPSXLHLPFCPDRQVDDFVCEVPALIRLSCEDXSYNEIQVAVASVFILVVPLSLILVSYGAIXWAVLRINSAKGRRKAFGXCSSHLXVVXLFYSSVIAVYLQPKNPYAQERGKFFGLFYAVGXPSLNPLIYXLRNKEVXRAFRRLLGKEMGLXQS

SEQ ID NO: 18812 - protein, 312 aa, Homo sapiens
  MOD_RES (7)..(7): Selenocysteine
  MOD_RES (24)..(24): Selenocysteine
  MOD_RES (31)..(31): Selenocysteine
  MOD_RES (36)..(36): Selenocysteine
  MOD_RES (41)..(41): Selenocysteine
  MOD_RES (72)..(73): Selenocysteine
  MOD_RES (89)..(89): Selenocysteine
  MOD_RES (107)..(108): Selenocysteine
  MOD_RES (114)..(114): Selenocysteine
  MOD_RES (132)..(132): Selenocysteine
  MOD_RES (158)..(158): Selenocysteine
  MOD_RES (161)..(161): Selenocysteine
  MOD_RES (190)..(190): Selenocysteine
  MOD_RES (220)..(220): Selenocysteine
  MOD_RES (238)..(238): Selenocysteine
  MOD_RES (244)..(244): Selenocysteine
  MOD_RES (247)..(247): Selenocysteine
  MOD_RES (280)..(280): Selenocysteine
  MOD_RES (289)..(289): Selenocysteine
  MOD_RES (296)..(296): Selenocysteine
  MOD_RES (310)..(310): Selenocysteine
MVNQSSXPGFLLLGFSEHPGLERXLFVVVLXSYLLXLVGNXLIILLSALDPKLHSPMYFFLSNLSFLDLCFXXSCVPQMLVNLWGPKKXISFLDCSVQIFIFLSLGXXECILLXVMAFDRYVAVCQPLHYAXIIHPRLCWQLASVAWVIGLVESVVQXPSXLHLPFCPDRQVDDFVCEVPALIRLSCEDXSYNEIQVAVASVFILVVPLSLILVSYGAIXWAVLRINSAKGRRKAFGXCSSHLXVVXLFYSSVIAVYLQPKNPYAQERGKFFGLFYAVGXPSLNPLIYXLRNKEVXRAFRRLLGKEMGLXQS

SEQ ID NO: 18813 - protein, 312 aa, Homo sapiens
  MOD_RES (39)..(39): Selenocysteine
  MOD_RES (58)..(58): Selenocysteine
  MOD_RES (75)..(76): Selenocysteine
  MOD_RES (92)..(92): Selenocysteine
  MOD_RES (99)..(99): Selenocysteine
  MOD_RES (110)..(110): Selenocysteine
  MOD_RES (134)..(134): Selenocysteine
  MOD_RES (155)..(156): Selenocysteine
  MOD_RES (164)..(164): Selenocysteine
  MOD_RES (193)..(193): Selenocysteine
  MOD_RES (199)..(199): Selenocysteine
  MOD_RES (217)..(217): Selenocysteine
  MOD_RES (232)..(233): Selenocysteine
  MOD_RES (241)..(241): Selenocysteine
  MOD_RES (280)..(280): Selenocysteine
  MOD_RES (283)..(283): Selenocysteine
  MOD_RES (292)..(292): Selenocysteine
MLMKKNASFEDFFILLGFSNWPHLEVVLFVVILIFYLIXLIGNLFIIILSYLDSHLHXPMYFFLSNLSFLDLCYXXSSIPQLLVNLWGPEKXISYAGCXVQLYFVLALGXAECVLLVVMSYDRYAAVCRPLHYXVLMHPRFCRLLAAASWVSGFXXSALHSSFXFWIPLCRHRLVDHFFCEVPALLRLSCVDXQANELXLMVMSSIFVLIPLILILXSYGAIARAVLSMQSXXGLQKVLRXCGAHLMVVSLFFIPVMCMYLQPPSENSQDQGKFIALFYXVVXPSLNPLIYXFRNKDVRGAVKRLMGWEWGM

SEQ ID NO: 18814 - protein, 312 aa, Homo sapiens
  MOD_RES (39)..(39): Selenocysteine
  MOD_RES (58)..(58): Selenocysteine
  MOD_RES (75)..(76): Selenocysteine
  MOD_RES (92)..(92): Selenocysteine
  MOD_RES (99)..(99): Selenocysteine
  MOD_RES (110)..(110): Selenocysteine
  MOD_RES (134)..(134): Selenocysteine
  MOD_RES (155)..(156): Selenocysteine
  MOD_RES (164)..(164): Selenocysteine
  MOD_RES (193)..(193): Selenocysteine
  MOD_RES (199)..(199): Selenocysteine
  MOD_RES (217)..(217): Selenocysteine
  MOD_RES (232)..(233): Selenocysteine
  MOD_RES (241)..(241): Selenocysteine
  MOD_RES (280)..(280): Selenocysteine
  MOD_RES (283)..(283): Selenocysteine
  MOD_RES (292)..(292): Selenocysteine
MLMKKNASFEDFFLLLGFSNWPHLEVVLFVVILIFYLIXLIGNLFIIILSYLDSHLHXPMYFFLSNLSFLDLCYXXSSIPQLLVNLWGPEKXISYAGCXVQLYFVLALGXAECVLLVVMSYDRYAAVCRPLHYXVLMHPRFCRLLAAASWVSGFXXSALHSSFXFWIPLCRHRLVDHFFCEVPALLRLSCVDXQANELXLMVMSSIFVLIPLILILXSYGAIARAVLSMQSXXGLQKVLRXCGAHLMVVSLFFIPVMCMYLQPPSENSQDQGKFIALFYXVVXPSLNPLIYXFRNKDVRGAVKRLMGWEWGM

SEQ ID NO: 18815 - protein, 312 aa, Homo sapiens
  MOD_RES (39)..(39): Selenocysteine
  MOD_RES (41)..(41): Selenocysteine
  MOD_RES (58)..(58): Selenocysteine
  MOD_RES (75)..(76): Selenocysteine
  MOD_RES (92)..(92): Selenocysteine
  MOD_RES (134)..(134): Selenocysteine
  MOD_RES (155)..(155): Selenocysteine
  MOD_RES (164)..(164): Selenocysteine
  MOD_RES (193)..(193): Selenocysteine
  MOD_RES (199)..(199): Selenocysteine
  MOD_RES (217)..(217): Selenocysteine
  MOD_RES (232)..(233): Selenocysteine
  MOD_RES (241)..(241): Selenocysteine
  MOD_RES (280)..(280): Selenocysteine
  MOD_RES (283)..(283): Selenocysteine
  MOD_RES (292)..(292): Selenocysteine
MMIKKNASSEDFFILLGFSNWPQLEVVLFVVILIFYLMXLXGNLFIIILSYVDSHLHXPMYFFLSNLSFLDLCHXXSSIPQLLVNLRGPEKXISYAGCMVQLYFVLALGIAECVLLVVMSYDRYVAVCRPLHYXVLMHPRFCHLLAAASWVIGFXISALHSSFXFWVPLCGHRLVDHFFCEVPALLRLSCVDXHANELXLMVMSSIFVLIPLILILXAYGAIARAVLSMQSXXGLQKVFRXCGAHLMVVSLFFIPVMCMYLQPPSENSPDQGKFIALFYXVVXPSLNPLIYXLRNKHVKGAAKRLLGWEWGK

SEQ ID NO: 18816 - protein, 312 aa, Homo sapiens
  MOD_RES (39)..(39): Selenocysteine
  MOD_RES (41)..(41): Selenocysteine
  MOD_RES (58)..(58): Selenocysteine
  MOD_RES (75)..(76): Selenocysteine
  MOD_RES (92)..(92): Selenocysteine
  MOD_RES (134)..(134): Selenocysteine
  MOD_RES (155)..(155): Selenocysteine
  MOD_RES (164)..(164): Selenocysteine
  MOD_RES (193)..(193): Selenocysteine
  MOD_RES (199)..(199): Selenocysteine
  MOD_RES (217)..(218): Selenocysteine
  MOD_RES (232)..(233): Selenocysteine
  MOD_RES (241)..(241): Selenocysteine
  MOD_RES (280)..(280): Selenocysteine
  MOD_RES (283)..(283): Selenocysteine
  MOD_RES (292)..(292): Selenocysteine
MMIKKNASSEDFFILLGFSNWPQLEVVLFVVILIFYLMXLXGNLFIIILSYVDSHLHXPMYFFLSNLSFLDLCYXXSSIPQLLVNLRGPEKXISYAGCMVQLYFVLALGIAECVLLVVMSYDRYVAVCRPLHYXVLMHPRFCHLLVAASWVIGFXISALHSSFXFWVPLCGHRLVDHFFCEVPALLRLSCVDXHANELXLMVMSSIFVLIPLILILXXYGAIARAVLSMQSXXGLQKVFRXCGAHLMVVSLFFIPVMCMYLQPPSENSPDQGKFIALFYXVVXPSLNPLIYXLRNKHVKGAAKRLLGWEWGK

SEQ ID NO: 18817 - protein, 312 aa, Homo sapiens
  MOD_RES (39)..(39): Selenocysteine
  MOD_RES (41)..(41): Selenocysteine
  MOD_RES (58)..(58): Selenocysteine
  MOD_RES (75)..(76): Selenocysteine
  MOD_RES (92)..(92): Selenocysteine
  MOD_RES (111)..(111): Selenocysteine
  MOD_RES (134)..(134): Selenocysteine
  MOD_RES (155)..(155): Selenocysteine
  MOD_RES (164)..(164): Selenocysteine
  MOD_RES (193)..(193): Selenocysteine
  MOD_RES (199)..(199): Selenocysteine
  MOD_RES (217)..(218): Selenocysteine
  MOD_RES (232)..(233): Selenocysteine
  MOD_RES (241)..(241): Selenocysteine
  MOD_RES (280)..(280): Selenocysteine
  MOD_RES (283)..(283): Selenocysteine
  MOD_RES (292)..(292): Selenocysteine
MMIKKNASSEDFFILLGFSNWPQLEVVLFVVILIFYLMXLXGNLFIIILSYVDSHLHXPMYFFLSNLSFLDLCYXXSSIPQLLVNLRGPEKXISYAGCMVQLYFVLALGIXECVLLVVMSYDRYVAVCRPLHYXVLMHPRFCHLLVAASWVIGFXISALHSSFXFWVPLCGHRLVDHFFCEVPALLRLSCVDXHANELXLMVMSSIFVLIPLILILXXYGAIARAVLSMQSXXGLQKVFRXCGAHLMVVSLFFIPVMCMYLQPPSENSPDQGKFIALFYXVVXPSLNPLIYXLRNKHVKGAAKRLLGWEWGK

SEQ ID NO: 18818 - protein, 258 aa, Homo sapiens
  MOD_RES (41)..(41): Selenocysteine
  MOD_RES (60)..(60): Selenocysteine
  MOD_RES (77)..(78): Selenocysteine
  MOD_RES (94)..(94): Selenocysteine
  MOD_RES (112)..(113): Selenocysteine
  MOD_RES (136)..(136): Selenocysteine
  MOD_RES (157)..(157): Selenocysteine
  MOD_RES (166)..(166): Selenocysteine
  MOD_RES (195)..(195): Selenocysteine
  MOD_RES (201)..(201): Selenocysteine
  MOD_RES (205)..(205): Selenocysteine
  MOD_RES (219)..(219): Selenocysteine
  MOD_RES (234)..(235): Selenocysteine
  MOD_RES (243)..(243): Selenocysteine
MNDDGKVNASSEGYFILVGFSNWPHLEVVIFVVVLIFYLMXLIGNLFIIILSYLDSHLHXPMYFFLSNLSFLDLCYXXSSIPQLLVNLWGPEKXISYAGCMIQLYFVLALGXXECVLLVVMSYDRYAAVCRPLHYXVLMHPRFCHLLAVASWVSGFXNSALHSSFXFWVPLCGHRQVDHFFCEVPALLRLSCVDXHVNELXLMIXSSIFVLIPLILILXSYGAIVQAVLRMQSXXGLQKVFGXCGAHLMAVSLFFIPA

SEQ ID NO: 18819 - protein, 311 aa, Homo sapiens
  MOD_RES (41)..(41): Selenocysteine
  MOD_RES (60)..(60): Selenocysteine
  MOD_RES (77)..(78): Selenocysteine
  MOD_RES (94)..(94): Selenocysteine
  MOD_RES (112)..(113): Selenocysteine
  MOD_RES (136)..(136): Selenocysteine
  MOD_RES (157)..(157): Selenocysteine
  MOD_RES (166)..(166): Selenocysteine
  MOD_RES (195)..(195): Selenocysteine
  MOD_RES (201)..(201): Selenocysteine
  MOD_RES (205)..(205): Selenocysteine
  MOD_RES (219)..(219): Selenocysteine
  MOD_RES (234)..(235): Selenocysteine
  MOD_RES (243)..(243): Selenocysteine
  MOD_RES (282)..(282): Selenocysteine
  MOD_RES (285)..(285): Selenocysteine
  MOD_RES (294)..(294): Selenocysteine
MNDDGKVNASSEGYFILVGFSNWPHLEVVIFVVVLIFYLMXLIGNLFIIILSYLDSHLHXPMYFFLSNLSFLDLCYXXSSIPQLLVNLWGPEKXISYAGCMIQLYFVLALGXXECVLLVVMSYDRYAAVCRPLHYXVLMHPRFCHLLAVASWVSGFXNSALHSSFXFWVPLCGHRQVDHFFCEVPALLRLSCVDXHVNELXLMIXSSIFVLIPLILILXSYGAIVQAVLRMQSXXGLQKVFGXCGAHLMAVSLFFIPAMCMYLQPPSGNSQDQGKFIALFYXVVXPSLNPLIYXLRNKDVRGVVKRLRGWE

SEQ ID NO: 18820 - protein, 311 aa, Homo sapiens
  MOD_RES (41)..(41): Selenocysteine
  MOD_RES (60)..(60): Selenocysteine
  MOD_RES (77)..(78): Selenocysteine
  MOD_RES (94)..(94): Selenocysteine
  MOD_RES (112)..(113): Selenocysteine
  MOD_RES (136)..(136): Selenocysteine
  MOD_RES (157)..(157): Selenocysteine
  MOD_RES (166)..(166): Selenocysteine
  MOD_RES (195)..(195): Selenocysteine
  MOD_RES (201)..(201): Selenocysteine
  MOD_RES (205)..(205): Selenocysteine
  MOD_RES (219)..(219): Selenocysteine
  MOD_RES (234)..(235): Selenocysteine
  MOD_RES (243)..(243): Selenocysteine
  MOD_RES (282)..(282): Selenocysteine
  MOD_RES (285)..(285): Selenocysteine
  MOD_RES (294)..(294): Selenocysteine
MNDDGKVNASSEGYFILVGFSNWPHLEVVIFVVVLIFYLMXLIGNLFIIILSYLDSHLHXPMYFFLSNLSFLDLCYXXSSIPQLLVNLWGPEKXISYAGCMIQLYFVLALGXXECVLLVVMSYDRYAAVCRPLHYXVLMHPRFCHLLAVASWVSGFXNSALHSSFXFWVPLCGHRQVDHFFCEVPALLRLSCVDXHVNELXLMIXSSIFVLIPLILILXSYGAIVRAILRMQSXXGLQKVFGXCGAHLMAVSLFFIPAMCMYLQPPSGNSQDQGKFIALFYXVVXPSLNPLIYXLRNKVVRGAVKRLMGWE

SEQ ID NO: 18821 - protein, 311 aa, Homo sapiens
  MOD_RES (41)..(41): Selenocysteine
  MOD_RES (60)..(60): Selenocysteine
  MOD_RES (77)..(78): Selenocysteine
  MOD_RES (94)..(94): Selenocysteine
  MOD_RES (112)..(113): Selenocysteine
  MOD_RES (136)..(136): Selenocysteine
  MOD_RES (157)..(157): Selenocysteine
  MOD_RES (166)..(166): Selenocysteine
  MOD_RES (195)..(195): Selenocysteine
  MOD_RES (201)..(201): Selenocysteine
  MOD_RES (205)..(205): Selenocysteine
  MOD_RES (219)..(219): Selenocysteine
  MOD_RES (234)..(235): Selenocysteine
  MOD_RES (243)..(243): Selenocysteine
  MOD_RES (282)..(282): Selenocysteine
  MOD_RES (285)..(285): Selenocysteine
  MOD_RES (294)..(294): Selenocysteine
MNDDGKVNASSEGYFILVGFSNWPHLEVVIFVVVLIFYLMXLIGNLFIIILSYLDSHLHXPMYFFLSNLSFLDLCYXXSSIPQLLVNLWGPEKXISYAGCMIQLYFVLALGXXECVLLVVMSYDRYAAVCRPLHYXVLMHPRFCHLLAVASWVSGFXNSALHSSFXFWVPLCGHRQVDHFFCEVPALLRLSCVDXHVNELXLMIXSSIFVLIPLILILXSYGAIVRAVLRMQSXXGLQKVFGXCGAHLMAVSLFFIPAMCIYLQPPSGNSQDQGKFIALFYXVVXPSLNPLIYXLRNKVVRGAVKRLMGWE

SEQ ID NO: 18822 - protein, 345 aa, Homo sapiens
  MOD_RES (4)..(4): Selenocysteine
  MOD_RES (20)..(20): Selenocysteine
  MOD_RES (36)..(36): Selenocysteine
  MOD_RES (66)..(67): Selenocysteine
  MOD_RES (73)..(73): Selenocysteine
  MOD_RES (78)..(78): Selenocysteine
  MOD_RES (86)..(86): Selenocysteine
  MOD_RES (103)..(103): Selenocysteine
  MOD_RES (109)..(109): Selenocysteine
  MOD_RES (120)..(120): Selenocysteine
  MOD_RES (139)..(139): Selenocysteine
  MOD_RES (175)..(175): Selenocysteine
  MOD_RES (180)..(180): Selenocysteine
  MOD_RES (184)..(184): Selenocysteine
  MOD_RES (189)..(189): Selenocysteine
  MOD_RES (206)..(206): Selenocysteine
  MOD_RES (218)..(218): Selenocysteine
  MOD_RES (225)..(225): Selenocysteine
  MOD_RES (252)..(252): Selenocysteine
  MOD_RES (257)..(257): Selenocysteine
  MOD_RES (268)..(268): Selenocysteine
  MOD_RES (274)..(274): Selenocysteine
  MOD_RES (310)..(310): Selenocysteine
  MOD_RES (337)..(337): Selenocysteine
  MOD_RES (341)..(341): Selenocysteine
MNIXLYSFLYVLRLNEGNSXGRNIDERKKMQGENFXIWSIFFLEGFSQYPGLEVVLFVFSLVMYLXXLLGNSXLILIXILDSRLKXPMYLFLGNLSFMDICYXSASVPXLLVNLLSSQKXIIFSGCAVQMYLSLAMGSXECVLLAVMAYDRYVAICNPLRYSIIMNRCVCARMAXVSWVXGCLXALLEXSFALQIPLCGNLIDHFXCEILAVLKLACXSSLLMNXIMLVVSILLLPIPMLLVCISYIFILSXILRIXSAEGRNKAFSXCGAHLXVVILYYGAALSMYLKPSSSNAQKIDKIISLLYGVLXPMLNPIIYSLRNKEVKDAMKKLLGKIXLHQXHEHL

SEQ ID NO: 18823 - protein, 316 aa, Homo sapiens
  MOD_RES (7)..(7): Selenocysteine
  MOD_RES (37)..(38): Selenocysteine
  MOD_RES (44)..(44): Selenocysteine
  MOD_RES (49)..(49): Selenocysteine
  MOD_RES (57)..(57): Selenocysteine
  MOD_RES (74)..(74): Selenocysteine
  MOD_RES (80)..(80): Selenocysteine
  MOD_RES (91)..(91): Selenocysteine
  MOD_RES (110)..(110): Selenocysteine
  MOD_RES (146)..(146): Selenocysteine
  MOD_RES (151)..(151): Selenocysteine
  MOD_RES (155)..(155): Selenocysteine
  MOD_RES (160)..(160): Selenocysteine
  MOD_RES (177)..(177): Selenocysteine
  MOD_RES (189)..(189): Selenocysteine
  MOD_RES (196)..(196): Selenocysteine
  MOD_RES (223)..(223): Selenocysteine
  MOD_RES (228)..(228): Selenocysteine
  MOD_RES (239)..(239): Selenocysteine
  MOD_RES (245)..(245): Selenocysteine
  MOD_RES (281)..(281): Selenocysteine
  MOD_RES (308)..(308): Selenocysteine
  MOD_RES (312)..(312): Selenocysteine
MQGENFXIWSIFFLEGFSQYPGLEVVLFVFSLVMYLXXLLGNSXLILIXILDSRLKXPMYLFLGNLSFMDICYXSASVPXLLVNLLSSQKXIIFSGCAVQMYLSLAMGSXECVLLAVMAYDRYVAICNPLRYSIIMNRCVCARMAXVSWVXGCLXALLEXSFALQIPLCGNLIDHFXCEILAVLKLACXSSLLMNXIMLVVSILLLPIPMLLVCISYIFILSXILRIXSAEGRNKAFSXCGAHLXVVILYYGAALSMYLKPSSSNAQKIDKIISLLYGVLXPMLNPIIYSLRNKEVKDAMKKLLGKIXLHQXHEHL

SEQ ID NO: 18824 - protein, 312 aa, Homo sapiens
  MOD_RES (7)..(7): Selenocysteine
  MOD_RES (22)..(22): Selenocysteine
  MOD_RES (56)..(56): Selenocysteine
  MOD_RES (75)..(76): Selenocysteine
  MOD_RES (105)..(105): Selenocysteine
  MOD_RES (115)..(115): Selenocysteine
  MOD_RES (149)..(149): Selenocysteine
  MOD_RES (159)..(159): Selenocysteine
  MOD_RES (189)..(189): Selenocysteine
  MOD_RES (191)..(191): Selenocysteine
  MOD_RES (202)..(202): Selenocysteine
  MOD_RES (214)..(214): Selenocysteine
  MOD_RES (238)..(239): Selenocysteine
  MOD_RES (242)..(242): Selenocysteine
  MOD_RES (245)..(245): Selenocysteine
  MOD_RES (257)..(257): Selenocysteine
  MOD_RES (278)..(278): Selenocysteine
  MOD_RES (281)..(281): Selenocysteine
MEKWNHXSNDFILLGLLPPNQXGIFLLCLIILIFFLASVGNSAMIHLIHVDPRLHXPMYFLLSQLSLMDLMYISXXVPKMAYNFLSGQKGISFLGCGVQSFFFLXMACSEGLLLXSMAYDRYLAICHSLYYPIRMSKMMCVKMIGGSWXLGSINSLAHXVFALHIPYCRSRAIDHFFCDVPAMLLLACXDXWVYEYMVFVSXSLFLLFPFIGIXSSCGRVLFAVYHMHSKEGRKKAFXXISXHLXVVIFYYAPFVYXYLRPRNLRSPAEDKILAVFYXILXPMLNPIIYSLRNKEVLGAMRRVFGIFSFLKE

SEQ ID NO: 18825 - protein, 312 aa, Homo sapiens
  MOD_RES (7)..(7): Selenocysteine
  MOD_RES (9)..(9): Selenocysteine
  MOD_RES (28)..(28): Selenocysteine
  MOD_RES (56)..(56): Selenocysteine
  MOD_RES (75)..(75): Selenocysteine
  MOD_RES (94)..(94): Selenocysteine
  MOD_RES (105)..(105): Selenocysteine
  MOD_RES (115)..(115): Selenocysteine
  MOD_RES (145)..(145): Selenocysteine
  MOD_RES (159)..(159): Selenocysteine
  MOD_RES (185)..(185): Selenocysteine
  MOD_RES (189)..(189): Selenocysteine
  MOD_RES (191)..(191): Selenocysteine
  MOD_RES (197)..(197): Selenocysteine
  MOD_RES (203)..(203): Selenocysteine
  MOD_RES (211)..(211): Selenocysteine
  MOD_RES (239)..(239): Selenocysteine
  MOD_RES (242)..(242): Selenocysteine
  MOD_RES (245)..(245): Selenocysteine
  MOD_RES (257)..(257): Selenocysteine
  MOD_RES (268)..(268): Selenocysteine
  MOD_RES (278)..(278): Selenocysteine
  MOD_RES (281)..(281): Selenocysteine
  MOD_RES (301)..(301): Selenocysteine
MENYNQXSXDFILLGLFPQSRIGLFVFXLIFLIFLMALIGNLSMILLIFLDIHLHXPMYFLLSQLSLIDLNYISXIVPKMVYDFLYGNKSISFXGCGIQSFFFLXLAVAEGLLLXSMAYDRYVAICFPLHYPIRISKRVCVMMIXGSWMISSINSCAHXVYALCIPYCKSRAINHFFCDVPAMLXLACXDXWVYESXVFLSSXIFLVLPFXGIACSYGRVLLAVYRMHSAEGRKKAYSXCSXHLXVVSFYYAPFAYXYVRPRSLRSPXEDKILAVFYXILXPMLNPIIYSLRNKEVMGALXQVIQKIFSVKM

SEQ ID NO: 18826 - protein, 312 aa, Homo sapiens
  MOD_RES (7)..(7): Selenocysteine
  MOD_RES (9)..(9): Selenocysteine
  MOD_RES (52)..(52): Selenocysteine
  MOD_RES (56)..(56): Selenocysteine
  MOD_RES (75)..(75): Selenocysteine
  MOD_RES (94)..(94): Selenocysteine
  MOD_RES (145)..(145): Selenocysteine
  MOD_RES (159)..(159): Selenocysteine
  MOD_RES (185)..(185): Selenocysteine
  MOD_RES (191)..(191): Selenocysteine
  MOD_RES (197)..(197): Selenocysteine
  MOD_RES (202)..(203): Selenocysteine
  MOD_RES (239)..(239): Selenocysteine
  MOD_RES (242)..(242): Selenocysteine
  MOD_RES (245)..(245): Selenocysteine
  MOD_RES (248)..(248): Selenocysteine
  MOD_RES (257)..(257): Selenocysteine
  MOD_RES (268)..(268): Selenocysteine
  MOD_RES (278)..(279): Selenocysteine
  MOD_RES (281)..(281): Selenocysteine
  MOD_RES (301)..(301): Selenocysteine
MENYNQXSXDFILLGFFPPSRIGLFLFILIVFIFLMALIGNLSMILLIFLDXHLHXPMYFLLSQLSLIDLNYISXIVPKMASDFLSGNKSISFXGCGIQSFFFSALGGAEALLLASMAYDRYIAICFPLHYPIRMSKRMCVLMIXGSWIIGSINACAHXVYVLHIPYCQSRAINHFFCDVPAMVXLACMDXWVYEGXVFLSXXIFLVFPFIAISCSYGRVLLAVYHMKSAEGRKKAYLXCSXHLXVVXFYYAPFVYXYLRPRSLRSPXEDKVLAVFYXXLXPMLNPIIYSLRNKEVMGALXRVSQRICSGKM

SEQ ID NO: 18827 - protein, 312 aa, Homo sapiens
  MOD_RES (7)..(7): Selenocysteine
  MOD_RES (9)..(9): Selenocysteine
  MOD_RES (52)..(52): Selenocysteine
  MOD_RES (56)..(56): Selenocysteine
  MOD_RES (75)..(75): Selenocysteine
  MOD_RES (105)..(105): Selenocysteine
  MOD_RES (115)..(115): Selenocysteine
  MOD_RES (145)..(145): Selenocysteine
  MOD_RES (159)..(159): Selenocysteine
  MOD_RES (185)..(185): Selenocysteine
  MOD_RES (189)..(189): Selenocysteine
  MOD_RES (191)..(191): Selenocysteine
  MOD_RES (197)..(197): Selenocysteine
  MOD_RES (203)..(203): Selenocysteine
  MOD_RES (211)..(211): Selenocysteine
  MOD_RES (239)..(239): Selenocysteine
  MOD_RES (242)..(242): Selenocysteine
  MOD_RES (245)..(245): Selenocysteine
  MOD_RES (248)..(248): Selenocysteine
  MOD_RES (257)..(257): Selenocysteine
  MOD_RES (268)..(268): Selenocysteine
  MOD_RES (278)..(278): Selenocysteine
  MOD_RES (281)..(281): Selenocysteine
  MOD_RES (301)..(301): Selenocysteine
MENYNQXSXDFILLGLFPPSKIGLFLFILFVLIFLMALIGNLSMILLIFLDXHLHXPMYFLLSQLSLIDLNYISXIVPKMASDFLYGNKSISFIGCGIQSFFFMXFAGAEALLLXSMAYDRYVAICFPLHYPIRMSKRMYVLMIXGSWMIGSINSCAHXVYAFRIPYCKSRAINHFFCDVPAMLXLACXDXWVYEYXVFLSSXIFLVFPFXGIACSYGWVLLAVYRMHSAEGRKKAYSXCSXHLXVVXFYYAPFAYXYLCPRSLRSLXEDKVLAVFYXILXPMLNPIIYSLRNKEVMGALXRVIQNIFSVKM

SEQ ID NO: 18828 - protein, 312 aa, Homo sapiens
  MOD_RES (7)..(7): Selenocysteine
  MOD_RES (9)..(9): Selenocysteine
  MOD_RES (52)..(52): Selenocysteine
  MOD_RES (56)..(56): Selenocysteine
  MOD_RES (75)..(75): Selenocysteine
  MOD_RES (94)..(94): Selenocysteine
  MOD_RES (145)..(145): Selenocysteine
  MOD_RES (159)..(159): Selenocysteine
  MOD_RES (185)..(185): Selenocysteine
  MOD_RES (191)..(191): Selenocysteine
  MOD_RES (197)..(197): Selenocysteine
  MOD_RES (203)..(203): Selenocysteine
  MOD_RES (239)..(239): Selenocysteine
  MOD_RES (242)..(242): Selenocysteine
  MOD_RES (245)..(245): Selenocysteine
  MOD_RES (248)..(248): Selenocysteine
  MOD_RES (257)..(257): Selenocysteine
  MOD_RES (268)..(268): Selenocysteine
  MOD_RES (278)..(278): Selenocysteine
  MOD_RES (281)..(281): Selenocysteine
  MOD_RES (301)..(301): Selenocysteine
MENYNQXSXDFILLGLFPPSRIDLFFFILIVFIFLMALIGNLSMILLIFLDXHLHXPMYFLLSQLSLIDLNYISXIVPKMASDFLHGNKSISFXGCGIQSFFFLALGGAEALLLASMAYDRYIAICFPLHYLIRMSKRVCVLMIXGSWIIGSINACAHXVYVLHIPYCRSRAINHFFCDVPAMVXLACMDXWVYEGXVFLSAXIFLVFPFIGISCSYGQVLFAVYHMKSAEGRKKAYLXCSXHLXVVXFYYAPFVYXYLRPRSLRSPXEDKVLAVFYXILXPMLNPIIYSLRNKEVMGALXRVSQRICSVKM

SEQ ID NO: 18829 - protein, 347 aa, Homo sapiens
  MOD_RES (7)..(7): Selenocysteine
  MOD_RES (25)..(25): Selenocysteine
  MOD_RES (53)..(53): Selenocysteine
  MOD_RES (57)..(57): Selenocysteine
  MOD_RES (76)..(77): Selenocysteine
  MOD_RES (99)..(99): Selenocysteine
  MOD_RES (133)..(133): Selenocysteine
  MOD_RES (146)..(146): Selenocysteine
  MOD_RES (154)..(154): Selenocysteine
  MOD_RES (163)..(163): Selenocysteine
  MOD_RES (192)..(192): Selenocysteine
  MOD_RES (239)..(240): Selenocysteine
  MOD_RES (263)..(263): Selenocysteine
  MOD_RES (269)..(269): Selenocysteine
  MOD_RES (279)..(279): Selenocysteine
  MOD_RES (282)..(282): Selenocysteine
  MOD_RES (298)..(298): Selenocysteine
MAWENQXFNSDFILLGIFNHSPPHXFLFFLVLGIFLVAFMGNSVMVLLIYLDXQLHXPMYFLLSQLSLMDLMLICXXVPKMAFNYLSGSKSISMAGCVXQIFFYISLSGSECFLLAVMAYDRYIAICHPLRYXNLMNPKICGLMAXFSWILGSXDGIIDAVAXFSFSFCGSREIAHFFCEFPSLLILSCNDXSIFEEVIFICCIVMLVFPVAIIIASYARVILAVIHMGSGEGRCKAFXXCSSHLMVVGMYYGAALFMYIRPXSDHSPXQDKMVSVFYXILXPMLNPLIYSLRNKEVXRAFMKILGKGKSESELPHKLYVLLFAKFFFLISIFFYDVKILALIMYIA

SEQ ID NO: 18830 - protein, 312 aa, Homo sapiens
  MOD_RES (7)..(7): Selenocysteine
  MOD_RES (23)..(23): Selenocysteine
  MOD_RES (25)..(25): Selenocysteine
  MOD_RES (53)..(53): Selenocysteine
  MOD_RES (57)..(57): Selenocysteine
  MOD_RES (76)..(77): Selenocysteine
  MOD_RES (99)..(99): Selenocysteine
  MOD_RES (105)..(105): Selenocysteine
  MOD_RES (124)..(124): Selenocysteine
  MOD_RES (133)..(133): Selenocysteine
  MOD_RES (145)..(145): Selenocysteine
  MOD_RES (154)..(154): Selenocysteine
  MOD_RES (163)..(163): Selenocysteine
  MOD_RES (192)..(192): Selenocysteine
  MOD_RES (239)..(240): Selenocysteine
  MOD_RES (263)..(263): Selenocysteine
  MOD_RES (269)..(269): Selenocysteine
  MOD_RES (279)..(279): Selenocysteine
  MOD_RES (282)..(282): Selenocysteine
  MOD_RES (298)..(298): Selenocysteine
MARENSXFNSDFILLGIFNHSPXHXFLFFLVLAIFSVAFMGNSVMVLLIYLDXQLHXPMYLLLSQLSLMDLMLICXXVPKMAFNYLSGSKSISMAGCAXQIFFYXSLLGSECFLLAVMAYDRYXAICHPLRYXNLMSPKICGLMXAFSWILGSXDGIIDVVAXFSFSYCGSREIAHFFCDFPSLLILSCSDXSIFEKILFICCIVMIVFPVAIIIASYARVILAVIHMGSGEGRRKAFXXCSSHLLVVGMYYGAALFMYIRPXSDRSPXQDKMVSVFYXILXPMLNPLIYSLRNKEVXRAFMKILGKGKSGE

SEQ ID NO: 18831 - protein, 311 aa, Homo sapiens
  MOD_RES (7)..(7): Selenocysteine
  MOD_RES (23)..(23): Selenocysteine
  MOD_RES (25)..(25): Selenocysteine
  MOD_RES (57)..(57): Selenocysteine
  MOD_RES (76)..(77): Selenocysteine
  MOD_RES (99)..(99): Selenocysteine
  MOD_RES (133)..(133): Selenocysteine
  MOD_RES (145)..(145): Selenocysteine
  MOD_RES (150)..(150): Selenocysteine
  MOD_RES (190)..(190): Selenocysteine
  MOD_RES (192)..(192): Selenocysteine
  MOD_RES (239)..(240): Selenocysteine
  MOD_RES (267)..(267): Selenocysteine
  MOD_RES (279)..(279): Selenocysteine
  MOD_RES (282)..(282): Selenocysteine
MVWENQXFNSIFILLGIFNHSPXHXFLFSLVLGIFSLALMENISMVLLIYIEKQLHXPMYFLLSQLSLMDLMLICXXLPKMIFSYLSGKKSISLAGCGXQIFFYVSLLGAECFLLAVMAYDRYVAICHPLQYXILMNPKLCVFMXVASWXLGSLDGIIVLAAVLSFSYCSSLEIHHFFCDVAALLPLSCXEXSAFERLLVICCVVMLIFPVSVIILSYSHVLRAVIHMGSGESRRKAFXXCSSHLSVVGLYYGAAMFMYMRPASKHXPDQDKMVSAFYXILXPMLNPLIYSLRNKEVFRALQKVLKKRKLI

SEQ ID NO: 18832 - protein, 312 aa, Homo sapiens
  MOD_RES (7)..(7): Selenocysteine
  MOD_RES (23)..(23): Selenocysteine
  MOD_RES (25)..(25): Selenocysteine
  MOD_RES (53)..(53): Selenocysteine
  MOD_RES (57)..(57): Selenocysteine
  MOD_RES (77)..(77): Selenocysteine
  MOD_RES (99)..(99): Selenocysteine
  MOD_RES (133)..(133): Selenocysteine
  MOD_RES (145)..(145): Selenocysteine
  MOD_RES (163)..(163): Selenocysteine
  MOD_RES (192)..(192): Selenocysteine
  MOD_RES (239)..(240): Selenocysteine
  MOD_RES (263)..(263): Selenocysteine
  MOD_RES (279)..(279): Selenocysteine
  MOD_RES (282)..(282): Selenocysteine
  MOD_RES (298)..(298): Selenocysteine
MAWENQXFNSDFILLGIFNHSPXHXFLFFLVLAIFSVAFMGNSVMVLLIYLDXQLHXPMYFLLSQLFLMDLMLICSXVPKMAFNYLSGSKSISMAGCAXQIFFYVSLLGSECFLLAVMSYDRYIAICHPLRYXNLMRPKICGLMXAFSWILGSMDAIIDAVAXFSFSYCGSREIAHFFCDFPSLLILSCNDXSIFEKVLFICCIVMIVFPVAIIIASYARVILAVIHMGSGEGRRKAFXXCSSHLMVVGMYYGAGLFMYIRPXSDRSPMQDKLVSVFYXILXPMLNPLIYSLRNKEVXRALRKVLGKGKCGE

SEQ ID NO: 18833 - protein, 312 aa, Homo sapiens
  MOD_RES (7)..(7): Selenocysteine
  MOD_RES (23)..(23): Selenocysteine
  MOD_RES (25)..(25): Selenocysteine
  MOD_RES (53)..(53): Selenocysteine
  MOD_RES (57)..(57): Selenocysteine
  MOD_RES (76)..(77): Selenocysteine
  MOD_RES (99)..(99): Selenocysteine
  MOD_RES (124)..(124): Selenocysteine
  MOD_RES (133)..(133): Selenocysteine
  MOD_RES (145)..(145): Selenocysteine
  MOD_RES (154)..(154): Selenocysteine
  MOD_RES (163)..(163): Selenocysteine
  MOD_RES (192)..(192): Selenocysteine
  MOD_RES (216)..(216): Selenocysteine
  MOD_RES (239)..(240): Selenocysteine
  MOD_RES (263)..(263): Selenocysteine
  MOD_RES (279)..(279): Selenocysteine
  MOD_RES (282)..(282): Selenocysteine
  MOD_RES (298)..(298): Selenocysteine
MAWENQXFNSDFLLLGIFNHSPXHXFLFFLVLAIFSVAFMGNSIMVLLIYLDXQLHXPMYFLLSQLSLMDLMLICXXVPKMAFNYLSGSKSISMAGCAXQIFFYISLLGSECFLLAVMSYDRYXAICHPLRYXNLMRPKICGLMXAFSWILGSXDGIIDAVAXFSFSYCGSREIAHFCCDFPSLLILSCNDXSIFEEVIFICCIVMLVFPVAIIIXSYARVILAVIHMGSGEGRRKAFXXCSSHLMVVGMYYGAGLFMCIQPXSHHSPMQDKMVSVFYXIVXPMLNPLIYSLRNKEVXRALMKILGKGKSGD

SEQ ID NO: 18834 - protein, 319 aa, Homo sapiens
  MOD_RES (7)..(7): Selenocysteine
  MOD_RES (27)..(27): Selenocysteine
  MOD_RES (50)..(50): Selenocysteine
  MOD_RES (58)..(58): Selenocysteine
  MOD_RES (75)..(76): Selenocysteine
  MOD_RES (88)..(88): Selenocysteine
  MOD_RES (92)..(92): Selenocysteine
  MOD_RES (111)..(111): Selenocysteine
  MOD_RES (161)..(161): Selenocysteine
  MOD_RES (179)..(179): Selenocysteine
  MOD_RES (203)..(203): Selenocysteine
  MOD_RES (224)..(225): Selenocysteine
  MOD_RES (241)..(241): Selenocysteine
  MOD_RES (247)..(247): Selenocysteine
  MOD_RES (255)..(255): Selenocysteine
  MOD_RES (289)..(289): Selenocysteine
  MOD_RES (318)..(318): Selenocysteine
MEKANEXSPVMGFVLLRLSAHPELEKXFFVLILLMYLVILLGNGVLILVXILDSRLHXPMYFFLGNLSFLDICFXXSSVPLVLDSFLXPQEXISFSACAVQMALSFAMAGXECLLLSMMAFDRYVAICNPLRYSVIMSKAAYMPMAASSWAIGGAASVVHXSLAIQLPFCGDNVINHFXCEILAVLKLACADISINVISMEVXNVIFLGVPVLFISFSYVFIIXXILRIPSAEGRKKVFSXCSAHLXVVIVFYGXLFFMYGKPKSKDSMGADKEDLSDKLIPLFYGVVXPMLNPIIYSLRNKDVKAAVRRLLRPKGFXQ

SEQ ID NO: 18835 - protein, 369 aa, Homo sapiens
  MOD_RES (21)..(21): Selenocysteine
  MOD_RES (47)..(48): Selenocysteine
  MOD_RES (57)..(57): Selenocysteine
  MOD_RES (60)..(60): Selenocysteine
  MOD_RES (63)..(63): Selenocysteine
  MOD_RES (73)..(73): Selenocysteine
  MOD_RES (87)..(87): Selenocysteine
  MOD_RES (101)..(101): Selenocysteine
  MOD_RES (107)..(107): Selenocysteine
  MOD_RES (126)..(126): Selenocysteine
  MOD_RES (141)..(141): Selenocysteine
  MOD_RES (148)..(148): Selenocysteine
  MOD_RES (156)..(156): Selenocysteine
  MOD_RES (210)..(210): Selenocysteine
  MOD_RES (213)..(213): Selenocysteine
  MOD_RES (242)..(242): Selenocysteine
  MOD_RES (247)..(247): Selenocysteine
  MOD_RES (273)..(274): Selenocysteine
  MOD_RES (290)..(290): Selenocysteine
  MOD_RES (296)..(296): Selenocysteine
  MOD_RES (308)..(308): Selenocysteine
  MOD_RES (329)..(329): Selenocysteine
  MOD_RES (332)..(332): Selenocysteine
  MOD_RES (348)..(348): Selenocysteine
MWQEYYFLNVFFPLLKVCCLXINSHVVILLPWECYHLIWKILPYIGXXVGSMEEYNXSSXDFXFMGLFNRKEXSGLIFAIISIIFFXALMANGVMIFLIQXDLRLHXPMYFLLSHLSLIDMMYISXIVPKMLVNYLLDQRXISFVGCXAQHFLYLXLVGAEFFLLGLMAYDRYVAICNPLRYPVLMSRRVCWMIIAGSWFGGSLDGFLLXPIXMSFPFCNSREINHFFCEAPAVLKLACADXALYEXVMYVCCVLMLLIPFSVVLASYARILXXVQCMSSVEGRKKAFAXCSSHMXVVSLFYGAAMYXYMLPHSYHKPAQDKVLSVFYXILXPMLNPLIYSLRNKDVXGALKRALGRFKGPQRVSGGVF

SEQ ID NO: 18836 - protein, 312 aa, Homo sapiens
  MOD_RES (7)..(7): Selenocysteine
  MOD_RES (44)..(44): Selenocysteine
  MOD_RES (57)..(57): Selenocysteine
  MOD_RES (72)..(72): Selenocysteine
  MOD_RES (77)..(77): Selenocysteine
  MOD_RES (91)..(91): Selenocysteine
  MOD_RES (99)..(99): Selenocysteine
  MOD_RES (160)..(160): Selenocysteine
  MOD_RES (192)..(192): Selenocysteine
  MOD_RES (212)..(212): Selenocysteine
  MOD_RES (224)..(224): Selenocysteine
  MOD_RES (239)..(240): Selenocysteine
  MOD_RES (246)..(246): Selenocysteine
  MOD_RES (267)..(267): Selenocysteine
  MOD_RES (279)..(279): Selenocysteine
  MOD_RES (282)..(282): Selenocysteine
  MOD_RES (298)..(298): Selenocysteine
MRLANQXLGGDFFLLGIFSQISHPGRLCLLIFSIFLMAVSWNIXLILLIHIDSSLHXPMYFFINQLSLIDLXYISVXVPKMLVNQLAKDKXISVLGCGXQMYFYLQLGGAECCLLAAMAYDRYVAICHPLRYSVLMSHRVCLLLASGCWFVGSVDGFMLXPIAMSFPFCRSHEIQHFFCEVPAVLKLSCSDXSLYKIFMYLCCVIMLLIPVXVISVSYYYIILXIHKMNSVEGRKKAFXXCSSHIXVVSLFYGAAIYNYMLPSSYQXPEKDMMSSFFYXILXPVLNPIIYSFRNKDVXRALKKMLSVQKPPY

SEQ ID NO: 18837 - protein, 316 aa, Homo sapiens
  MOD_RES (2)..(2): Selenocysteine
  MOD_RES (4)..(4): Selenocysteine
  MOD_RES (10)..(10): Selenocysteine
  MOD_RES (26)..(26): Selenocysteine
  MOD_RES (37)..(37): Selenocysteine
  MOD_RES (54)..(54): Selenocysteine
  MOD_RES (68)..(68): Selenocysteine
  MOD_RES (73)..(74): Selenocysteine
  MOD_RES (103)..(103): Selenocysteine
  MOD_RES (157)..(157): Selenocysteine
  MOD_RES (160)..(160): Selenocysteine
  MOD_RES (189)..(189): Selenocysteine
  MOD_RES (194)..(194): Selenocysteine
  MOD_RES (213)..(213): Selenocysteine
  MOD_RES (221)..(221): Selenocysteine
  MOD_RES (236)..(237): Selenocysteine
  MOD_RES (243)..(243): Selenocysteine
  MOD_RES (255)..(255): Selenocysteine
  MOD_RES (264)..(264): Selenocysteine
  MOD_RES (276)..(276): Selenocysteine
  MOD_RES (279)..(279): Selenocysteine
  MOD_RES (313)..(313): Selenocysteine
MXNXSSSDFXLLGLLVNSEAAGIVFXVILAVFLGAVXANLVMIFLIQVDSRLHXPMYFLLSQLSIMDXLFICXXVPKLLADMVSKEKIISFVACGIQIFLYLXMIGSEFFLLGLMAYDCYVAVCNPLRYPVLMNRKKCLLLAAGAWFGGSLDGFLLXPIXMNVPYCGSRSINHFFCEIPAVLKLACADXSLYEXLMYICCVLMLLIPISIISXSYSLILLXIHRMPSAEGRKKAFXXCSSHLXVVSIFYGAAFYXYVLPQSFHXPEQDKVVSAFYXIVXPMLNPLIYSLRNKDVIGAFKKVFACCSSAQKVAXSDA

SEQ ID NO: 18838 - protein, 320 aa, Homo sapiens
  MOD_RES (6)..(7): Selenocysteine
  MOD_RES (19)..(19): Selenocysteine
  MOD_RES (32)..(32): Selenocysteine
  MOD_RES (35)..(35): Selenocysteine
  MOD_RES (74)..(75): Selenocysteine
  MOD_RES (85)..(85): Selenocysteine
  MOD_RES (104)..(104): Selenocysteine
  MOD_RES (132)..(132): Selenocysteine
  MOD_RES (143)..(143): Selenocysteine
  MOD_RES (161)..(161): Selenocysteine
  MOD_RES (190)..(190): Selenocysteine
  MOD_RES (229)..(229): Selenocysteine
  MOD_RES (238)..(238): Selenocysteine
  MOD_RES (256)..(256): Selenocysteine
  MOD_RES (266)..(266): Selenocysteine
  MOD_RES (277)..(277): Selenocysteine
  MOD_RES (280)..(280): Selenocysteine
  MOD_RES (305)..(305): Selenocysteine
MEMRNXXPDFILLGLFNHXRAHQVLFMMLLAXVLXSLFSNALMILLIHWDHRLHRPMYFLLSQLSLMDMMLVSXXVPKMAADYLXGNKAISRAGCGVQIFFLPXLGGGECFLLAAMAYDRYAAVCHPLRYPXLMSWQLCLRMXMSSWLLGAADGLLQAVAXLSFPYCGAHEIDHFFCEAPVLVRLACADXSVFENAMYICCVLMLLVPFSLILSSYGLILAAVLLMRSXEARKKAFAXCSSHVAVVGLFYGAGIFXYMRPKSHRSXNHDKVVSAFYXMFXPLLNPLIYSVRNSEVKEALKRWLGXCVNLKHQQNEAHRSR

SEQ ID NO: 18839 - protein, 324 aa, Homo sapiens
  MOD_RES (11)..(11): Selenocysteine
  MOD_RES (16)..(16): Selenocysteine
  MOD_RES (20)..(20): Selenocysteine
  MOD_RES (41)..(41): Selenocysteine
  MOD_RES (58)..(58): Selenocysteine
  MOD_RES (72)..(72): Selenocysteine
  MOD_RES (78)..(78): Selenocysteine
  MOD_RES (92)..(92): Selenocysteine
  MOD_RES (107)..(107): Selenocysteine
  MOD_RES (161)..(161): Selenocysteine
  MOD_RES (164)..(164): Selenocysteine
  MOD_RES (191)..(191): Selenocysteine
  MOD_RES (193)..(193): Selenocysteine
  MOD_RES (198)..(198): Selenocysteine
  MOD_RES (220)..(220): Selenocysteine
  MOD_RES (225)..(225): Selenocysteine
  MOD_RES (241)..(241): Selenocysteine
  MOD_RES (259)..(259): Selenocysteine
  MOD_RES (268)..(268): Selenocysteine
  MOD_RES (280)..(280): Selenocysteine
  MOD_RES (283)..(283): Selenocysteine
  MOD_RES (319)..(319): Selenocysteine
MGMEGLLQNSXNFVLXGLIXHPAFPGLLFAIVFSIFVVAIXANLVMILLIHMDSRLHXPMYFLLSQLSIMDXIYICIXVPKMLQDLLSKDKXISFLGCAVQIFLYLXLIGGEFFLLGLMAYDRYVAVCNPLRYPLLMNRRVCLFMVVGSWVGGSLDGFMLXPVXMSFPFCRSREINHFFCEIPAVLKLSCXDXSLYEXLMYACCVLMLLIPLSVISVSYXHILLXVHRMNSAEGRRKAFAXCSSHIMVVSVFYGAAFYXNVLPHSYHXPEKDKVVSAFYXILXPMLNPLIYSLRNKDVAAALRKVLGRCGSSQSIRVAXVIRKG

SEQ ID NO: 18840 - protein, 317 aa, Homo sapiens
  MOD_RES (37)..(37): Selenocysteine
  MOD_RES (57)..(57): Selenocysteine
  MOD_RES (76)..(76): Selenocysteine
  MOD_RES (98)..(98): Selenocysteine
  MOD_RES (106)..(106): Selenocysteine
  MOD_RES (160)..(160): Selenocysteine
  MOD_RES (163)..(163): Selenocysteine
  MOD_RES (190)..(190): Selenocysteine
  MOD_RES (192)..(192): Selenocysteine
  MOD_RES (197)..(197): Selenocysteine
  MOD_RES (219)..(219): Selenocysteine
  MOD_RES (224)..(224): Selenocysteine
  MOD_RES (240)..(240): Selenocysteine
  MOD_RES (258)..(258): Selenocysteine
  MOD_RES (267)..(267): Selenocysteine
  MOD_RES (279)..(279): Selenocysteine
  MOD_RES (282)..(282): Selenocysteine
  MOD_RES (298)..(298): Selenocysteine
  MOD_RES (315)..(316): Selenocysteine
MEQSNYSVYADFILLGLFSNARFPWLLFALILLVFLXSIASNVVKIILIHIDSRLHXPMYFLLSQLSLRDILYISXIVPKMLVDQVMSQRAISFAGCXAQHFLYLXLAGAEFFLLGLMSYDRYVAICNPLHYPVLMSRKICWLIVAAAWLGGSIDGFLLXPVXMQFPFCASREINHFFCEVPALLKLSCXDXSAYEXAMYVCCIMMLLIPFSVISGSYXRILIXVYRMSEAEGRGKAVAXCSSHMVVVSLFYGAAMYXYVLPHSYHXPEQDKAVSAFYXILXPMLNPLIYSLRNKDVXGALQKVVGRCVSSGKVXXF

SEQ ID NO: 18841 - protein, 315 aa, Homo sapiens
  MOD_RES (5)..(5): Selenocysteine
  MOD_RES (11)..(11): Selenocysteine
  MOD_RES (81)..(81): Selenocysteine
  MOD_RES (110)..(110): Selenocysteine
  MOD_RES (121)..(121): Selenocysteine
  MOD_RES (164)..(164): Selenocysteine
  MOD_RES (167)..(167): Selenocysteine
  MOD_RES (189)..(189): Selenocysteine
  MOD_RES (196)..(196): Selenocysteine
  MOD_RES (201)..(201): Selenocysteine
  MOD_RES (216)..(216): Selenocysteine
  MOD_RES (228)..(228): Selenocysteine
  MOD_RES (244)..(244): Selenocysteine
  MOD_RES (250)..(250): Selenocysteine
  MOD_RES (262)..(262): Selenocysteine
  MOD_RES (271)..(271): Selenocysteine
  MOD_RES (283)..(283): Selenocysteine
  MOD_RES (286)..(286): Selenocysteine
  MOD_RES (310)..(310): Selenocysteine
MANIXRMANHXGRLDFILMGLFRQSKHPALLSVVIFVVFLKALSGNAVLILLIHCDAHLHSPMYFFISQLSLMDMAYISVXVPKMLLDQVMGVNKVSAPECGMQMFLYLXLAGSEFFLLAXMAYDRYVAICHPLRYPVLMNHRVCLFLASGCWFLGSVDGFMLXPIXMSFPFCRSWEIHHFFCEVPAVXILSCSDXSLYEXLMYLCCVLMLLIPVXIISSSYLLILLXVHRMNSAEGRKKAFAXCSSHLXVVILFYGAAVYXYMLPSSYHXPEKDMMVSVFYXILXPVLNPLIYSLRNKDVMGALKKMLXVRFVL

SEQ ID NO: 18842 - protein, 318 aa, Homo sapiens
  MOD_RES (7)..(7): Selenocysteine
  MOD_RES (12)..(12): Selenocysteine
  MOD_RES (15)..(15): Selenocysteine
  MOD_RES (18)..(18): Selenocysteine
  MOD_RES (20)..(20): Selenocysteine
  MOD_RES (34)..(34): Selenocysteine
  MOD_RES (36)..(36): Selenocysteine
  MOD_RES (45)..(45): Selenocysteine
  MOD_RES (62)..(62): Selenocysteine
  MOD_RES (82)..(82): Selenocysteine
  MOD_RES (92)..(92): Selenocysteine
  MOD_RES (96)..(96): Selenocysteine
  MOD_RES (111)..(111): Selenocysteine
  MOD_RES (165)..(165): Selenocysteine
  MOD_RES (168)..(168): Selenocysteine
  MOD_RES (186)..(186): Selenocysteine
  MOD_RES (202)..(202): Selenocysteine
  MOD_RES (224)..(224): Selenocysteine
  MOD_RES (245)..(245): Selenocysteine
  MOD_RES (263)..(263): Selenocysteine
  MOD_RES (272)..(272): Selenocysteine
  MOD_RES (284)..(284): Selenocysteine
  MOD_RES (287)..(287): Selenocysteine
  MOD_RES (303)..(303): Selenocysteine
MCSGNQXSQNQXASXDFXLXGLFAESKHAALLYXVXFLLFLMALXGNALLILLIHSEPRLHXPMYFFISQLALMDLMYLCVXVPKMLVGQVXGDDXISPSGCGIQMFFYLXLAGAEVFLLAAMAYDRYAAVCRPLHYPLLMNQRVCQLLVSACWVLGMVDGLLLXPIXMSFPFCQSRKILSFFCEXPALLKLSCSDVSLYKXLMYLCCILMLLAPIMVISSSYXLILHLIHRMNSAAGHRKALAXCSSHMIIVLLLFGASFYXYMLPSSYHXAEQDMMVSAFYXIFXPVLNPLIYSLRNKDVXRALRSMMQSRMNQEK

SEQ ID NO: 18843 - protein, 320 aa, Homo sapiens
  MOD_RES (6)..(7): Selenocysteine
  MOD_RES (19)..(19): Selenocysteine
  MOD_RES (35)..(35): Selenocysteine
  MOD_RES (55)..(55): Selenocysteine
  MOD_RES (74)..(75): Selenocysteine
  MOD_RES (85)..(85): Selenocysteine
  MOD_RES (104)..(104): Selenocysteine
  MOD_RES (132)..(132): Selenocysteine
  MOD_RES (143)..(143): Selenocysteine
  MOD_RES (161)..(161): Selenocysteine
  MOD_RES (179)..(179): Selenocysteine
  MOD_RES (190)..(190): Selenocysteine
  MOD_RES (229)..(229): Selenocysteine
  MOD_RES (238)..(238): Selenocysteine
  MOD_RES (256)..(256): Selenocysteine
  MOD_RES (266)..(266): Selenocysteine
  MOD_RES (277)..(277): Selenocysteine
  MOD_RES (280)..(280): Selenocysteine
  MOD_RES (305)..(305): Selenocysteine
MEMRNXXPDFILLGLFNHXRAHQVLFMMVLSIVLXSLFGNSLMILLIHWDHRLHXPMYFLLSQLSLMDMMLVSXXVPKMAADYLXGSKAISRAGCGVQIFFLPXLGGGECFLLAAMAYDRYAAVCHPLRYPXLMSWQLCLRMXMSCWLLGAADGLLQAVVXLSFPYCGAHEIDHFFCEXPVLVRLACADXSVFENAMYICCVLMLLVPFSLILSSYGLILAAVLHMRSXEARKKAFAXCSSHVAVVGLFYGAAIFXYMRPKSHRSXNHDKVVSAFYXMFXPLLNPLIYSVKNSEVKGALKRWLGXCVNIKHQQNEAHRSR

SEQ ID NO: 18844 - protein, 318 aa, Homo sapiens
  MOD_RES (7)..(7): Selenocysteine
  MOD_RES (12)..(12): Selenocysteine
  MOD_RES (15)..(15): Selenocysteine
  MOD_RES (18)..(18): Selenocysteine
  MOD_RES (20)..(20): Selenocysteine
  MOD_RES (34)..(34): Selenocysteine
  MOD_RES (36)..(36): Selenocysteine
  MOD_RES (45)..(45): Selenocysteine
  MOD_RES (62)..(62): Selenocysteine
  MOD_RES (82)..(82): Selenocysteine
  MOD_RES (92)..(92): Selenocysteine
  MOD_RES (96)..(96): Selenocysteine
  MOD_RES (111)..(111): Selenocysteine
  MOD_RES (165)..(165): Selenocysteine
  MOD_RES (168)..(168): Selenocysteine
  MOD_RES (186)..(186): Selenocysteine
  MOD_RES (204)..(204): Selenocysteine
  MOD_RES (214)..(214): Selenocysteine
  MOD_RES (224)..(224): Selenocysteine
  MOD_RES (245)..(245): Selenocysteine
  MOD_RES (263)..(263): Selenocysteine
  MOD_RES (272)..(272): Selenocysteine
  MOD_RES (284)..(284): Selenocysteine
  MOD_RES (287)..(287): Selenocysteine
  MOD_RES (303)..(303): Selenocysteine
MCSGNQXSQNQXASXDFXLXGLFAESKHAALLYXVXFLLFLMALXGNALLILLIHSEPRLHXPMYFFISQLALMDLMYLCVXVPKMLVGQVXGDDXISPSGCGIQMFFHLXLAGAEVFLLAAMAYDRYAAVCRPLHYPLLMNQRVCQLLVSACWVLGMVDGLLLXPIXMSFPFCQSRKILSFFCEXPALLKLSCSDVSLYKMLXYLCCILMLLXPIMVISSSYXLILHLIHRMNSAAGRRKALAXCSSHMIIVLLLFGASFYXYMLRSSYHXAEQDMMVSAFYXIFXPVLNPLIYSLRNKDVXRALRSMMQSRMNQEK

SEQ ID NO: 18845 - protein, 323 aa, Homo sapiens
  MOD_RES (11)..(11): Selenocysteine
  MOD_RES (16)..(16): Selenocysteine
  MOD_RES (20)..(20): Selenocysteine
  MOD_RES (41)..(41): Selenocysteine
  MOD_RES (58)..(58): Selenocysteine
  MOD_RES (72)..(72): Selenocysteine
  MOD_RES (78)..(78): Selenocysteine
  MOD_RES (92)..(92): Selenocysteine
  MOD_RES (106)..(106): Selenocysteine
  MOD_RES (160)..(160): Selenocysteine
  MOD_RES (163)..(163): Selenocysteine
  MOD_RES (190)..(190): Selenocysteine
  MOD_RES (192)..(192): Selenocysteine
  MOD_RES (197)..(197): Selenocysteine
  MOD_RES (219)..(219): Selenocysteine
  MOD_RES (224)..(224): Selenocysteine
  MOD_RES (240)..(240): Selenocysteine
  MOD_RES (258)..(258): Selenocysteine
  MOD_RES (267)..(267): Selenocysteine
  MOD_RES (279)..(279): Selenocysteine
  MOD_RES (282)..(282): Selenocysteine
  MOD_RES (318)..(318): Selenocysteine
MGMEGLLQNSXNFVLXGLIXHPAFPGLLFAVVFSIFVVAIXANLVMILLIHMDSRLHXPMYFLLSQLSIMDXIYICIXVPKMLQDLLSKDKXISFLGCAVQIFYLXLIGGEFFLLGLMAYDRYVAVCNPLRYPLLMNRRVCLFMVVGSWVGGSLDGFMLXPVXMSFPFCRSREINHFFCEIPAVLKLSCXDXSLYEXLMYACCVLMLLIPLSVISVSYXHILLXVHRMNSAEGRRKAFAXCSSHIMVVSVFYGAAFYXNVLPHSYHXPEKDKVVSAFYXILXPMLNPLIYSLRNKDVAAALRKVLGRCGSSQSIRVAXVIRKG

SEQ ID NO: 18846 - protein, 348 aa, Homo sapiens
  MOD_RES (5)..(5): Selenocysteine
  MOD_RES (11)..(11): Selenocysteine
  MOD_RES (33)..(33): Selenocysteine
  MOD_RES (39)..(39): Selenocysteine
  MOD_RES (89)..(89): Selenocysteine
  MOD_RES (109)..(109): Selenocysteine
  MOD_RES (138)..(138): Selenocysteine
  MOD_RES (149)..(149): Selenocysteine
  MOD_RES (190)..(190): Selenocysteine
  MOD_RES (192)..(192): Selenocysteine
  MOD_RES (195)..(195): Selenocysteine
  MOD_RES (197)..(197): Selenocysteine
  MOD_RES (224)..(224): Selenocysteine
  MOD_RES (256)..(256): Selenocysteine
  MOD_RES (272)..(272): Selenocysteine
  MOD_RES (278)..(278): Selenocysteine
  MOD_RES (290)..(290): Selenocysteine
  MOD_RES (299)..(299): Selenocysteine
  MOD_RES (311)..(311): Selenocysteine
  MOD_RES (314)..(314): Selenocysteine
  MOD_RES (338)..(338): Selenocysteine
MDNIXWMASHXGWSDFILMGLFRQSKHPMANIXWMANHXGWSDFILLGLFRQSKHPALLCVVIFVVFLMALSGNAVLILLIHCDAHLHXPMYFFISQLSLMDMAYISVXVPKMLLDQVMGVNKISAPECGMQMFFYVXLAGSEFFLLAXMAYDRYVAICHPLRYPVLMNHRVCLFLSSGCWFLGSVDGFXFXPIXMXFPFRGSREIHHFFCEVPAVLNLSCSDXSLYEIFMYLCCVLMLLIPVVIISSSYLLILLXIHGMNSAEGRKKAFAXCSSHLXVVILFYGAAIYXYMLPSSYHXPEKDMMVSVFYXILXPVVNPLIYSLRNKDVMGALKKMLXVEPAFQKAME

SEQ ID NO: 18847 - protein, 315 aa, Homo sapiens
  MOD_RES (5)..(5): Selenocysteine
  MOD_RES (11)..(11): Selenocysteine
  MOD_RES (81)..(81): Selenocysteine
  MOD_RES (110)..(110): Selenocysteine
  MOD_RES (121)..(121): Selenocysteine
  MOD_RES (164)..(164): Selenocysteine
  MOD_RES (167)..(167): Selenocysteine
  MOD_RES (189)..(189): Selenocysteine
  MOD_RES (196)..(196): Selenocysteine
  MOD_RES (201)..(201): Selenocysteine
  MOD_RES (216)..(216): Selenocysteine
  MOD_RES (228)..(228): Selenocysteine
  MOD_RES (244)..(244): Selenocysteine
  MOD_RES (250)..(250): Selenocysteine
  MOD_RES (262)..(262): Selenocysteine
  MOD_RES (271)..(271): Selenocysteine
  MOD_RES (283)..(283): Selenocysteine
  MOD_RES (286)..(286): Selenocysteine
  MOD_RES (310)..(310): Selenocysteine
MANIXRMANHXGKLDFILMGLFRRSKHPALLSVVIFVVFLKALSGNAVLILLIHCDAHLHSPMYFFISQLSLMDMAYISVXVPKMLLDQVMGVNKVSAPECGMQMFLYLXLAGSEFFLLAXMAYDRYVAICHPLRYPVLMNHRVCLFLASGCWFLGSVDGFMLXPIXMSFPFCRSWEIHHFFCEVPAVXILSCSDXSLYEXLMYLCCVLMLLIPVXIISSSYLLILLXVHRMNSAEGRKKAFAXCSSHLXVVILFYGAAVYXYMLPSSYHXPEKDMMVSVFYXILXPVLNPLIYSLRNKDVMGALKKMLXVRFVL

SEQ ID NO: 18848 - protein, 308 aa, Homo sapiens
  MOD_RES (7)..(7): Selenocysteine
  MOD_RES (9)..(9): Selenocysteine
  MOD_RES (13)..(13): Selenocysteine
  MOD_RES (19)..(19): Selenocysteine
  MOD_RES (57)..(57): Selenocysteine
  MOD_RES (71)..(71): Selenocysteine
  MOD_RES (76)..(76): Selenocysteine
  MOD_RES (91)..(91): Selenocysteine
  MOD_RES (98)..(98): Selenocysteine
  MOD_RES (160)..(160): Selenocysteine
  MOD_RES (163)..(163): Selenocysteine
  MOD_RES (183)..(183): Selenocysteine
  MOD_RES (193)..(194): Selenocysteine
  MOD_RES (197)..(197): Selenocysteine
  MOD_RES (215)..(215): Selenocysteine
  MOD_RES (219)..(219): Selenocysteine
  MOD_RES (224)..(224): Selenocysteine
  MOD_RES (229)..(229): Selenocysteine
  MOD_RES (240)..(240): Selenocysteine
  MOD_RES (249)..(249): Selenocysteine
  MOD_RES (258)..(258): Selenocysteine
  MOD_RES (260)..(260): Selenocysteine
  MOD_RES (267)..(267): Selenocysteine
  MOD_RES (279)..(279): Selenocysteine
  MOD_RES (282)..(282): Selenocysteine
MNENNEXLXRGFXLMGLFXHNKCSGFFFGVICAVFFMAMIANGVMIFLINIDPHLHXPMYFLLSHLSVIDXLYISXIVPKMLVDYLMGEGXISFIACXAQCFLYMGFMGAEFFLLGLMAYDRYVAICNPLRYPVLISWRVCWMILASSWFGGALDSFLLXPIXMSLPFCASHQINHFFCEAPXMLRLACGDKXXYEXVMYVCCVAMLLIPFSVVXASYXRILIXVHQMXSAEGRKKAFAXCSSHMMVVXLFYGAALYXYXLPQSYHXPIKDKVFSAFYXILXPLLNPLIYSLRNRDVMGALKRVVARC

SEQ ID NO: 18849 - protein, 308 aa, Homo sapiens
  MOD_RES (3)..(3): Selenocysteine
  MOD_RES (12)..(12): Selenocysteine
  MOD_RES (28)..(28): Selenocysteine
  MOD_RES (48)..(48): Selenocysteine
  MOD_RES (67)..(67): Selenocysteine
  MOD_RES (89)..(89): Selenocysteine
  MOD_RES (97)..(97): Selenocysteine
  MOD_RES (151)..(151): Selenocysteine
  MOD_RES (154)..(154): Selenocysteine
  MOD_RES (181)..(181): Selenocysteine
  MOD_RES (183)..(183): Selenocysteine
  MOD_RES (188)..(188): Selenocysteine
  MOD_RES (210)..(210): Selenocysteine
  MOD_RES (215)..(215): Selenocysteine
  MOD_RES (231)..(231): Selenocysteine
  MOD_RES (249)..(249): Selenocysteine
  MOD_RES (258)..(258): Selenocysteine
  MOD_RES (270)..(270): Selenocysteine
  MOD_RES (273)..(273): Selenocysteine
  MOD_RES (289)..(289): Selenocysteine
  MOD_RES (306)..(307): Selenocysteine
MPXLSFWVCSAXPVSPGFFALILLVFVXSIASNVVKIILIHIDSRLHXPMYFLLSQLSLRDILYISXIVPKMLVDQVMSQRAISFAGCXAQHFLYLXLAGAEFFLLGLMSCDRYVAICNPLHYPDLMSRKICWLIVAAAWLGGSIDGFLLXPVXMQFPFCASREINHFFCEVPALLKLSCXDXSAYEXAMYVCCIMMLLIPFSVISGSYXRILIXVYRMSEAEGRRKAVAXCSSHMVVVSLFYGAAMYXYVLPHSYHXPEQDKAVSAFYXILXPMLNPLIYSLRNKDVXGALQKVVGRCVSSGKVXXF

SEQ ID NO: 18850 - protein, 312 aa, Homo sapiens
  MOD_RES (7)..(7): Selenocysteine
  MOD_RES (19)..(19): Selenocysteine
  MOD_RES (35)..(35): Selenocysteine
  MOD_RES (55)..(55): Selenocysteine
  MOD_RES (74)..(75): Selenocysteine
  MOD_RES (85)..(85): Selenocysteine
  MOD_RES (104)..(104): Selenocysteine
  MOD_RES (132)..(132): Selenocysteine
  MOD_RES (161)..(161): Selenocysteine
  MOD_RES (179)..(179): Selenocysteine
  MOD_RES (190)..(190): Selenocysteine
  MOD_RES (229)..(229): Selenocysteine
  MOD_RES (238)..(238): Selenocysteine
  MOD_RES (256)..(256): Selenocysteine
  MOD_RES (266)..(266): Selenocysteine
  MOD_RES (277)..(277): Selenocysteine
  MOD_RES (280)..(280): Selenocysteine
  MOD_RES (300)..(300): Selenocysteine
MENGSYXSYFILLGLFNHXRAHQVLFMMVLSIVLXSLFGNSLMILLIHWDHRLHXPMYFLLSQLSLMDVMLVSXXVPKMAADYLXGSKAISRAGCGAQIFFLPXLGGGECFLLAAMAYDRYAAVCHPLRYPXLMSWQLCLRMNLSCWLLGAADGLLQAVAXLSFPYCGAHEIDHFFCEXPVLVRLACADXSVFENAMYICCVLMLLVPFSLILSSYGLILAAVLHMRSXEARKKAFAXCSSHVAVVGLFYGAAIFXYMRPKSHRSXNHDKVVSAFYXMFXPLLNPLIYSVKNSEVKGALXRCMGRCVALSRE

SEQ ID NO: 18851 - protein, 315 aa, Homo sapiens
  MOD_RES (10)..(10): Selenocysteine
  MOD_RES (24)..(24): Selenocysteine
  MOD_RES (37)..(37): Selenocysteine
  MOD_RES (58)..(58): Selenocysteine
  MOD_RES (146)..(146): Selenocysteine
  MOD_RES (193)..(193): Selenocysteine
  MOD_RES (198)..(198): Selenocysteine
  MOD_RES (241)..(241): Selenocysteine
  MOD_RES (247)..(247): Selenocysteine
  MOD_RES (250)..(250): Selenocysteine
  MOD_RES (280)..(280): Selenocysteine
  MOD_RES (283)..(283): Selenocysteine
MGRWVNQSYXDGFFLLGIFSHSQXDLVLFSAVMVVFXVALCGNVLLIFLIYLDAGLHXPMYFFLSQLSLMDLMLVCNIVPKMAANFLSGRKSISFVGCGIQIGFFVSLVGSEGLLLGLMAYDRYVAVSHPLHYPILMNQRVCLQIXGSSWAFGIIDGVIQMVAAMGLPYCGSRSVDHFFCEVQALLKLACADXSLFDXLLFACCVFMLLLPFSIIMASYACILGAVLRIRSAQAWKKALAXCSSHLXAVXLFYGAAMFMYLRPRRYRAPSHDKVASIFYXVLXPMLNPLIYSLRNGEVMGALRKGLDRCRIGSQH

SEQ ID NO: 18852 - protein, 315 aa, Homo sapiens
  MOD_RES (3)..(3): Selenocysteine
  MOD_RES (10)..(10): Selenocysteine
  MOD_RES (23)..(23): Selenocysteine
  MOD_RES (37)..(37): Selenocysteine
  MOD_RES (58)..(58): Selenocysteine
  MOD_RES (77)..(77): Selenocysteine
  MOD_RES (146)..(146): Selenocysteine
  MOD_RES (193)..(193): Selenocysteine
  MOD_RES (225)..(225): Selenocysteine
  MOD_RES (241)..(241): Selenocysteine
  MOD_RES (247)..(247): Selenocysteine
  MOD_RES (250)..(250): Selenocysteine
  MOD_RES (280)..(280): Selenocysteine
  MOD_RES (283)..(283): Selenocysteine
MEXWVNQSYXDGFFLLGIFSHSXADLVLFSVVMAVFXVALCGNVLLIFLIYMDPHLHXPMYFFLSQLSLMDLMLVCXNVPKMAANFLSGRKSISFVGCGIQIGLFVCLVGSEGLLLGLMAYDRYVAISHPLHYPILMNQRVCLQIXGSSWAFGIIDGLIQMVVVMNFPYCGLRKVNHFFCEMLSLLKLACVDXSLFEKVIFACCVFMLLFPFSIIVASYAHILGXVLQMHSAQAWKKALAXCSSHLXAVXLFYGAAMFIYLRPRHYRAPSHDKVASIFYXVLXPMLNPLIYSLRNREVMGALRKGLDRCRIGSQH

SEQ ID NO: 18853 - protein, 320 aa, Homo sapiens
  MOD_RES (38)..(38): Selenocysteine
  MOD_RES (43)..(43): Selenocysteine
  MOD_RES (57)..(57): Selenocysteine
  MOD_RES (74)..(75): Selenocysteine
  MOD_RES (91)..(91): Selenocysteine
  MOD_RES (124)..(124): Selenocysteine
  MOD_RES (161)..(161): Selenocysteine
  MOD_RES (163)..(163): Selenocysteine
  MOD_RES (168)..(168): Selenocysteine
  MOD_RES (192)..(194): Selenocysteine
  MOD_RES (209)..(209): Selenocysteine
  MOD_RES (228)..(228): Selenocysteine
  MOD_RES (240)..(240): Selenocysteine
  MOD_RES (246)..(246): Selenocysteine
  MOD_RES (254)..(254): Selenocysteine
  MOD_RES (275)..(275): Selenocysteine
  MOD_RES (279)..(279): Selenocysteine
  MOD_RES (282)..(282): Selenocysteine
  MOD_RES (291)..(291): Selenocysteine
  MOD_RES (312)..(312): Selenocysteine
MDQSNYSSLHGFILLGFSNHPKMEMILSGVVAIFYLIXLVGNXAIILASLLDSQLHXPMYFFLRNLSFLDLCFXXSIIPQMLVNLWGPDKXISYVGCIIQLYVYMWLGSVECLLLAVMSYDRFXAICKPLHYFVVMNPHLCLKMIIMIWSISLANSVVLCXLXLNLPXCGNNILDHFLCELPALVKIACVDXXXVEMSVFALGIIIVLXPLILILISYGYIAKAVLRXKSKASQRKAMNXCGSHLXVVSMFYGXIIYMYLQPGNRASKDQGKFLXLFYXVIXPSLNPLIYXLRNKDMKDALKKLMRFHHKSXKIKRNCKS

SEQ ID NO: 18854 - protein, 314 aa, Homo sapiens
  MOD_RES (4)..(4): Selenocysteine
  MOD_RES (8)..(8): Selenocysteine
  MOD_RES (10)..(10): Selenocysteine
  MOD_RES (38)..(38): Selenocysteine
  MOD_RES (43)..(44): Selenocysteine
  MOD_RES (57)..(57): Selenocysteine
  MOD_RES (74)..(75): Selenocysteine
  MOD_RES (91)..(91): Selenocysteine
  MOD_RES (148)..(148): Selenocysteine
  MOD_RES (163)..(163): Selenocysteine
  MOD_RES (192)..(192): Selenocysteine
  MOD_RES (198)..(198): Selenocysteine
  MOD_RES (240)..(240): Selenocysteine
  MOD_RES (246)..(246): Selenocysteine
  MOD_RES (282)..(282): Selenocysteine
  MOD_RES (291)..(291): Selenocysteine
MDGXNGSXQXHFILLGFSDRPHLERILFVVILIAYLLXLVGNXXIILVSRLDPHLHXPMYFFLAHLSFLDLSFXXSSIPQLLYNLNGCDKXISYMGCAIQLFLFLGLGGVECLLLAVMAYDRCVAICKPLHYMVIMNPRLCRGLVSVXWGCGVANSLAMSPVXLRLPRCGHHEVDHFLREMPALIRMACVSXVAIEGXVFVLAVGVVLSPLVFILLSYSYIVRAVLQIRSASGRQKAFGXCGSHLXVVSLFYGNIIYMYMQPGASSSQDQGMFLMLFYNIVXPLLNPLIYXLRNREVKGALGRLLLGKRELGKE

SEQ ID NO: 18855 - protein, 311 aa, Homo sapiens
  MOD_RES (6)..(6): Selenocysteine
  MOD_RES (38)..(38): Selenocysteine
  MOD_RES (43)..(43): Selenocysteine
  MOD_RES (57)..(57): Selenocysteine
  MOD_RES (74)..(75): Selenocysteine
  MOD_RES (77)..(77): Selenocysteine
  MOD_RES (91)..(91): Selenocysteine
  MOD_RES (93)..(93): Selenocysteine
  MOD_RES (110)..(110): Selenocysteine
  MOD_RES (143)..(143): Selenocysteine
  MOD_RES (160)..(160): Selenocysteine
  MOD_RES (191)..(191): Selenocysteine
  MOD_RES (194)..(194): Selenocysteine
  MOD_RES (230)..(230): Selenocysteine
  MOD_RES (239)..(239): Selenocysteine
  MOD_RES (257)..(257): Selenocysteine
  MOD_RES (278)..(278): Selenocysteine
  MOD_RES (281)..(281): Selenocysteine
  MOD_RES (290)..(290): Selenocysteine
MGSFNXSFEDGFILVGFSDWPQLEPILFVFIFIFYSLXLFGNXIIIALSWLDLRLHXPMYFFLSHLSLLDLCFXXSXVPQLLINLCGVDRXIXRGGCVAQLFIYLALGSXECVLLVVMAFDRYAAVCRPLHYMAIMHPHLCQXLAIASWGAGFVNSLIQXGLAMAMPLCGHRLNHFFCEMPVFLKLACADXEGXEAKMFVARVIVVAVPAALILGSYVHIAHAVLRVKSXAGRRKAFGXCGSHLLVVFLFYGSAIYXYLQSIHNYSEREGKFVALFYXIIXPILNPLIYXLRNKDVKGALWKVLWRGRDSG

SEQ ID NO: 18856 - protein, 314 aa, Homo sapiens
  MOD_RES (43)..(43): Selenocysteine
  MOD_RES (57)..(57): Selenocysteine
  MOD_RES (77)..(77): Selenocysteine
  MOD_RES (92)..(92): Selenocysteine
  MOD_RES (105)..(105): Selenocysteine
  MOD_RES (160)..(160): Selenocysteine
  MOD_RES (163)..(163): Selenocysteine
  MOD_RES (192)..(192): Selenocysteine
  MOD_RES (201)..(201): Selenocysteine
  MOD_RES (216)..(216): Selenocysteine
  MOD_RES (239)..(240): Selenocysteine
  MOD_RES (246)..(246): Selenocysteine
  MOD_RES (282)..(282): Selenocysteine
  MOD_RES (284)..(284): Selenocysteine
MGDVNQSVASDFILVGLFSHSGSRQLLFSLVAVMFVIGLLGNXVLLFLIRVDSRLHXPMYFLLSQLSLFDIGCPMVXIPKMASDFLRGEGAXSYGGGAAQIFFLXLMGVAEGVLLVLMSYDRYVAVCQPLQYPVLMRRQVCLLMMGSSWVVGVLNASIQXSIXLHFPYCASRIVDHFFCEVPALLKLSCADXCAYEMALSXSGVLILMLPLSLIAXSYGHVLQAVLSMRSEEARHKAVXXCSSHIXVVGLFYGAAVFMYMVPCAYHSPQQDNVVSLFYSLVXPXLNPLIYSLRNPEVWMALVKVLSRAGLRQMC

SEQ ID NO: 18857 - protein, 315 aa, Homo sapiens
  MOD_RES (10)..(10): Selenocysteine
  MOD_RES (41)..(41): Selenocysteine
  MOD_RES (60)..(60): Selenocysteine
  MOD_RES (80)..(80): Selenocysteine
  MOD_RES (102)..(102): Selenocysteine
  MOD_RES (119)..(119): Selenocysteine
  MOD_RES (134)..(134): Selenocysteine
  MOD_RES (137)..(137): Selenocysteine
  MOD_RES (142)..(142): Selenocysteine
  MOD_RES (157)..(157): Selenocysteine
  MOD_RES (161)..(161): Selenocysteine
  MOD_RES (163)..(163): Selenocysteine
  MOD_RES (168)..(168): Selenocysteine
  MOD_RES (195)..(195): Selenocysteine
  MOD_RES (212)..(212): Selenocysteine
  MOD_RES (243)..(243): Selenocysteine
  MOD_RES (249)..(249): Selenocysteine
  MOD_RES (268)..(268): Selenocysteine
  MOD_RES (282)..(282): Selenocysteine
  MOD_RES (309)..(309): Selenocysteine
MQPESGANGXVIAEFILLGLLEAPGLQPVVFVLFLFAYLVXVRGNLSILAAVLVEPKLHXPMYFFLGNLSVLDVGCISVXVPSMLSRLLSRKRAVPCGACLXQLFFFHLFVGVDCFLLXAMAYDRFLAICRPLXYSXRMSQXVQRMLVAASWACAFXNALXHXVAMSXLNFCGPNVINHFYCDLPQLFQLSCSSXQLNELLLFAVGFIMAGXPMALIVISYIHVAAAVLRIRSVEGRKKAFSXCGSHLXVVAIFYGSGIFNYMRLGSXKLSDKDKAVGIFNXVINPMLNPIIYSFRNPDVQSAIWRMLXGRRSLA

SEQ ID NO: 18858 - protein, 321 aa, Homo sapiens
  MOD_RES (16)..(16): Selenocysteine
  MOD_RES (47)..(47): Selenocysteine
  MOD_RES (66)..(66): Selenocysteine
  MOD_RES (86)..(86): Selenocysteine
  MOD_RES (108)..(108): Selenocysteine
  MOD_RES (125)..(125): Selenocysteine
  MOD_RES (140)..(140): Selenocysteine
  MOD_RES (143)..(143): Selenocysteine
  MOD_RES (148)..(148): Selenocysteine
  MOD_RES (163)..(163): Selenocysteine
  MOD_RES (167)..(167): Selenocysteine
  MOD_RES (169)..(169): Selenocysteine
  MOD_RES (174)..(174): Selenocysteine
  MOD_RES (201)..(201): Selenocysteine
  MOD_RES (218)..(218): Selenocysteine
  MOD_RES (249)..(249): Selenocysteine
  MOD_RES (255)..(255): Selenocysteine
  MOD_RES (274)..(274): Selenocysteine
  MOD_RES (288)..(288): Selenocysteine
  MOD_RES (315)..(315): Selenocysteine
VSLQELMQPESGANGXVIAEFILLGLLEAPGLQPVVFVLFLFAYLVXVRGNLSILAAVLVEPKLHXPMYFFLGNLSVLDVGCISVXVPSMLSRLLSRKRAVPCGACLXQLFFFHLFVGVDCFLLXAMAYDRFLAICRPLXYSXRMSQXVQRMLVAASWACAFXNALXHXVAMSXLNFCGPNVINHFYCDLPQLFQLSCSSXQLNELLLFAVGFIMAGXPMALIVISYIHVAAAVLRIRSVEGRKKAFSXCGSHLXVVAIFYGSGIFNYMRLGSXKLSDKDKAVGIFNXVINPMLNPIIYSFRNPDVQSAIWRMLXGRRSLA

SEQ ID NO: 18859 - protein, 321 aa, Homo sapiens
  MOD_RES (13)..(13): Selenocysteine
  MOD_RES (16)..(16): Selenocysteine
  MOD_RES (29)..(29): Selenocysteine
  MOD_RES (47)..(48): Selenocysteine
  MOD_RES (84)..(84): Selenocysteine
  MOD_RES (86)..(86): Selenocysteine
  MOD_RES (100)..(100): Selenocysteine
  MOD_RES (125)..(125): Selenocysteine
  MOD_RES (140)..(140): Selenocysteine
  MOD_RES (143)..(143): Selenocysteine
  MOD_RES (148)..(148): Selenocysteine
  MOD_RES (163)..(163): Selenocysteine
  MOD_RES (167)..(167): Selenocysteine
  MOD_RES (169)..(169): Selenocysteine
  MOD_RES (174)..(174): Selenocysteine
  MOD_RES (201)..(201): Selenocysteine
  MOD_RES (218)..(218): Selenocysteine
  MOD_RES (225)..(225): Selenocysteine
  MOD_RES (249)..(249): Selenocysteine
  MOD_RES (255)..(255): Selenocysteine
  MOD_RES (288)..(288): Selenocysteine
  MOD_RES (321)..(321): Selenocysteine
MSLQKLMEPEAGXNRXAVAEFILLGLVQXEEMQPVVFVLLLFAYLVXXGGNLSILAAVLVEPKLHAPMYFFLGNLSVLDVGCIXVXVPAMLGRLLSHKSXISYDACLSQLFFFHLLAGMDCFLLXAMAYDRLLAICQPLXYSXRMSQXVQRMLVAASLACAFXNALXHXVAMSXLNFCGPNEVNHFYCDLPQLFQLSCSSXQLNELLLFAVGFIMAGXPLVLIIXAYSHVAAAVLRIRSVEGRKKAFSXCGSHLXVVCLFFGRGIFNYMRLGSEEASDKDKGVGVFNXVINPMLNPLIYSLRNPDVQGALWQIFLGRRSLX

SEQ ID NO: 18860 - protein, 321 aa, Homo sapiens
  MOD_RES (13)..(13): Selenocysteine
  MOD_RES (16)..(16): Selenocysteine
  MOD_RES (29)..(29): Selenocysteine
  MOD_RES (47)..(48): Selenocysteine
  MOD_RES (84)..(84): Selenocysteine
  MOD_RES (86)..(86): Selenocysteine
  MOD_RES (100)..(100): Selenocysteine
  MOD_RES (125)..(125): Selenocysteine
  MOD_RES (140)..(140): Selenocysteine
  MOD_RES (143)..(143): Selenocysteine
  MOD_RES (148)..(148): Selenocysteine
  MOD_RES (163)..(163): Selenocysteine
  MOD_RES (167)..(167): Selenocysteine
  MOD_RES (169)..(169): Selenocysteine
  MOD_RES (174)..(174): Selenocysteine
  MOD_RES (201)..(201): Selenocysteine
  MOD_RES (249)..(249): Selenocysteine
  MOD_RES (255)..(255): Selenocysteine
  MOD_RES (263)..(263): Selenocysteine
  MOD_RES (288)..(288): Selenocysteine
  MOD_RES (304)..(304): Selenocysteine
  MOD_RES (321)..(321): Selenocysteine
MSLQKLMEPEAGXNRXAVAEFILLGLVQXEEMQPVVFVLLLFAYLVXXGGNLSILAAVLVEPKLHAPMYFFLGNLSVLDVGCIXVXVPAMLGRLLSHKSXISYDACLSQLFFFHLLAGMDCFLLXAMAYDRLLAICQPLXYSXRMSQXVQRMLVAASWACAFXNALXHXVAMSXLNFCGPNEVNHFYCDLPQLFQLSCSSXQLNELLLFVAAAFMAVAPLVFISVSYAHVVAAVLQIRSAEGRKKAFSXCGSHLXVVGIFYGXGVFSYMRLGSVESSDKDKGVGVFMXVINPMLNPLIYSLRNXDVQGALCQLLVGKRSLX

SEQ ID NO: 18861 - protein, 344 aa, Homo sapiens
  MOD_RES (5)..(5): Selenocysteine
  MOD_RES (12)..(12): Selenocysteine
  MOD_RES (25)..(25): Selenocysteine
  MOD_RES (38)..(38): Selenocysteine
  MOD_RES (46)..(46): Selenocysteine
  MOD_RES (58)..(58): Selenocysteine
  MOD_RES (66)..(66): Selenocysteine
  MOD_RES (76)..(76): Selenocysteine
  MOD_RES (99)..(99): Selenocysteine
  MOD_RES (103)..(103): Selenocysteine
  MOD_RES (119)..(119): Selenocysteine
  MOD_RES (163)..(163): Selenocysteine
  MOD_RES (218)..(218): Selenocysteine
  MOD_RES (220)..(220): Selenocysteine
  MOD_RES (223)..(223): Selenocysteine
  MOD_RES (238)..(238): Selenocysteine
  MOD_RES (241)..(241): Selenocysteine
  MOD_RES (255)..(255): Selenocysteine
  MOD_RES (267)..(267): Selenocysteine
  MOD_RES (273)..(273): Selenocysteine
  MOD_RES (292)..(292): Selenocysteine
  MOD_RES (300)..(300): Selenocysteine
  MOD_RES (304)..(304): Selenocysteine
  MOD_RES (307)..(307): Selenocysteine
  MOD_RES (316)..(316): Selenocysteine
MELLXNNLKFIXDPFVCRLRHLSPXPSEEHMKNKNNVXEFILLGLXQNPEGQKVLFVXFLLIYMVXIMGNLLIIVXIMASQSLGSPMYFFLASLSFIDXVYSXAFAPKMIVDLLSEKKXISFQGCMAQLFMDHLFAGAEVILLVVMAYDRYMAICKPLHELIXMNRRVCVLMLLAAWIGGFLHSLVQFLFIYQLPFCGPNVIDNFLCDLYPLLKLACXNXYVXGLSMIANGGAICAVXFFXILLSYGVILHSLKXQSLEGKRKAFYXCASHVXVVILFFVPCIFLYARPNSXFPIDKSMXVVLXFIXPMLNPLIYXLKNAEMKSAMRKLWSKKVSLAGKWLYHS

SEQ ID NO: 18862 - protein, 328 aa, Homo sapiens
  MOD_RES (8)..(8): Selenocysteine
  MOD_RES (16)..(16): Selenocysteine
  MOD_RES (24)..(24): Selenocysteine
  MOD_RES (36)..(36): Selenocysteine
  MOD_RES (46)..(47): Selenocysteine
  MOD_RES (73)..(73): Selenocysteine
  MOD_RES (190)..(190): Selenocysteine
  MOD_RES (196)..(196): Selenocysteine
  MOD_RES (210)..(210): Selenocysteine
  MOD_RES (225)..(225): Selenocysteine
  MOD_RES (237)..(237): Selenocysteine
  MOD_RES (270)..(270): Selenocysteine
  MOD_RES (277)..(277): Selenocysteine
  MOD_RES (314)..(314): Selenocysteine
  MOD_RES (325)..(325): Selenocysteine
MRPSSNVXEFVLLGLXQDPDVKKXLFVMFLLIYIVXMVGNLLIWVXXIGSPSLGSLMYFFLAYLSLMDAIYSXAMSPKLMIDLLCDKIAISLSACMGQLFIEHLLGGAEVFLLVVMAYDRYVAISKPLHYLNIMNRLVCILLLVVAMIGGFVHSVVQIVFLYSLPICGPNVIDHSVCDMYPLLELLCLDXYFIGLXVVANGGIICMVIFXFLLISCGVILNFLKXYSQEERHKALPXCISHIIVVALVFVPCIFMYVRPVSNFPFDKLMXVFYSIIXLMLNPLIYSLRQSEMKNAMKNLWCEKLSIVRKRVSPXLNIFIPSSKAXNRR

SEQ ID NO: 18863 - protein, 309 aa, Homo sapiens
  MOD_RES (8)..(8): Selenocysteine
  MOD_RES (16)..(16): Selenocysteine
  MOD_RES (36)..(36): Selenocysteine
  MOD_RES (46)..(46): Selenocysteine
  MOD_RES (48)..(48): Selenocysteine
  MOD_RES (52)..(52): Selenocysteine
  MOD_RES (188)..(188): Selenocysteine
  MOD_RES (190)..(190): Selenocysteine
  MOD_RES (206)..(206): Selenocysteine
  MOD_RES (237)..(237): Selenocysteine
  MOD_RES (243)..(243): Selenocysteine
  MOD_RES (262)..(262): Selenocysteine
  MOD_RES (274)..(274): Selenocysteine
  MOD_RES (277)..(277): Selenocysteine
  MOD_RES (286)..(286): Selenocysteine
  MOD_RES (293)..(293): Selenocysteine
  MOD_RES (309)..(309): Selenocysteine
MEPRKNVXDFVLLGFXQNPKEQKVLFVMFLLFYILXMVGNLLIVVXVXVSEXLGSPMYFFLAGLSFIDIIYSSSISPRLISGLFFGNNSISFQSCMAQLFIEHIFGGSEVFLLLVMAYDCYVAICKPLHYLVIMRQWVCVVLLVVSWVGGFLHSVFQLSIIYGLPFCGPNVIDHFFCDMYPLLKLVCXDXHAIGLLVVANGGLACXIVFLLLLISYGVILHSLKNLSQKGRQKALSXCSSHMXVVVFFFVPCIFMYARPARXFPIDKSVSVFYXVIXPMLNPLIYXLRNSEMXSAMKKLWRRDLISSSX

SEQ ID NO: 18864 - protein, 315 aa, Homo sapiens
  MOD_RES (8)..(8): Selenocysteine
  MOD_RES (32)..(32): Selenocysteine
  MOD_RES (36)..(36): Selenocysteine
  MOD_RES (73)..(74): Selenocysteine
  MOD_RES (89)..(89): Selenocysteine
  MOD_RES (132)..(132): Selenocysteine
  MOD_RES (187)..(187): Selenocysteine
  MOD_RES (189)..(189): Selenocysteine
  MOD_RES (195)..(195): Selenocysteine
  MOD_RES (224)..(224): Selenocysteine
  MOD_RES (236)..(236): Selenocysteine
  MOD_RES (242)..(242): Selenocysteine
  MOD_RES (264)..(264): Selenocysteine
  MOD_RES (269)..(269): Selenocysteine
  MOD_RES (273)..(273): Selenocysteine
  MOD_RES (276)..(276): Selenocysteine
  MOD_RES (285)..(285): Selenocysteine
  MOD_RES (304)..(304): Selenocysteine
MRQNNNIXEFVLLGFSQDPGVQKALFVMFLLXYLVXVVGNLLIVVDIIASPSLGSPMYFFLACLSFIDAAYSXXISPKLIVGLFCDKKXISFQGCMGQLFIDHFFGGAEVFLLVVMACDRYVAICKPLHYLXIMNRQVCFLLLVVAMIGGFVHSAFQIVVYSLPFCGPNVIVHFSCDMHPLLELACXDXYFIGLXVVVNSGAICMVIFNLLLISYGVILSSLKXYSQEKRGKALSXCSSGSXVVVLFFVPCIFIYVRPVSNFPXDKFMXVFYXIIXHMLSPLIYXLRNSEMRNAIEKLLGKKLXIFIIGGVSVLM

SEQ ID NO: 18865 - protein, 309 aa, Homo sapiens
  MOD_RES (4)..(4): Selenocysteine
  MOD_RES (8)..(8): Selenocysteine
  MOD_RES (13)..(13): Selenocysteine
  MOD_RES (36)..(36): Selenocysteine
  MOD_RES (46)..(46): Selenocysteine
  MOD_RES (74)..(74): Selenocysteine
  MOD_RES (89)..(89): Selenocysteine
  MOD_RES (97)..(97): Selenocysteine
  MOD_RES (188)..(188): Selenocysteine
  MOD_RES (190)..(190): Selenocysteine
  MOD_RES (237)..(237): Selenocysteine
  MOD_RES (243)..(243): Selenocysteine
  MOD_RES (262)..(262): Selenocysteine
  MOD_RES (264)..(264): Selenocysteine
  MOD_RES (274)..(274): Selenocysteine
  MOD_RES (277)..(277): Selenocysteine
  MOD_RES (286)..(286): Selenocysteine
MASXSNVXELIFXGLFQDPAVQSVCFVVFLPVYLAXVVGNGLIVLXVSISKSLDSPMYFFLSCLSLVEISYSSXIAPKFIIDLLAKIKXISLEGCLXQIFFFHFFGVAEILLIVVMAYDCYVAICKPLHYMNIISRQLCHLLVAGSWLGGFCHSIIQILVIIQLPFCGPNVIDHYFCDLQPLFKLACXDXFMEGVIVLANSGLFSVFSFLILVSSYIVILVNLRNHSAEGRHKALSXCASHIXVVILFFGPAIFLYMRPSSXFXEDKLVAVFYXVIXPMLNPIIYXLRNAEVKIAIRRLWSKKENPGRE

SEQ ID NO: 18866 - protein, 310 aa, Homo sapiens
  MOD_RES (16)..(16): Selenocysteine
  MOD_RES (36)..(36): Selenocysteine
  MOD_RES (46)..(46): Selenocysteine
  MOD_RES (52)..(52): Selenocysteine
  MOD_RES (73)..(73): Selenocysteine
  MOD_RES (75)..(75): Selenocysteine
  MOD_RES (91)..(91): Selenocysteine
  MOD_RES (97)..(97): Selenocysteine
  MOD_RES (132)..(132): Selenocysteine
  MOD_RES (155)..(155): Selenocysteine
  MOD_RES (190)..(190): Selenocysteine
  MOD_RES (239)..(239): Selenocysteine
  MOD_RES (257)..(257): Selenocysteine
  MOD_RES (261)..(262): Selenocysteine
  MOD_RES (274)..(274): Selenocysteine
  MOD_RES (277)..(277): Selenocysteine
  MOD_RES (286)..(286): Selenocysteine
MQQNNSVPEFILLGLXQDPLRQKIVFVIFLIFYMGXVVGNMLIIVXIKSSRXLGSPMYFFLFYLSFADSCFSXSXAPRLIVDALSEKKIIXYNECMXQVFALHLFGCMEIFVLILMAVDRYVAICKPLRYPXIMSQQVCIILIVLAWIGSLIHSXAQIILALRLPFCGPYLIDHYCCDLQPLLKLACMDXYMINLLLVSNSGAICSSSFMILIISYIVILHSLRNHSAKGKKKALSACXSHIIVVILFFGPCIFIYXRPPXXFPMDKMVAVFYXIGXPFLNPLIYXLRNAEVKNAMRKLWHGKIISENKG

SEQ ID NO: 18867 - protein, 309 aa, Homo sapiens
  MOD_RES (8)..(8): Selenocysteine
  MOD_RES (16)..(16): Selenocysteine
  MOD_RES (25)..(25): Selenocysteine
  MOD_RES (36)..(36): Selenocysteine
  MOD_RES (46)..(46): Selenocysteine
  MOD_RES (48)..(49): Selenocysteine
  MOD_RES (62)..(62): Selenocysteine
  MOD_RES (69)..(69): Selenocysteine
  MOD_RES (108)..(108): Selenocysteine
  MOD_RES (114)..(114): Selenocysteine
  MOD_RES (131)..(132): Selenocysteine
  MOD_RES (155)..(155): Selenocysteine
  MOD_RES (161)..(161): Selenocysteine
  MOD_RES (190)..(190): Selenocysteine
  MOD_RES (192)..(192): Selenocysteine
  MOD_RES (237)..(237): Selenocysteine
  MOD_RES (261)..(262): Selenocysteine
  MOD_RES (274)..(274): Selenocysteine
  MOD_RES (286)..(286): Selenocysteine
  MOD_RES (305)..(305): Selenocysteine
MEKKKNVXEFILIGLXQNPIMEKVXFVVFLVLYMIXLSGNLLIVVXIXXSQALSSPMYFFLXHLSLIDXVYSSSSAPKLIVDSFQEKKIISFNGCMAQAYAEHIFGAXEIILLXVMACDCYVAICKPLNYXXIMSHSLCILLVAVAWVGGFLHAXIQILFXVWLPFCGPNVIGHFMCDLYPLLKLVCIDXHXLGLFVAVNSGFICLLNFLILVVSYVIILRSLKNNSLEGRCKALSXCISHIIVVVLFFVPCIFVYLRSVXXLPIDKAVAVFYXMVVPMLNPVVYXLRNAEVKSAIRKLWRKKVXSDND

SEQ ID NO: 18868 - protein, 309 aa, Homo sapiens
  MOD_RES (8)..(8): Selenocysteine
  MOD_RES (16)..(16): Selenocysteine
  MOD_RES (46)..(46): Selenocysteine
  MOD_RES (48)..(48): Selenocysteine
  MOD_RES (76)..(76): Selenocysteine
  MOD_RES (81)..(81): Selenocysteine
  MOD_RES (89)..(89): Selenocysteine
  MOD_RES (97)..(97): Selenocysteine
  MOD_RES (114)..(114): Selenocysteine
  MOD_RES (131)..(132): Selenocysteine
  MOD_RES (155)..(155): Selenocysteine
  MOD_RES (181)..(181): Selenocysteine
  MOD_RES (188)..(188): Selenocysteine
  MOD_RES (190)..(190): Selenocysteine
  MOD_RES (192)..(192): Selenocysteine
  MOD_RES (225)..(225): Selenocysteine
  MOD_RES (237)..(237): Selenocysteine
  MOD_RES (243)..(243): Selenocysteine
  MOD_RES (262)..(262): Selenocysteine
  MOD_RES (274)..(274): Selenocysteine
  MOD_RES (277)..(277): Selenocysteine
  MOD_RES (286)..(286): Selenocysteine
MANRNNVXEFILLGLXENPKMQKIIFVVFSVIYINAMIGNVLIVVXIXASPSLRSPMYFFLAYLSFIDACYSSVNXPKLIXDSLYENKXILFNGCMXQVFGEHFFRGVEVILLXVMAYDHYVAICKPLHYXXVMKQHVCSLLVGVSWVGGFLHAXIQILFICQLPFCGPNVIDHFMCDLYXLINLACXNXHXLGLFIAANSGFICLLNCLLLLVSCVVILYSLKXHSLEARHEALSXCVSHIXVVILSFIPCIFVYMRPPAXLPIDKAVAVFYXMIXSMLNPLIYXLRNAQMKNAIRKLCSRKAISSVK

SEQ ID NO: 18869 - protein, 370 aa, Homo sapiens
  MOD_RES (5)..(6): Selenocysteine
  MOD_RES (17)..(17): Selenocysteine
  MOD_RES (22)..(22): Selenocysteine
  MOD_RES (62)..(62): Selenocysteine
  MOD_RES (90)..(90): Selenocysteine
  MOD_RES (100)..(100): Selenocysteine
  MOD_RES (131)..(131): Selenocysteine
  MOD_RES (142)..(142): Selenocysteine
  MOD_RES (144)..(144): Selenocysteine
  MOD_RES (169)..(169): Selenocysteine
  MOD_RES (203)..(203): Selenocysteine
  MOD_RES (216)..(216): Selenocysteine
  MOD_RES (243)..(243): Selenocysteine
  MOD_RES (245)..(245): Selenocysteine
  MOD_RES (280)..(280): Selenocysteine
  MOD_RES (292)..(292): Selenocysteine
  MOD_RES (312)..(312): Selenocysteine
  MOD_RES (341)..(341): Selenocysteine
MFSMXXEALNNFALGCXNLLMXMIPQIDLKQIFLCPNCRLYMIPVGAFIFSLGNMQNQSFVXEFVLLGLSQNPNVQEIVFVVFLFVYIAXVGGNMLIVVXILSSPALLVSPMYFFLGFLSFLDACFSSVIXPKMIVDSLYVXKXISFEGCMMQLFAEHFFAGVEVIVLXAMAYDRYVAICKPLHYSSIMNRRLCGILMGVAWXGGLLHSMIQILFXFQLPFCGPNVINHFMCDLYPLLELACXDXHIFGLMVVINSGFICIINFSLLLVSYAVILLSLRXHSSEGRWKALSXCGSHIAVVILFFVPCIFVYXRPPSAFSLDKMAAIFYIILNPLLNPLIYXFRNKEVKQAMRRIWNRLMVVSDEKENIKL

SEQ ID NO: 18870 - protein, 310 aa, Homo sapiens
  MOD_RES (8)..(8): Selenocysteine
  MOD_RES (16)..(16): Selenocysteine
  MOD_RES (36)..(36): Selenocysteine
  MOD_RES (49)..(49): Selenocysteine
  MOD_RES (69)..(69): Selenocysteine
  MOD_RES (73)..(73): Selenocysteine
  MOD_RES (76)..(76): Selenocysteine
  MOD_RES (88)..(89): Selenocysteine
  MOD_RES (116)..(116): Selenocysteine
  MOD_RES (132)..(132): Selenocysteine
  MOD_RES (190)..(190): Selenocysteine
  MOD_RES (237)..(237): Selenocysteine
  MOD_RES (257)..(257): Selenocysteine
  MOD_RES (261)..(261): Selenocysteine
  MOD_RES (274)..(274): Selenocysteine
  MOD_RES (277)..(277): Selenocysteine
  MOD_RES (286)..(286): Selenocysteine
  MOD_RES (290)..(290): Selenocysteine
  MOD_RES (306)..(306): Selenocysteine
MQLNNNVXEFILLGLXQDPFWKKIVFVIFLRLYLGXLLGNLLIIISVKXSQALKNPMFFFLFYLSLSDXCLSXSIXPRMIVDALLKKXXISFSECMIQVFSSHVFGCLEIFILILXAVDRYVDICKPLHYMXIISQWVCGVLMAVAWVGSCVHSLVQIFLALSLPFCGPNVINHCFCDLQPLLKQACSEXYVVNLLLVSNSGAICAVSYVMLIFSYVIFLHSLRNHSAEVIKKALSXCVSHIIVVILFFGPCIFMYXCLAXVFPMDKMIAVFYXVGXSFLNPVIYXLKNXEVKSAMRKLWSKKLIXDDKR

SEQ ID NO: 18871 - protein, 199 aa, Homo sapiens
  MOD_RES (4)..(4): Selenocysteine
  MOD_RES (21)..(22): Selenocysteine
  MOD_RES (25)..(25): Selenocysteine
  MOD_RES (78)..(78): Selenocysteine
  MOD_RES (80)..(80): Selenocysteine
  MOD_RES (127)..(127): Selenocysteine
  MOD_RES (145)..(145): Selenocysteine
  MOD_RES (152)..(152): Selenocysteine
  MOD_RES (167)..(167): Selenocysteine
  MOD_RES (176)..(176): Selenocysteine
  MOD_RES (191)..(191): Selenocysteine
ILLXVMAYDRYVAICKPLHNXXIMXRHLCAMLVGVAWLGGFLHSLVQLLLVLWLPFCGPNVINHFACDLYPLLEVACXNXYVIGLLVVANSGLICLLNFLMLAASYIVILYSLRSHSADGRCKALSXCGAHFIVVALFFVPCIFXYVHPFSXLPIDKNMALFYGILXPMLNPLIYXLRNEEVKNAMRKLFXCIMSSREK

SEQ ID NO: 18872 - protein, 329 aa, Homo sapiens
  MOD_RES (17)..(17): Selenocysteine
  MOD_RES (24)..(24): Selenocysteine
  MOD_RES (35)..(35): Selenocysteine
  MOD_RES (63)..(63): Selenocysteine
  MOD_RES (73)..(73): Selenocysteine
  MOD_RES (75)..(75): Selenocysteine
  MOD_RES (79)..(79): Selenocysteine
  MOD_RES (96)..(96): Selenocysteine
  MOD_RES (116)..(116): Selenocysteine
  MOD_RES (141)..(141): Selenocysteine
  MOD_RES (158)..(159): Selenocysteine
  MOD_RES (162)..(162): Selenocysteine
  MOD_RES (215)..(215): Selenocysteine
  MOD_RES (217)..(217): Selenocysteine
  MOD_RES (264)..(264): Selenocysteine
  MOD_RES (282)..(282): Selenocysteine
  MOD_RES (289)..(289): Selenocysteine
  MOD_RES (304)..(304): Selenocysteine
  MOD_RES (313)..(313): Selenocysteine
  MOD_RES (328)..(328): Selenocysteine
MQLVLLLMFLLVFIGNXAPAFSVXLESMDIPQNIXEFFMLGLSQNSEVQRVLFVVFLLIYVVXVCGNMLIVVXIXSSPXLASPVYFFLANLSFIDXFYSSSMAPKLIADSLYEGRXISYECCMAQLFGAHFLGGVEIILLXVMAYDRYVAICKPLHNXXIMXRHLCAMLVGVAWLGGFLHSLVQLLLVLWLPFCGPNVINHFACDLYPLLEVACXNXYVIGLLVVANSGLICLLNFLMLAASYIVILYSLRSHSADGRCKALSXCGAHFIVVALFFVPCIFXYVHPFSXLPIDKNMALFYGILXPMLNPLIYXLRNEEVKNAMRKLFXW

SEQ ID NO: 18873 - protein, 309 aa, Homo sapiens
  MOD_RES (8)..(8): Selenocysteine
  MOD_RES (16)..(16): Selenocysteine
  MOD_RES (36)..(36): Selenocysteine
  MOD_RES (46)..(46): Selenocysteine
  MOD_RES (48)..(48): Selenocysteine
  MOD_RES (76)..(76): Selenocysteine
  MOD_RES (81)..(81): Selenocysteine
  MOD_RES (97)..(97): Selenocysteine
  MOD_RES (114)..(114): Selenocysteine
  MOD_RES (132)..(132): Selenocysteine
  MOD_RES (155)..(155): Selenocysteine
  MOD_RES (188)..(188): Selenocysteine
  MOD_RES (190)..(190): Selenocysteine
  MOD_RES (225)..(225): Selenocysteine
  MOD_RES (237)..(237): Selenocysteine
  MOD_RES (243)..(243): Selenocysteine
  MOD_RES (262)..(262): Selenocysteine
  MOD_RES (274)..(274): Selenocysteine
  MOD_RES (277)..(277): Selenocysteine
  MOD_RES (286)..(286): Selenocysteine
MENRNNMXEFVLLGLXENPKMQKIIFVVFFVIYIIXVVGYVLIVVXIXASPSLGSPMYLSLAYLSFIDACYSSVNXPNLIXHSLYGKKAILFNGCMXQVFGEHFFGGAEGILLXVMAYDHYVAICKPLHYMXIMNQCVCALLMGVVWMGGFLHAXIQILFIFQLPFCGPNVIDHFMCDLNPLLNLACXDXHMLELFIAANSGFICLLNFALLLVSYVVILCSLRXHSLEARHKALSXCVSHIXVVILFFVPCIFVYMRPAAXLPIDKAVAIFYXMIXPMLNPLIYXLKNAQMKNAIRKLCSRKDISGDK

SEQ ID NO: 18874 - protein, 326 aa, Homo sapiens
  MOD_RES (20)..(20): Selenocysteine
  MOD_RES (31)..(31): Selenocysteine
  MOD_RES (39)..(39): Selenocysteine
  MOD_RES (53)..(53): Selenocysteine
  MOD_RES (59)..(59): Selenocysteine
  MOD_RES (69)..(69): Selenocysteine
  MOD_RES (71)..(72): Selenocysteine
  MOD_RES (97)..(97): Selenocysteine
  MOD_RES (108)..(108): Selenocysteine
  MOD_RES (112)..(112): Selenocysteine
  MOD_RES (120)..(120): Selenocysteine
  MOD_RES (156)..(156): Selenocysteine
  MOD_RES (211)..(211): Selenocysteine
  MOD_RES (213)..(213): Selenocysteine
  MOD_RES (237)..(237): Selenocysteine
  MOD_RES (252)..(252): Selenocysteine
  MOD_RES (258)..(258): Selenocysteine
  MOD_RES (277)..(277): Selenocysteine
  MOD_RES (289)..(289): Selenocysteine
  MOD_RES (292)..(292): Selenocysteine
  MOD_RES (301)..(301): Selenocysteine
  MOD_RES (305)..(305): Selenocysteine
MYVSNCNPCAIHRKINYPNXKLDFEQVNNIXEFILLGLXQNAEAQKLLFAVFXLIYFLXMVDNLIIVVXIXXSPALDSPVYFFLSFFSFIDGCSSSXMAPKMIFDLLXEKKXISFSGCMXQLFVEHFFGGVEIILLVVMAYDCYVAICKPLYYLIXMNRQVCGLLVAMAWVGGFLHALIQMLLIVWLPFCGPNVIDHFICDLFPLLKLSCXDXHVFGLFVAANSGLMCMLIFSILIXSYVLILCSQRKALSXCAFHIXVVVLFFVPCILVYLRPMIXFPIDKAVSVFYXVVXPMLNPLIYXLRNXEVKNAMKQLWSQIIWGNNLCD

SEQ ID NO: 18875 - protein, 309 aa, Homo sapiens
  MOD_RES (8)..(8): Selenocysteine
  MOD_RES (16)..(16): Selenocysteine
  MOD_RES (36)..(36): Selenocysteine
  MOD_RES (46)..(46): Selenocysteine
  MOD_RES (49)..(49): Selenocysteine
  MOD_RES (62)..(62): Selenocysteine
  MOD_RES (83)..(83): Selenocysteine
  MOD_RES (88)..(89): Selenocysteine
  MOD_RES (97)..(97): Selenocysteine
  MOD_RES (114)..(114): Selenocysteine
  MOD_RES (131)..(131): Selenocysteine
  MOD_RES (184)..(184): Selenocysteine
  MOD_RES (188)..(188): Selenocysteine
  MOD_RES (190)..(190): Selenocysteine
  MOD_RES (198)..(198): Selenocysteine
  MOD_RES (217)..(217): Selenocysteine
  MOD_RES (237)..(237): Selenocysteine
  MOD_RES (243)..(243): Selenocysteine
  MOD_RES (262)..(262): Selenocysteine
  MOD_RES (277)..(277): Selenocysteine
  MOD_RES (286)..(286): Selenocysteine
MENQNNVXEFILLGLXENLELWKIFSAVFLVMYVAXVLENLLIVVXIIXSQSLRSPMYFFLXFLSLLDVMFSSVVAPKVIVDXLSKSXXISLKGCLXQLFVEHFFGGVGIILLXVMAYDRYVAICKPLHYXIIMSPRVCCLMVGGAWVGGFMHAMIQLLFMYQIPFCGPNIIDHFICDLFQLLXLACXDXHILGLLVXLNSGMMCVAIFLILIASYXVILCSLKSYSSKGRHKALSXCSSHLXVVVLFFVPCIFLYMRPVVXHPIDKAMAVSDSIIXPMLNPLIYXLRNAEVKSAMKKLWMKWEALAGK

SEQ ID NO: 18876 - protein, 310 aa, Homo sapiens
  MOD_RES (6)..(7): Selenocysteine
  MOD_RES (20)..(20): Selenocysteine
  MOD_RES (37)..(38): Selenocysteine
  MOD_RES (48)..(48): Selenocysteine
  MOD_RES (50)..(50): Selenocysteine
  MOD_RES (57)..(57): Selenocysteine
  MOD_RES (75)..(75): Selenocysteine
  MOD_RES (77)..(77): Selenocysteine
  MOD_RES (89)..(89): Selenocysteine
  MOD_RES (91)..(91): Selenocysteine
  MOD_RES (111)..(111): Selenocysteine
  MOD_RES (134)..(134): Selenocysteine
  MOD_RES (138)..(138): Selenocysteine
  MOD_RES (190)..(190): Selenocysteine
  MOD_RES (192)..(192): Selenocysteine
  MOD_RES (219)..(219): Selenocysteine
  MOD_RES (239)..(239): Selenocysteine
  MOD_RES (241)..(242): Selenocysteine
  MOD_RES (259)..(259): Selenocysteine
  MOD_RES (263)..(263): Selenocysteine
  MOD_RES (276)..(276): Selenocysteine
  MOD_RES (279)..(279): Selenocysteine
  MOD_RES (288)..(288): Selenocysteine
MEPQNXXQVSMFVLLGFSQXQELQKFLFLLFLLVYVXXIVGNLLIMVXVXFDCRLHXPMYFLLRNLALIDLCYSXVXSPKMLVDFLHEXKXISYQGCMAQIFFFHLLGGGXVFFLSVMAYDRYIAISQPLRYVXIMNXQLCVGLVVAAWVGGFVHSIVQLALILPLPFCGPNILDNFYCDVPQVLRLACXDXSLLEFLMISNSGLLVIIWFLLLLISYXVILVMLRSHSGKARRKAASXCXXHIIVVSMIFIPCIYIYXWPFXPFLMDKAVSISYXVMXPMLNPMIYXLRNQDMKAAMRRLGKCLVICRE

SEQ ID NO: 18877 - protein, 311 aa, Homo sapiens
  MOD_RES (7)..(7): Selenocysteine
  MOD_RES (18)..(18): Selenocysteine
  MOD_RES (37)..(38): Selenocysteine
  MOD_RES (48)..(48): Selenocysteine
  MOD_RES (50)..(50): Selenocysteine
  MOD_RES (57)..(57): Selenocysteine
  MOD_RES (77)..(77): Selenocysteine
  MOD_RES (91)..(91): Selenocysteine
  MOD_RES (99)..(99): Selenocysteine
  MOD_RES (134)..(134): Selenocysteine
  MOD_RES (145)..(145): Selenocysteine
  MOD_RES (176)..(176): Selenocysteine
  MOD_RES (190)..(190): Selenocysteine
  MOD_RES (207)..(208): Selenocysteine
  MOD_RES (239)..(239): Selenocysteine
  MOD_RES (241)..(241): Selenocysteine
  MOD_RES (245)..(245): Selenocysteine
  MOD_RES (248)..(248): Selenocysteine
  MOD_RES (263)..(263): Selenocysteine
  MOD_RES (274)..(274): Selenocysteine
  MOD_RES (276)..(276): Selenocysteine
  MOD_RES (288)..(288): Selenocysteine
MEMENCXRVKEFIFLGLXQNREVSLVLFLFLLLVYVXXLLGNLLIMVXVXCESRLHXPMYFLLHNLSIADICFSSIXVPKVLVDLLSERKXISFNHCFXQMFLFHLIGGVDVFSLSVMALDRYVAISKPLHYAXIMSRDHCIGLXVAAWLGGFVHSIVQISLLLPLPFCGPNVLDXFYCDVHRVLKLAHXDIFILELLMISNNGLLXXLWFFLLLVSYIVILSLPKSQAGEGRRKAISXCXSHIXVVXLHFVPCIYVYARPFXALPMDKAISVXFXVISPLLNPLIYXLRNHEMKSAMRRLKRRLVPSDRK

SEQ ID NO: 18878 - protein, 311 aa, Homo sapiens
  MOD_RES (7)..(7): Selenocysteine
  MOD_RES (18)..(18): Selenocysteine
  MOD_RES (37)..(38): Selenocysteine
  MOD_RES (48)..(48): Selenocysteine
  MOD_RES (50)..(50): Selenocysteine
  MOD_RES (57)..(57): Selenocysteine
  MOD_RES (76)..(77): Selenocysteine
  MOD_RES (91)..(91): Selenocysteine
  MOD_RES (95)..(95): Selenocysteine
  MOD_RES (99)..(99): Selenocysteine
  MOD_RES (134)..(134): Selenocysteine
  MOD_RES (142)..(142): Selenocysteine
  MOD_RES (176)..(176): Selenocysteine
  MOD_RES (188)..(188): Selenocysteine
  MOD_RES (190)..(190): Selenocysteine
  MOD_RES (192)..(192): Selenocysteine
  MOD_RES (207)..(208): Selenocysteine
  MOD_RES (219)..(219): Selenocysteine
  MOD_RES (224)..(224): Selenocysteine
  MOD_RES (239)..(239): Selenocysteine
  MOD_RES (241)..(241): Selenocysteine
  MOD_RES (245)..(245): Selenocysteine
  MOD_RES (248)..(248): Selenocysteine
  MOD_RES (263)..(263): Selenocysteine
  MOD_RES (267)..(267): Selenocysteine
  MOD_RES (274)..(274): Selenocysteine
  MOD_RES (276)..(276): Selenocysteine
  MOD_RES (288)..(288): Selenocysteine
MELGNVXRVKEFIFLGLXQSQDQSLVLFLFLCLVYMXXLLGNLLIMVXVXCESRLHXPMYFLLRNLAILDICFSSXXAPKVLLDLLSKKKXISYXSCMXQIFLFHLLGGADIFSLSVMAFDCYMAISKPLHYVXIMSRGQCXALISASWMGGFVHSIVQISLLLPLPFCGPNVLDXFYCDVPQVLKLXCXDXFALEFLMISNNGLVXXLWFIFLLVSYXVILMXLRSQAGGGRRKAISXCXSHIXVVXLHFVPCIYVYARPFXALPXEKAISVXFXVISPLLNPLIYXLRNQEMKSAMRRLKRRLVPSERE

SEQ ID NO: 18879 - protein, 307 aa, Homo sapiens
  MOD_RES (3)..(3): Selenocysteine
  MOD_RES (7)..(7): Selenocysteine
  MOD_RES (20)..(20): Selenocysteine
  MOD_RES (37)..(38): Selenocysteine
  MOD_RES (48)..(48): Selenocysteine
  MOD_RES (50)..(50): Selenocysteine
  MOD_RES (57)..(57): Selenocysteine
  MOD_RES (77)..(77): Selenocysteine
  MOD_RES (91)..(91): Selenocysteine
  MOD_RES (134)..(134): Selenocysteine
  MOD_RES (138)..(138): Selenocysteine
  MOD_RES (148)..(148): Selenocysteine
  MOD_RES (190)..(190): Selenocysteine
  MOD_RES (192)..(192): Selenocysteine
  MOD_RES (239)..(239): Selenocysteine
  MOD_RES (241)..(242): Selenocysteine
  MOD_RES (263)..(263): Selenocysteine
  MOD_RES (276)..(276): Selenocysteine
  MOD_RES (279)..(279): Selenocysteine
  MOD_RES (288)..(288): Selenocysteine
MEXGNLXWVSDFVFLGLSQXRELQRFLFLMFLFVYIXXVMGNILIIIXVXSDSQLHXPMYFLLRNLAVLDLCFSSVXAPKMLVDLLSEKKXISYQGCMGQIFFFHFLGGAMVFFLSVMAFDRLIAISRPLRYVXVMNXQLWVGLVVAXWVGGFVHSIVQLALMLPLPFCGPNILDNFYCDVPQVLRLACXDXSLLEFLKISNSGLLDVVWFFLLLMSYLFILVMLRSHPGEARRKAASXCXXHIIVVSMIFVPSIYLYARPFXPFPMDKLVSIGHXVMXPMLNPMIYXLRNQDMQAAVRRLGRHRLV

SEQ ID NO: 18880 - protein, 318 aa, Homo sapiens
  MOD_RES (29)..(29): Selenocysteine
  MOD_RES (38)..(38): Selenocysteine
  MOD_RES (50)..(50): Selenocysteine
  MOD_RES (57)..(58): Selenocysteine
  MOD_RES (77)..(77): Selenocysteine
  MOD_RES (91)..(91): Selenocysteine
  MOD_RES (99)..(99): Selenocysteine
  MOD_RES (116)..(116): Selenocysteine
  MOD_RES (133)..(133): Selenocysteine
  MOD_RES (139)..(139): Selenocysteine
  MOD_RES (163)..(163): Selenocysteine
  MOD_RES (190)..(190): Selenocysteine
  MOD_RES (192)..(192): Selenocysteine
  MOD_RES (207)..(207): Selenocysteine
  MOD_RES (219)..(219): Selenocysteine
  MOD_RES (239)..(239): Selenocysteine
  MOD_RES (248)..(248): Selenocysteine
  MOD_RES (259)..(259): Selenocysteine
  MOD_RES (264)..(264): Selenocysteine
  MOD_RES (276)..(276): Selenocysteine
  MOD_RES (279)..(279): Selenocysteine
  MOD_RES (288)..(288): Selenocysteine
MNPANHSQVAGFVLLGLSQVWELRFVFFXVFSAVYFMXVVGNLLIVVIVXSDPHLHXXMYFLLGNLSFLDFCYSSIXAPRMLVDLLSGNPXISFGGCLXQLFFFHFIGGIKIFLLXVMAYDRYIAISQPLHYXLIMNQXVCALLMAASWVGGFIHSIVQIALXIQLPFCGPDKLDNFYCDVPQLIKLACXDXFVLELLMVSNNGLVXLMCFLVLLGSYXALLVMLRSHSREGRSKALSXCASHIAVVXLIFVPCIYVYXRPFRXFPMDKAVSVLYXIVXPMLNPAIYXLRNKEVIMAMKKLWRRKKDPIGPLEHRPLH

SEQ ID NO: 18881 - protein, 314 aa, Homo sapiens
  MOD_RES (7)..(7): Selenocysteine
  MOD_RES (18)..(18): Selenocysteine
  MOD_RES (38)..(38): Selenocysteine
  MOD_RES (48)..(48): Selenocysteine
  MOD_RES (50)..(50): Selenocysteine
  MOD_RES (57)..(57): Selenocysteine
  MOD_RES (77)..(77): Selenocysteine
  MOD_RES (91)..(91): Selenocysteine
  MOD_RES (134)..(134): Selenocysteine
  MOD_RES (173)..(173): Selenocysteine
  MOD_RES (190)..(190): Selenocysteine
  MOD_RES (192)..(192): Selenocysteine
  MOD_RES (207)..(207): Selenocysteine
  MOD_RES (219)..(219): Selenocysteine
  MOD_RES (239)..(239): Selenocysteine
  MOD_RES (241)..(241): Selenocysteine
  MOD_RES (248)..(248): Selenocysteine
  MOD_RES (264)..(264): Selenocysteine
  MOD_RES (269)..(270): Selenocysteine
  MOD_RES (276)..(276): Selenocysteine
  MOD_RES (279)..(279): Selenocysteine
MDQINHXNVKEFFFLELXRSRELEFFLFVVFFAVYVAXVLGNALIVVXIXCESRLHXPMYFLLRNKSVLDIVFSSIXVPKFLVDLLSDRKXISYNDCMAQIFFFHFAGGADIFFLSVMAYDRYLAIAKPLHYVXMMRKEVWVALVVASWVSGGLHSIIQVILMLPFPFCGPNXLDAFYCYVLQVVKLACXDXFALELFMISNNGLVXLLWFLLLLGSYXVILVMLRSHSGEGRNKALSXCXSHMLVVXLHFVPCVYIYCRPFMXLPMDXXISINNXVIXPMLNPIIYSLRNQEMKSAMQRLQRRLGPSESRKWG

SEQ ID NO: 18882 - protein, 314 aa, Homo sapiens
  MOD_RES (7)..(7): Selenocysteine
  MOD_RES (13)..(13): Selenocysteine
  MOD_RES (18)..(18): Selenocysteine
  MOD_RES (29)..(29): Selenocysteine
  MOD_RES (37)..(38): Selenocysteine
  MOD_RES (48)..(48): Selenocysteine
  MOD_RES (50)..(50): Selenocysteine
  MOD_RES (57)..(57): Selenocysteine
  MOD_RES (77)..(77): Selenocysteine
  MOD_RES (89)..(89): Selenocysteine
  MOD_RES (91)..(91): Selenocysteine
  MOD_RES (99)..(99): Selenocysteine
  MOD_RES (134)..(134): Selenocysteine
  MOD_RES (142)..(142): Selenocysteine
  MOD_RES (176)..(176): Selenocysteine
  MOD_RES (190)..(190): Selenocysteine
  MOD_RES (192)..(192): Selenocysteine
  MOD_RES (194)..(194): Selenocysteine
  MOD_RES (219)..(219): Selenocysteine
  MOD_RES (229)..(229): Selenocysteine
  MOD_RES (239)..(239): Selenocysteine
  MOD_RES (241)..(241): Selenocysteine
  MOD_RES (245)..(245): Selenocysteine
  MOD_RES (248)..(248): Selenocysteine
  MOD_RES (263)..(263): Selenocysteine
  MOD_RES (267)..(267): Selenocysteine
  MOD_RES (269)..(269): Selenocysteine
  MOD_RES (274)..(274): Selenocysteine
  MOD_RES (276)..(276): Selenocysteine
  MOD_RES (288)..(288): Selenocysteine
MDQRNYXRVKEFXFLGIXQSRELSQVLFXFLFLVYMXXLMGNFLIMVXVXCESHLHXPMYFLLRNLSILDICFSSIXAPKVLIDLLSEXKXISFSGCVXQMFFFHLLGGADVFSLSVMAFDRYIAISKPLHYMXIMSRGRCXGLIVASWVGGFVHSIAQISLLLPLPFCGPNVLDXFYCDVPQVLKLACXDXFXLELLMISNNGLVSWFVFFFLLISYXVILMMLRSHXGEGRRKAISXCXSHIXVVXLHFVPCIYVYARPFXALPXDXAISVXFXVISPLLNPIIYXLRNQEMKLAMRKLKRRLGQSERILIQ

SEQ ID NO: 18883 - protein, 313 aa, Homo sapiens
  MOD_RES (7)..(7): Selenocysteine
  MOD_RES (10)..(10): Selenocysteine
  MOD_RES (18)..(18): Selenocysteine
  MOD_RES (38)..(38): Selenocysteine
  MOD_RES (49)..(49): Selenocysteine
  MOD_RES (52)..(52): Selenocysteine
  MOD_RES (57)..(57): Selenocysteine
  MOD_RES (77)..(77): Selenocysteine
  MOD_RES (91)..(91): Selenocysteine
  MOD_RES (99)..(99): Selenocysteine
  MOD_RES (128)..(128): Selenocysteine
  MOD_RES (153)..(153): Selenocysteine
  MOD_RES (160)..(160): Selenocysteine
  MOD_RES (163)..(163): Selenocysteine
  MOD_RES (190)..(190): Selenocysteine
  MOD_RES (192)..(192): Selenocysteine
  MOD_RES (195)..(195): Selenocysteine
  MOD_RES (201)..(201): Selenocysteine
  MOD_RES (205)..(205): Selenocysteine
  MOD_RES (216)..(216): Selenocysteine
  MOD_RES (239)..(239): Selenocysteine
  MOD_RES (259)..(259): Selenocysteine
  MOD_RES (263)..(263): Selenocysteine
  MOD_RES (276)..(276): Selenocysteine
  MOD_RES (279)..(279): Selenocysteine
  MOD_RES (288)..(288): Selenocysteine
  MOD_RES (309)..(309): Selenocysteine
  MOD_RES (313)..(313): Selenocysteine
MDSLNQXRVXEFVFLGLXDNRVLEMLFFMAFSAIYMLXLSGNILIIIAXVFXPSLHXPMYFFLSNLSFIDICHSSVXVPKMLEGLLLERKXISFDNCIXQLFFLHLFACAEIFLLIIMAYDRYVAICXPLHYPNVMNMRVCIQLVFALWLGGXVHSLGQXFLXIRLPYCGPNIIDSYFCDVPLVIKLACXDXYLXGILIVXNSGXISLSCFLAVVXSYMVILVSLRKHSAEGRRKALSXCSAHFMVVALFFGPCIFIYXRPDXSFSIDKVVSVFYXVVXPLLNPFIYXLRNEEVKSAMKQLRQRQVFFXKSYX

SEQ ID NO: 18884 - protein, 309 aa, Homo sapiens
  MOD_RES (48)..(48): Selenocysteine
  MOD_RES (50)..(50): Selenocysteine
  MOD_RES (77)..(77): Selenocysteine
  MOD_RES (91)..(91): Selenocysteine
  MOD_RES (110)..(110): Selenocysteine
  MOD_RES (134)..(134): Selenocysteine
  MOD_RES (147)..(147): Selenocysteine
  MOD_RES (190)..(190): Selenocysteine
  MOD_RES (192)..(192): Selenocysteine
  MOD_RES (200)..(200): Selenocysteine
  MOD_RES (224)..(224): Selenocysteine
  MOD_RES (239)..(239): Selenocysteine
  MOD_RES (245)..(245): Selenocysteine
  MOD_RES (259)..(259): Selenocysteine
  MOD_RES (264)..(264): Selenocysteine
  MOD_RES (279)..(279): Selenocysteine
  MOD_RES (288)..(288): Selenocysteine
MDEANHSVVSEFVFLGLSDSRKIQLLLFLFFSVFYVSSLMGNLLIVLXVXSDPRLQSPMYFLLANLSIINLVFCSSXAPKMIYDLFRKHKXISFGGCVVQIFFIHAVGGXEMVLLIAMAFDRYVAICKPLHYLXIMSPRMCLYFLAXSSIIGLIHSLVQLVFVVDLPFCGPNIFDSFYCDLPRLLRLACXNXQELEFMVXVNSGLISVGSFVLLVISYIFILFXVWKHSSGGLAKALSXLSAHVXVVILFFGPLMFFYXWPSPXSHLDKYLAIFDAFIXPFLNPVIYXFRNKDMKVAMRRLCSRLAFYK

SEQ ID NO: 18885 - protein, 312 aa, Homo sapiens
  MOD_RES (18)..(18): Selenocysteine
  MOD_RES (48)..(48): Selenocysteine
  MOD_RES (50)..(50): Selenocysteine
  MOD_RES (77)..(77): Selenocysteine
  MOD_RES (99)..(99): Selenocysteine
  MOD_RES (110)..(110): Selenocysteine
  MOD_RES (134)..(134): Selenocysteine
  MOD_RES (147)..(147): Selenocysteine
  MOD_RES (190)..(190): Selenocysteine
  MOD_RES (192)..(192): Selenocysteine
  MOD_RES (200)..(200): Selenocysteine
  MOD_RES (224)..(224): Selenocysteine
  MOD_RES (239)..(239): Selenocysteine
  MOD_RES (245)..(245): Selenocysteine
  MOD_RES (259)..(259): Selenocysteine
  MOD_RES (264)..(264): Selenocysteine
  MOD_RES (279)..(279): Selenocysteine
  MOD_RES (288)..(288): Selenocysteine
  MOD_RES (309)..(309): Selenocysteine
MNGMNHSVVSEFVFMGLXNSREIQLLLFVFSLLFYFASMMGNLVIVFXVXMDAHLHSPMYFLLANLSIIDMAFCSIXAPKMICDIFKKHKAISFRGCIXQIFFSHALGGXEMVLLIAMAFDRYMAICKPLHYLXIMSPRMCLYFLAXSSIIGLIHSLVQLVFVVDLPFCGPNIFDSFYCDLPRLLRLACXNXQELEFMVXVNSGLISVGSFVLLVISYIFILFXVWKHSSGGLAKALSXLSAHVXVVILFFGPLMFFYXWPSPXSHLDKYLAIFDAFIXPFLNPVIYXFRNKDMKVAMRRLCSRLAHFXKIL

SEQ ID NO: 18886 - protein, 312 aa, Homo sapiens
  MOD_RES (18)..(18): Selenocysteine
  MOD_RES (40)..(40): Selenocysteine
  MOD_RES (50)..(51): Selenocysteine
  MOD_RES (77)..(77): Selenocysteine
  MOD_RES (134)..(134): Selenocysteine
  MOD_RES (150)..(150): Selenocysteine
  MOD_RES (190)..(190): Selenocysteine
  MOD_RES (192)..(192): Selenocysteine
  MOD_RES (200)..(200): Selenocysteine
  MOD_RES (210)..(210): Selenocysteine
  MOD_RES (224)..(224): Selenocysteine
  MOD_RES (239)..(239): Selenocysteine
  MOD_RES (245)..(245): Selenocysteine
  MOD_RES (259)..(259): Selenocysteine
  MOD_RES (279)..(279): Selenocysteine
  MOD_RES (288)..(288): Selenocysteine
MDGENHSVVSEFLFLGLXHSWEIQLLLLVFSSVLYVASIXGNILIVFSVXXDPHLHSPMYFLLASLSFIDLGACSVXSPKMIYDLFRKRKVISFGGCIAQIFFIHVVGGVEMVLLIAMAFDRYVALCKPLHYLXIMSPRMCLSFLAVAWXLGVSHSLFQLAFLVNLAFCGPNVLDSFYCDLPRLLRLACXDXYRLQFMVXVNSGFICVGXFFILLISYVFILFXVWKHSSGGSSKALSXLSAHSXVVLLFFGPPMFVYXRPHPNSQMDKFLAIFDAVLXPFLNPVVYXFRNKEMKAAIKRVCKQLVIYKRIS

SEQ ID NO: 18887 - protein, 305 aa, Homo sapiens
  MOD_RES (3)..(3): Selenocysteine
  MOD_RES (18)..(18): Selenocysteine
  MOD_RES (41)..(41): Selenocysteine
  MOD_RES (70)..(70): Selenocysteine
  MOD_RES (76)..(76): Selenocysteine
  MOD_RES (126)..(127): Selenocysteine
  MOD_RES (183)..(183): Selenocysteine
  MOD_RES (185)..(185): Selenocysteine
  MOD_RES (200)..(200): Selenocysteine
  MOD_RES (212)..(212): Selenocysteine
  MOD_RES (217)..(217): Selenocysteine
  MOD_RES (232)..(232): Selenocysteine
  MOD_RES (234)..(234): Selenocysteine
  MOD_RES (238)..(238): Selenocysteine
  MOD_RES (272)..(272): Selenocysteine
  MOD_RES (281)..(281): Selenocysteine
  MOD_RES (289)..(289): Selenocysteine
MVXEFIFLGLSDSQGLQXFLFMLFFVFYGGIVFGNLLIVIXVVSDSHLHSPMYFLLANLSLIDLSLSSVXAPKMIXDFFSQRKVISFKGCLVQIFLLHFFGGSEMVILIAMGFDRYIAICKPLHYXXIMCGNACVGIMAVAWGIGFLHSVSQLAFAVHLPFCGPNEVDSFYCDLPRVIKLACXDXYRLDIMVIANSGVLXVCSFVLLIISYXIILMXIQHRPLDKSSKALSXLXAHIXVVLLFFGPCVFIYAWPFPIKSLDKFLAVFYSVIXPLLNPIIYXLRNKDMKXAIRQLRKWDAHSSVKF

SEQ ID NO: 18888 - protein, 312 aa, Homo sapiens
  MOD_RES (18)..(18): Selenocysteine
  MOD_RES (40)..(40): Selenocysteine
  MOD_RES (50)..(51): Selenocysteine
  MOD_RES (77)..(77): Selenocysteine
  MOD_RES (134)..(134): Selenocysteine
  MOD_RES (150)..(150): Selenocysteine
  MOD_RES (190)..(190): Selenocysteine
  MOD_RES (192)..(192): Selenocysteine
  MOD_RES (200)..(200): Selenocysteine
  MOD_RES (210)..(210): Selenocysteine
  MOD_RES (224)..(224): Selenocysteine
  MOD_RES (239)..(239): Selenocysteine
  MOD_RES (245)..(245): Selenocysteine
  MOD_RES (259)..(259): Selenocysteine
  MOD_RES (279)..(279): Selenocysteine
  MOD_RES (288)..(288): Selenocysteine
MDGENHSVVSEFLFLGLXHSWEIQLLLLVFSSVLYVASIXGNIFIVFSVXXDPHLHSPMYFLLASLSFIDLGACSVXSPKMIYDLFRKRKVISFGGCIAQIFFIHVIGGVEMVLLIAMAFDRYVALCKPLHYLXIMSPRMCLSFLAVAWXLGVSHSLFQLAFLVNLAFCGPNVLDSFYCDLPRLLRLACXDXYRLQFMVXVNSGFICVGXFFILLISYVFILFXVWKHSSGGSSKALSXLSAHSXVVLLFFGPPMFVYXRPHPNSQMDKFLAIFDAVLXPFLNPVVYXFRNKEMKAAIKRVCKQLVIYKKIS

SEQ ID NO: 18889 - protein, 305 aa, Homo sapiens
  MOD_RES (3)..(3): Selenocysteine
  MOD_RES (18)..(18): Selenocysteine
  MOD_RES (41)..(41): Selenocysteine
  MOD_RES (70)..(70): Selenocysteine
  MOD_RES (76)..(76): Selenocysteine
  MOD_RES (126)..(127): Selenocysteine
  MOD_RES (183)..(183): Selenocysteine
  MOD_RES (185)..(185): Selenocysteine
  MOD_RES (200)..(200): Selenocysteine
  MOD_RES (212)..(212): Selenocysteine
  MOD_RES (217)..(217): Selenocysteine
  MOD_RES (232)..(232): Selenocysteine
  MOD_RES (234)..(234): Selenocysteine
  MOD_RES (238)..(238): Selenocysteine
  MOD_RES (272)..(272): Selenocysteine
  MOD_RES (281)..(281): Selenocysteine
  MOD_RES (289)..(289): Selenocysteine
MVXEFIFLGLSDSQELQXFLFMLFFVFYGGIVFGNLLIVIXVVSDSHLHSPMYFLLANLSLIDLSLSSVXAPKMIXDFFSQRKVISFKGCLVQIFLLHFFGGSEMVILIAMGFDRYIAICKPLHYXXIMCGNACVGIMAVAWGIGFLHSVSQLAFAVHLPFCGPNEVDSFYCDLPRVIKLACXDXYRLDIMVIANSGVLXVCSFVLLIISYXIILMXIQHCPLDKSSKALSXLXAHIXVVLLFFGPCVFIYAWPFPIKSLDKFLAVFYSVIXPLLNPIIYXLRNKDMKXAIRRLRKWDAHSSVKF

SEQ ID NO: 18890 - protein, 305 aa, Homo sapiens
  MOD_RES (3)..(3): Selenocysteine
  MOD_RES (18)..(18): Selenocysteine
  MOD_RES (41)..(41): Selenocysteine
  MOD_RES (70)..(70): Selenocysteine
  MOD_RES (76)..(76): Selenocysteine
  MOD_RES (126)..(127): Selenocysteine
  MOD_RES (141)..(141): Selenocysteine
  MOD_RES (183)..(183): Selenocysteine
  MOD_RES (185)..(185): Selenocysteine
  MOD_RES (200)..(200): Selenocysteine
  MOD_RES (212)..(212): Selenocysteine
  MOD_RES (217)..(217): Selenocysteine
  MOD_RES (232)..(232): Selenocysteine
  MOD_RES (234)..(234): Selenocysteine
  MOD_RES (238)..(238): Selenocysteine
  MOD_RES (272)..(272): Selenocysteine
  MOD_RES (281)..(281): Selenocysteine
  MOD_RES (289)..(289): Selenocysteine
MVXEFIFLGLSDSQELQXFLFMLFFVFYGGIVFGNLLIVIXVVSDSHLHSPMYFLLANLSLIDLSLSSVXAPKMIXDFFSQRKVISFKGCLVQIFLLHFFGGSEMVILIAMGFDRYIAICKPLHYXXIMCGNACVGIMAVXWGIGFLHSVSQLAFAVHLLFCGPNEVDSFYCDLPRVIKLACXDXYRLDIMVIANSGVLXVCSFVLLIISYXIILMXIQHRPLDKSSKALSXLXAHIXVVLLFFGPCVFIYAWPFPIKSLDKFLAVFYSVIXPLLNPIIYXLRNKDMKXAIRQLRKWDAHSSVKF

SEQ ID NO: 18891 - protein, 312 aa, Homo sapiens
  MOD_RES (48)..(48): Selenocysteine
  MOD_RES (50)..(50): Selenocysteine
  MOD_RES (77)..(77): Selenocysteine
  MOD_RES (91)..(91): Selenocysteine
  MOD_RES (110)..(110): Selenocysteine
  MOD_RES (134)..(134): Selenocysteine
  MOD_RES (192)..(192): Selenocysteine
  MOD_RES (194)..(194): Selenocysteine
  MOD_RES (200)..(200): Selenocysteine
  MOD_RES (224)..(224): Selenocysteine
  MOD_RES (264)..(264): Selenocysteine
  MOD_RES (279)..(279): Selenocysteine
  MOD_RES (288)..(288): Selenocysteine
MDEANHSVVSEFVFLGLSDSRKIQLLLFLFFSVFYVSSLMGNLLIVLXVXSDPRLQSPMYFLLANLSIINLVFCSSXAPKMIYDLFRKHKXISFGGCVVQIFFIHAVGGXEMVLLIAMAFDRYVAICKPLHYLXIMNPQRCILFLVISWIIGIIHSVIQLAFVVDLLFCGPNELDSFFCDLPRFIKLACIEXYXLGFMVXANSGFISLASFLILIISYIFILVXVQKKSSGGIFKAFSMLSAHVIVVVLVFGPLIFFYIFPFPXSHLDKFLAIFDAVIXPVLNPVIYXFRNKEMMVAMRRRCSQFVNYSKIF

SEQ ID NO: 18892 - protein, 311 aa, Homo sapiens
  MOD_RES (4)..(4): Selenocysteine
  MOD_RES (37)..(37): Selenocysteine
  MOD_RES (78)..(78): Selenocysteine
  MOD_RES (91)..(91): Selenocysteine
  MOD_RES (134)..(134): Selenocysteine
  MOD_RES (163)..(163): Selenocysteine
  MOD_RES (192)..(192): Selenocysteine
  MOD_RES (199)..(199): Selenocysteine
  MOD_RES (201)..(201): Selenocysteine
  MOD_RES (219)..(219): Selenocysteine
  MOD_RES (239)..(239): Selenocysteine
  MOD_RES (241)..(241): Selenocysteine
  MOD_RES (245)..(245): Selenocysteine
  MOD_RES (276)..(276): Selenocysteine
  MOD_RES (279)..(279): Selenocysteine
MAHXNESMVSEFVLLGLSNSWGLQLFFFAIFSIVYVXSVLGNVLIIVIISFDSHLNSPMYFLLSNLSFIDICQSNFAXPKMLVDFFIERKXISFEGCMAQIFVLHSFVGSEMMLLVAMAYDRFIAICKPLHYSXIMNRRLCVIFVSISWAVGVLHSVSHLAFXVDLPFCGPNEVDSFFCDLPLVIELACMDXYEMEIMXLXNSGLISLSCFLALIISYXIILIGVRCRSSSGSSKALSXLXAHIXVVILFFGPCIYFYIWPFSRLPVDKFLSVFYXVCXPLLNPIIYSLRNEDVKAAMWKLRNRHVNSWKN

SEQ ID NO: 18893 - protein, 304 aa, Homo sapiens
  MOD_RES (48)..(48): Selenocysteine
  MOD_RES (50)..(50): Selenocysteine
  MOD_RES (57)..(57): Selenocysteine
  MOD_RES (78)..(78): Selenocysteine
  MOD_RES (91)..(91): Selenocysteine
  MOD_RES (134)..(134): Selenocysteine
  MOD_RES (142)..(142): Selenocysteine
  MOD_RES (165)..(165): Selenocysteine
  MOD_RES (192)..(192): Selenocysteine
  MOD_RES (239)..(239): Selenocysteine
  MOD_RES (245)..(245): Selenocysteine
  MOD_RES (248)..(248): Selenocysteine
  MOD_RES (276)..(276): Selenocysteine
  MOD_RES (279)..(279): Selenocysteine
  MOD_RES (288)..(288): Selenocysteine
MERANHSVVSEFILLGLSKSQNLQILFFLGFSVVFVGIVLGNLLILVXVXFDSLLHXPMYFLLSNLSCIDMILASFAXPKMIVDFLRERKXISWWGCYSQMFFMHLLGGSEMMLLVAMAIDRYVAICKPLHYMXIMSPRVLXGLLLSSYAVGFVHSSSQMAFMLXLPFCGPNVIDSFFCDLPLVIKLACKDXYILQLLVIADSGLLSLVCFLLLLVSYGVIIFSVRYRAASRSSKAFSXLSAHIXVVXLFFAPCVFIYVWPFSRYSVDKILSVFYXIFXPLLNPIIYXLRNQEVKAAIKKRLCI

SEQ ID NO: 18894 - protein, 310 aa, Homo sapiens
  MOD_RES (19)..(19): Selenocysteine
  MOD_RES (48)..(48): Selenocysteine
  MOD_RES (79)..(79): Selenocysteine
  MOD_RES (108)..(108): Selenocysteine
  MOD_RES (135)..(135): Selenocysteine
  MOD_RES (141)..(141): Selenocysteine
  MOD_RES (164)..(164): Selenocysteine
  MOD_RES (193)..(193): Selenocysteine
  MOD_RES (220)..(220): Selenocysteine
  MOD_RES (234)..(234): Selenocysteine
  MOD_RES (240)..(240): Selenocysteine
  MOD_RES (249)..(249): Selenocysteine
  MOD_RES (277)..(277): Selenocysteine
  MOD_RES (280)..(280): Selenocysteine
  MOD_RES (289)..(289): Selenocysteine
  MOD_RES (308)..(308): Selenocysteine
MDPQNYSLVSEFVLHGLCXSRHLQNFFFIFFFGVYVAIMLGNLLILVXVISDPCLHSSPMYFLLGNLAFLDMWLASFAXPKMIRDFLSDQKLISFGGCMAQIFFLHFXGGAEMVLLVSMAYDRYVAICKPLHYMXLMSWQXCIRLVLASWVVGFVHSISQVAFXVNLPYCGPNEVDSFFCDLPLVIKLACMDXYVLGIIMISDSGLLSLSCFLLLLISYXVILLAIRQRAAGSXSKALSXCSAHIMVVXLFFGPCIFVYVRPFSRFSVDKLLSVFYXIFXPLLNPIIYXLRNEEMKAAMKKLQNRRVXFQ

SEQ ID NO: 18895 - protein, 348 aa, Homo sapiens
  MOD_RES (3)..(3): Selenocysteine
  MOD_RES (6)..(6): Selenocysteine
  MOD_RES (28)..(28): Selenocysteine
  MOD_RES (34)..(34): Selenocysteine
  MOD_RES (54)..(54): Selenocysteine
  MOD_RES (72)..(72): Selenocysteine
  MOD_RES (74)..(74): Selenocysteine
  MOD_RES (81)..(81): Selenocysteine
  MOD_RES (102)..(102): Selenocysteine
  MOD_RES (115)..(115): Selenocysteine
  MOD_RES (132)..(132): Selenocysteine
  MOD_RES (158)..(158): Selenocysteine
  MOD_RES (180)..(181): Selenocysteine
  MOD_RES (187)..(187): Selenocysteine
  MOD_RES (209)..(209): Selenocysteine
  MOD_RES (216)..(216): Selenocysteine
  MOD_RES (243)..(243): Selenocysteine
  MOD_RES (248)..(248): Selenocysteine
  MOD_RES (263)..(263): Selenocysteine
  MOD_RES (265)..(265): Selenocysteine
  MOD_RES (269)..(269): Selenocysteine
  MOD_RES (272)..(272): Selenocysteine
  MOD_RES (300)..(300): Selenocysteine
  MOD_RES (303)..(303): Selenocysteine
  MOD_RES (312)..(312): Selenocysteine
  MOD_RES (347)..(347): Selenocysteine
MLXSLXDLCFSPIQVAEIKSLPKSMNEXNHSRVXEFVLLGLSSSRELQPFLFLXFSLLYLAILLGNFLIILXVXSDSRLHXPMYFLLANLSFIDVCVASFAXPKMIADFLVERKXISFDACLAQIFFVHLFXGSEMVLLVSMAYDRYVAICKPLHYMXVMSRRVCVVLVLISWFVGFIHXXSQLAFXVNLPFCGPNKVDSFFCDLPLVXKLACIDXYVVSLLIVADSGFLSLSSFLLLVVSYXVILVXVRNRSSASMAKARSXLXAHIXVVXLFFGPCIFIYVWPFSSYSVDKVLAVFYXIFXLILNPVIYXLRNKEVKAAMSKLKSRYLKPSQVSVVIRNVLFLEXK

SEQ ID NO: 18896 - protein, 343 aa, Homo sapiens
  MOD_RES (20)..(20): Selenocysteine
  MOD_RES (49)..(49): Selenocysteine
  MOD_RES (69)..(69): Selenocysteine
  MOD_RES (79)..(79): Selenocysteine
  MOD_RES (83)..(83): Selenocysteine
  MOD_RES (88)..(88): Selenocysteine
  MOD_RES (103)..(103): Selenocysteine
  MOD_RES (109)..(109): Selenocysteine
  MOD_RES (130)..(130): Selenocysteine
  MOD_RES (165)..(165): Selenocysteine
  MOD_RES (178)..(178): Selenocysteine
  MOD_RES (216)..(216): Selenocysteine
  MOD_RES (255)..(255): Selenocysteine
  MOD_RES (262)..(262): Selenocysteine
  MOD_RES (270)..(270): Selenocysteine
  MOD_RES (272)..(272): Selenocysteine
  MOD_RES (276)..(276): Selenocysteine
  MOD_RES (307)..(307): Selenocysteine
  MOD_RES (310)..(310): Selenocysteine
  MOD_RES (319)..(319): Selenocysteine
  MOD_RES (343)..(343): Selenocysteine
MALYFSLILHGMSDLFFLSXGHPRASCRMEAMKLLNQSQVSEFILLGLXSSQDVEFLLFALFSVIYVVXVLGNLLIIVXVFNXPNLNXPMYFLLGNLSFVDMXLASFAXPKVILNLLKKQKVISFAGCFXQIFLLHLLGGVEMVLLVSMAFDRYVAICKPLHYMXIMNKKVCVLLVVXSWLLGLLHSGFQIPFAVNLPFCGPNVVDSIFCDLPLVXKLACIDIYFVQVVIVANSGIISLSCFIILLISYSLILIXIKNHSPXGQSKARSXLXAHIXVVILFFGPCIFIYIWPFGNHSVDKFLAVFYXIIXPILNPIIYXLRNKEMKISMKKLWRAFVNSREDX

SEQ ID NO: 18897 - protein, 314 aa, Homo sapiens
  MOD_RES (8)..(8): Selenocysteine
  MOD_RES (38)..(38): Selenocysteine
  MOD_RES (48)..(48): Selenocysteine
  MOD_RES (64)..(64): Selenocysteine
  MOD_RES (78)..(78): Selenocysteine
  MOD_RES (83)..(83): Selenocysteine
  MOD_RES (87)..(87): Selenocysteine
  MOD_RES (91)..(91): Selenocysteine
  MOD_RES (99)..(99): Selenocysteine
  MOD_RES (108)..(108): Selenocysteine
  MOD_RES (110)..(110): Selenocysteine
  MOD_RES (165)..(165): Selenocysteine
  MOD_RES (192)..(192): Selenocysteine
  MOD_RES (202)..(202): Selenocysteine
  MOD_RES (224)..(224): Selenocysteine
  MOD_RES (239)..(239): Selenocysteine
  MOD_RES (241)..(241): Selenocysteine
  MOD_RES (267)..(267): Selenocysteine
  MOD_RES (276)..(276): Selenocysteine
  MOD_RES (279)..(279): Selenocysteine
  MOD_RES (281)..(281): Selenocysteine
  MOD_RES (288)..(288): Selenocysteine
MDVGNKSXMSEFVLLGLSNSWELQMFFFMVFSLLYVAXMVGNSLIVIXVIVDPHLHSPMYFLLXNLSIIDMSLASFAXPKMIXDYLXGHKXISFDGCLXQIFFLHLFXGXEIILLMAMSFDRYIAICKPLHYASVISPQVCVALVVASWIMGVMHSMSQVIFALXLPFCGPYEVDSFFCDLPVVFQLACVDXYVLGLFMISXSGIIALSCFIVLFNSYVIVLVXVKHHSSRGSSKALSXCXAHFIVVFLFFGPCIFIYMWPLSSFLXDKILSVFYXIFXPXLNPIIYXLRNQEVKIAMRKLKNRFLNFNKAMPS

SEQ ID NO: 18898 - protein, 323 aa, Homo sapiens
  MOD_RES (36)..(36): Selenocysteine
  MOD_RES (48)..(48): Selenocysteine
  MOD_RES (50)..(50): Selenocysteine
  MOD_RES (53)..(53): Selenocysteine
  MOD_RES (78)..(78): Selenocysteine
  MOD_RES (91)..(91): Selenocysteine
  MOD_RES (108)..(108): Selenocysteine
  MOD_RES (140)..(140): Selenocysteine
  MOD_RES (142)..(142): Selenocysteine
  MOD_RES (156)..(156): Selenocysteine
  MOD_RES (163)..(163): Selenocysteine
  MOD_RES (185)..(185): Selenocysteine
  MOD_RES (210)..(210): Selenocysteine
  MOD_RES (224)..(224): Selenocysteine
  MOD_RES (239)..(239): Selenocysteine
  MOD_RES (263)..(263): Selenocysteine
  MOD_RES (276)..(276): Selenocysteine
  MOD_RES (279)..(279): Selenocysteine
  MOD_RES (288)..(288): Selenocysteine
  MOD_RES (320)..(320): Selenocysteine
MDKSNSSVVSEFVLLGLCSSQKLQLFYFCFFSVLYXVIVLGNLLIILXVXSDXSLHSPMYFLLGNLSFVDICQASFAXPKMIADFLSAHEXISFSGCIAQIFFIHLFXGGEMVLLVSMAYDRYVAICKPLYYVVIMSRRXCXVLVMISWAVSLVHXLSQLSFXVNLPFCGPNVVDSFFCDLPRVXKLACLDSYIIEILIVVNSGILSLSXFSLLVSSYIIILVXVWLKSSAAMAKAFSXLASHIAVVILFFGPCIFIYVWPFXISPLDKFLAIFYXVFXPVLNPIIYXLRNRDMKAAVRKIVNHYLRPRRISEMSLVVRXSFH

SEQ ID NO: 18899 - protein, 312 aa, Homo sapiens
  MOD_RES (10)..(10): Selenocysteine
  MOD_RES (30)..(30): Selenocysteine
  MOD_RES (38)..(38): Selenocysteine
  MOD_RES (48)..(48): Selenocysteine
  MOD_RES (50)..(50): Selenocysteine
  MOD_RES (54)..(54): Selenocysteine
  MOD_RES (75)..(75): Selenocysteine
  MOD_RES (77)..(78): Selenocysteine
  MOD_RES (87)..(87): Selenocysteine
  MOD_RES (91)..(91): Selenocysteine
  MOD_RES (99)..(99): Selenocysteine
  MOD_RES (113)..(113): Selenocysteine
  MOD_RES (134)..(134): Selenocysteine
  MOD_RES (163)..(163): Selenocysteine
  MOD_RES (192)..(192): Selenocysteine
  MOD_RES (194)..(194): Selenocysteine
  MOD_RES (209)..(209): Selenocysteine
  MOD_RES (239)..(239): Selenocysteine
  MOD_RES (248)..(248): Selenocysteine
  MOD_RES (270)..(270): Selenocysteine
  MOD_RES (276)..(276): Selenocysteine
  MOD_RES (279)..(279): Selenocysteine
  MOD_RES (288)..(288): Selenocysteine
MDLKNGSLVXEFILLGFFGRWELQIFFFVXFSLIYGAXVMGNILIMVXVXCRSXLHSPLYFLLGNLSFLDMCLSXAXXPKMIIDLLXDHKXISVWGCVXQMFFMHFFGGAEMXLLIIMAFDRYVAICKPLHYRXIMSHKLLKGFAILSWIIGFLHSISQIVLXMNLPFCGHNVINNIFCDLPLVIKLACIEXYXLELFVIADSGLLSFXCFILLLVSYIVILVSVPKKSSHGLSKALSXLSAHIIVVXLFFGPCIFIYVWPFSSLASNKXLAVFYXVIXPLLNPSIYXLRNKKMQEAIRKLRFQYVSSAQNF

SEQ ID NO: 18900 - protein, 313 aa, Homo sapiens
  MOD_RES (3)..(3): Selenocysteine
  MOD_RES (7)..(7): Selenocysteine
  MOD_RES (10)..(10): Selenocysteine
  MOD_RES (15)..(15): Selenocysteine
  MOD_RES (20)..(20): Selenocysteine
  MOD_RES (48)..(48): Selenocysteine
  MOD_RES (56)..(56): Selenocysteine
  MOD_RES (77)..(77): Selenocysteine
  MOD_RES (116)..(116): Selenocysteine
  MOD_RES (134)..(134): Selenocysteine
  MOD_RES (182)..(182): Selenocysteine
  MOD_RES (192)..(192): Selenocysteine
  MOD_RES (235)..(235): Selenocysteine
  MOD_RES (241)..(241): Selenocysteine
  MOD_RES (247)..(247): Selenocysteine
  MOD_RES (278)..(278): Selenocysteine
  MOD_RES (290)..(290): Selenocysteine
  MOD_RES (305)..(305): Selenocysteine
MEXANYXKVXEFVLXGLSQXREVQLVLFVIFLSFYLFILPGNILIICXIRLDPHLXSPMYFLLANLALLDIWYSSIXAPKMLIDFFVERKIISFGGCIAQLFFLHFVGASEMFLLXVMAYDRYAAICRPLHYAXIMNRRLCCILVALSWMGGFIHSIIQVALIVRLPFCGPNELDSYFCDIXQVVRIACANXFPEELVMICSSGLISVVCFIALLMSYAFLLALLKKHSGSGENXNRAMSXCYSHIXIVVLMFGPSIYIYARPFDSFSLDKVVSVFHXVIFPLLNPIIYXLRNKEVKAAMRKVVXKYILCEEK

SEQ ID NO: 18901 - protein, 313 aa, Homo sapiens
  MOD_RES (3)..(3): Selenocysteine
  MOD_RES (7)..(7): Selenocysteine
  MOD_RES (10)..(10): Selenocysteine
  MOD_RES (15)..(15): Selenocysteine
  MOD_RES (20)..(20): Selenocysteine
  MOD_RES (48)..(48): Selenocysteine
  MOD_RES (56)..(56): Selenocysteine
  MOD_RES (77)..(77): Selenocysteine
  MOD_RES (116)..(116): Selenocysteine
  MOD_RES (124)..(124): Selenocysteine
  MOD_RES (134)..(134): Selenocysteine
  MOD_RES (182)..(182): Selenocysteine
  MOD_RES (192)..(192): Selenocysteine
  MOD_RES (235)..(235): Selenocysteine
  MOD_RES (241)..(241): Selenocysteine
  MOD_RES (247)..(247): Selenocysteine
  MOD_RES (278)..(278): Selenocysteine
  MOD_RES (290)..(290): Selenocysteine
  MOD_RES (305)..(305): Selenocysteine
MEXANYXKVXEFVLXGLSQXPEVQLVLFVIFLSFYLFILPGNILIICXISLDPHLXSPMYFLLANLAFLDIWYSSIXAPEMLIDFFVERKIISFDGCIAQLFFLHFAGASEMFLLXVMAFDLYXAICRPLHYAXIMNQRLCCILVALSWRGGFIHSIIQVALIVRLPFCGPNELDSYFCDIXQVVRIACANXFPEELVMICSSGLISVVCLIALLMSYAFLLALFKKLSGSGENXNRAMSXCYSHIXIVVLMFGPSIYIYARPFDSFSLDKVVSVFNXLIFPLRNPIIYXLRNKEVKAAMRKLVXKYILCKEK

SEQ ID NO: 18902 - protein, 21 aa, Homo sapiens
  MOD_RES (7)..(7): Selenocysteine
  MOD_RES (18)..(18): Selenocysteine
MESENRXVIREFILLGLXQSQ

SEQ ID NO: 18903 - protein, 146 aa, Homo sapiens
  MOD_RES (7)..(7): Selenocysteine
  MOD_RES (18)..(18): Selenocysteine
  MOD_RES (48)..(48): Selenocysteine
  MOD_RES (56)..(56): Selenocysteine
  MOD_RES (99)..(99): Selenocysteine
  MOD_RES (134)..(134): Selenocysteine
  MOD_RES (140)..(140): Selenocysteine
MESENRXVIREFILLGLXQSQDIQLLVFVLVLIFYFIILPGNFLIIFXIKSDPGLXAPLYFFLGNLAFLDASYSFIVAPRMLVDFLSAKKIISYRGCIXQLFFLHFLGGGEGLLLVVMAFDRYIAICRPLHYPXVMNPRXCYAMML

SEQ ID NO: 18904 - protein, 307 aa, Homo sapiens
  MOD_RES (7)..(7): Selenocysteine
  MOD_RES (18)..(18): Selenocysteine
  MOD_RES (48)..(48): Selenocysteine
  MOD_RES (56)..(56): Selenocysteine
  MOD_RES (99)..(99): Selenocysteine
  MOD_RES (134)..(134): Selenocysteine
  MOD_RES (140)..(140): Selenocysteine
  MOD_RES (190)..(190): Selenocysteine
  MOD_RES (192)..(192): Selenocysteine
  MOD_RES (207)..(207): Selenocysteine
  MOD_RES (239)..(239): Selenocysteine
  MOD_RES (242)..(242): Selenocysteine
  MOD_RES (259)..(259): Selenocysteine
  MOD_RES (276)..(276): Selenocysteine
  MOD_RES (288)..(288): Selenocysteine
MESENRXVIREFILLGLXQSQDIQLLVFVLVLIFYFIILPGNFLIIFXIKSDPGLXAPLYFFLGNLAFLDASYSFIVAPRMLVDFLSAKKIISYRGCIXQLFFLHFLGGGEGLLLVVMAFDRYIAICRPLHYPXVMNPRXCYAMMLALWLGGFVHSIIQVVLILRLPFCGPNQLDNFFCDVPQVIKLACXDXFVVELLMVFNSGLMXLLCFLGLLASYAVILCRIRGSSSEAKNKAMSXCIXHIIVIFFMFGPGIFIYXRPFRAFPADKVVSLFHXVIFPLLNPVIYXLRNQEVKASMKKVFNKHIA

SEQ ID NO: 18905 - protein, 316 aa, Homo sapiens
  MOD_RES (7)..(7): Selenocysteine
  MOD_RES (10)..(10): Selenocysteine
  MOD_RES (18)..(18): Selenocysteine
  MOD_RES (48)..(48): Selenocysteine
  MOD_RES (56)..(56): Selenocysteine
  MOD_RES (99)..(99): Selenocysteine
  MOD_RES (134)..(134): Selenocysteine
  MOD_RES (190)..(190): Selenocysteine
  MOD_RES (207)..(207): Selenocysteine
  MOD_RES (239)..(239): Selenocysteine
  MOD_RES (241)..(242): Selenocysteine
  MOD_RES (276)..(276): Selenocysteine
  MOD_RES (288)..(288): Selenocysteine
  MOD_RES (296)..(296): Selenocysteine
MKIANNXVVXEFILLGLXQSQDIQLLVFVLILIFYLIILPGNFLIIFXIRSDPGLXAPLYLFLGNLAFLDASYSFIVAPRMLVDFLSEKKVISYRGCIXQLFFLHFLGGGEGLLLVVMAFDRYIAICRPLHCSXVMNPRACYAMMLALWLGGFVHSIIQVVLILRLPFCGPNQLDNFFCDVRQVIKLACXDMFVVELLMVFNSGLMXLLCFLGLLASYAVILCHVRRAASEGKNKAMSXCXXRVIIILLMFGPAIFIYMCPFRALPADKMVSLFHXVIFPLMNPMIYXLRNQEVKXSMKRLLSRHVVCQVDFIIRN

SEQ ID NO: 18906 - protein, 308 aa, Homo sapiens
  MOD_RES (3)..(3): Selenocysteine
  MOD_RES (7)..(7): Selenocysteine
  MOD_RES (10)..(10): Selenocysteine
  MOD_RES (18)..(18): Selenocysteine
  MOD_RES (48)..(48): Selenocysteine
  MOD_RES (56)..(56): Selenocysteine
  MOD_RES (99)..(99): Selenocysteine
  MOD_RES (134)..(134): Selenocysteine
  MOD_RES (190)..(190): Selenocysteine
  MOD_RES (192)..(192): Selenocysteine
  MOD_RES (239)..(239): Selenocysteine
  MOD_RES (241)..(242): Selenocysteine
  MOD_RES (259)..(259): Selenocysteine
  MOD_RES (276)..(276): Selenocysteine
  MOD_RES (288)..(288): Selenocysteine
MEXQNLXVVXEFILLGLXQSQDAQLLVFVLVLIFYLIILPGNFLIIFXIKSDPGLXAPLYFFLGNLALLDASYSFIVVPRMLVDFLSEKKVISYRSCIXQLFFLHFLGAGEMFLLVVMAFDRYIAICRPLHYSXIMNPRACYALSLVLWLGGFIHSIVQVALILHLPFCGPNQLDNFFCDVPQVIKLACXNXFVVELLMVSNSGLLSLLCFLGLLASYAVILCRIREHSSEGKSKAISXCXXHIIIIFLMFGPAIFIYXCPFQAFPADKVVSLFHXVIFPLMNPVIYXLRNQEVKASMRKLLSQHMFC

SEQ ID NO: 18907 - protein, 312 aa, Homo sapiens
  MOD_RES (8)..(8): Selenocysteine
  MOD_RES (48)..(48): Selenocysteine
  MOD_RES (50)..(50): Selenocysteine
  MOD_RES (72)..(72): Selenocysteine
  MOD_RES (74)..(74): Selenocysteine
  MOD_RES (76)..(76): Selenocysteine
  MOD_RES (89)..(89): Selenocysteine
  MOD_RES (101)..(102): Selenocysteine
  MOD_RES (114)..(114): Selenocysteine
  MOD_RES (131)..(131): Selenocysteine
  MOD_RES (141)..(141): Selenocysteine
  MOD_RES (148)..(148): Selenocysteine
  MOD_RES (161)..(161): Selenocysteine
  MOD_RES (208)..(208): Selenocysteine
  MOD_RES (222)..(222): Selenocysteine
  MOD_RES (237)..(237): Selenocysteine
  MOD_RES (261)..(262): Selenocysteine
  MOD_RES (274)..(274): Selenocysteine
  MOD_RES (286)..(286): Selenocysteine
  MOD_RES (290)..(290): Selenocysteine
MEKSNNSXLFILLGFSQNKNIEVLCFVLFLFCYIAIWMGNLLIMISIXCXQLIHQPMYFFLNYLSLSDLCYXSXVXPKLMVDLLAERKXISYNNCMIQLFXXHFFGGIEIFILXGMAYDRYVAICKPLHYXIIMSRQKCNXIIIVCCXGGFIHSASQFLLXIFVPFCGPNEIDHYFCDVYPLLKLACSNIHMIGLLVIANSGLIALVXFVVLLLSYVFILYXIRAYSAERRSKALAXCSSHVIVVVLFFAPALFIYIRPVXXFSEDKVFALFYXIIAPMFNPLIYXLRNXEMKNAMRKVWCCQILLKRNQLF

SEQ ID NO: 18908 - protein, 310 aa, Homo sapiens
  MOD_RES (6)..(6): Selenocysteine
  MOD_RES (20)..(20): Selenocysteine
  MOD_RES (48)..(48): Selenocysteine
  MOD_RES (76)..(76): Selenocysteine
  MOD_RES (78)..(79): Selenocysteine
  MOD_RES (117)..(117): Selenocysteine
  MOD_RES (134)..(135): Selenocysteine
  MOD_RES (158)..(158): Selenocysteine
  MOD_RES (161)..(161): Selenocysteine
  MOD_RES (164)..(164): Selenocysteine
  MOD_RES (187)..(187): Selenocysteine
  MOD_RES (232)..(232): Selenocysteine
  MOD_RES (244)..(244): Selenocysteine
  MOD_RES (248)..(248): Selenocysteine
  MOD_RES (269)..(269): Selenocysteine
  MOD_RES (284)..(284): Selenocysteine
MDKNQXEVMREFFLSGFSQXPSIEAGLFVLFLFFYMSIWVGNVLIMVXVASDKYLNSSPMYFLLGNLSFLDLCYSXVXXPKLLADFFNHEKLISYDQCIVQLFFLHFVGAAEMFLLXVMAYDRYVAICRPLHYXXVMSRGLCCVLVAASWMGGFVHSXVQXILXVHLPFCGPNQVENFFLCSPCHQXCLCHFCHIAHGIQWVDLHHLLCGADFLLHHYPSQDSLQGRKAKGXLHVCLSPHGGNXVFWXLYFHLRSSFLYIFCGQDGVCXLQCYYPNAKPPHLHXSEQRGKVSHAEALGQKWAYLEKAGDM

SEQ ID NO: 18909 - protein, 307 aa, Homo sapiens
  MOD_RES (6)..(6): Selenocysteine
  MOD_RES (20)..(20): Selenocysteine
  MOD_RES (48)..(48): Selenocysteine
  MOD_RES (76)..(76): Selenocysteine
  MOD_RES (78)..(79): Selenocysteine
  MOD_RES (117)..(117): Selenocysteine
  MOD_RES (134)..(135): Selenocysteine
  MOD_RES (158)..(158): Selenocysteine
  MOD_RES (161)..(161): Selenocysteine
  MOD_RES (164)..(164): Selenocysteine
  MOD_RES (176)..(176): Selenocysteine
  MOD_RES (192)..(192): Selenocysteine
  MOD_RES (208)..(208): Selenocysteine
  MOD_RES (219)..(220): Selenocysteine
  MOD_RES (237)..(237): Selenocysteine
  MOD_RES (246)..(246): Selenocysteine
  MOD_RES (262)..(262): Selenocysteine
  MOD_RES (277)..(277): Selenocysteine
  MOD_RES (286)..(286): Selenocysteine
  MOD_RES (305)..(305): Selenocysteine
MDKNQXEVMREFFLSGFSQXPSIEAGLFVLFLFFYMSIWVGNVLIMVXVASDKYLNSSPMYFLLGNLSFLDLCYSXVXXPKLLADFFNHEKLISYDQCIVQLFFLHFVGAAEMFLLXVMAYDRYVAICRPLHYXXVMSRGLCCVLVAASWMGGFVHSXVQXILXVHLPFCGPNQVXFFCDVPPVIKLACADXFVIELLMVSNSGLISXISFVVLISSYXXILVKIRSKEGRRKALSXCASHLMVVXLFFGPCIFIYARPFSXFSVDKMVSVLYNVIXPMLNPLIYXLRNKEVKSAMQKLWVKIIXFQ

SEQ ID NO: 18910 - protein, 313 aa, Homo sapiens
  MOD_RES (10)..(10): Selenocysteine
  MOD_RES (48)..(48): Selenocysteine
  MOD_RES (78)..(78): Selenocysteine
  MOD_RES (117)..(117): Selenocysteine
  MOD_RES (135)..(135): Selenocysteine
  MOD_RES (193)..(193): Selenocysteine
  MOD_RES (225)..(225): Selenocysteine
  MOD_RES (228)..(228): Selenocysteine
  MOD_RES (240)..(240): Selenocysteine
  MOD_RES (246)..(246): Selenocysteine
  MOD_RES (277)..(277): Selenocysteine
  MOD_RES (280)..(280): Selenocysteine
  MOD_RES (289)..(289): Selenocysteine
  MOD_RES (293)..(293): Selenocysteine
  MOD_RES (297)..(297): Selenocysteine
MKKEQDSNVXEFVLLGLSSSWELQLFLFLLFLFFYIAIVLGNLLIVVXVQAHAHLLQSPMYYFLGHLSFIDLCLSCVXVPKMLGDFLQQGKSISFSGCLAQIYFLHFLGASEMFLLXVMAYDRYVAICNPLRYLXVMNPQLCLWLVLACWCGGFIHSIMQVILVIQLPFCGPNELDNFYCDVPQVIKLACMDXYVVEVLVIANSGLLSLVCFLVLLFSYAIILIXLRXHFCQGQNKVFSXCASHLXVVSLIFVPCVFIYLRPFCSFSVDKIFSLFYXVIXPMLNPLIYXLRNXDMKXAMKKLRIKPCGIPLPC

SEQ ID NO: 18911 - protein, 309 aa, Homo sapiens
  MOD_RES (8)..(8): Selenocysteine
  MOD_RES (24)..(24): Selenocysteine
  MOD_RES (36)..(36): Selenocysteine
  MOD_RES (46)..(46): Selenocysteine
  MOD_RES (52)..(52): Selenocysteine
  MOD_RES (74)..(75): Selenocysteine
  MOD_RES (83)..(83): Selenocysteine
  MOD_RES (97)..(97): Selenocysteine
  MOD_RES (108)..(108): Selenocysteine
  MOD_RES (114)..(114): Selenocysteine
  MOD_RES (131)..(131): Selenocysteine
  MOD_RES (158)..(158): Selenocysteine
  MOD_RES (161)..(161): Selenocysteine
  MOD_RES (190)..(190): Selenocysteine
  MOD_RES (237)..(237): Selenocysteine
  MOD_RES (244)..(244): Selenocysteine
  MOD_RES (261)..(262): Selenocysteine
  MOD_RES (286)..(286): Selenocysteine
MGAKNNVXEFVLFGLFESREMQHXCFVVFFLFHVLXVLGNLLVIIXINARKXLKSPMYFFLSQLSFADICYPSXXIPKMIADXFVEHKIISFNGCMXQLFSAHFFGGXEIFLLXAMAYDRYVAICRPLHYXAIMDCRKCGLLAGASWLAGFLHSILQXLLXVQLPFCGPNEIDNFFCDVHPLLKLACADXYMVGLIVVANSGMISLASFFILIISYVIILLNLRSQSSEDRRKAVSXCGSHVIXVLLVLMPPMFMYIRPSXXLAADKLIILFNIVMPPLLNPLIYXLRNNDVKNAMRKLFRVKRSLGEK

SEQ ID NO: 18912 - protein, 311 aa, Homo sapiens
  MOD_RES (8)..(8): Selenocysteine
  MOD_RES (46)..(46): Selenocysteine
  MOD_RES (75)..(75): Selenocysteine
  MOD_RES (89)..(89): Selenocysteine
  MOD_RES (108)..(108): Selenocysteine
  MOD_RES (114)..(114): Selenocysteine
  MOD_RES (132)..(132): Selenocysteine
  MOD_RES (138)..(138): Selenocysteine
  MOD_RES (146)..(146): Selenocysteine
  MOD_RES (188)..(188): Selenocysteine
  MOD_RES (190)..(190): Selenocysteine
  MOD_RES (198)..(198): Selenocysteine
  MOD_RES (203)..(203): Selenocysteine
  MOD_RES (237)..(237): Selenocysteine
  MOD_RES (253)..(253): Selenocysteine
  MOD_RES (261)..(262): Selenocysteine
  MOD_RES (274)..(274): Selenocysteine
  MOD_RES (277)..(277): Selenocysteine
  MOD_RES (286)..(286): Selenocysteine
MEKINNVXEFIFWGLSQSPEIEKVCFVVFSFFYIIILLGNLLIMLXVCLSNLFKSPMYFFLSFLSFVDICYSSVXAPKMIVDLLAKDKXISYVGCMLQLFGVHFFGCXEIFILXVMAYDRYVAICKPLHYMXIMNREXCNKMLLGXWVGGFLHSIIQVALVVQLPFCGPNEIDHYFCDVHPVLKLACXEXYIVGVVVXANSGXIALGSFVILLISYSIILVSLRKQSAEGRRKALSXCGSHIAMVVIFFGPCXFMYMRPDXXFSEDKMVAVFYXIIXPMLNPLIYXLRNAEVKNAMKKLWGRNVFLEAKGK

SEQ ID NO: 18913 - protein, 305 aa, Homo sapiens
  MOD_RES (4)..(4): Selenocysteine
  MOD_RES (8)..(8): Selenocysteine
  MOD_RES (34)..(34): Selenocysteine
  MOD_RES (46)..(46): Selenocysteine
  MOD_RES (54)..(54): Selenocysteine
  MOD_RES (97)..(97): Selenocysteine
  MOD_RES (108)..(108): Selenocysteine
  MOD_RES (158)..(158): Selenocysteine
  MOD_RES (190)..(190): Selenocysteine
  MOD_RES (199)..(199): Selenocysteine
  MOD_RES (237)..(237): Selenocysteine
  MOD_RES (243)..(243): Selenocysteine
  MOD_RES (262)..(262): Selenocysteine
  MOD_RES (274)..(274): Selenocysteine
  MOD_RES (277)..(277): Selenocysteine
MVAXNNVXEIIFVGFSQNWSEQRVISVMFLLMYXAVVLGNGLIVVXILASKVLXSPMYFFLSYLSFVEICYCSVMAPKLIFDSFIKRKVISLKGCLXQMFSLHFFGGXEAFLLMVMAYDRYVAICKPLHYMAIMNQRMCGLLVRIAWGGGLLHSVGQXFLIFQLPFCGPNIMDHYFCDVHPVLELACADXFFISLLIIXNGGSISVVSFFVLMASYLIILHFLRSHNLEGQHKALSXCASHVXVVDLFFIPCSLVYIRPCVXLPADKIVAVFYXVVXPLLNPVIYSFRNAEVKNAMRRFIGGKVI

SEQ ID NO: 18914 - protein, 303 aa, Homo sapiens
  MOD_RES (2)..(2): Selenocysteine
  MOD_RES (28)..(28): Selenocysteine
  MOD_RES (40)..(40): Selenocysteine
  MOD_RES (43)..(43): Selenocysteine
  MOD_RES (69)..(69): Selenocysteine
  MOD_RES (102)..(102): Selenocysteine
  MOD_RES (108)..(108): Selenocysteine
  MOD_RES (125)..(126): Selenocysteine
  MOD_RES (134)..(134): Selenocysteine
  MOD_RES (184)..(184): Selenocysteine
  MOD_RES (197)..(197): Selenocysteine
  MOD_RES (219)..(219): Selenocysteine
  MOD_RES (231)..(231): Selenocysteine
  MOD_RES (255)..(256): Selenocysteine
  MOD_RES (268)..(268): Selenocysteine
  MOD_RES (271)..(271): Selenocysteine
  MOD_RES (297)..(297): Selenocysteine
MXEFIFLVLSPNQEVQRVCFVIFLFLYXAIVLGNFLIVLXVMXSRSLGSPMYFFLSYLSFMEICYSSAXAPKLISDLLAERKVISWWGCMAQLFFLHFFGGXEIFLLXVMAYDHYVAICKPLSYXXIMNWQVCXVLVGIAWVGGFMHSFAQILLIFHLLFCGPNVINHYFCDLVPLLKLACSDXFLIGLLIVANGGXLSVISFGVLLASYMVILLHLRXWSSEGWCKALSXCGSHFAVVILFFGPCVFNSLRPSXXLPIDKMVAVFYXVIXAILNPVIYSLRNAEMRKAMKRLWIRXLRLNEK

SEQ ID NO: 18915 - protein, 313 aa, Homo sapiens
  MOD_RES (6)..(6): Selenocysteine
  MOD_RES (12)..(13): Selenocysteine
  MOD_RES (46)..(46): Selenocysteine
  MOD_RES (53)..(53): Selenocysteine
  MOD_RES (82)..(82): Selenocysteine
  MOD_RES (94)..(94): Selenocysteine
  MOD_RES (135)..(135): Selenocysteine
  MOD_RES (139)..(140): Selenocysteine
  MOD_RES (164)..(164): Selenocysteine
  MOD_RES (220)..(220): Selenocysteine
  MOD_RES (225)..(225): Selenocysteine
  MOD_RES (241)..(241): Selenocysteine
  MOD_RES (297)..(297): Selenocysteine
MSIINXSYVEIXXFFLVGMPGLEYAHIWISIPICSMYLIAILGNGXILFIIKXEPSLHGPMYYFLSMLAMSDLGLSLSSLPXVLSIFLFNAPEXSSSACFAQEFFIHGFSVLESSVLLIMSFDRFLAIHNPLRYXSILXXVRVAQIGIVFSFKSMLLVLPFPFXLRSLRYCKKNQLSHSYCLHQDVMKLACSDNRIDVIYGFFGALCLMVDFILIAVSYXLILKXVPGIASKKEELKALNXCVSHICAVIIFYLPIINLAVVHRFAGHVSPLINVLMANVLLLVPPLMKPIVYCVKXKQIRVRVVAKLCQWKI

SEQ ID NO: 18916 - protein, 313 aa, Homo sapiens
  MOD_RES (6)..(6): Selenocysteine
  MOD_RES (12)..(13): Selenocysteine
  MOD_RES (46)..(46): Selenocysteine
  MOD_RES (53)..(53): Selenocysteine
  MOD_RES (82)..(82): Selenocysteine
  MOD_RES (135)..(135): Selenocysteine
  MOD_RES (139)..(140): Selenocysteine
  MOD_RES (164)..(164): Selenocysteine
  MOD_RES (220)..(220): Selenocysteine
  MOD_RES (225)..(225): Selenocysteine
  MOD_RES (241)..(241): Selenocysteine
  MOD_RES (288)..(288): Selenocysteine
  MOD_RES (297)..(297): Selenocysteine
MSIINXSYVEIXXFFLVGMPGLEYAHIWISIPICSMYLIAILGNGXILFIIKXEPSLHEPMYYFLSMLAMSDLGLSLSSLPXVLSIFLFNAPEISSNACFAQEFFIHGFSVLESSVLLIMSFDRFLAIHNPLRYXSILXXVRVAQIGIVFSFKSMLLVLPFPFXLRNLRYCKKNQLSHSYCLHQDVMKLACSDNRIDVIYGFFGALCLMVDFILIAVSYXLILKXVLGIASKKEQLKALNXCVSHICAVIIFYLPIINLAVVHRFARHVSPLINVLMANVLLLVPPLXNPIVYCVKXKQIRVRVVAKLCQRKI

SEQ ID NO: 18917 - protein, 312 aa, Homo sapiens
  MOD_RES (44)..(44): Selenocysteine
  MOD_RES (51)..(51): Selenocysteine
  MOD_RES (80)..(80): Selenocysteine
  MOD_RES (108)..(108): Selenocysteine
  MOD_RES (137)..(137): Selenocysteine
  MOD_RES (162)..(162): Selenocysteine
  MOD_RES (184)..(184): Selenocysteine
  MOD_RES (194)..(194): Selenocysteine
  MOD_RES (206)..(206): Selenocysteine
  MOD_RES (223)..(223): Selenocysteine
  MOD_RES (239)..(239): Selenocysteine
  MOD_RES (249)..(249): Selenocysteine
  MOD_RES (256)..(256): Selenocysteine
  MOD_RES (295)..(295): Selenocysteine
MSVLNNSEVKLFLLIGIPGLEHAHIWFSIPICLMYLLAIMGNCXILFIIKXEPSLHEPMYYFLAMLAVSDMGLSLSSLPXMLRVFLFNAMGISPNACFAQEFFIHGFXVMESSVLLIMSLDRFLAIHNPLRYSSILXSNRVAKMGLILAIRSILLVIPFPFXLRRLKYCQKNLLSHSYCLHQDXMKLACSDNKXNVIYGFFIALCXMLDLALIVLSYVLILKXILSIASLAERLKALNXCVSHICAVLXFYVPIIXLAAMHHFAKHKSPLVVILIADMFLLVPPLMNPIVYCVKXRQIWEKILGKLLNVCGR

SEQ ID NO: 18918 - protein, 312 aa, Homo sapiens
  MOD_RES (6)..(6): Selenocysteine
  MOD_RES (13)..(13): Selenocysteine
  MOD_RES (62)..(62): Selenocysteine
  MOD_RES (67)..(67): Selenocysteine
  MOD_RES (72)..(72): Selenocysteine
  MOD_RES (74)..(75): Selenocysteine
  MOD_RES (78)..(78): Selenocysteine
  MOD_RES (135)..(135): Selenocysteine
  MOD_RES (137)..(137): Selenocysteine
  MOD_RES (173)..(173): Selenocysteine
  MOD_RES (191)..(191): Selenocysteine
  MOD_RES (204)..(204): Selenocysteine
  MOD_RES (222)..(222): Selenocysteine
  MOD_RES (238)..(238): Selenocysteine
  MOD_RES (252)..(252): Selenocysteine
  MOD_RES (257)..(257): Selenocysteine
  MOD_RES (294)..(294): Selenocysteine
MWPNIXAAPFLLXGFPGLEAAHHWISIPFFAVYVCILLGNGMLLYLIKHDHSLHEPMYYFLXMLAGXDLMVXLXXMPXVMGILWVNHREISSVGCFLQAYFIHSLSVVESGSLLAMAYDCFIAIRNPLRYASILXNXRVIALGVGVFLRGFVSILPVILRLFSFSYCKSHVIXRAFCLHQEIMRLACADIXFNRLYPVILISLXIFLDCLIILFSYILILNXVIGIASGEERAKALNXCISHISCVLIFYVXVMGLXFIYRFGKNVPEVVHIIMSYIYFLFPPLMNPVIYSIKXKQIQYGIIRLLSKHRFSS

SEQ ID NO: 18919 - protein, 310 aa, Homo sapiens
  MOD_RES (13)..(13): Selenocysteine
  MOD_RES (42)..(42): Selenocysteine
  MOD_RES (67)..(67): Selenocysteine
  MOD_RES (72)..(72): Selenocysteine
  MOD_RES (74)..(75): Selenocysteine
  MOD_RES (78)..(78): Selenocysteine
  MOD_RES (97)..(97): Selenocysteine
  MOD_RES (125)..(125): Selenocysteine
  MOD_RES (134)..(134): Selenocysteine
  MOD_RES (174)..(174): Selenocysteine
  MOD_RES (190)..(190): Selenocysteine
  MOD_RES (200)..(200): Selenocysteine
  MOD_RES (203)..(203): Selenocysteine
  MOD_RES (221)..(221): Selenocysteine
  MOD_RES (237)..(237): Selenocysteine
  MOD_RES (251)..(251): Selenocysteine
  MOD_RES (272)..(272): Selenocysteine
  MOD_RES (293)..(293): Selenocysteine
MWYNNSAGPFLLXGFLGSEAVHYRISMSFFVIYFSVLFGNGXLLVLIWNDHSLHEPMYYFLAMLADXDLGMXFXXMPXVLGVLLLDQREIAHAACFXQSFIHSLAIVESGILLVLAYDCFIAIRXPLRYNCILXNSRVMNIGLGVLMRGFMSILPIILSLYCYPYCGSRALLHXFCLHQDVIKLACADIXFNHIYPIIQXSLXVFLDALIIIFSYILILKXVMGIASGQEEAKSLNXCVSHISCVLVFHIXVMGLSFIHRFGKHAPHVVPIXMSYVHFLFPPFVNPIIYSIKXKQIQRSIIRLFSGQSRA

SEQ ID NO: 18920 - protein, 312 aa, Homo sapiens
  MOD_RES (13)..(13): Selenocysteine
  MOD_RES (42)..(42): Selenocysteine
  MOD_RES (67)..(67): Selenocysteine
  MOD_RES (74)..(75): Selenocysteine
  MOD_RES (78)..(78): Selenocysteine
  MOD_RES (131)..(131): Selenocysteine
  MOD_RES (135)..(135): Selenocysteine
  MOD_RES (137)..(137): Selenocysteine
  MOD_RES (190)..(191): Selenocysteine
  MOD_RES (222)..(222): Selenocysteine
  MOD_RES (238)..(238): Selenocysteine
  MOD_RES (252)..(252): Selenocysteine
  MOD_RES (289)..(289): Selenocysteine
  MOD_RES (294)..(294): Selenocysteine
  MOD_RES (306)..(307): Selenocysteine
  MOD_RES (312)..(312): Selenocysteine
MSSSGSSHPFLLXGFPGLEEAHHWISVFFLFMYISILFGNGXLLLLIKEDHNLHEPMYFFLAMLAAXDLGLALXXMPXVLGVLWLDHREIGSAACFSQAYFIHSLSFLESGILLAMAYDRFIAICNPLRYXSVLXNXRVVKIGLGVLMRGFVSVVPPIRPLYFFLYCHSHVLSHAFCLHQDVIKLACADXXFNRLYPAVLVVFIFVLDYLIIFISYVLILKXVLSIASREERAKALIXCVSHICCVLVFYVXVIGLSLIHRFGKQVPHIVHLIMSYAYFLFPPLMNPIXYSVKXKQIQNAILHLFXXHRIGX

SEQ ID NO: 18921 - protein, 312 aa, Homo sapiens
  MOD_RES (9)..(9): Selenocysteine
  MOD_RES (13)..(13): Selenocysteine
  MOD_RES (42)..(42): Selenocysteine
  MOD_RES (67)..(67): Selenocysteine
  MOD_RES (72)..(72): Selenocysteine
  MOD_RES (74)..(75): Selenocysteine
  MOD_RES (78)..(78): Selenocysteine
  MOD_RES (104)..(104): Selenocysteine
  MOD_RES (123)..(123): Selenocysteine
  MOD_RES (131)..(131): Selenocysteine
  MOD_RES (135)..(135): Selenocysteine
  MOD_RES (137)..(137): Selenocysteine
  MOD_RES (148)..(148): Selenocysteine
  MOD_RES (191)..(191): Selenocysteine
  MOD_RES (222)..(222): Selenocysteine
  MOD_RES (238)..(238): Selenocysteine
  MOD_RES (252)..(252): Selenocysteine
  MOD_RES (257)..(257): Selenocysteine
  MOD_RES (273)..(273): Selenocysteine
  MOD_RES (294)..(294): Selenocysteine
MGLNKSASXFQLXGFPGMEKAHHWIFIPLLAAYISILLGNGXLLFLIRNDHNLHEPMYYFLAMLAAXDLGVXLXXMPXVLGVLWLDHREIGHGACFSQAYFIHXLSVMESGVLLAMAYDCFIXIRSPLRYXSILXNXQVMKIGVRVLXRAGLSIMPIVVRLHWFPYCRSHVLSHAFCLHQDVIKLACADIXFNRLYPVVVLFAMVLLDFLIIFFSYILILKXVMGIGSGGERAKALNXCVSHICCILVFYVXVVCLXFIHRFGKHVPHVVHIXMSYIHFLFPPFMNPFIYSIKXKQIQSGILRLFSLPHSRA

SEQ ID NO: 18922 - protein, 324 aa, Homo sapiens
  MOD_RES (13)..(13): Selenocysteine
  MOD_RES (35)..(35): Selenocysteine
  MOD_RES (52)..(52): Selenocysteine
  MOD_RES (57)..(57): Selenocysteine
  MOD_RES (81)..(81): Selenocysteine
  MOD_RES (90)..(90): Selenocysteine
  MOD_RES (150)..(150): Selenocysteine
  MOD_RES (153)..(153): Selenocysteine
  MOD_RES (163)..(163): Selenocysteine
  MOD_RES (184)..(184): Selenocysteine
  MOD_RES (186)..(186): Selenocysteine
  MOD_RES (188)..(188): Selenocysteine
  MOD_RES (203)..(203): Selenocysteine
  MOD_RES (205)..(205): Selenocysteine
  MOD_RES (253)..(253): Selenocysteine
  MOD_RES (281)..(281): Selenocysteine
  MOD_RES (291)..(291): Selenocysteine
  MOD_RES (308)..(308): Selenocysteine
MQKPQLLVPIIAXSNGNLVHAAYFLLVGIPGLGPXIHFWLAFPLCFMYALAXLGNLXIVLIIRVERRLHEPMYLFLAMLSXIDLVLSSIXMPKMASLFLMGIQEIEFNICLAQMFLIHALSAVESAVLLAMAFDRFVAICHPLRHASVLXGCXVAKIGLSALXRGFVFFFPLPFILKWLSYCQXHXVXHSFCLHQDIMKLSCXDXRVNVVYGLFIILSVMGVDSLFIGFSYILILWAVLELSSRRAALKAFNXCISHLCAVLVFYVPLIGLSVVHRLGGPXSLLHVVMANXYLLLPPVVNPLVYGAKXKEICSRVLCMFSQGGK

SEQ ID NO: 18923 - protein, 72 aa, Homo sapiens
  MOD_RES (13)..(13): Selenocysteine
  MOD_RES (48)..(48): Selenocysteine
  MOD_RES (67)..(67): Selenocysteine
MMVDPNGNESSAXYFILIGLPGLEEAQFWLAFPLCSLYLIAVLASGVXLRCPSSWPISICWFLLCSXQLSME

SEQ ID NO: 18924 - protein, 318 aa, Homo sapiens
  MOD_RES (13)..(13): Selenocysteine
  MOD_RES (47)..(47): Selenocysteine
  MOD_RES (54)..(54): Selenocysteine
  MOD_RES (78)..(78): Selenocysteine
  MOD_RES (93)..(94): Selenocysteine
  MOD_RES (116)..(116): Selenocysteine
  MOD_RES (137)..(137): Selenocysteine
  MOD_RES (140)..(140): Selenocysteine
  MOD_RES (145)..(145): Selenocysteine
  MOD_RES (227)..(227): Selenocysteine
  MOD_RES (232)..(232): Selenocysteine
  MOD_RES (242)..(242): Selenocysteine
  MOD_RES (298)..(298): Selenocysteine
  MOD_RES (313)..(313): Selenocysteine
MMVDPNGNESSAXYFILIGLPGLEEAQFWLAFPLCSLYLIAVLGNLXIIYIVRXEHSLHEPMYIFLCMLSGIDILISXSSMPKMLAIFWFNSXXIQFDACLLQMFAIHSLSGMESXVLLAMAFDRYVAICHPLRHAXVLXLPRVXKIGVAAVVRGAALMAPLPVFIKQLPFCRSNILSHSYCLHQDVMKLACDDIRVNVVYGLIVIISAIGLDSLLISFSYLLILKXVLGLXREAQAKAFGXCVSHVCAVFIFYVPFIGLSMVHRFSKRRDSPLPVILANIYLLVPPVLNPIVYGVKXKEIRQRILRLFHVAXHASEP

SEQ ID NO: 18925 - protein, 83 aa, Homo sapiens
  MOD_RES (7)..(7): Selenocysteine
  MOD_RES (10)..(10): Selenocysteine
  MOD_RES (50)..(50): Selenocysteine
  MOD_RES (74)..(74): Selenocysteine
  MOD_RES (76)..(76): Selenocysteine
MSSCNFXHAXFVLIGIPGLEKAHFWVGFPLLSMYVVAMFGNCIVVFIVRXERSLHAPMYLFLCMLAAIDLALSXSXMPKILAL

SEQ ID NO: 18926 - protein, 320 aa, Homo sapiens
  MOD_RES (7)..(7): Selenocysteine
  MOD_RES (10)..(10): Selenocysteine
  MOD_RES (50)..(50): Selenocysteine
  MOD_RES (74)..(74): Selenocysteine
  MOD_RES (76)..(76): Selenocysteine
  MOD_RES (98)..(98): Selenocysteine
  MOD_RES (112)..(112): Selenocysteine
  MOD_RES (138)..(138): Selenocysteine
  MOD_RES (140)..(140): Selenocysteine
  MOD_RES (191)..(191): Selenocysteine
  MOD_RES (200)..(200): Selenocysteine
  MOD_RES (223)..(223): Selenocysteine
  MOD_RES (239)..(239): Selenocysteine
  MOD_RES (295)..(295): Selenocysteine
  MOD_RES (300)..(300): Selenocysteine
MSSCNFXHAXFVLIGIPGLEKAHFWVGFPLLSMYVVAMFGNCIVVFIVRXERSLHAPMYLFLCMLAAIDLALSXSXMPKILALFWFDSREISFEACLXQMFFIHALSAIESXILLAMAFDRYVAICHPLRHAAVLNNXVXAQIGIVAVVRGSLFFFPLPLLIKRLAFCHSNVLSHSYCVHQDVMKLAYADXLPNVVYGLXAILLVMGVDVMFISLSYFLIIRXVLQLPSKSERAKAFGXCVSHIGVVLAFYVPLIGLSVVHRFGNSLHPIVRVVMGDIYLLLPPVINPIIYGAKXKQIRXRVLAMFKISCDKDLQAVGGK

SEQ ID NO: 18927 - protein, 312 aa, Homo sapiens
  MOD_RES (8)..(8): Selenocysteine
  MOD_RES (13)..(13): Selenocysteine
  MOD_RES (17)..(17): Selenocysteine
  MOD_RES (53)..(53): Selenocysteine
  MOD_RES (71)..(71): Selenocysteine
  MOD_RES (76)..(76): Selenocysteine
  MOD_RES (82)..(83): Selenocysteine
  MOD_RES (110)..(110): Selenocysteine
  MOD_RES (120)..(120): Selenocysteine
  MOD_RES (135)..(136): Selenocysteine
  MOD_RES (139)..(139): Selenocysteine
  MOD_RES (152)..(152): Selenocysteine
  MOD_RES (208)..(209): Selenocysteine
  MOD_RES (213)..(213): Selenocysteine
  MOD_RES (242)..(242): Selenocysteine
  MOD_RES (298)..(298): Selenocysteine
  MOD_RES (311)..(311): Selenocysteine
MEILSNSXSKFPXFLLXGIPGLESAHVWISIPFCCFYAIALSGNSVILFVIIXQQSLHEPMYYFLFRLSAXDLGLXVSSLSXXLGILWFEAREISLYSCIVQMFFLHGFXFMESGVLVAXAFDRYVAICDPLRYXXILXNSRIIQMGLLMIXRAIVLILPLLLLLKPLYFCRMNALSHSYCYHPDVIQLACSDIRANSICGLIDLILXXGIDXPCIVLSYILIIHSVLRIASPEEWHKVFSXCVSHVGAVAFFYIHMLSLSLVYRYGRSAPRVVHSVMANVYLLLPPVLNPIIDSVKXKQIRKAMLSLLLXK

SEQ ID NO: 18928 - protein, 319 aa, Homo sapiens
  MOD_RES (7)..(7): Selenocysteine
  MOD_RES (15)..(15): Selenocysteine
  MOD_RES (20)..(20): Selenocysteine
  MOD_RES (24)..(24): Selenocysteine
  MOD_RES (60)..(60): Selenocysteine
  MOD_RES (78)..(78): Selenocysteine
  MOD_RES (83)..(83): Selenocysteine
  MOD_RES (89)..(90): Selenocysteine
  MOD_RES (117)..(117): Selenocysteine
  MOD_RES (127)..(127): Selenocysteine
  MOD_RES (142)..(143): Selenocysteine
  MOD_RES (146)..(146): Selenocysteine
  MOD_RES (159)..(159): Selenocysteine
  MOD_RES (215)..(216): Selenocysteine
  MOD_RES (220)..(220): Selenocysteine
  MOD_RES (249)..(249): Selenocysteine
  MOD_RES (305)..(305): Selenocysteine
  MOD_RES (318)..(318): Selenocysteine
MLQNQDXMEILSNSXSKFPXFLLXGIPGLESAHVWISIPFCCFYAIALSGNSVILFVIIXQQSLHEPMYYFLFRLSAXDLGLXVSSLSXXLGILWFEAREISLYSCIVQMFFLHGFXFMESGVLVAXAFDRYVAICDPLRYXXILXNSRIIQMGLLMIXRAIVLILPLLLLLKPLYFCRMNALSHSYCYHPDVIQLACSDIRANSICGLIDLILXXGIDXPCIVLSYILIIHSVLRIASPEEWHKVFSXCVSHVGAVAFFYIHMLSLSLVYRYGRSAPRVVHSVMANVYLLLPPVLNPIIDSVKXKQIRKAMLSLLLXK

SEQ ID NO: 18929 - protein, 342 aa, Homo sapiens
  MOD_RES (2)..(2): Selenocysteine
  MOD_RES (4)..(4): Selenocysteine
  MOD_RES (19)..(19): Selenocysteine
  MOD_RES (37)..(37): Selenocysteine
  MOD_RES (83)..(83): Selenocysteine
  MOD_RES (91)..(91): Selenocysteine
  MOD_RES (94)..(95): Selenocysteine
  MOD_RES (122)..(122): Selenocysteine
  MOD_RES (147)..(148): Selenocysteine
  MOD_RES (151)..(151): Selenocysteine
  MOD_RES (204)..(204): Selenocysteine
  MOD_RES (220)..(221): Selenocysteine
  MOD_RES (254)..(254): Selenocysteine
  MOD_RES (256)..(256): Selenocysteine
MXEXSLSSQCFPMSVLNNXIAEPLIFLLMGIPGLKAXQYWISIPFCLLYVVAVSGNSMILFVVLCERSLHKPMYYFLSMLSAXDLSLSLCXLSXXLGVFWFEAREINLNACIAQMFFLHGFXFMESGVLLAMAFDRFVAICYPLRYXXILXNARIAKIGMSMLIRNVAVMLPVMLFVKRLSFCSSMVLSHSYCYHVDLIQLSCXDNRINSILGLFALLSXXGFDCPCILLSYILIIRSVLSIASSEERRKAFNXCXSHISAVSIFYLPLISLSLVHRYGHSAPPFVHIIMANVFLLIPPVLNPIIYSVKIKQIQKAIIKVLIQKHSKSNHQLFLIRDKAIYE

SEQ ID NO: 18930 - protein, 321 aa, Homo sapiens
  MOD_RES (2)..(2): Selenocysteine
  MOD_RES (13)..(13): Selenocysteine
  MOD_RES (17)..(17): Selenocysteine
  MOD_RES (39)..(39): Selenocysteine
  MOD_RES (46)..(46): Selenocysteine
  MOD_RES (53)..(53): Selenocysteine
  MOD_RES (56)..(56): Selenocysteine
  MOD_RES (71)..(71): Selenocysteine
  MOD_RES (79)..(79): Selenocysteine
  MOD_RES (82)..(82): Selenocysteine
  MOD_RES (91)..(91): Selenocysteine
  MOD_RES (101)..(101): Selenocysteine
  MOD_RES (108)..(108): Selenocysteine
  MOD_RES (136)..(136): Selenocysteine
  MOD_RES (139)..(139): Selenocysteine
  MOD_RES (208)..(208): Selenocysteine
  MOD_RES (226)..(226): Selenocysteine
  MOD_RES (242)..(242): Selenocysteine
  MOD_RES (298)..(298): Selenocysteine
MXILLNSSLQRAXFFLXGFQGLEGLHGWISIPFCFIYLXVILGNLXILHVICXDAXLHGPMYYFLGMLAVXDLGLCLSXLPXVLGIFWFDXREIGIPACFXQLFFIHXLSSMESSVLLSMSIDRYVAVCNPLHDSXVLXPACIVKMGLSSVLRSALLILPLPFLLKRFQYCHSHVLAHAYCLHLEIMKLACSSIIVNHIYGLFVVACXVGVDSLLIFLSYALILRXVLSIASHQERLRALNXCVSHICAVLLFYIPMIGLSLVHRFGEHLPRVVHLFMSYVYLLVPPLMNPIIYSIKXKQIRQRIIKKFQFIKSLRCFWKD

SEQ ID NO: 18931 - protein, 314 aa, Homo sapiens
  MOD_RES (2)..(2): Selenocysteine
  MOD_RES (16)..(16): Selenocysteine
  MOD_RES (49)..(49): Selenocysteine
  MOD_RES (56)..(56): Selenocysteine
  MOD_RES (82)..(82): Selenocysteine
  MOD_RES (85)..(85): Selenocysteine
  MOD_RES (142)..(142): Selenocysteine
  MOD_RES (144)..(144): Selenocysteine
  MOD_RES (211)..(211): Selenocysteine
  MOD_RES (229)..(229): Selenocysteine
  MOD_RES (245)..(245): Selenocysteine
  MOD_RES (258)..(258): Selenocysteine
  MOD_RES (301)..(301): Selenocysteine
  MOD_RES (309)..(309): Selenocysteine
MXLGSLGNSSSSVSAXFLLSGIPGLERMHIWISIPLCFMYLVSIPGNCXILFIIKXERSLHEPMYLFLSMLALIDLGLSLCXLPXVLGIFWVGAREISHDACFAQLFFIHCFSFLESSVLLSMAFDRFVAICHPLHYVSILXNXVIGRIGLVSLGRSVALIFPLPFMLKRFPYCGSPVLSHSYCLHQEVMKLACADMKANSIYGMFVIVSXVGIDSLLILFSYALILRXVLSIASRAERFKALNXCVSHICAVLLFYXPMIGLSVIHRFGKQAPHLVQVVMGFMYLLFPPVMNPIVYSVKXKQIRDRVXHAFCY

SEQ ID NO: 18932 - protein, 302 aa, Homo sapiens
  MOD_RES (2)..(2): Selenocysteine
  MOD_RES (17)..(17): Selenocysteine
  MOD_RES (22)..(22): Selenocysteine
  MOD_RES (38)..(38): Selenocysteine
  MOD_RES (40)..(40): Selenocysteine
  MOD_RES (46)..(46): Selenocysteine
  MOD_RES (61)..(61): Selenocysteine
  MOD_RES (71)..(71): Selenocysteine
  MOD_RES (79)..(79): Selenocysteine
  MOD_RES (139)..(139): Selenocysteine
  MOD_RES (146)..(146): Selenocysteine
  MOD_RES (152)..(152): Selenocysteine
  MOD_RES (194)..(194): Selenocysteine
  MOD_RES (208)..(208): Selenocysteine
  MOD_RES (216)..(216): Selenocysteine
  MOD_RES (223)..(223): Selenocysteine
  MOD_RES (226)..(226): Selenocysteine
  MOD_RES (239)..(239): Selenocysteine
  MOD_RES (242)..(242): Selenocysteine
  MOD_RES (249)..(249): Selenocysteine
  MOD_RES (299)..(299): Selenocysteine
MXNLNASQANHRNFILXGIPGXPDKNPWLAFPLGFLYXLXLLGNGXILAVIKVEPSLHEPXYYFLSILALXDVSLSMSXLPSMLSIYWFNAPQIVFDACIMQMFFIHVFGIVESGVLVSMAFDRFVAIRNPLHYVSILXHDVIRKXGIAVLXRAVCVVFPVPFLIKCLPFCHSNVLSHSYCLHQNMMRLACASXRINSLYGLIVVIFXLGLDVLLXLLSYVLXLKXVLGIVSRGERLKXLSXCLSHMSXVLLFYVPFMGAASMIHRFWEHLSPVVHMVMADIYLLLPPVLNPIVYSVKXKQI

SEQ ID NO: 18933 - protein, 314 aa, Homo sapiens
  MOD_RES (7)..(7): Selenocysteine
  MOD_RES (13)..(13): Selenocysteine
  MOD_RES (17)..(17): Selenocysteine
  MOD_RES (24)..(24): Selenocysteine
  MOD_RES (27)..(27): Selenocysteine
  MOD_RES (49)..(49): Selenocysteine
  MOD_RES (79)..(79): Selenocysteine
  MOD_RES (82)..(82): Selenocysteine
  MOD_RES (86)..(86): Selenocysteine
  MOD_RES (108)..(108): Selenocysteine
  MOD_RES (136)..(136): Selenocysteine
  MOD_RES (139)..(139): Selenocysteine
  MOD_RES (152)..(152): Selenocysteine
  MOD_RES (156)..(157): Selenocysteine
  MOD_RES (208)..(208): Selenocysteine
  MOD_RES (214)..(214): Selenocysteine
  MOD_RES (242)..(242): Selenocysteine
  MOD_RES (298)..(298): Selenocysteine
MLGLNGXPFQPAXLQLXGIPGIQXGLXWVALIFCILYMISIVGNLSILXLVFWEPALHQPMYYFLSMLALNDLGVSFSXLPXVISXFCFNYNHVAFNACLVQMFFIHXFSFMESGILLAMSLDRFVAICYPLRYVXVLXHNRILAMGLGILXKSFXXLFPFPFVVKRLPFCKGNVLHHSYCLHPDLMKVACGDIHVNNIYGLLVIIFXYGMDSXFILLSYALILRAMLVIISQEQRLKALNXCMSHICAVLAFYVPIIAVSMIHRFWKSAPPVVHVMMSNVYLFVPPMLNPIIYSVKXKEIRKGILKFFHKSQA

SEQ ID NO: 18934 - protein, 312 aa, Homo sapiens
  MOD_RES (7)..(7): Selenocysteine
  MOD_RES (15)..(15): Selenocysteine
  MOD_RES (43)..(43): Selenocysteine
  MOD_RES (77)..(77): Selenocysteine
  MOD_RES (80)..(80): Selenocysteine
  MOD_RES (84)..(84): Selenocysteine
  MOD_RES (93)..(93): Selenocysteine
  MOD_RES (134)..(134): Selenocysteine
  MOD_RES (137)..(138): Selenocysteine
  MOD_RES (155)..(155): Selenocysteine
  MOD_RES (206)..(206): Selenocysteine
  MOD_RES (228)..(228): Selenocysteine
  MOD_RES (240)..(240): Selenocysteine
  MOD_RES (260)..(260): Selenocysteine
  MOD_RES (296)..(296): Selenocysteine
MGLFNVXHPAFFLLXGIPGLESSHSWLSGPLCVMYAVALGGNXVILQAVRVEPSLHEPMYYFLSMLSFSDVAISMAXLPXVLRXFCLNARNIXFDACLIQMFLIHFFSMMESGILLAMSFDRYVAICDPLRYAXVLXXEVIAAMGLGAAARSFIXLFPLPFLIKRLPICRSNVLSHSYCLHPDMMRLACADISINSIYGLFVLVSXFGMDLFFIFLSYVLILRSVMAXASREERLKALNXCVSHILAVLAFYVPMIGVSXVHRFGKHVPCYIHVLMSNVYLFVPPVLNPLIYSAKXKEIRRAIFRMFHHIKI

SEQ ID NO: 18935 - protein, 316 aa, Homo sapiens
  MOD_RES (13)..(14): Selenocysteine
  MOD_RES (54)..(54): Selenocysteine
  MOD_RES (80)..(80): Selenocysteine
  MOD_RES (83)..(83): Selenocysteine
  MOD_RES (93)..(93): Selenocysteine
  MOD_RES (133)..(133): Selenocysteine
  MOD_RES (141)..(141): Selenocysteine
  MOD_RES (153)..(153): Selenocysteine
  MOD_RES (179)..(179): Selenocysteine
  MOD_RES (206)..(206): Selenocysteine
  MOD_RES (208)..(208): Selenocysteine
  MOD_RES (226)..(226): Selenocysteine
  MOD_RES (232)..(232): Selenocysteine
  MOD_RES (242)..(242): Selenocysteine
  MOD_RES (298)..(298): Selenocysteine
MKISNNSLGFLPXXFILVGIPGLESEHLWISVPFSLIYIIIFLGNGIILHVIRXDIALHQPMYLFLAMLALAEVRVSASXLPXVLGIFLFGNXEISLEACLFPDVLHPFFIHDGASCAAGHVFGPLYSHLQPXELHSYPDXAQGLWHRSYYRXEKHYAHGSVAHSLMASALLWPQCPLXFLLSAPQSYLSCGNISVNNIYGIFIVXSXFGLDSLLIVISYGLILHXVLGIAXGEGRKKALNXCGSHVCAVLAYYVPMIGLSIVHRLGHRVSPLLQAMMANAYLFFPPVVNPIVYSIKXKEIHGAIVRMLLEKRRRV

SEQ ID NO: 18936 - protein, 315 aa, Homo sapiens
  MOD_RES (46)..(46): Selenocysteine
  MOD_RES (79)..(79): Selenocysteine
  MOD_RES (82)..(82): Selenocysteine
  MOD_RES (108)..(108): Selenocysteine
  MOD_RES (110)..(110): Selenocysteine
  MOD_RES (136)..(136): Selenocysteine
  MOD_RES (139)..(139): Selenocysteine
  MOD_RES (161)..(161): Selenocysteine
  MOD_RES (192)..(192): Selenocysteine
  MOD_RES (196)..(196): Selenocysteine
  MOD_RES (208)..(208): Selenocysteine
  MOD_RES (226)..(226): Selenocysteine
  MOD_RES (242)..(242): Selenocysteine
  MOD_RES (298)..(298): Selenocysteine
MGDWNNSDAVEPIFILRGFPGLEYVHSWLSILFCLAYLVAFMGNVXILSVIWIESSLHQPMYYFISILAVNDLGMSLSXLPXMLAVLWLDAPEIQASACYAQLFFIHXFXFLESSVLLAMAFDRFVAICHPLHYPXILXNSVIGKIGLACLLRSLGVVLPXPLLLRHYHYCHGNALSHAFCLHQDVLRLSCXDARXNSIYGLCVVIAXLGVDSIFILLSYVLILNXVLDIASREEQLKALNXCVSHICVVLIFFVPVIGVSMVHRFGKHLSPIVHILMADIYLLLPPVLNPIVYSVRXKQIRLGILHKFVLRRRF

SEQ ID NO: 18937 - protein, 326 aa, Homo sapiens
  MOD_RES (18)..(18): Selenocysteine
  MOD_RES (27)..(27): Selenocysteine
  MOD_RES (63)..(63): Selenocysteine
  MOD_RES (69)..(69): Selenocysteine
  MOD_RES (81)..(81): Selenocysteine
  MOD_RES (89)..(89): Selenocysteine
  MOD_RES (92)..(93): Selenocysteine
  MOD_RES (149)..(149): Selenocysteine
  MOD_RES (168)..(168): Selenocysteine
  MOD_RES (202)..(202): Selenocysteine
  MOD_RES (205)..(205): Selenocysteine
  MOD_RES (218)..(218): Selenocysteine
  MOD_RES (236)..(236): Selenocysteine
  MOD_RES (252)..(252): Selenocysteine
  MOD_RES (254)..(254): Selenocysteine
  MOD_RES (308)..(308): Selenocysteine
MSVQYSLSPQFMLLSNIXQFSPIFYLXSFPGLEGIKHWIFIPFFFMYMVAISGNCFILIIIKXNPRLHXPMYYLLSLLALXDLGLCVSXLPXXMGIFWFNSHSIYFGACQIQMFCIHSFSFMESSVLLMMSFDRLVAICHPLRYSVIIXGQQVVRAGLIVIFRGPVAXIPIVLLLKAFPYCGSVVLSHSFCLHQEVIQLACXDIXFNNLYGLMVVVFXVMLDLVLIALSYGLILHXVAGLASQEEQRRAFQXCXAPLCAVLVFFVPMMGLSLVHRFGKHAPPAIHLLMANVYLFVPPMLNPIIYSIKXKEIHRAIIKFLGLKKASK

SEQ ID NO: 18938 - protein, 317 aa, Homo sapiens
  MOD_RES (5)..(5): Selenocysteine
  MOD_RES (7)..(8): Selenocysteine
  MOD_RES (17)..(17): Selenocysteine
  MOD_RES (38)..(38): Selenocysteine
  MOD_RES (45)..(46): Selenocysteine
  MOD_RES (49)..(49): Selenocysteine
  MOD_RES (53)..(53): Selenocysteine
  MOD_RES (71)..(71): Selenocysteine
  MOD_RES (76)..(76): Selenocysteine
  MOD_RES (78)..(79): Selenocysteine
  MOD_RES (82)..(82): Selenocysteine
  MOD_RES (139)..(139): Selenocysteine
  MOD_RES (146)..(146): Selenocysteine
  MOD_RES (221)..(221): Selenocysteine
  MOD_RES (230)..(230): Selenocysteine
  MOD_RES (232)..(232): Selenocysteine
  MOD_RES (263)..(263): Selenocysteine
MSQVXNXXQEGIYFILXDIPGFEASHIWISIPVCCLYXISIMGNXXILXVIRXEPSVHQRMYLFLSMLALXDLGLXLXXLPXVMQLLWFNVRRISSEACFAQFFFLHGFSFMESSVLLAMSVDCYVAICCPLHYASILXNEVIGRXGLAIICCCVLAVLPSLFLLKRLPFCHSHLLSRSYCLHQDMIRLVCADIRLNSWYGFALALLIIIVDPLLIVISYXLILKNILGXAXWAERLRALNNCLSHILAVLVLYIPMVGVSMXHRFAKHASPLVHVIMANIYLLAPPVMNPIIYSVKNKQIQWGMLNFLSLKNMHSR

SEQ ID NO: 18939 - protein, 323 aa, Homo sapiens
  MOD_RES (3)..(3): Selenocysteine
  MOD_RES (6)..(6): Selenocysteine
  MOD_RES (14)..(14): Selenocysteine
  MOD_RES (19)..(19): Selenocysteine
  MOD_RES (36)..(36): Selenocysteine
  MOD_RES (52)..(52): Selenocysteine
  MOD_RES (83)..(83): Selenocysteine
  MOD_RES (88)..(88): Selenocysteine
  MOD_RES (99)..(99): Selenocysteine
  MOD_RES (145)..(145): Selenocysteine
  MOD_RES (183)..(183): Selenocysteine
  MOD_RES (247)..(247): Selenocysteine
  MOD_RES (276)..(276): Selenocysteine
  MOD_RES (279)..(279): Selenocysteine
  MOD_RES (281)..(281): Selenocysteine
MSXLPXQIAPNSSXSMAPXFLLVGMPGLSGAPSWWXLPLIAVYLLSALGNGXILWIIALQPALHRPMHFFLFLLSVSDIGLVXALMPXLLGIALAGAHXVPASACLLQMVFIHVFSVMESSVLLAMSIDRALAICRPLHYPALLXNGVISKISLAISFRCLGLHLPLPFLLAYMPYCLPQVLXHSYCLHPDVARLACPEAWGAAYSLFVVLSAMGLDPLLIFFSYGLIGKVLQGVESREDRWKAGQXCAAHLSAVLLFYIPMILLALINHPELPIXQHXHXLLSYVHFLLPPLINPILYSVKMKEIRKRILNRLQPRKVGGAQ

SEQ ID NO: 18940 - protein, 327 aa, Homo sapiens
  MOD_RES (7)..(8): Selenocysteine
  MOD_RES (17)..(17): Selenocysteine
  MOD_RES (38)..(38): Selenocysteine
  MOD_RES (53)..(53): Selenocysteine
  MOD_RES (76)..(76): Selenocysteine
  MOD_RES (78)..(79): Selenocysteine
  MOD_RES (82)..(82): Selenocysteine
  MOD_RES (136)..(136): Selenocysteine
  MOD_RES (139)..(139): Selenocysteine
  MOD_RES (167)..(167): Selenocysteine
  MOD_RES (190)..(190): Selenocysteine
  MOD_RES (211)..(211): Selenocysteine
  MOD_RES (226)..(226): Selenocysteine
  MOD_RES (242)..(242): Selenocysteine
  MOD_RES (251)..(251): Selenocysteine
  MOD_RES (270)..(270): Selenocysteine
  MOD_RES (277)..(277): Selenocysteine
  MOD_RES (298)..(298): Selenocysteine
  MOD_RES (300)..(300): Selenocysteine
MAIFNNXXSSSSNFLLXAFPGLECAHVWISIPVCCLYXIALLGNSMIFLVIIXKRRLHKPMYYFLSMLAAVDLCLXIXXLPXVLGVLWFHAREISFKACFIQMFFVHAFSLLESSVLVAMAFDRFVAICNPLNYAXILXDRMVLVIGLVICIRPAVFLLPLLVAINXVSFHGGHELSHPFCYHPEVIKYXYSKPWISSFWGLFLQLYLNGXDVLFILFSYVLILRXVLGIVARKKQQKALSXCVCHICAVXIFYVPLISLSLAHRLFHSXPRVLCSXLANIYLLLPPVLNPIIYSLKXKXIRQAMFQLLQSKGSWGFNVRGLRGRWD

SEQ ID NO: 18941 - protein, 354 aa, Homo sapiens
  MOD_RES (2)..(2): Selenocysteine
  MOD_RES (27)..(27): Selenocysteine
  MOD_RES (34)..(35): Selenocysteine
  MOD_RES (44)..(44): Selenocysteine
  MOD_RES (65)..(65): Selenocysteine
  MOD_RES (80)..(80): Selenocysteine
  MOD_RES (103)..(103): Selenocysteine
  MOD_RES (105)..(106): Selenocysteine
  MOD_RES (109)..(109): Selenocysteine
  MOD_RES (163)..(163): Selenocysteine
  MOD_RES (166)..(166): Selenocysteine
  MOD_RES (194)..(194): Selenocysteine
  MOD_RES (217)..(217): Selenocysteine
  MOD_RES (238)..(238): Selenocysteine
  MOD_RES (253)..(253): Selenocysteine
  MOD_RES (269)..(269): Selenocysteine
  MOD_RES (278)..(278): Selenocysteine
  MOD_RES (297)..(297): Selenocysteine
  MOD_RES (304)..(304): Selenocysteine
  MOD_RES (325)..(325): Selenocysteine
  MOD_RES (327)..(327): Selenocysteine
MXNKMYAIYIKNLNYFSFLIVQCLQPXMAIFNNXXSSSSNFLLXAFPGLECAHVWISIPVCCLYXIALLGNSMIFLVIIXKRRLHKPMYYFLSMLAAVDLCLXIXXLPXVLGVLWFHAREISFKACFIQMFFVHAFSLLESSVLVAMAFDRFVAICNPLNYAXILXDRMVLVIGLVICIRPAVFLLPLLVAINXVSFHGGHELSHPFCYHPEVIKYXYSKPWISSFWGLFLQLYLNGXDVLFILFSYVLILRXVLGIVARKKQQKALSXCVCHICAVXIFYVPLISLSLAHRLFHSXPRVLCSXLANIYLLLPPVLNPIIYSLKXKXIRQAMFQLLQSKGSWGFNVRGLRGRWD

SEQ ID NO: 18942 - protein, 321 aa, Homo sapiens
  MOD_RES (9)..(9): Selenocysteine
  MOD_RES (15)..(15): Selenocysteine
  MOD_RES (17)..(17): Selenocysteine
  MOD_RES (24)..(24): Selenocysteine
  MOD_RES (60)..(60): Selenocysteine
  MOD_RES (78)..(78): Selenocysteine
  MOD_RES (86)..(86): Selenocysteine
  MOD_RES (89)..(89): Selenocysteine
  MOD_RES (126)..(126): Selenocysteine
  MOD_RES (146)..(146): Selenocysteine
  MOD_RES (156)..(156): Selenocysteine
  MOD_RES (166)..(166): Selenocysteine
  MOD_RES (249)..(249): Selenocysteine
  MOD_RES (268)..(268): Selenocysteine
  MOD_RES (305)..(305): Selenocysteine
  MOD_RES (310)..(310): Selenocysteine
MFLSSRMIXSVSPSXSXNSSFLLXGFSGMEQQYPWLSIPFSSIYAMVLLGNCMVLHVIWXEPSLHQPMFYFLSMLALXDLCMGLSXVYXVLGILWGIIREISLDSCIAQSYFIHGLSFMESSVLLXMAFDRYIAICNPLRYSSILXNSRIIKIGLXIIGRSFFFIXPPIICLKFFNYCHFHILSHSFCLHQDLLRLACSDIRFNSYYALMLVICILLLDAILILFSYILILKSVLAVASQEERHKLFQXCISHICAVLVFYIPIISLXMVHRFGKHLSPVAHVLIGNIYILFPPLMNPIIYSVKXQQIHXRMLRLFSLKRY

SEQ ID NO: 18943 - protein, 312 aa, Homo sapiens
  MOD_RES (7)..(7): Selenocysteine
  MOD_RES (15)..(15): Selenocysteine
  MOD_RES (71)..(71): Selenocysteine
  MOD_RES (108)..(108): Selenocysteine
  MOD_RES (139)..(139): Selenocysteine
  MOD_RES (148)..(148): Selenocysteine
  MOD_RES (174)..(175): Selenocysteine
  MOD_RES (208)..(208): Selenocysteine
  MOD_RES (215)..(215): Selenocysteine
  MOD_RES (218)..(218): Selenocysteine
  MOD_RES (227)..(227): Selenocysteine
  MOD_RES (243)..(243): Selenocysteine
  MOD_RES (264)..(264): Selenocysteine
  MOD_RES (299)..(300): Selenocysteine
MSISNIXVYMPSVLXLVGIPGLESVQCWIGIPFCAIYLIAMIGNSLLLSIIKSERSLHEPLYIFLGMLGAXDIALASSIMPKMLGIFWFNVPEIYFDSCLLQMWFIHXLQGIESGILVAMALDRYVAICYPLRHANIFXHQLVIQIGXMVVLRAAILVAPCLVLIKCRFQFYHXXVISHSYCEHMAIVKLAAANVQVNKIYGLFVAFXVAGFDLXFIXLSYIQIFIXVFRLPQKEARFKAFNXCIAHICVFLQFYLLAFFSFFXHRFGSHISPYIHILFSSIYLLVPPFLNPLVYGAKXXQIRIHVVKMFCS

SEQ ID NO: 18944 - protein, 316 aa, Homo sapiens
  MOD_RES (3)..(3): Selenocysteine
  MOD_RES (71)..(71): Selenocysteine
  MOD_RES (77)..(77): Selenocysteine
  MOD_RES (136)..(136): Selenocysteine
  MOD_RES (144)..(144): Selenocysteine
  MOD_RES (151)..(151): Selenocysteine
  MOD_RES (174)..(175): Selenocysteine
  MOD_RES (192)..(192): Selenocysteine
  MOD_RES (218)..(218): Selenocysteine
  MOD_RES (227)..(227): Selenocysteine
  MOD_RES (243)..(243): Selenocysteine
  MOD_RES (264)..(264): Selenocysteine
  MOD_RES (299)..(299): Selenocysteine
  MOD_RES (316)..(316): Selenocysteine
MPXFNGSVFMPSAFILIGIPGLESVQCWIGIPFSAMYLIGVIGNSLILVIIKYENSLHIPMYIFLAMLAAXDIALNXCILPKMLGIFWFHLPEISFDACLFQMWLIHSFQAIESGILLAMALDRYVAICIPLRHAXIFSQQFLXHIGLGVXLRAAILIIPSLGLIKCCLKHYRXXVISHSYCEHMAIVKLAXEDIRVNKIYGLFVAFAILGFDIIFIXLSYVQIFIXVFQLPQKEARFKAFNXCIAHICVFLQFYLLAFFSFFXHRFGSHIPPYIHILLSNLYLLVPPFLNPIVYGVKXKQIRDHIVKVFFFKKVX

SEQ ID NO: 18945 - protein, 323 aa, Homo sapiens
  MOD_RES (4)..(4): Selenocysteine
  MOD_RES (7)..(7): Selenocysteine
  MOD_RES (39)..(39): Selenocysteine
  MOD_RES (77)..(79): Selenocysteine
  MOD_RES (101)..(101): Selenocysteine
  MOD_RES (135)..(136): Selenocysteine
  MOD_RES (139)..(139): Selenocysteine
  MOD_RES (152)..(152): Selenocysteine
  MOD_RES (173)..(173): Selenocysteine
  MOD_RES (195)..(195): Selenocysteine
  MOD_RES (242)..(242): Selenocysteine
  MOD_RES (260)..(260): Selenocysteine
  MOD_RES (263)..(263): Selenocysteine
  MOD_RES (298)..(298): Selenocysteine
  MOD_RES (314)..(314): Selenocysteine
  MOD_RES (318)..(318): Selenocysteine
MSHXNVXIFHPAVFVLPGIPGLEAYHIWLSIPLCLIYIXAVLGNSILIVVIVMERNLHVPMYFFLSMLAVMDILLSXXXVPKALAIFWLQAHNIAFDACVXQGFFVHMMFVGESAILLAMAFDRFVAICAPLRYXXVLXWPVVGRIALAVIXRSFCIIFPVIFLLKRLPFCLXNIVPHSYCEHIGVARLACADIXVNIWYGFSVPIVMVILDVILIAVSYSLILRAVFRLPSQDARHKALSXCGSHLCVILMFYVPSFFXLLXHHFGRNIPQHVHILLANLYVAVPPMLNPIVYGVKXKQIREGVAHRFFDIKXWCCXSPLGS

SEQ ID NO: 18946 - protein, 314 aa, Homo sapiens
  MOD_RES (3)..(3): Selenocysteine
  MOD_RES (9)..(9): Selenocysteine
  MOD_RES (12)..(12): Selenocysteine
  MOD_RES (39)..(39): Selenocysteine
  MOD_RES (53)..(53): Selenocysteine
  MOD_RES (77)..(77): Selenocysteine
  MOD_RES (79)..(79): Selenocysteine
  MOD_RES (101)..(101): Selenocysteine
  MOD_RES (109)..(109): Selenocysteine
  MOD_RES (135)..(136): Selenocysteine
  MOD_RES (139)..(139): Selenocysteine
  MOD_RES (149)..(149): Selenocysteine
  MOD_RES (157)..(157): Selenocysteine
  MOD_RES (169)..(169): Selenocysteine
  MOD_RES (179)..(179): Selenocysteine
  MOD_RES (208)..(208): Selenocysteine
  MOD_RES (242)..(242): Selenocysteine
  MOD_RES (260)..(260): Selenocysteine
  MOD_RES (263)..(263): Selenocysteine
  MOD_RES (298)..(298): Selenocysteine
MPXVNHSGXSHXVFHLLGIPGLQDQHMWISIPFFISYVXALLGNSLLIFIILXKRSLHEPMYLFLCMLAGADIVLSXCXIPQALAIFWFRAGDISLDRCIXQLFFIHSXFISESGILLVMAFDHYIAICYPLRYXXILXNALIKKICVXVSLRSYGXIFPIIFLLKRLXFCQNNIIPHXFCEHIGLAKYACNDIRINIWYGFSILMSXVVLDVVLIFISYMLILHAVFHMPSPDACHKALNXFGSHVCIIILFYGSGIFXILXQRFGRHIPPCIHIPLANVCILAPPMLNPIIYGIKXKQIQEQVVQFLFIKQK

SEQ ID NO: 18947 - protein, 335 aa, Homo sapiens
  MOD_RES (27)..(27): Selenocysteine
  MOD_RES (35)..(35): Selenocysteine
  MOD_RES (57)..(57): Selenocysteine
  MOD_RES (95)..(97): Selenocysteine
  MOD_RES (119)..(119): Selenocysteine
  MOD_RES (153)..(153): Selenocysteine
  MOD_RES (156)..(156): Selenocysteine
  MOD_RES (165)..(165): Selenocysteine
  MOD_RES (196)..(196): Selenocysteine
  MOD_RES (226)..(226): Selenocysteine
  MOD_RES (234)..(234): Selenocysteine
  MOD_RES (259)..(259): Selenocysteine
  MOD_RES (316)..(316): Selenocysteine
MAQVRALHKIMALFSANSIGAMNNSDXRIAGCFLXGIPGLEQLHIWLSIPFCIMYIXALEGNGILICVILSQAILHEPMYIFLSMLASADVLLSXXXMPKALANLWLGYSLISFDGCLXQMFFIHFLFIHSAVLLAMAFDRYVAICSPLRYVXILXSKVIGKIVXAALSHSFIIMFPSIFLLEHLHYCQINIIAHXFCEHMGIAHLSCSDISINVWYGLAAALLSXGLDIMLIXVSYIHILQAVFRLLSQDARSKALSXCGSHICVILLFYVPALFSVFAYRFGGRSVPCYVHILLASLYVVIPPMLNPVIYGVRXKPILEGAKQMFSNLAKGSK

SEQ ID NO: 18948 - protein, 318 aa, Homo sapiens
  MOD_RES (14)..(14): Selenocysteine
  MOD_RES (18)..(18): Selenocysteine
  MOD_RES (72)..(72): Selenocysteine
  MOD_RES (79)..(80): Selenocysteine
  MOD_RES (136)..(137): Selenocysteine
  MOD_RES (178)..(178): Selenocysteine
  MOD_RES (180)..(180): Selenocysteine
  MOD_RES (196)..(196): Selenocysteine
  MOD_RES (204)..(204): Selenocysteine
  MOD_RES (243)..(243): Selenocysteine
  MOD_RES (264)..(264): Selenocysteine
  MOD_RES (300)..(300): Selenocysteine
  MOD_RES (316)..(316): Selenocysteine
MSDSNLSDNHLPDXFFLXGIPGLEAAHFWIAIPFCAMYLVALVGNAALILVIAMDNALHAPMYLFLCLLSLXDLALSSXXVPKMLAILWLHAGEISFGGCLAQMFCVHSIYALESSILLAMAFDRYVAICNPLRYXXILNHAVIGRIGFVGLFRSVAIVSPFIFLLRRLPYCGHRVMXHXYCEHMGIARLACANIXVNIVYGLXVALLAMGLDSILIAISYGFILHAVFHLPSHDAQHKALSXCGSHIGIILVFYIPAFFSFLXHRFGHHEVPKHVHIFLANLYVLVPPVLNPILYGARXKEIRSRLLKLLHLGKXSI

SEQ ID NO: 18949 - protein, 325 aa, Homo sapiens
  MOD_RES (7)..(7): Selenocysteine
  MOD_RES (24)..(24): Selenocysteine
  MOD_RES (46)..(46): Selenocysteine
  MOD_RES (53)..(53): Selenocysteine
  MOD_RES (70)..(71): Selenocysteine
  MOD_RES (77)..(77): Selenocysteine
  MOD_RES (79)..(79): Selenocysteine
  MOD_RES (101)..(101): Selenocysteine
  MOD_RES (110)..(110): Selenocysteine
  MOD_RES (139)..(139): Selenocysteine
  MOD_RES (179)..(179): Selenocysteine
  MOD_RES (213)..(213): Selenocysteine
  MOD_RES (231)..(231): Selenocysteine
  MOD_RES (241)..(241): Selenocysteine
  MOD_RES (254)..(254): Selenocysteine
  MOD_RES (262)..(262): Selenocysteine
  MOD_RES (297)..(297): Selenocysteine
  MOD_RES (323)..(323): Selenocysteine
MFLPNDXQFHPSSFLLLGIPGLEXLHIWIGFPFCAVYMIALIGNFXILLVIKXDSSLHQPMFYFLAMLAXXDVGLSXAXIPKMLGIFWINLRGIIFEACLXQMFFIHNFXLMESAVLVAMAYDSYVAICNPLQYSAILXNKVVSVIGLGVFVRALIFVIPSILLILRLPFCGNHVIPHXYCEHMGLAHLSCASIKINIIYGLCAICNLVFDIXVIALSYVHILCAVFRLPXHEARLKSLSXCGSHVCVILAFYXPALFSFMXHRFGRNVPRYIHILLANLYVVVPPMLNPVIYGVRXKQIYKCVKKILLQEQGMEKEEYLIHXRF

SEQ ID NO: 18950 - protein, 312 aa, Homo sapiens
  MOD_RES (7)..(7): Selenocysteine
  MOD_RES (24)..(24): Selenocysteine
  MOD_RES (46)..(46): Selenocysteine
  MOD_RES (53)..(53): Selenocysteine
  MOD_RES (77)..(77): Selenocysteine
  MOD_RES (79)..(79): Selenocysteine
  MOD_RES (110)..(110): Selenocysteine
  MOD_RES (114)..(114): Selenocysteine
  MOD_RES (135)..(135): Selenocysteine
  MOD_RES (139)..(139): Selenocysteine
  MOD_RES (142)..(142): Selenocysteine
  MOD_RES (159)..(159): Selenocysteine
  MOD_RES (179)..(179): Selenocysteine
  MOD_RES (241)..(241): Selenocysteine
  MOD_RES (254)..(254): Selenocysteine
  MOD_RES (262)..(262): Selenocysteine
  MOD_RES (297)..(297): Selenocysteine
MPSINDXHFYPPFFLLLGIPGLDXLHIWISFPFCIVYLIAIVGNMXILFVIKXEHSLHQPMFYFLAMLSMIDLGLSXSXIPKMLGIFWFNLQEISFGGCLLQMFFIHMFXGMEXVLLVVMAYDRFVAICNPLQYXMILXNKXISILASVVVGRNLVLVXPFVFLILRLPFCGHNIVPHXYCEHRGLAGLACAPIKINIIYGLMVISYIIVDVILIASSYVLILRAVFRLPSQDVRLKAFNXCGSHVCVMLCFYXPAFFSFMXHRFGQNIPHYIHILLANLYVVVPPALNPVIYGVRXKQIREQIVKIFVQKE

SEQ ID NO: 18951 - protein, 327 aa, Homo sapiens
  MOD_RES (4)..(4): Selenocysteine
  MOD_RES (7)..(7): Selenocysteine
  MOD_RES (13)..(13): Selenocysteine
  MOD_RES (39)..(39): Selenocysteine
  MOD_RES (53)..(53): Selenocysteine
  MOD_RES (71)..(71): Selenocysteine
  MOD_RES (77)..(77): Selenocysteine
  MOD_RES (79)..(79): Selenocysteine
  MOD_RES (101)..(101): Selenocysteine
  MOD_RES (105)..(105): Selenocysteine
  MOD_RES (110)..(110): Selenocysteine
  MOD_RES (118)..(118): Selenocysteine
  MOD_RES (120)..(120): Selenocysteine
  MOD_RES (139)..(139): Selenocysteine
  MOD_RES (154)..(154): Selenocysteine
  MOD_RES (159)..(159): Selenocysteine
  MOD_RES (162)..(162): Selenocysteine
  MOD_RES (179)..(179): Selenocysteine
  MOD_RES (239)..(239): Selenocysteine
  MOD_RES (260)..(260): Selenocysteine
  MOD_RES (295)..(295): Selenocysteine
MLHXNNXQFHPSXFLVVGVPGLEDVHVWIGFPFFAVYLXALLGNIIILFVIQXEQSLHQPMFYFLAMLAGXDLGLSXAXIPKMLGIFWFNLGEIAFGACIXQMYXIHICXGLESVVLXVXGIDRYIAICNPLRYSMILXNKVIAILGIVIIVRXLVFVXPFXFLILRLPFCGVRIIPHXYCEHMGLAKLACASINVIYGLIAFSVGYIDISVIGFSYVQILRAVFHLPAWDARPKALSXCGSHVCVMLAFYLPALFSFMXHRFGHNIPHYIHILLANLYVVFPPALNSVIYGVKXKQIREQVLRILNPKSFWHFDPKRIFHNNSVRQ

SEQ ID NO: 18952 - protein, 317 aa, Homo sapiens
  MOD_RES (11)..(11): Selenocysteine
  MOD_RES (15)..(15): Selenocysteine
  MOD_RES (57)..(57): Selenocysteine
  MOD_RES (81)..(81): Selenocysteine
  MOD_RES (83)..(83): Selenocysteine
  MOD_RES (114)..(114): Selenocysteine
  MOD_RES (139)..(139): Selenocysteine
  MOD_RES (143)..(143): Selenocysteine
  MOD_RES (183)..(183): Selenocysteine
  MOD_RES (245)..(245): Selenocysteine
  MOD_RES (258)..(258): Selenocysteine
  MOD_RES (266)..(266): Selenocysteine
  MOD_RES (291)..(291): Selenocysteine
  MOD_RES (301)..(301): Selenocysteine
  MOD_RES (307)..(307): Selenocysteine
  MOD_RES (315)..(315): Selenocysteine
MEKRMPIANDXQFHXSSFLLLGIPGLEDVHIWIGFPFFSVYLIALLGNAAIFFVIQXEQSLHEPMYYCLAMLDSIDLSLSXAXIPKMLGIFWFNIKEISFGGYLSQMFFIHFFXVMESIVLVAMAFDRYIAICKPLWYXMILXSKIISLIAGIAVLRSLYMVIPLVFLLLRLPFCGHRIIPHXYCEHMGIARLACASIKVNIMFGLGSISLLLLDVLLIILSHIRILYAVFCLPSWEARLKALNXCGSHIGVILAFSXPAFFSFFXHCFGHDIPQYIHIFLANLYVVVPPXLNPVIYGVRXKHIREXVLRIFFKXDH

SEQ ID NO: 18953 - protein, 313 aa, Homo sapiens
  MOD_RES (7)..(7): Selenocysteine
  MOD_RES (11)..(11): Selenocysteine
  MOD_RES (53)..(53): Selenocysteine
  MOD_RES (77)..(77): Selenocysteine
  MOD_RES (79)..(79): Selenocysteine
  MOD_RES (110)..(110): Selenocysteine
  MOD_RES (135)..(135): Selenocysteine
  MOD_RES (139)..(139): Selenocysteine
  MOD_RES (179)..(179): Selenocysteine
  MOD_RES (241)..(241): Selenocysteine
  MOD_RES (254)..(254): Selenocysteine
  MOD_RES (262)..(262): Selenocysteine
  MOD_RES (287)..(287): Selenocysteine
  MOD_RES (297)..(297): Selenocysteine
  MOD_RES (303)..(303): Selenocysteine
  MOD_RES (311)..(311): Selenocysteine
MPIANDXQFHXSSFLLLGIPGLEDVHIWIGFPFFSVYLIALLGNAAIFFVIQXEQSLHEPMYYCLAMLDSIDLSLSXAXIPKMLGIFWFNIKEISFGGYLSQMFFIHFFXVMESIVLVAMAFDRYIAICKPLWYXMILXSKIISLIAGIAVLRSLYMVIPLVFLLLRLPFCGHRIIPHXYCEHMGIARLACASIKVNIMFGLGSISLLLLDVLLIILSHIRILYAVFCLPSWEARLKALNXCGSHIGVILAFSXPAFFSFFXHCFGHDIPQYIHIFLANLYVVVPPXLNPVIYGVRXKHIREXVLRIFFKXDH

SEQ ID NO: 18954 - protein, 317 aa, Homo sapiens
  MOD_RES (7)..(7): Selenocysteine
  MOD_RES (11)..(11): Selenocysteine
  MOD_RES (49)..(49): Selenocysteine
  MOD_RES (57)..(57): Selenocysteine
  MOD_RES (81)..(81): Selenocysteine
  MOD_RES (83)..(83): Selenocysteine
  MOD_RES (95)..(95): Selenocysteine
  MOD_RES (114)..(114): Selenocysteine
  MOD_RES (139)..(139): Selenocysteine
  MOD_RES (143)..(143): Selenocysteine
  MOD_RES (183)..(183): Selenocysteine
  MOD_RES (245)..(245): Selenocysteine
  MOD_RES (258)..(258): Selenocysteine
  MOD_RES (266)..(266): Selenocysteine
  MOD_RES (301)..(301): Selenocysteine
  MOD_RES (315)..(315): Selenocysteine
MAGRMSXSNHXQFHPSSFLLLGIPGLEDVHIWIGVPFFFVYLVALLGNXALLFVIQXEQSLHEPMYYFLAMLDSIDLGLSXAXIPKMLGIFWFNXKEISFGGCLSHMFFIHFFXAMESIVLVAMAFDRYIAICKPLRYXMILXSKIISLIAGIAVLRSLYMVVPLVFLLLRLPFCGHRIIPHXYCEHMGIARLACASIKVNIRFGLGNISLLLLDVILIILSYVRILYAVFCLPSWEARLKALNXCGSHIGVILAFFXPAFFSFLXHRFGHNIPQYIHIILANLYVVVPPALNPVIYGVRXKQIRERVLRIFLKXNH

SEQ ID NO: 18955 - protein, 320 aa, Homo sapiens
  MOD_RES (77)..(77): Selenocysteine
  MOD_RES (83)..(83): Selenocysteine
  MOD_RES (101)..(101): Selenocysteine
  MOD_RES (107)..(107): Selenocysteine
  MOD_RES (141)..(142): Selenocysteine
  MOD_RES (145)..(145): Selenocysteine
  MOD_RES (148)..(148): Selenocysteine
  MOD_RES (172)..(172): Selenocysteine
  MOD_RES (179)..(179): Selenocysteine
  MOD_RES (185)..(185): Selenocysteine
  MOD_RES (214)..(214): Selenocysteine
  MOD_RES (248)..(248): Selenocysteine
  MOD_RES (261)..(261): Selenocysteine
  MOD_RES (279)..(279): Selenocysteine
  MOD_RES (304)..(304): Selenocysteine
  MOD_RES (319)..(319): Selenocysteine
MPSASAMIIFNLSSYNPGPFILVGIPGLEQFHVWIGIPFCIIYIVAVVGNCILLYLIVVEHSLHEPMFFFLSMLAMXDLILSXAGVPKALSIFWLGAREIXFPGCLXQMFFLHYNFVLDSAILMAMAFDHYVAICSPLRYXXILXPKXIIKSAMGISFRSFCIILPDVFLLXCLPFCRXRIIPHXYCEHIGVAQLACADISINFWYGFCVPIMXVISDVILIAVSYAHILCAVFGLPSQDACQKALGXCGSHVCVILMFYXPAFFSILAHRFGHNVSRXFHIMFANLYIVIPPALNPMVYGVKXKQIRDKVILLFSKGXG

SEQ ID NO: 18956 - protein, 349 aa, Homo sapiens
  MOD_RES (9)..(9): Selenocysteine
  MOD_RES (34)..(34): Selenocysteine
  MOD_RES (37)..(37): Selenocysteine
  MOD_RES (66)..(66): Selenocysteine
  MOD_RES (72)..(72): Selenocysteine
  MOD_RES (76)..(76): Selenocysteine
  MOD_RES (83)..(83): Selenocysteine
  MOD_RES (128)..(128): Selenocysteine
  MOD_RES (137)..(137): Selenocysteine
  MOD_RES (141)..(141): Selenocysteine
  MOD_RES (146)..(146): Selenocysteine
  MOD_RES (166)..(166): Selenocysteine
  MOD_RES (178)..(178): Selenocysteine
  MOD_RES (183)..(183): Selenocysteine
  MOD_RES (186)..(186): Selenocysteine
  MOD_RES (261)..(261): Selenocysteine
  MOD_RES (269)..(269): Selenocysteine
  MOD_RES (302)..(302): Selenocysteine
  MOD_RES (316)..(316): Selenocysteine
  MOD_RES (326)..(326): Selenocysteine
CKRVLEDCXILLHHLYINRQEVSPVMLGPAYNHXMEXPASFLLVGIPGLQSSHLWLAISLSAMYIXALLGNXLIVXAIWMDSXRHEPMYCFLCVLAAVDIVMASSVVPKMVSIFCSGDSSISFSACFXQMFFVHLAXAVEXGLLLXMAFDRYVAICKPLHYKRILXPQVMLGMSMAVXIRAVXFMXPLSWMMNHLPFCGSNVVVHSYCKHIALARLACADPVPSSLYSLIGSSLMVGSDVAFIAASYILILRAVFDLSSKXAQLKALSXCGSHVGVMALYYLPGMASIYAAWLGQDIVPLHXQVLLADLYVIIPAXLNPIIYGMRXKQLLEGIWSYLMHFLFDHSNLGS

SEQ ID NO: 18957 - protein, 324 aa, Homo sapiens
  MOD_RES (9)..(9): Selenocysteine
  MOD_RES (12)..(12): Selenocysteine
  MOD_RES (41)..(41): Selenocysteine
  MOD_RES (47)..(47): Selenocysteine
  MOD_RES (51)..(51): Selenocysteine
  MOD_RES (58)..(58): Selenocysteine
  MOD_RES (103)..(103): Selenocysteine
  MOD_RES (112)..(112): Selenocysteine
  MOD_RES (116)..(116): Selenocysteine
  MOD_RES (121)..(121): Selenocysteine
  MOD_RES (141)..(141): Selenocysteine
  MOD_RES (153)..(153): Selenocysteine
  MOD_RES (158)..(158): Selenocysteine
  MOD_RES (161)..(161): Selenocysteine
  MOD_RES (236)..(236): Selenocysteine
  MOD_RES (244)..(244): Selenocysteine
  MOD_RES (277)..(277): Selenocysteine
  MOD_RES (291)..(291): Selenocysteine
  MOD_RES (301)..(301): Selenocysteine
MLGPAYNHXMEXPASFLLVGIPGLQSSHLWLAISLSAMYIXALLGNXLIVXAIWMDSXRHEPMYCFLCVLAAVDIVMASSVVPKMVSIFCSGDSSISFSACFXQMFFVHLAXAVEXGLLLXMAFDRYVAICKPLHYKRILXPQVMLGMSMAVXIRAVXFMXPLSWMMNHLPFCGSNVVVHSYCKHIALARLACADPVPSSLYSLIGSSLMVGSDVAFIAASYILILRAVFDLSSKXAQLKALSXCGSHVGVMALYYLPGMASIYAAWLGQDIVPLHXQVLLADLYVIIPAXLNPIIYGMRXKQLLEGIWSYLMHFLFDHSNLGS

SEQ ID NO: 18958 - protein, 350 aa, Homo sapiens
  MOD_RES (35)..(35): Selenocysteine
  MOD_RES (38)..(38): Selenocysteine
  MOD_RES (73)..(73): Selenocysteine
  MOD_RES (77)..(77): Selenocysteine
  MOD_RES (84)..(84): Selenocysteine
  MOD_RES (129)..(129): Selenocysteine
  MOD_RES (138)..(138): Selenocysteine
  MOD_RES (142)..(142): Selenocysteine
  MOD_RES (147)..(147): Selenocysteine
  MOD_RES (167)..(167): Selenocysteine
  MOD_RES (179)..(179): Selenocysteine
  MOD_RES (187)..(187): Selenocysteine
  MOD_RES (262)..(262): Selenocysteine
  MOD_RES (270)..(270): Selenocysteine
  MOD_RES (303)..(303): Selenocysteine
  MOD_RES (317)..(317): Selenocysteine
  MOD_RES (327)..(327): Selenocysteine
MCQQILRDCILLIHHLCINRKKVSLVMLGPAYNHXMEXPASFLLVGIPGLQSSHLWLAISLSAMYIIALLGNXIIVXAIWMDSXRHEPMYCFLCVLAAVDIVMASSVVPKMVSIFCSGDSSISFSACFXQMFFVHLAXAVEXGLLLXMAFDRYVAICKPLHYKRILXPQVMLGMSMAIXIRAIIAIXPLSWMVSHLPFCGSNVVVHSYCEHIALARLACADPVPSSLYSLIGSSLMVGSDVAFIAASYILILKAVFGLSSKXAQLKALSXCGSHVGVMALYYLPGMASIYAAWLGQDVVPLHXQVLLADLYVIIPAXLNPIIYGMRXKQLRERIWSYLMHVLFDHSNLGS

SEQ ID NO: 18959 - protein, 311 aa, Homo sapiens
  MOD_RES (13)..(13): Selenocysteine
  MOD_RES (46)..(46): Selenocysteine
  MOD_RES (56)..(56): Selenocysteine
  MOD_RES (70)..(70): Selenocysteine
  MOD_RES (77)..(78): Selenocysteine
  MOD_RES (110)..(110): Selenocysteine
  MOD_RES (136)..(136): Selenocysteine
  MOD_RES (139)..(139): Selenocysteine
  MOD_RES (158)..(158): Selenocysteine
  MOD_RES (241)..(241): Selenocysteine
  MOD_RES (262)..(262): Selenocysteine
  MOD_RES (297)..(297): Selenocysteine
  MOD_RES (309)..(309): Selenocysteine
MFYHNKSIFHPVXFFLIGIPGLEDFHMWISGPFCSVYLVALLGNAXILLVIKVEQXLREPMFYFLAILSXIDLALSXXSVPRMLGIFWFDAHEINYGACVAQMFLIHAFXGMEAEVLLAMAFDRYVAVCAPLHYAXILXSQVLVGISMCIVIRPVLLXLPMVYLIYRLPFCQAHIIAHSYCEHMGIAKLSCGNIRINGIYGLFVVSFFVLNLVLIGISYVYILRAVFRLPSHDAQLKALSXCGAHVGVICVFYIPSVFSFLXHRFGHQIPGYIHILVANLYLIIPPSLNPIIYGVRXKQIRERVLYVFXKK

SEQ ID NO: 18960 - protein, 314 aa, Homo sapiens
  MOD_RES (7)..(7): Selenocysteine
  MOD_RES (9)..(9): Selenocysteine
  MOD_RES (38)..(38): Selenocysteine
  MOD_RES (46)..(46): Selenocysteine
  MOD_RES (70)..(70): Selenocysteine
  MOD_RES (78)..(79): Selenocysteine
  MOD_RES (135)..(136): Selenocysteine
  MOD_RES (139)..(139): Selenocysteine
  MOD_RES (144)..(144): Selenocysteine
  MOD_RES (156)..(156): Selenocysteine
  MOD_RES (159)..(159): Selenocysteine
  MOD_RES (194)..(194): Selenocysteine
  MOD_RES (242)..(242): Selenocysteine
  MOD_RES (253)..(253): Selenocysteine
  MOD_RES (255)..(255): Selenocysteine
  MOD_RES (298)..(298): Selenocysteine
MLPSNIXSXHPAVFLLVGIPGLEHLHAWISIPFCFAYXLALLGNCXLLFIIQADAALHEPMYLFLAMLAXIDLVLSSXXLPKMLAIFWFRDQEINFFACLVQMFFLHSFSIMESAVLLAMAFDRYVAICKPLHYXXVLXGSLIXKIGMAAVARAVXLMXPLPFLLRRFHYCRGPVIAHCYCEHMAVVRLACGDXSFNNIYGIAVAMFIVVLDLLFVILSYVFILQAVLQLASQEARYKAFGXCVSHIGAILSXYXPVVISSVMHRVARHAAPRVHILLAIFYLLFPPMVNPIIYGVKXKQIREYVLSLFQRKNM

SEQ ID NO: 18961 - protein, 314 aa, Homo sapiens
  MOD_RES (7)..(7): Selenocysteine
  MOD_RES (9)..(9): Selenocysteine
  MOD_RES (12)..(12): Selenocysteine
  MOD_RES (38)..(38): Selenocysteine
  MOD_RES (46)..(46): Selenocysteine
  MOD_RES (135)..(135): Selenocysteine
  MOD_RES (139)..(139): Selenocysteine
  MOD_RES (144)..(144): Selenocysteine
  MOD_RES (156)..(156): Selenocysteine
  MOD_RES (159)..(159): Selenocysteine
  MOD_RES (194)..(194): Selenocysteine
  MOD_RES (242)..(242): Selenocysteine
  MOD_RES (255)..(256): Selenocysteine
  MOD_RES (298)..(298): Selenocysteine
MSASNIXLXHPXAFLLVGIPGLEHLHIWISIPFCLAYXLALLGNCXLLLIIQADAALHEPMYLFLAMLAAIDLVLSSSALPKMLAIFWFRDREINFFACLAQMFFLHSFSIMESAVLLAMAFDRYVAICKPLHYXKVLXGSLIXKIGMAAVARAVXLMXPLPFLLRCFHYCRGPVIAHCYCEHMAVVRLACGDXSFNNIYGIAVAMFIVVLDLLLVILSYIFILQAVLLLASQEARYKAFGXCVSHIGAILAFYXXVVISSVMHRVARHAAPHVHILLANFYLLFPPMVNPIIYGVKXKQIRESILGVFPRKDM

SEQ ID NO: 18962 - protein, 329 aa, Homo sapiens
  MOD_RES (2)..(2): Selenocysteine
  MOD_RES (62)..(62): Selenocysteine
  MOD_RES (95)..(95): Selenocysteine
  MOD_RES (152)..(152): Selenocysteine
  MOD_RES (183)..(183): Selenocysteine
  MOD_RES (190)..(190): Selenocysteine
  MOD_RES (210)..(211): Selenocysteine
  MOD_RES (219)..(219): Selenocysteine
  MOD_RES (258)..(258): Selenocysteine
  MOD_RES (279)..(279): Selenocysteine
  MOD_RES (296)..(296): Selenocysteine
  MOD_RES (314)..(314): Selenocysteine
  MOD_RES (326)..(326): Selenocysteine
MXLVSFFSFLSKPLIMLLSNSSWRLSQPSFLLVGIPGLEESQHWIALPLGILYLLALVGNVXILFIIWMDPSLHQSMYLFLSMLAAIDLVLASSXAPKALAVLLVHAHEIGYIVCLIQMFFIHAFSSMESGVLVAMALDRYVAICHPLHHSXILHPGVIGRIGMVVLVRGLLLLIPFPILLGXLIFCQAXIIGHAYCEHMAVVKLACSEXXVNRAYGLXMALLVIGLDVLAIGVSYAHILQAVLKVPGSEARLKAFSXCGSHICVILVFYVPGIFSFLXHRFGHHVPHHVHVLLAXRYLLMPPALNPLVYGVKXQQIRQRVLRVFXQKD

SEQ ID NO: 18963 - protein, 317 aa, Homo sapiens
  MOD_RES (3)..(3): Selenocysteine
  MOD_RES (17)..(17): Selenocysteine
  MOD_RES (46)..(46): Selenocysteine
  MOD_RES (77)..(77): Selenocysteine
  MOD_RES (79)..(79): Selenocysteine
  MOD_RES (111)..(111): Selenocysteine
  MOD_RES (139)..(139): Selenocysteine
  MOD_RES (141)..(141): Selenocysteine
  MOD_RES (174)..(174): Selenocysteine
  MOD_RES (191)..(191): Selenocysteine
  MOD_RES (233)..(233): Selenocysteine
  MOD_RES (240)..(240): Selenocysteine
  MOD_RES (243)..(243): Selenocysteine
  MOD_RES (277)..(277): Selenocysteine
  MOD_RES (299)..(299): Selenocysteine
MLXFHNVCSVPSSFWLXGIPGLESLHVWLSIPFGSMYLVAVVGNVXILAVVKIERSLHQPMYFFLCMLAAIDLVLSXSXIPKLLGIFWFGACDIGLDACLGQMFLIHCFAXVESGIFLAMAFDRYVAICNPLRHSMVLXYXVVGRLGLVSLLRGVLYIGPLPLMIRLRLPLYKXHVISHSYCEHMAVVALXCGDSRVNNVYGLSIGFLVLILDSVAIAASYVMIFRAVMGLAXPEARLKXLGXCASHLCAILIFYVPIAVSSLIHRFGQCVPPPVHXLLANFYLLIPPILNPIVYAVRXKQIRESLLQIPRIEMKIR

SEQ ID NO: 18964 - protein, 320 aa, Homo sapiens
  MOD_RES (7)..(7): Selenocysteine
  MOD_RES (10)..(10): Selenocysteine
  MOD_RES (35)..(35): Selenocysteine
  MOD_RES (42)..(42): Selenocysteine
  MOD_RES (71)..(71): Selenocysteine
  MOD_RES (77)..(77): Selenocysteine
  MOD_RES (79)..(79): Selenocysteine
  MOD_RES (83)..(83): Selenocysteine
  MOD_RES (108)..(108): Selenocysteine
  MOD_RES (110)..(110): Selenocysteine
  MOD_RES (136)..(136): Selenocysteine
  MOD_RES (139)..(139): Selenocysteine
  MOD_RES (150)..(150): Selenocysteine
  MOD_RES (162)..(162): Selenocysteine
  MOD_RES (165)..(165): Selenocysteine
  MOD_RES (179)..(179): Selenocysteine
  MOD_RES (217)..(217): Selenocysteine
  MOD_RES (221)..(221): Selenocysteine
  MOD_RES (242)..(242): Selenocysteine
  MOD_RES (244)..(244): Selenocysteine
  MOD_RES (253)..(253): Selenocysteine
  MOD_RES (260)..(260): Selenocysteine
  MOD_RES (263)..(263): Selenocysteine
  MOD_RES (270)..(270): Selenocysteine
  MOD_RES (289)..(289): Selenocysteine
  MOD_RES (299)..(299): Selenocysteine
MSFLNGXSLXPASFILNGIPGLEDVHLWISFPLCXMYSIAIXGNFGLMYLIYCDEALHRPMYVFLALLSFXDVLMCXSXLPNXLFILWFNLKEIDFKACLAQMFFVHXFXGMESGVLMLMALDHCVAICFPLRYAXILXNSVIAKAGFLXFLRGVMLVIPSXFLXKRLPYCKGNVIPHXYCDHMSVAKISCGNVRVNAIYGLIVALLIGGFDILCIXISYXMILQAVVSLSSADARQKAFSXCXAHFCAIVLXYVPAFFXFFXHHFGGHXIPLHIHIIMANLYLLMPPXMNPIVYGVKXRQVRESVIRFFLKGKDNSHNF

SEQ ID NO: 18965 - protein, 321 aa, Homo sapiens
  MOD_RES (10)..(10): Selenocysteine
  MOD_RES (25)..(25): Selenocysteine
  MOD_RES (71)..(71): Selenocysteine
  MOD_RES (74)..(74): Selenocysteine
  MOD_RES (77)..(78): Selenocysteine
  MOD_RES (110)..(110): Selenocysteine
  MOD_RES (136)..(136): Selenocysteine
  MOD_RES (139)..(139): Selenocysteine
  MOD_RES (150)..(150): Selenocysteine
  MOD_RES (162)..(162): Selenocysteine
  MOD_RES (165)..(165): Selenocysteine
  MOD_RES (179)..(179): Selenocysteine
  MOD_RES (221)..(221): Selenocysteine
  MOD_RES (242)..(242): Selenocysteine
  MOD_RES (244)..(244): Selenocysteine
  MOD_RES (253)..(253): Selenocysteine
  MOD_RES (260)..(260): Selenocysteine
  MOD_RES (263)..(263): Selenocysteine
  MOD_RES (289)..(289): Selenocysteine
  MOD_RES (299)..(299): Selenocysteine
  MOD_RES (318)..(318): Selenocysteine
MSGDNSSSLXPGFFILNGVPGLEAXHIWISLPFCFMYIIAVVGNCGLICLISHEEALHRPMYYFLALLSFXDVXLCXXMVPNMLCIFWFNLKEIDFNACLAQMFFVHMLXGMESGVLMLMALDRYVAICYPLRYAXILXNPVIAKAGLAXFLRNVMLIIPFXLLXKRLPYCRGNFIPHXYCDHMSVAKVSCGNFKVNAIYGLMVALLIGVFDICCISVSYXMILQAVMSLSSADARHKAFSXCXSHMCSIVIXYVAAFFXFFXHRFVGHNIPNHIHIIVANLYLLLPPXMNPIVYGVKXKQIQEGVIKFLLGDKVSFXYDK

SEQ ID NO: 18966 - protein, 321 aa, Homo sapiens
  MOD_RES (3)..(3): Selenocysteine
  MOD_RES (7)..(7): Selenocysteine
  MOD_RES (25)..(25): Selenocysteine
  MOD_RES (71)..(71): Selenocysteine
  MOD_RES (79)..(79): Selenocysteine
  MOD_RES (106)..(106): Selenocysteine
  MOD_RES (108)..(108): Selenocysteine
  MOD_RES (110)..(110): Selenocysteine
  MOD_RES (136)..(136): Selenocysteine
  MOD_RES (139)..(139): Selenocysteine
  MOD_RES (148)..(148): Selenocysteine
  MOD_RES (150)..(150): Selenocysteine
  MOD_RES (162)..(162): Selenocysteine
  MOD_RES (165)..(165): Selenocysteine
  MOD_RES (179)..(179): Selenocysteine
  MOD_RES (217)..(217): Selenocysteine
  MOD_RES (221)..(221): Selenocysteine
  MOD_RES (242)..(242): Selenocysteine
  MOD_RES (244)..(244): Selenocysteine
  MOD_RES (255)..(255): Selenocysteine
  MOD_RES (289)..(289): Selenocysteine
  MOD_RES (299)..(299): Selenocysteine
  MOD_RES (316)..(316): Selenocysteine
MLXLNKXDLIPASFILNGVPGLEDXQLWISFPFCSMYVVAMVGNCGLLYLIHYEDALHKPMYYFLAMLSFXDLVMCSSXIPKALCIFWFHLKDIGFDECLVQMFFXHXFXGMESGVLMLMALDRYVAICYPLRYSXILXNPVIAKVGXAXFLRGVLLIIPFXFLXKLLPYCRGNILPHXYCDHMSVAKLSCGNVKVNAIYGLMVALLIWGFDILCIXNSYXMILRAVVSLSSADARQKAFNXCXAHICAIVFSYXPAFFSFFSHRFGEHIIPPSCHIIVANIYLLLPPXMNPIVYGVKXKQIRDCVIRILSGSKDXKSYSM

SEQ ID NO: 18967 - protein, 324 aa, Homo sapiens
  MOD_RES (12)..(12): Selenocysteine
  MOD_RES (16)..(16): Selenocysteine
  MOD_RES (41)..(41): Selenocysteine
  MOD_RES (82)..(82): Selenocysteine
  MOD_RES (84)..(86): Selenocysteine
  MOD_RES (117)..(117): Selenocysteine
  MOD_RES (143)..(144): Selenocysteine
  MOD_RES (146)..(146): Selenocysteine
  MOD_RES (157)..(157): Selenocysteine
  MOD_RES (186)..(186): Selenocysteine
  MOD_RES (228)..(228): Selenocysteine
  MOD_RES (249)..(249): Selenocysteine
  MOD_RES (251)..(251): Selenocysteine
  MOD_RES (260)..(260): Selenocysteine
  MOD_RES (267)..(267): Selenocysteine
  MOD_RES (277)..(277): Selenocysteine
  MOD_RES (296)..(296): Selenocysteine
  MOD_RES (306)..(306): Selenocysteine
MPLFNSLCWFPXIHVXPPSFILNGIPGLERVHVWISLPLCXMYIIFLVGNLGLVYLIYYEESLHHPMYFFFGHALSLIDLLXCXXXLPNALCIFWFSLKEINFNACLAQMFFVHGFXGVESGVLMLMALDRYVAICYPLRYAXXLXNPIIAKAELAXFLRGVLLMIPFPFLVKRLPFCQSNIISHXYCDHMSVVKLSCASIKVNVIYGLMVALLIGVFDICCISLSYXLILKAAISLSSSDARQKAFSXCXAHISAIIIXYVPAFFXFFAHRFGGHXIPPSLHIIVANLYLLLPPXLNPIVYGVKXKQIRKSVIKFFQGDKGAG

SEQ ID NO: 18968 - protein, 315 aa, Homo sapiens
  MOD_RES (37)..(37): Selenocysteine
  MOD_RES (47)..(47): Selenocysteine
  MOD_RES (57)..(57): Selenocysteine
  MOD_RES (72)..(72): Selenocysteine
  MOD_RES (80)..(80): Selenocysteine
  MOD_RES (140)..(140): Selenocysteine
  MOD_RES (149)..(149): Selenocysteine
  MOD_RES (195)..(195): Selenocysteine
  MOD_RES (243)..(243): Selenocysteine
  MOD_RES (264)..(264): Selenocysteine
  MOD_RES (299)..(299): Selenocysteine
MVLASGNSSSHPVSFILLGIPGLESFQLWIAFPFCAXYAVAVVGNIXLLHVIRIDHXLHEPMYLFLAMLAIXDLVLSSSXQPKMLAIFWFHAHEIQYHACLIQVFFIHAFSSVESGVLMAMALDCYVAICFPLRHSSILXPSVVIKLGXIVMLRGLLWVSPFCFMVSRMPFCQHQAIPQSYCEHMAVLKLVCADXSISRGNGLFVAFSVAGFDMIVIGMSYVMILRAVLQLPSGEARLKAFSXRSSHICVILALYIPALFSFLXYRFGHDVPRVVHILFANLYLLIPPMLNPIIYGVRXKQIGDRVIQGCCGNIP

SEQ ID NO: 18969 - protein, 320 aa, Homo sapiens
  MOD_RES (4)..(4): Selenocysteine
  MOD_RES (10)..(10): Selenocysteine
  MOD_RES (20)..(20): Selenocysteine
  MOD_RES (30)..(30): Selenocysteine
  MOD_RES (33)..(33): Selenocysteine
  MOD_RES (59)..(59): Selenocysteine
  MOD_RES (74)..(74): Selenocysteine
  MOD_RES (80)..(80): Selenocysteine
  MOD_RES (113)..(113): Selenocysteine
  MOD_RES (142)..(142): Selenocysteine
  MOD_RES (178)..(178): Selenocysteine
  MOD_RES (182)..(182): Selenocysteine
  MOD_RES (197)..(197): Selenocysteine
  MOD_RES (200)..(200): Selenocysteine
  MOD_RES (220)..(220): Selenocysteine
  MOD_RES (235)..(235): Selenocysteine
  MOD_RES (245)..(245): Selenocysteine
  MOD_RES (266)..(266): Selenocysteine
  MOD_RES (273)..(273): Selenocysteine
  MOD_RES (302)..(302): Selenocysteine
  MOD_RES (312)..(312): Selenocysteine
  MOD_RES (314)..(314): Selenocysteine
MAEXLQLNSXFLHPNFFILXGFPGLGSAQXWLXLVFGPIYLLALLGNGALPAVVWIDSXLHQPMFLLLAILAAXDLGLAXSIAPGLLAVLWLGPRSVPYAVCLVQMFFVHALXAMESGVLLAMACDRAAAIGRPLHYPVLVXKACVGYAALALALKAVAIVVPFPLLVAKFEHFQAKXIGHXYCAHMAVVELVVGNXQAXNLYGLALSLAISGMDILGIXGSYGLIAHAVLQLPXREAHAKAFGXCSSHICVILAFYIPGLFSYLXHRFGHHXVPKPVHILLSNIYLLLPPALNPLIYGARXKQIRDRLLEXFXFRKSPL

SEQ ID NO: 18970 - protein, 298 aa, Homo sapiens
  MOD_RES (11)..(11): Selenocysteine
  MOD_RES (37)..(37): Selenocysteine
  MOD_RES (61)..(61): Selenocysteine
  MOD_RES (119)..(119): Selenocysteine
  MOD_RES (122)..(122): Selenocysteine
  MOD_RES (152)..(152): Selenocysteine
  MOD_RES (184)..(184): Selenocysteine
  MOD_RES (190)..(190): Selenocysteine
  MOD_RES (202)..(202): Selenocysteine
  MOD_RES (223)..(223): Selenocysteine
  MOD_RES (236)..(236): Selenocysteine
  MOD_RES (251)..(251): Selenocysteine
  MOD_RES (280)..(280): Selenocysteine
MGIPGLEGLHXWISIPFSFMYIVAVAGNIFLIFLIMXERSLHEPMYLFLSMLASADFLLAXAAAPKVLAILWFHSMDISFGSCVSQMFFIHFIFVAESAILLAMAFDRYVAICYPLRYXILXSSAVRKIGIAAVVRSFFICCPFIFLVYRLXYCGRNIIPHSYCEHIARLACGNINVNIIYGLXVALLSXGLDIVLIIISYXMILHSVFQISSWAARFKALSXCGSHICVIFMFYXPAFFSFLAHRFGGKXIPHHIHILVGSLYVLVPPMLNPIIYGVKXKQIKDRVILLFSPISVCC

SEQ ID NO: 18971 - protein, 318 aa, Homo sapiens
  MOD_RES (13)..(13): Selenocysteine
  MOD_RES (50)..(51): Selenocysteine
  MOD_RES (55)..(55): Selenocysteine
  MOD_RES (83)..(83): Selenocysteine
  MOD_RES (121)..(121): Selenocysteine
  MOD_RES (144)..(144): Selenocysteine
  MOD_RES (163)..(163): Selenocysteine
  MOD_RES (170)..(170): Selenocysteine
  MOD_RES (200)..(200): Selenocysteine
  MOD_RES (212)..(212): Selenocysteine
  MOD_RES (226)..(226): Selenocysteine
  MOD_RES (247)..(247): Selenocysteine
  MOD_RES (260)..(260): Selenocysteine
  MOD_RES (268)..(268): Selenocysteine
  MOD_RES (303)..(303): Selenocysteine
MIQPMASPSNSSXVPVSEFLLICFPNFQSWQHWLSLPLSLLFLLAMGANXXLLIXIQLEASLHQPLYYLLSLLSLLDIVLCLXVIPKVLAIFWYDLRSISFPACFLQMFIMNSFLPMESCXFMVMAYDRYVAICHPLRYPSIIXNQFVAKASVFIVVRNALLXAPIPILXSLLHYCGENVIENCICANLSVSRLSCDNFXLNRIYQFVAGWXLLGSDLFLIFLSYXFILRAVLRFKAEGAAVKALSXCGSHFILILFFSXILLVVVLXNVARKKVPMDILILLNVLHHLIPPALNPIVYGVRXKEIKQGIQKLLQRGR

SEQ ID NO: 18972 - protein, 315 aa, Homo sapiens
  MOD_RES (2)..(3): Selenocysteine
  MOD_RES (8)..(8): Selenocysteine
  MOD_RES (11)..(11): Selenocysteine
  MOD_RES (47)..(48): Selenocysteine
  MOD_RES (52)..(52): Selenocysteine
  MOD_RES (80)..(80): Selenocysteine
  MOD_RES (87)..(87): Selenocysteine
  MOD_RES (118)..(118): Selenocysteine
  MOD_RES (141)..(141): Selenocysteine
  MOD_RES (154)..(154): Selenocysteine
  MOD_RES (160)..(160): Selenocysteine
  MOD_RES (197)..(197): Selenocysteine
  MOD_RES (209)..(209): Selenocysteine
  MOD_RES (223)..(223): Selenocysteine
  MOD_RES (244)..(244): Selenocysteine
  MOD_RES (257)..(257): Selenocysteine
  MOD_RES (265)..(265): Selenocysteine
  MOD_RES (300)..(300): Selenocysteine
MXXHRNDXLSXEASDFLLNCFVRSPSWQHWLSLPLSLLFLLAVGANXXLLMXIWLEASLHQPLYYLLSLLSLLDIVLCLXVIPKVLXIFWFDLRPISFPACFLQMYIMNCFLAMESCXFMVMAYDRYVAICHPLRYPSIIXDHFVVKAAMFILXRNVLMXLPIPILSAQLRYCGRNVIENCICANMSVSRLSCDDVXINHLYQFAGGWXLLGSDLILIFLSYXFILRAVLRLKAEGAVAKALSXCGSHFMLILFFSXILLVFVLXHVAKKKVSPDVPVLLNVLHHVIPAALNPIIYGVRXQEIKQGMQRLLKKGC

SEQ ID NO: 18973 - protein, 365 aa, Homo sapiens
  MOD_RES (3)..(3): Selenocysteine
  MOD_RES (8)..(8): Selenocysteine
  MOD_RES (23)..(24): Selenocysteine
  MOD_RES (34)..(34): Selenocysteine
  MOD_RES (61)..(61): Selenocysteine
  MOD_RES (98)..(99): Selenocysteine
  MOD_RES (103)..(103): Selenocysteine
  MOD_RES (131)..(131): Selenocysteine
  MOD_RES (164)..(164): Selenocysteine
  MOD_RES (169)..(169): Selenocysteine
  MOD_RES (192)..(192): Selenocysteine
  MOD_RES (248)..(248): Selenocysteine
  MOD_RES (260)..(260): Selenocysteine
  MOD_RES (295)..(295): Selenocysteine
  MOD_RES (308)..(308): Selenocysteine
  MOD_RES (316)..(316): Selenocysteine
  MOD_RES (351)..(351): Selenocysteine
MMXVILKXLLGQIQGLSGNPHSXXSRMYFLCFCXSLLRFKVHWVSRLIRKLYMASPSNDSXAPVSEFLLICFPNFQSWQHWLSLPLSLLFLLAMGANXXLLIXIQLEASLHQPLYYLLSLLSLLDIVLCLXVIPKVLAIFWFDLRSISFPACFLQMFIMNSFLXMESCXFMVMAYDRYVAICHPLRYPSIIXDQFVARAVVFVIARNAFVSLPVPMLSARLRYCAGNIIKNCICSNLSVSKLSCDDIXFNQLYQFVAGWXLLGSDLILIVISYSFILKVVLRIKAEGAVAKALSXCGSHFILILFFSXVLLVLVIXNLARKRIPPDVPILLNILHHLIPPALNPIVYGVRXKEIKQGIQNLLKRL

SEQ ID NO: 18974 - protein, 246 aa, Homo sapiens
  MOD_RES (11)..(11): Selenocysteine
  MOD_RES (44)..(44): Selenocysteine
  MOD_RES (49)..(49): Selenocysteine
  MOD_RES (72)..(72): Selenocysteine
  MOD_RES (91)..(91): Selenocysteine
  MOD_RES (115)..(115): Selenocysteine
  MOD_RES (128)..(128): Selenocysteine
  MOD_RES (140)..(140): Selenocysteine
  MOD_RES (159)..(159): Selenocysteine
  MOD_RES (175)..(175): Selenocysteine
  MOD_RES (187)..(188): Selenocysteine
  MOD_RES (196)..(196): Selenocysteine
  MOD_RES (231)..(231): Selenocysteine
LSLLDIVLCLXVIPKVLAIFWFDLRSISFPACFLQVFIMNSFLXMESCXFMIMAYDRYVAICKPLQYSSIIXDQFVARAAIFVVARNGLLXMPIPILSSRLRYCAGHIIKNCICXNVSVSKLSCDDIXLNQSYQFVIGWXLLGSDLILIVLSYFFILKXVLRIKGEGDMAKALGXCGSHFILILFFXXVLLVLVIXNLARKRIPPDVPILLNILHHLIPPALNPIVYGVRXKEIKQGIQNLLRRLC

SEQ ID NO: 18975 - protein, 313 aa, Homo sapiens
  MOD_RES (2)..(2): Selenocysteine
  MOD_RES (9)..(9): Selenocysteine
  MOD_RES (47)..(47): Selenocysteine
  MOD_RES (51)..(51): Selenocysteine
  MOD_RES (79)..(79): Selenocysteine
  MOD_RES (112)..(112): Selenocysteine
  MOD_RES (117)..(117): Selenocysteine
  MOD_RES (140)..(140): Selenocysteine
  MOD_RES (159)..(159): Selenocysteine
  MOD_RES (183)..(183): Selenocysteine
  MOD_RES (196)..(196): Selenocysteine
  MOD_RES (208)..(208): Selenocysteine
  MOD_RES (227)..(227): Selenocysteine
  MOD_RES (243)..(243): Selenocysteine
  MOD_RES (255)..(256): Selenocysteine
  MOD_RES (264)..(264): Selenocysteine
  MOD_RES (299)..(299): Selenocysteine
MXLPSNNSXSPVFEFFLICFPSFQSWQHWLSLPLSLLFLLAMGANAXLLIXIYLEASLHQPLYYLLSLLSLLDIVLCLXVIPKVLAIFWFDLRSISFPACFLQVFIMNSFLXMESCXFMIMAYDRYVAICKPLQYSSIIXDQFVARAAIFVVARNGLLXMPIPILSSRLRYCAGHIIKNCICXNVSVSKLSCDDIXLNQSYQFVIGWXLLGSDLILIVLSYFFILKXVLRIKGEGDMAKALGXCGSHFILILFFXXVLLVLVIXNLARKRIPPDVPILLNILHHLIPPALNPIVYGVRXKEIKQGIQNLLRRL

SEQ ID NO: 18976 - protein, 324 aa, Homo sapiens
  MOD_RES (52)..(52): Selenocysteine
  MOD_RES (84)..(85): Selenocysteine
  MOD_RES (146)..(146): Selenocysteine
  MOD_RES (154)..(154): Selenocysteine
  MOD_RES (166)..(166): Selenocysteine
  MOD_RES (194)..(194): Selenocysteine
  MOD_RES (249)..(249): Selenocysteine
  MOD_RES (255)..(255): Selenocysteine
  MOD_RES (262)..(262): Selenocysteine
  MOD_RES (270)..(270): Selenocysteine
  MOD_RES (273)..(273): Selenocysteine
  MOD_RES (278)..(278): Selenocysteine
  MOD_RES (298)..(298): Selenocysteine
  MOD_RES (304)..(304): Selenocysteine
  MOD_RES (319)..(319): Selenocysteine
MNHMSASLKISNSSKFQVSEFILLGFPGIHSWQHWLSLPLALLYLSALAANXLILIIIWQNPSLQQPMYIFLGILCMVDMGLAXXIIPKILAIFWFDAKVISLPECFAQIYAIHFFVGMESGILLCMAFDRYVAICHPLRYPSIVXSSLILKAXLFMVLRNGLFVXPVPVLAAQRDYCSKNEIEHCLCSNLGVXSLACDDRRPNSICQLVLAWLGMGSDLSLIILSYILILYSVLRLNSAEAAAKALSXCSSHLXLILFFYXIVVVISVXHLXEMKAXLIPVLLNVLHNIIPPSLNPXVYALQXKELRAAFQKVLFALXKEIRS

SEQ ID NO: 18977 - protein, 319 aa, Homo sapiens
  MOD_RES (3)..(3): Selenocysteine
  MOD_RES (5)..(5): Selenocysteine
  MOD_RES (8)..(8): Selenocysteine
  MOD_RES (38)..(38): Selenocysteine
  MOD_RES (54)..(54): Selenocysteine
  MOD_RES (59)..(59): Selenocysteine
  MOD_RES (81)..(82): Selenocysteine
  MOD_RES (143)..(143): Selenocysteine
  MOD_RES (151)..(151): Selenocysteine
  MOD_RES (162)..(162): Selenocysteine
  MOD_RES (199)..(199): Selenocysteine
  MOD_RES (246)..(246): Selenocysteine
  MOD_RES (258)..(258): Selenocysteine
  MOD_RES (266)..(266): Selenocysteine
MDXSXSVXYDSSLQISQFILMGLPGIHEWQHWLSLPLXLLYLLALGANLLIIIXIQHEXVLHEPMYHLLGILAVVDIGLAXXIMPKILAIFWFDAKAISLPMCFAQIYAIHCFFCIESGIFLCMAVDRYIAICRPLQYPSIVXKAFVFKAXGFIMLRNGLLXIPVPILAAQRHYCSRNEIEHCLCSNLGVISLACDDIXVNKFYQLMLAWVLVGSDMALVFSSYAVILHSVLRLNSAEAMSKALSXCSSHLILILFHXGIIVLSVXHLAEKKIPLIPVFLNVLHNVIPPALNPLACALRMHKLRLGFQRLLGLGQDVSK

SEQ ID NO: 18978 - protein, 315 aa, Homo sapiens
  MOD_RES (4)..(4): Selenocysteine
  MOD_RES (13)..(13): Selenocysteine
  MOD_RES (21)..(21): Selenocysteine
  MOD_RES (33)..(33): Selenocysteine
  MOD_RES (40)..(41): Selenocysteine
  MOD_RES (56)..(56): Selenocysteine
  MOD_RES (60)..(60): Selenocysteine
  MOD_RES (86)..(86): Selenocysteine
  MOD_RES (94)..(94): Selenocysteine
  MOD_RES (119)..(119): Selenocysteine
  MOD_RES (137)..(137): Selenocysteine
  MOD_RES (140)..(140): Selenocysteine
  MOD_RES (145)..(145): Selenocysteine
  MOD_RES (195)..(195): Selenocysteine
  MOD_RES (208)..(208): Selenocysteine
  MOD_RES (212)..(212): Selenocysteine
  MOD_RES (243)..(243): Selenocysteine
  MOD_RES (252)..(252): Selenocysteine
  MOD_RES (257)..(257): Selenocysteine
MSIXKAWNSSSVXMFILLGFXDHPELQALLFVXFLGIYLXXLAWNLALIFLIRGDXHLHXPMYFFLSNLSFIDICYSSAVAPNMLXDFFWEQKXISFVGCAAQFFFFVGMGLSECLLLXAMAYDRYAAISSPLLYPXIMXQGLCXRMVVGAYVGGFLSSLIQASSIFRLHFCGPNIINHFFCDLPPVLALSCSDXFLSQVVNFLVVVXVGGXSFLQLLISYGYIVSAVLKIPSAEGRWKACNXCASHLMVVXLLFGXALFVYLRPSSSYLLGRDKVVSVFYSLVIPMLNPLIYSLRNKEIKDALWKVLERKKVFS

SEQ ID NO: 18979 - protein, 324 aa, Homo sapiens
  MOD_RES (8)..(8): Selenocysteine
  MOD_RES (11)..(11): Selenocysteine
  MOD_RES (39)..(39): Selenocysteine
  MOD_RES (78)..(78): Selenocysteine
  MOD_RES (88)..(88): Selenocysteine
  MOD_RES (92)..(92): Selenocysteine
  MOD_RES (100)..(100): Selenocysteine
  MOD_RES (111)..(111): Selenocysteine
  MOD_RES (134)..(134): Selenocysteine
  MOD_RES (140)..(140): Selenocysteine
  MOD_RES (161)..(161): Selenocysteine
  MOD_RES (193)..(193): Selenocysteine
  MOD_RES (195)..(195): Selenocysteine
  MOD_RES (200)..(200): Selenocysteine
  MOD_RES (233)..(233): Selenocysteine
  MOD_RES (236)..(236): Selenocysteine
  MOD_RES (241)..(241): Selenocysteine
  MOD_RES (247)..(247): Selenocysteine
  MOD_RES (250)..(250): Selenocysteine
  MOD_RES (322)..(322): Selenocysteine
MAVGRNNXIVXKFILLGLSDHPQMKIFLFMLFLGLYLLXLAWNLSLIALIKMDSHLHMPMYFFLSNLSFLDICYVSSXAPKMLSDIIXEQKXISFVGCAXQYFVFCGMGLXECFLLAAMAYDRYAAICNPLLYXVLISHXLCLKMVVGAYVGGFLSSFIEXYSVYQHDFCGPYMINHFFCDLPPVLALSCSDXFXSEVVXFIVSVVVGIVSVLVVLISYGYIVAAVVKISSAXGRXKAFSXCASHLXAVXLFYGSGFFMYMRPSSSYSLNRDKVVSIFYALVIPVVNPIIYSFRNKEIKNAMRKAMERDPGISHGGPFIFMXLG

SEQ ID NO: 18980 - protein, 309 aa, Homo sapiens
  MOD_RES (9)..(9): Selenocysteine
  MOD_RES (12)..(12): Selenocysteine
  MOD_RES (17)..(17): Selenocysteine
  MOD_RES (20)..(20): Selenocysteine
  MOD_RES (40)..(40): Selenocysteine
  MOD_RES (75)..(75): Selenocysteine
  MOD_RES (77)..(77): Selenocysteine
  MOD_RES (80)..(80): Selenocysteine
  MOD_RES (91)..(91): Selenocysteine
  MOD_RES (101)..(101): Selenocysteine
  MOD_RES (111)..(112): Selenocysteine
  MOD_RES (169)..(169): Selenocysteine
  MOD_RES (212)..(212): Selenocysteine
  MOD_RES (215)..(215): Selenocysteine
  MOD_RES (221)..(221): Selenocysteine
  MOD_RES (242)..(242): Selenocysteine
  MOD_RES (256)..(256): Selenocysteine
  MOD_RES (281)..(281): Selenocysteine
MDISEGNKXLVXEFVLXGLXDRPWLHVLFFVVFLVVYLIXMVGNLGLIVLIWNDPHLHMPMYLFLGGLAFSDACXSXSIXPRMLVNFLDKXAMISLAECIXQFYFFASSAXXECFLLVMMAYDRYVAICNPLLYPVMMSNKLSAQLLSISYVIGFLHPLVHVSLLLRLXFCRFNIIHYFYCEILQLFKISCNGPSINALMIFIFGAFIQIPXLMXIIISYXRVLFDILKKKSEKGRSKAFSXCGAHLLSVSLYYGXLIFMYVRPASGLAEDQDKVYSLFYXIIIPLLNPFIYSLRNKKVMHALRRVIRK

SEQ ID NO: 18981 - protein, 309 aa, Homo sapiens
  MOD_RES (2)..(2): Selenocysteine
  MOD_RES (7)..(7): Selenocysteine
  MOD_RES (10)..(10): Selenocysteine
  MOD_RES (37)..(37): Selenocysteine
  MOD_RES (51)..(51): Selenocysteine
  MOD_RES (57)..(57): Selenocysteine
  MOD_RES (59)..(59): Selenocysteine
  MOD_RES (74)..(74): Selenocysteine
  MOD_RES (78)..(78): Selenocysteine
  MOD_RES (86)..(86): Selenocysteine
  MOD_RES (106)..(106): Selenocysteine
  MOD_RES (109)..(109): Selenocysteine
  MOD_RES (133)..(133): Selenocysteine
  MOD_RES (139)..(139): Selenocysteine
  MOD_RES (160)..(160): Selenocysteine
  MOD_RES (163)..(163): Selenocysteine
  MOD_RES (210)..(210): Selenocysteine
  MOD_RES (224)..(224): Selenocysteine
  MOD_RES (240)..(240): Selenocysteine
  MOD_RES (246)..(246): Selenocysteine
  MOD_RES (249)..(249): Selenocysteine
  MOD_RES (254)..(254): Selenocysteine
  MOD_RES (280)..(280): Selenocysteine
MXLGNSXEVXEFYLLGFGAQHEFWCILFIVFLLIYVXSIMGNSGIILLINXDSRFQXLXYFFLQHLAFVDICYXSAIXPKMLQSFXEEKNLMLFQGCVIQFLVYAXFAXSDCYLLAMMAVDPYVAICKPLHYXVIMSRXVCIRLVAGSYIMGSINASVQXGFXCSLSFCKSNSINHFFCDVPPILALSCSNVDINIMLLVVFVGSNLIFXGLVVIFSYIYIMAXILKMSSSAGRKKSFSXCASHLXAVXIFYGXLSYMYLQSHSNNSQENMKVAFIFYGXVIPMLNPLIYSLRNKEVKEALKVIGKKLF

SEQ ID NO: 18982 - protein, 311 aa, Homo sapiens
  MOD_RES (2)..(2): Selenocysteine
  MOD_RES (8)..(8): Selenocysteine
  MOD_RES (11)..(11): Selenocysteine
  MOD_RES (30)..(30): Selenocysteine
  MOD_RES (38)..(38): Selenocysteine
  MOD_RES (58)..(58): Selenocysteine
  MOD_RES (78)..(78): Selenocysteine
  MOD_RES (92)..(92): Selenocysteine
  MOD_RES (94)..(94): Selenocysteine
  MOD_RES (107)..(107): Selenocysteine
  MOD_RES (117)..(117): Selenocysteine
  MOD_RES (140)..(140): Selenocysteine
  MOD_RES (152)..(152): Selenocysteine
  MOD_RES (155)..(155): Selenocysteine
  MOD_RES (191)..(191): Selenocysteine
  MOD_RES (193)..(193): Selenocysteine
  MOD_RES (200)..(200): Selenocysteine
  MOD_RES (204)..(204): Selenocysteine
  MOD_RES (230)..(230): Selenocysteine
  MOD_RES (241)..(241): Selenocysteine
  MOD_RES (247)..(247): Selenocysteine
  MOD_RES (254)..(254): Selenocysteine
  MOD_RES (280)..(280): Selenocysteine
MXGGGNIXEIXYFILLGFSDFPRIIKVLFXIFLVIYIXSLAWNLSLIVLIRMDSHLHXPMYFFLSNLSFIDVCYISSXVPKMLSNLLQEQQXIXFVGCIIQYFIFSXMGLSESCLMXAMAYDRYAAICNPLLYSSIMSPXLCVWMVLGAYMXGLXASLFQIGALLQLHFCGSNVIRHFFCDMPQLLILSCXDXFFVQVMXAILXMFFGIASALVIMISYGYIGISIMKIXSAKGRSKAFNXCASHLXAVSLFYXSGIFVYLSSSSGGSSSFDRFASVFYXVVIPMLNPLIYSLRNKEIKDALKRLQKRKCC

SEQ ID NO: 18983 - protein, 317 aa, Homo sapiens
  MOD_RES (14)..(14): Selenocysteine
  MOD_RES (17)..(17): Selenocysteine
  MOD_RES (64)..(64): Selenocysteine
  MOD_RES (85)..(85): Selenocysteine
  MOD_RES (117)..(117): Selenocysteine
  MOD_RES (154)..(154): Selenocysteine
  MOD_RES (167)..(167): Selenocysteine
  MOD_RES (170)..(170): Selenocysteine
  MOD_RES (188)..(188): Selenocysteine
  MOD_RES (199)..(199): Selenocysteine
  MOD_RES (247)..(247): Selenocysteine
  MOD_RES (256)..(256): Selenocysteine
  MOD_RES (261)..(261): Selenocysteine
  MOD_RES (270)..(270): Selenocysteine
  MOD_RES (286)..(286): Selenocysteine
MMRLMKEVRGRNQXEVXEFLLLGLSDNPDLQGVLFALFLLIYMANMVGNLGMIVLIKIDLCLHXPMYFFLSSLSFVDASYSSSVXPKMLVNLMAENKAISFHGCAAQFYFFGSFLGXECFLLAMMAYDRYAAIWNPLLYPVLVSGRICFLLIAXSFLAGCGNAAIHXGMXFRLSFCGSNRINHFYCDXPPLLKLSCSDXHFNGIVIMAFSSFIVISCVMIVLISYLCIFIAVLKMPSLEGRHKAFSXCASYLMAVXIFFGXILFMYLRPXSSYSMEQDKVVSVFYXVIIPVLNPLIYSLKNKDVKKALKKILWKHIL

SEQ ID NO: 18984 - protein, 316 aa, Homo sapiens
  MOD_RES (13)..(13): Selenocysteine
  MOD_RES (16)..(16): Selenocysteine
  MOD_RES (63)..(63): Selenocysteine
  MOD_RES (84)..(84): Selenocysteine
  MOD_RES (116)..(116): Selenocysteine
  MOD_RES (153)..(153): Selenocysteine
  MOD_RES (166)..(166): Selenocysteine
  MOD_RES (169)..(169): Selenocysteine
  MOD_RES (187)..(187): Selenocysteine
  MOD_RES (198)..(198): Selenocysteine
  MOD_RES (246)..(246): Selenocysteine
  MOD_RES (255)..(255): Selenocysteine
  MOD_RES (260)..(260): Selenocysteine
  MOD_RES (269)..(269): Selenocysteine
  MOD_RES (285)..(285): Selenocysteine
MRLMKEVRGRNQXEVXEFLLLGLSDNPDLQGVLFALFLLIYMANMVGNLGMIVLIKIDLCLHXPMYFFLSSLSFVDASYSSSVXPKMLVNLMAENKAISFHGCAAQFYFFGSFLGXECFLLAMMAYDRYAAIWNPLLYPVLVSGRICFLLIAXSFLAGCGNAAIHXGMXFRLSFCGSNRINHFYCDXPPLLKLSCSDXHFNGIVIMAFSSFIVISCVMIVLISYLCIFIAVLKMPSLEGRHKAFSXCASYLMAVXIFFGXILFMYLRPXSSYSMEQDKVVSVFYXVIIPVLNPLIYSLKNKDVKKALKKILWKHIL

SEQ ID NO: 18985 - protein, 310 aa, Homo sapiens
  MOD_RES (10)..(10): Selenocysteine
  MOD_RES (18)..(18): Selenocysteine
  MOD_RES (50)..(51): Selenocysteine
  MOD_RES (53)..(53): Selenocysteine
  MOD_RES (57)..(57): Selenocysteine
  MOD_RES (87)..(87): Selenocysteine
  MOD_RES (99)..(99): Selenocysteine
  MOD_RES (134)..(134): Selenocysteine
  MOD_RES (160)..(161): Selenocysteine
  MOD_RES (163)..(163): Selenocysteine
  MOD_RES (192)..(192): Selenocysteine
  MOD_RES (210)..(210): Selenocysteine
  MOD_RES (219)..(219): Selenocysteine
  MOD_RES (240)..(240): Selenocysteine
  MOD_RES (246)..(246): Selenocysteine
  MOD_RES (249)..(249): Selenocysteine
  MOD_RES (254)..(254): Selenocysteine
  MOD_RES (263)..(263): Selenocysteine
  MOD_RES (279)..(279): Selenocysteine
MDKENSSMVXEFIFMGIXQDPQMEIIFFVVFLIVYLVNVVGNIGMIILIXXDXQLHXPMYFFLCNLSFVDLGYSSAIAPRMLADFLXNHKVISFSSCAXQFAFFVGFVDAECYVLAAMAYGRFVAICRPLHYSXFMSKQVCLALMLGSYLAGLVSLVAHXXLXFSLSYCGSNIINHFFCEIPPLLALSCSDXYISEILLFSLCGFIEFSXILIIFISYXFILVAIIRMRSAEGRLKAFSXCGSHLXGIXLFYGXVMFMYLRPXSSYSLDQDKWASVFYXVIIPMLNPLIYSLRNKDVKAAFKKLIGKKSQ

SEQ ID NO: 18986 - protein, 324 aa, Homo sapiens
  MOD_RES (7)..(7): Selenocysteine
  MOD_RES (10)..(10): Selenocysteine
  MOD_RES (18)..(18): Selenocysteine
  MOD_RES (26)..(26): Selenocysteine
  MOD_RES (36)..(36): Selenocysteine
  MOD_RES (38)..(38): Selenocysteine
  MOD_RES (75)..(75): Selenocysteine
  MOD_RES (78)..(78): Selenocysteine
  MOD_RES (133)..(134): Selenocysteine
  MOD_RES (154)..(155): Selenocysteine
  MOD_RES (163)..(163): Selenocysteine
  MOD_RES (190)..(190): Selenocysteine
  MOD_RES (192)..(192): Selenocysteine
  MOD_RES (208)..(208): Selenocysteine
  MOD_RES (210)..(210): Selenocysteine
  MOD_RES (224)..(224): Selenocysteine
  MOD_RES (237)..(237): Selenocysteine
  MOD_RES (240)..(240): Selenocysteine
  MOD_RES (249)..(249): Selenocysteine
  MOD_RES (263)..(264): Selenocysteine
  MOD_RES (270)..(270): Selenocysteine
  MOD_RES (279)..(279): Selenocysteine
MLESNYXMPXEFLFVGFXDYLPLRVXLFLVFLLVYXLXMVGNILLIILVNINSSLQIPMYYFLSNLSFLDISCSXAIXPKMLANFLASRKSISPYGCALQMFFFASFADAECLILAAMAYDRYAAICNPLLYXXLMSRRVCVCFIVLAYFSGSXXSLVHVCLXFRLSFCGSNIVNHFFCDIPPLLALSCXDXQINQLLLFALCSFIQXSXFVVIFISYFCILIXVLSIKSSGGRSKXFSXCASHLIAVXLFYGALLFMYLQPXXSYSLDXDKVVAVFYXVVFPMFNPIIYSFRNKDVKNALKKLLERIGYSNEWYLNRLRIVNI

SEQ ID NO: 18987 - protein, 362 aa, Homo sapiens
  MOD_RES (2)..(2): Selenocysteine
  MOD_RES (35)..(35): Selenocysteine
  MOD_RES (69)..(70): Selenocysteine
  MOD_RES (87)..(87): Selenocysteine
  MOD_RES (89)..(89): Selenocysteine
  MOD_RES (105)..(105): Selenocysteine
  MOD_RES (108)..(108): Selenocysteine
  MOD_RES (127)..(127): Selenocysteine
  MOD_RES (132)..(132): Selenocysteine
  MOD_RES (150)..(150): Selenocysteine
  MOD_RES (160)..(160): Selenocysteine
  MOD_RES (185)..(185): Selenocysteine
  MOD_RES (211)..(211): Selenocysteine
  MOD_RES (226)..(226): Selenocysteine
  MOD_RES (243)..(243): Selenocysteine
  MOD_RES (262)..(262): Selenocysteine
  MOD_RES (264)..(264): Selenocysteine
  MOD_RES (275)..(275): Selenocysteine
  MOD_RES (291)..(291): Selenocysteine
  MOD_RES (297)..(297): Selenocysteine
  MOD_RES (305)..(306): Selenocysteine
  MOD_RES (320)..(320): Selenocysteine
  MOD_RES (324)..(324): Selenocysteine
  MOD_RES (330)..(330): Selenocysteine
  MOD_RES (360)..(360): Selenocysteine
MXEFHLQSQMPSIRLIFRRLSLGRIKPSQSPRCSXSFMVVPSFSIAEHWRRMKGANLSQGMEFELLGLXXDPQLQRLLFVVFLGMYXAXLLGNLVMFLLIHVSAXLHXPMYSLLKSLSFLDFCYSSXVVPQXLVNFLAKRKVISYFGCMXQMFFYAGFAXSECYLIAAMAYDRYAAICNPLLYSXIMSPEVCASLIVGSYSAGFLNSLIHXGCIFSLKFCGAHVVXHFFCDGPPILSLSCVDXSLCEILLFIFAGFNLLSCXLXILISYFLILNXILKMSSAQGRFKAFSXCASHLXAICLFFGXXLFMYLRPRSSYSLXQDRXVAVIYXVVIPVLNPLMYSLRNKDVKKALIKVWGRKXME

SEQ ID NO: 18988 - protein, 314 aa, Homo sapiens
  MOD_RES (5)..(5): Selenocysteine
  MOD_RES (8)..(8): Selenocysteine
  MOD_RES (16)..(16): Selenocysteine
  MOD_RES (36)..(36): Selenocysteine
  MOD_RES (55)..(55): Selenocysteine
  MOD_RES (76)..(76): Selenocysteine
  MOD_RES (85)..(85): Selenocysteine
  MOD_RES (97)..(97): Selenocysteine
  MOD_RES (107)..(107): Selenocysteine
  MOD_RES (131)..(133): Selenocysteine
  MOD_RES (135)..(136): Selenocysteine
  MOD_RES (158)..(158): Selenocysteine
  MOD_RES (161)..(161): Selenocysteine
  MOD_RES (184)..(184): Selenocysteine
  MOD_RES (222)..(222): Selenocysteine
  MOD_RES (238)..(238): Selenocysteine
  MOD_RES (244)..(244): Selenocysteine
  MOD_RES (252)..(252): Selenocysteine
  MOD_RES (268)..(268): Selenocysteine
  MOD_RES (302)..(302): Selenocysteine
MENNXEVXEFILVGLXDDPELQIPLFIVFLFIYLIXLVGNLGMIELILLDSCLHXPMYFFLSNLSLVDFGYSSAVXPKVMVGFLXGDKFILYNACAXQFFFFVAFIXAESFLLASMAYDRYAALCKPLHYXXXMXXNVCACLAIGSYICGFLNASIHXGNXFRLSFCRSNVVEHFFCDAPPLLXLSCSDNYISEMVIFFVVGFNDLFSILVILISYLFIFIXIMKMRSPEGRQKAFSXCASHLXAVSIFYGXGIFMYLRPNSSHFMGXDKMASVFYAIVIPMLNPLVYSLRNKEVKSAFKKXVGKAKASIGFIF

SEQ ID NO: 18989 - protein, 314 aa, Homo sapiens
  MOD_RES (5)..(5): Selenocysteine
  MOD_RES (16)..(16): Selenocysteine
  MOD_RES (30)..(30): Selenocysteine
  MOD_RES (36)..(36): Selenocysteine
  MOD_RES (38)..(38): Selenocysteine
  MOD_RES (55)..(55): Selenocysteine
  MOD_RES (76)..(76): Selenocysteine
  MOD_RES (81)..(81): Selenocysteine
  MOD_RES (107)..(107): Selenocysteine
  MOD_RES (131)..(133): Selenocysteine
  MOD_RES (135)..(136): Selenocysteine
  MOD_RES (161)..(161): Selenocysteine
  MOD_RES (184)..(184): Selenocysteine
  MOD_RES (186)..(186): Selenocysteine
  MOD_RES (212)..(212): Selenocysteine
  MOD_RES (222)..(222): Selenocysteine
  MOD_RES (228)..(228): Selenocysteine
  MOD_RES (238)..(238): Selenocysteine
  MOD_RES (252)..(252): Selenocysteine
  MOD_RES (268)..(268): Selenocysteine
  MOD_RES (277)..(277): Selenocysteine
  MOD_RES (289)..(289): Selenocysteine
MENNXEVSEFILLGLXNAPELQVPLFIMFXLIYLIXLXGNLGMIILILLDSHLHXPMYFFLSNLSLAGIGYSSAVXPKVLXGLLIEDKAISYSACAAQMFFCAVFAXVENYLLSSMAYDRYAAVCNPLHYXXXMXXRVCACLAIGCYVIGFLNASIQIGDXFRLSFCMSNVIHHFFCDKPAVIXLXCSEKHISELILVLISSFNVFFALLVXLISYLFILIXILKRHXGKGYQKPLSXCGSHLIAIFLFYIXVIIMYIRPSSSHSMDXDKIASVFYXMIIPMLSPIVYXLRNKDVKNAFMKVVEKAKYSLDSVF

SEQ ID NO: 18990 - protein, 309 aa, Homo sapiens
  MOD_RES (5)..(5): Selenocysteine
  MOD_RES (8)..(8): Selenocysteine
  MOD_RES (16)..(16): Selenocysteine
  MOD_RES (30)..(30): Selenocysteine
  MOD_RES (36)..(36): Selenocysteine
  MOD_RES (55)..(55): Selenocysteine
  MOD_RES (76)..(76): Selenocysteine
  MOD_RES (107)..(107): Selenocysteine
  MOD_RES (131)..(133): Selenocysteine
  MOD_RES (135)..(135): Selenocysteine
  MOD_RES (192)..(192): Selenocysteine
  MOD_RES (222)..(222): Selenocysteine
  MOD_RES (238)..(238): Selenocysteine
  MOD_RES (244)..(244): Selenocysteine
  MOD_RES (252)..(252): Selenocysteine
  MOD_RES (268)..(268): Selenocysteine
MENCXEVXKFILLGLXSVPELQIPLFILFXFIYLLXLCGNLGMMLLILMDSCLHXPMYFFLSNLSLVDFGYSSAVXPKVMAGFLRGDKVISYNACAVQMFFFVALAXVENYLLASMAYDRYAAVCKPLHYXXXMXASVGACLALGSYVCGFLNASFHIGGIFSLSFCKSNLVHHFFCDVPAVMALSCSDKHXSEVILVFMSSFNIFFVLLVIFISYLFIFIXILKMHSAKGHQKALSXCASHFXAVSVFYGXVIFIYLQPSSSHSMDXDKMASVFYAMIIPMLNPVVYSLRNREVQNAFKKVLRRQKFL

SEQ ID NO: 18991 - protein, 309 aa, Homo sapiens
  MOD_RES (5)..(5): Selenocysteine
  MOD_RES (8)..(8): Selenocysteine
  MOD_RES (16)..(16): Selenocysteine
  MOD_RES (36)..(36): Selenocysteine
  MOD_RES (55)..(55): Selenocysteine
  MOD_RES (79)..(79): Selenocysteine
  MOD_RES (107)..(107): Selenocysteine
  MOD_RES (131)..(133): Selenocysteine
  MOD_RES (135)..(135): Selenocysteine
  MOD_RES (144)..(144): Selenocysteine
  MOD_RES (161)..(161): Selenocysteine
  MOD_RES (190)..(190): Selenocysteine
  MOD_RES (207)..(207): Selenocysteine
  MOD_RES (221)..(221): Selenocysteine
  MOD_RES (237)..(237): Selenocysteine
  MOD_RES (243)..(243): Selenocysteine
  MOD_RES (251)..(251): Selenocysteine
  MOD_RES (267)..(267): Selenocysteine
  MOD_RES (276)..(276): Selenocysteine
MENSXEVXEFILLGLXDDPNLQIPLLLAFLFIYLIXLLGNGGMMVIIHSDSHLHXPMYFFLSNLSLVDLGYSSAVAPKXVAALRSGDKAISYDGCAAQFFFFVGFAXVECYLLASMAYDRHAAVCRPLHYXXXMXAGVCALLAXGSYVSGFLNASIHAAGXFRLSFCGSNEINHFFCDIPPLLALSCSDXRISKLVVFVAGFNVFFXLLVILISYFFICIXIQRMHSAEGQKKVFSXCASHLXALSIFYGXIIFMYLQPNSSQSVDXDKIASVFYXVVIPMLNPLIYSLRNKEVKSALWKILNKLYPQY

SEQ ID NO: 18992 - protein, 314 aa, Homo sapiens
  MOD_RES (5)..(5): Selenocysteine
  MOD_RES (8)..(8): Selenocysteine
  MOD_RES (16)..(16): Selenocysteine
  MOD_RES (28)..(28): Selenocysteine
  MOD_RES (36)..(36): Selenocysteine
  MOD_RES (76)..(76): Selenocysteine
  MOD_RES (107)..(107): Selenocysteine
  MOD_RES (131)..(133): Selenocysteine
  MOD_RES (135)..(137): Selenocysteine
  MOD_RES (158)..(158): Selenocysteine
  MOD_RES (161)..(161): Selenocysteine
  MOD_RES (217)..(217): Selenocysteine
  MOD_RES (222)..(222): Selenocysteine
  MOD_RES (238)..(238): Selenocysteine
  MOD_RES (252)..(252): Selenocysteine
  MOD_RES (268)..(268): Selenocysteine
  MOD_RES (277)..(277): Selenocysteine
MENKXEVXQFILLGLXNDSELQVPLFIXFPFIYIIXLVGNLGIIVLIFWDSCLHNPMYFFLSNLSLVDFCYSSAVXPIVMAGFLIEDKVISYNACAAQMYIFVAFAXVENYLLASMAYDRYAAVCKPLHYXXXMXXXVCARLAIGSYLCGFLNASIHXGDXFSLSFCKSNEVHHFFCDIPAVMVLSCSDRHISELVLIYVVSFNIFIALLVILISYXFIFIXILKMHSASVYQKPLSXCASHFIAVGIFYGXIIFMYLQPSSSHSMDXDKMAPVFYXMVIPMLNPLVYSLRNKEVKSAFKKVVEKAKLSVGWSV

SEQ ID NO: 18993 - protein, 320 aa, Homo sapiens
  MOD_RES (7)..(7): Selenocysteine
  MOD_RES (22)..(22): Selenocysteine
  MOD_RES (34)..(34): Selenocysteine
  MOD_RES (61)..(61): Selenocysteine
  MOD_RES (95)..(95): Selenocysteine
  MOD_RES (99)..(99): Selenocysteine
  MOD_RES (114)..(114): Selenocysteine
  MOD_RES (137)..(138): Selenocysteine
  MOD_RES (164)..(165): Selenocysteine
  MOD_RES (167)..(167): Selenocysteine
  MOD_RES (196)..(196): Selenocysteine
  MOD_RES (212)..(212): Selenocysteine
  MOD_RES (214)..(214): Selenocysteine
  MOD_RES (219)..(219): Selenocysteine
  MOD_RES (244)..(244): Selenocysteine
  MOD_RES (250)..(250): Selenocysteine
  MOD_RES (258)..(258): Selenocysteine
  MOD_RES (274)..(274): Selenocysteine
  MOD_RES (283)..(283): Selenocysteine
  MOD_RES (308)..(308): Selenocysteine
MNSENLXRAAVAPAEFVLLGIXNRWDLRVALFLXCLPVYLVSLLGNMGMALLIRMDARLHXPMYFFLANLSLLDACYSSAIGPKMLVDLLLPRAXIPYXACALQMFVFAGLADXECCLLAAMAYDRYVAIRNPLLYXXAMSQRLCLALLGASGLGGAVSAFVHXXLXFRLSFCRSRKINSFFCDIPPLLAISCSDXSLNELLLFAICGFIQXAXVLAIXVSYGFIAGAVIHMRSVEGSRRAASXGGSHLXAVAMMYGXLIFMYLRPSSSYALDXDKMASVFYXLVIPSLNPLIYSLRNKEVKEALRQXWSRFHCPGQGSQ

SEQ ID NO: 18994 - protein, 314 aa, Homo sapiens
  MOD_RES (11)..(11): Selenocysteine
  MOD_RES (13)..(13): Selenocysteine
  MOD_RES (38)..(38): Selenocysteine
  MOD_RES (40)..(40): Selenocysteine
  MOD_RES (59)..(59): Selenocysteine
  MOD_RES (71)..(71): Selenocysteine
  MOD_RES (77)..(77): Selenocysteine
  MOD_RES (80)..(80): Selenocysteine
  MOD_RES (93)..(93): Selenocysteine
  MOD_RES (112)..(112): Selenocysteine
  MOD_RES (114)..(114): Selenocysteine
  MOD_RES (135)..(136): Selenocysteine
  MOD_RES (152)..(152): Selenocysteine
  MOD_RES (162)..(162): Selenocysteine
  MOD_RES (174)..(174): Selenocysteine
  MOD_RES (218)..(218): Selenocysteine
  MOD_RES (225)..(226): Selenocysteine
  MOD_RES (239)..(239): Selenocysteine
  MOD_RES (242)..(242): Selenocysteine
  MOD_RES (248)..(248): Selenocysteine
  MOD_RES (251)..(251): Selenocysteine
  MOD_RES (256)..(256): Selenocysteine
  MOD_RES (268)..(268): Selenocysteine
  MOD_RES (274)..(274): Selenocysteine
  MOD_RES (281)..(281): Selenocysteine
  MOD_RES (309)..(309): Selenocysteine
MMASERNQSSXPXFILLGFSEYPEIQVPLFLVFLFVYXVXVVGNLGMIIIIRLNSKLHXIMCFFLSHLSLXDFCFSXVVXPKLLENLVVEYRXISFSGCIMQFCFACIFGVXEXFMLAAMAYDRFVAVCKPLLYXXIMSQKLCALLVAGSYXWGIVCSLILXYFLLDLSFCESXFINNFICDHSVIVSASYSDPYISQRLCFIIAIFNEVSSLIIILXSYMLIFXXIMKMRSASGRQKXFSXCASHLXAIXIFHGXILFLYCVPNPKXSSLIVXVASVFYXVAIPMLNPLIYSLRNKDINNMFEKLVVXKLIYH

SEQ ID NO: 18995 - protein, 314 aa, Homo sapiens
  MOD_RES (13)..(13): Selenocysteine
  MOD_RES (20)..(20): Selenocysteine
  MOD_RES (40)..(40): Selenocysteine
  MOD_RES (59)..(59): Selenocysteine
  MOD_RES (80)..(80): Selenocysteine
  MOD_RES (108)..(108): Selenocysteine
  MOD_RES (112)..(112): Selenocysteine
  MOD_RES (135)..(135): Selenocysteine
  MOD_RES (184)..(184): Selenocysteine
  MOD_RES (206)..(206): Selenocysteine
  MOD_RES (212)..(212): Selenocysteine
  MOD_RES (218)..(218): Selenocysteine
  MOD_RES (226)..(226): Selenocysteine
  MOD_RES (242)..(242): Selenocysteine
  MOD_RES (248)..(248): Selenocysteine
  MOD_RES (251)..(251): Selenocysteine
  MOD_RES (256)..(256): Selenocysteine
  MOD_RES (272)..(272): Selenocysteine
  MOD_RES (281)..(281): Selenocysteine
  MOD_RES (309)..(309): Selenocysteine
MMMVLRNLSMEPXFALLGFXDYPKLQIPLFLVFLLMYVIXVVGNLGMIIIIKINPKFHXPMYFFLSHLSFVDFCYSSIVXPKLLENLVMADKSIFYFSCMMQYFLSCXAVVXESFLLAVMAYDRFVAICNPLLYXVAMSQRLCALLVAGSYLWGMFGPLVLLCYALRLNFSGPNVINHFFCEYXALISVSGSDILIPHLLLFSFAXFNEMCXLLIILXSYVFIFVXVLKIRSVSGRHKAFSXWASHLXSIXIFHGXILFLYCVPNSKNSRQXVKVASVFYXVVNPMLNPLIYSLRNKDVKDAFWKLIHXQVPFH

SEQ ID NO: 18996 - protein, 328 aa, Homo sapiens
  MOD_RES (4)..(4): Selenocysteine
  MOD_RES (8)..(9): Selenocysteine
  MOD_RES (13)..(13): Selenocysteine
  MOD_RES (15)..(15): Selenocysteine
  MOD_RES (59)..(59): Selenocysteine
  MOD_RES (93)..(93): Selenocysteine
  MOD_RES (108)..(108): Selenocysteine
  MOD_RES (112)..(112): Selenocysteine
  MOD_RES (135)..(135): Selenocysteine
  MOD_RES (160)..(160): Selenocysteine
  MOD_RES (175)..(175): Selenocysteine
  MOD_RES (203)..(203): Selenocysteine
  MOD_RES (206)..(206): Selenocysteine
  MOD_RES (212)..(212): Selenocysteine
  MOD_RES (218)..(218): Selenocysteine
  MOD_RES (226)..(227): Selenocysteine
  MOD_RES (242)..(242): Selenocysteine
  MOD_RES (248)..(248): Selenocysteine
  MOD_RES (251)..(251): Selenocysteine
  MOD_RES (256)..(256): Selenocysteine
  MOD_RES (272)..(272): Selenocysteine
  MOD_RES (281)..(281): Selenocysteine
  MOD_RES (309)..(309): Selenocysteine
MFLXERNXXSEAXFXLLGFSDYLELQIPLFFVFLAVYGFSVVGNLGMIVIIKINPKLHXPMYFFLNHLSFVDFCYSSIIAPMMLVNLVVEDRXISFSGCLVQFFFFCXFVVXELILFAVMAYDHFVAICNPLLYXVAISQKLCAMLVVVLYAWGVACSLXLACSALKLSFHGFNXINHFFCELSSLISLSYPDSYLSQLLLFXVAXFNEISXLLIILXSYAFIIVXXLKMPSASGHRKVFSXCASHLXAIXIFHGXILFLYCVPNSKNSRHXVKVASVFYXVVIPLLNPLIYSLRNKDVKDAIRKIINXKYFHIKHRHWYPFNFVIEQ

SEQ ID NO: 18997 - protein, 313 aa, Homo sapiens
  MOD_RES (4)..(4): Selenocysteine
  MOD_RES (8)..(8): Selenocysteine
  MOD_RES (11)..(12): Selenocysteine
  MOD_RES (14)..(14): Selenocysteine
  MOD_RES (39)..(39): Selenocysteine
  MOD_RES (58)..(58): Selenocysteine
  MOD_RES (92)..(92): Selenocysteine
  MOD_RES (107)..(107): Selenocysteine
  MOD_RES (111)..(111): Selenocysteine
  MOD_RES (134)..(134): Selenocysteine
  MOD_RES (161)..(161): Selenocysteine
  MOD_RES (174)..(174): Selenocysteine
  MOD_RES (193)..(193): Selenocysteine
  MOD_RES (205)..(205): Selenocysteine
  MOD_RES (211)..(211): Selenocysteine
  MOD_RES (217)..(217): Selenocysteine
  MOD_RES (225)..(225): Selenocysteine
  MOD_RES (241)..(241): Selenocysteine
  MOD_RES (247)..(247): Selenocysteine
  MOD_RES (250)..(250): Selenocysteine
  MOD_RES (255)..(255): Selenocysteine
  MOD_RES (271)..(271): Selenocysteine
  MOD_RES (280)..(280): Selenocysteine
  MOD_RES (301)..(301): Selenocysteine
  MOD_RES (303)..(303): Selenocysteine
  MOD_RES (308)..(308): Selenocysteine
MLLXDRNXSGXXFXLLGFSDYPELQVPLFLVFLAIYNVXVLGNIGLIVIIKINPKLHXPMYFFLSQLSFVDFCYSSIIAPKMLVNLVVKDRXISFLGCVVQFFFFCXFVVXESFLLAVMAYDRFVAICNPLLYXVNMSQKLCVLLVVGSYAWGVSCSLELXCSALKLCFHGFNXINHFFCEFSSLLSLSCSDXYINQWLLFFLAXFNEISXLLIVLXSYAFIVVXILKMRSVSGRRKAFSXCASHLXAIXIFHGXILFLYCVPNSKNSRHXVKVASVFYXVVIPMLNPLIYSLRNKDVKDXVXEILDXKVFSY

SEQ ID NO: 18998 - protein, 314 aa, Homo sapiens
  MOD_RES (2)..(2): Selenocysteine
  MOD_RES (7)..(7): Selenocysteine
  MOD_RES (10)..(10): Selenocysteine
  MOD_RES (20)..(20): Selenocysteine
  MOD_RES (36)..(36): Selenocysteine
  MOD_RES (38)..(38): Selenocysteine
  MOD_RES (57)..(57): Selenocysteine
  MOD_RES (75)..(76): Selenocysteine
  MOD_RES (78)..(78): Selenocysteine
  MOD_RES (91)..(91): Selenocysteine
  MOD_RES (109)..(110): Selenocysteine
  MOD_RES (139)..(139): Selenocysteine
  MOD_RES (160)..(160): Selenocysteine
  MOD_RES (192)..(192): Selenocysteine
  MOD_RES (210)..(210): Selenocysteine
  MOD_RES (240)..(240): Selenocysteine
  MOD_RES (246)..(246): Selenocysteine
  MOD_RES (254)..(254): Selenocysteine
  MOD_RES (258)..(258): Selenocysteine
  MOD_RES (279)..(279): Selenocysteine
  MOD_RES (310)..(310): Selenocysteine
MXRKNYXSLXEFVLLGLADXLELQIILFLFFLVIYXLXVLGNLGMILLIRIDSQLHXPMYFFLANLSFVDVCNSXXIXPKMLADLLSEKKXISFAGCFLQMYFFISLAXXECILFGLMAYDRYAAICRPLLYSLIMSRXVYLKMAAGAFAAGLLNFMVNXSHVSSLSFCDSNVIHHFFCDSPPLFKLSCSDXILKESISSILAGVNIVGXLLVILSSYSYVLFSIFSMHSGEGRHRAFSXCASHLXAIILFYAXCIYXYLRPSSSYSLNQDKVASVFYXVVIPMLNPLIYSLRSKEVKKALANVISRKRXSSFL

SEQ ID NO: 18999 - protein, 313 aa, Homo sapiens
  MOD_RES (7)..(7): Selenocysteine
  MOD_RES (10)..(10): Selenocysteine
  MOD_RES (15)..(15): Selenocysteine
  MOD_RES (38)..(38): Selenocysteine
  MOD_RES (76)..(76): Selenocysteine
  MOD_RES (78)..(78): Selenocysteine
  MOD_RES (109)..(110): Selenocysteine
  MOD_RES (117)..(117): Selenocysteine
  MOD_RES (137)..(137): Selenocysteine
  MOD_RES (167)..(167): Selenocysteine
  MOD_RES (181)..(181): Selenocysteine
  MOD_RES (190)..(190): Selenocysteine
  MOD_RES (213)..(213): Selenocysteine
  MOD_RES (219)..(219): Selenocysteine
  MOD_RES (240)..(240): Selenocysteine
  MOD_RES (279)..(279): Selenocysteine
  MOD_RES (298)..(298): Selenocysteine
  MOD_RES (302)..(302): Selenocysteine
MEEENAXLLXEFVLXGFLYQPQWKIPLFLAFLVIYLIXIMGNLGLIAVIWKDPHLHIPMYLLLGNLAFVDAWISSXVXPKMLNNFLAKSKMISLSECKIQFFSFAISVXXECFLLAXMAYDRYVAICKPLLYPAIMXNGLCIRLLILSYVGGILHALIHEGFLFRLXFCNSNIVHHIYCDXIPLSKISCXDSSINFLMVFIFSGSIQVFSIVXILVSYXFVLFAILKKKSDKGVRKAFSXCGAHLFSVSLYYGPLLFIYVGPASPQADDQDMVEPLFYXVIIPLLNPIIYSLRNKQVXVSFXKMLKKHVKVSY

SEQ ID NO: 19000 - protein, 310 aa, Homo sapiens
  MOD_RES (7)..(7): Selenocysteine
  MOD_RES (10)..(10): Selenocysteine
  MOD_RES (15)..(15): Selenocysteine
  MOD_RES (38)..(38): Selenocysteine
  MOD_RES (78)..(78): Selenocysteine
  MOD_RES (109)..(110): Selenocysteine
  MOD_RES (117)..(117): Selenocysteine
  MOD_RES (137)..(137): Selenocysteine
  MOD_RES (167)..(167): Selenocysteine
  MOD_RES (190)..(190): Selenocysteine
  MOD_RES (210)..(210): Selenocysteine
  MOD_RES (213)..(213): Selenocysteine
  MOD_RES (224)..(224): Selenocysteine
  MOD_RES (240)..(240): Selenocysteine
  MOD_RES (279)..(279): Selenocysteine
  MOD_RES (302)..(302): Selenocysteine
MEEENAXLLXEFVLXGFLYQPQWKIPLFLAFLVIYLIXIMGNLGLIAVIWKDPHLHIPMYLLLGNLAFVDALLSSSVXLKMLINFLAKSKMISLSECKIQLFSFAISVXXECFLLAXMAYDRYVAICKPLLYPAIMXNGLCIRLLILSYVGGLLHALIHEGFLFRLXFCNSNIIQHFYCDIIPLLKISYXDSSINFLMVFIFAGSIQVFXIGXVLISYIFVLYXILKKKSVKGMRKAFSXCGAHLLSVSLYYGPLAFMYMGSASPQADDQDMMESLFYXVIVPLLNPMIYSLRNKQVIASFXKMFKRNDV

SEQ ID NO: 19001 - protein, 313 aa, Homo sapiens
  MOD_RES (7)..(7): Selenocysteine
  MOD_RES (10)..(10): Selenocysteine
  MOD_RES (15)..(15): Selenocysteine
  MOD_RES (38)..(38): Selenocysteine
  MOD_RES (76)..(76): Selenocysteine
  MOD_RES (78)..(78): Selenocysteine
  MOD_RES (109)..(110): Selenocysteine
  MOD_RES (117)..(117): Selenocysteine
  MOD_RES (137)..(137): Selenocysteine
  MOD_RES (167)..(167): Selenocysteine
  MOD_RES (181)..(181): Selenocysteine
  MOD_RES (190)..(190): Selenocysteine
  MOD_RES (213)..(213): Selenocysteine
  MOD_RES (219)..(219): Selenocysteine
  MOD_RES (224)..(224): Selenocysteine
  MOD_RES (240)..(240): Selenocysteine
  MOD_RES (279)..(279): Selenocysteine
MEEENAXLLXEFVLXGFLYQPQWKIPLFLAFLVIYLIXIMGNLGLIAVIWKDPHLHIPMYLLLGNLAFVDAWISSXVXPKMLNNFLAKSKMISLSECKIQFFSIAIGVXXECFLLAXMAYDRYVAICKPLLYPAIMXNGLCIRLLILSYIAGILHALIHEGFLFRLXFCNSNIVHHIYCDXIPLSKISCXDSSINFLMVFIFSGSIQVFSIVXILISYXFVLFXVLEKKSDKGVRKAFSXCGAHLFSVCLYYGPLLLMYVGPASPQADGQNMVEPLFYXVIIPLLNPIIYSLRNKQVIVSFIKMLKRNVKVSY

SEQ ID NO: 19002 - protein, 310 aa, Homo sapiens
  MOD_RES (7)..(7): Selenocysteine
  MOD_RES (10)..(10): Selenocysteine
  MOD_RES (15)..(15): Selenocysteine
  MOD_RES (38)..(38): Selenocysteine
  MOD_RES (76)..(76): Selenocysteine
  MOD_RES (78)..(78): Selenocysteine
  MOD_RES (109)..(110): Selenocysteine
  MOD_RES (117)..(117): Selenocysteine
  MOD_RES (137)..(137): Selenocysteine
  MOD_RES (167)..(167): Selenocysteine
  MOD_RES (181)..(181): Selenocysteine
  MOD_RES (190)..(190): Selenocysteine
  MOD_RES (210)..(210): Selenocysteine
  MOD_RES (213)..(213): Selenocysteine
  MOD_RES (219)..(219): Selenocysteine
  MOD_RES (224)..(224): Selenocysteine
  MOD_RES (240)..(240): Selenocysteine
  MOD_RES (279)..(279): Selenocysteine
  MOD_RES (302)..(302): Selenocysteine
MEEENAXLLXEFVLXGFLYQPQWKIPLFLAFLVIYLIXIMGNLGLIAVIWKDPHLHIPMYLLLGNLAFVDAWISSXVXPKMLNNFLAKSKMISLSECKIQFFSIAIGVXXECFLLAXMAYDRYVAICKPLLYPAIMXNGLCIRLLILSYIAGILHALIHEGFLFRLXFCNSNIVHHIYCDXIPLSKISCXDSSINFLMVFIFSGSIQVFXIGXVLVSYXFVLSXILKKKSVKGIRKDFSXCGAHILPVSLYYGPLAFMYVGSASQRADDQDMMESLFYXVIVPLLNPMIYSLRNKQVIDSFXKMFKGNNV

SEQ ID NO: 19003 - protein, 314 aa, Homo sapiens
  MOD_RES (11)..(12): Selenocysteine
  MOD_RES (15)..(15): Selenocysteine
  MOD_RES (20)..(20): Selenocysteine
  MOD_RES (23)..(23): Selenocysteine
  MOD_RES (43)..(43): Selenocysteine
  MOD_RES (81)..(81): Selenocysteine
  MOD_RES (83)..(83): Selenocysteine
  MOD_RES (114)..(115): Selenocysteine
  MOD_RES (122)..(122): Selenocysteine
  MOD_RES (172)..(172): Selenocysteine
  MOD_RES (195)..(195): Selenocysteine
  MOD_RES (215)..(215): Selenocysteine
  MOD_RES (218)..(218): Selenocysteine
  MOD_RES (224)..(224): Selenocysteine
  MOD_RES (229)..(229): Selenocysteine
  MOD_RES (245)..(245): Selenocysteine
  MOD_RES (284)..(284): Selenocysteine
  MOD_RES (307)..(307): Selenocysteine
MSNEDMEQDNXXLLXEFVLXGLXYQPEWKMPLFLVFLVIYLIXIVWNLGLIALIWNDPQLHIPMYFFLGSLAFVDAWISSXVXPKMLVNFLAKNRMISLSECMIQFFSFAFGGXXECFLLAXMAYDRYVAICKPLLYPVIMNNSLCIRLLAFSFLGGFLHALIHEVLIFRLXFCNSNIIHHFYCDIIPLFMISCXDPSINFLMVFILSGSIQVFXIVXVLNSYXFALFXILKKKSVRGVRKAFSXCGAHLLSVSLYYGPLIFMYLRPASPQADDQDMIDSVFYXIIIPLLNPIIYSLRNKQVIDSFXKMVKRNV

SEQ ID NO: 19004 - protein, 325 aa, Homo sapiens
  MOD_RES (12)..(12): Selenocysteine
  MOD_RES (23)..(23): Selenocysteine
  MOD_RES (26)..(26): Selenocysteine
  MOD_RES (31)..(31): Selenocysteine
  MOD_RES (54)..(54): Selenocysteine
  MOD_RES (92)..(92): Selenocysteine
  MOD_RES (94)..(94): Selenocysteine
  MOD_RES (122)..(123): Selenocysteine
  MOD_RES (125)..(126): Selenocysteine
  MOD_RES (133)..(133): Selenocysteine
  MOD_RES (153)..(153): Selenocysteine
  MOD_RES (183)..(183): Selenocysteine
  MOD_RES (206)..(206): Selenocysteine
  MOD_RES (226)..(226): Selenocysteine
  MOD_RES (229)..(229): Selenocysteine
  MOD_RES (235)..(235): Selenocysteine
  MOD_RES (240)..(240): Selenocysteine
  MOD_RES (256)..(256): Selenocysteine
  MOD_RES (272)..(272): Selenocysteine
  MOD_RES (295)..(295): Selenocysteine
  MOD_RES (318)..(318): Selenocysteine
MFLYLCFIFQRXCSEEMEEENAXLLXEFVLXGFLHQPDCKIPLFLAFLVIYLIXIMGNLGLIVLIWKDPHLHIPMYLFLGSLAFVDASLSSXVXPKMLINFLAKSKMISLSECMVQFFSLVXXVXXECFLLAXMAYDRYVAICKALLYPVIMXNELCIQLLVLSFIGGLLHALIHEAFSFRLXFCNSNIIQHFYCDIIPLLKISCXDSSINFLMVFIFAGSVQVFXIGXILISYXIILFXILEKKSIKGIRKAVSXCGAHLLSVSLYYGPLXFKYLGSASPQADDQDMMESLFYXVIVPLLNPMIYSLRNKQVIASFXKMFKSNV

SEQ ID NO: 19005 - protein, 314 aa, Homo sapiens
  MOD_RES (4)..(4): Selenocysteine
  MOD_RES (9)..(9): Selenocysteine
  MOD_RES (12)..(12): Selenocysteine
  MOD_RES (21)..(21): Selenocysteine
  MOD_RES (35)..(35): Selenocysteine
  MOD_RES (59)..(59): Selenocysteine
  MOD_RES (108)..(108): Selenocysteine
  MOD_RES (112)..(112): Selenocysteine
  MOD_RES (135)..(135): Selenocysteine
  MOD_RES (162)..(162): Selenocysteine
  MOD_RES (192)..(192): Selenocysteine
  MOD_RES (194)..(195): Selenocysteine
  MOD_RES (203)..(203): Selenocysteine
  MOD_RES (239)..(239): Selenocysteine
  MOD_RES (242)..(242): Selenocysteine
  MOD_RES (248)..(248): Selenocysteine
  MOD_RES (251)..(251): Selenocysteine
  MOD_RES (256)..(256): Selenocysteine
  MOD_RES (272)..(272): Selenocysteine
  MOD_RES (281)..(281): Selenocysteine
MEFXDRNYXLVXEFILLGFPXRPELQIVLFLMFLXLYAIILIGNIGLMLLIRIDPHLQXPMYFFLSNLSFVDLCYFSDIVPKMLVNFLSENKSISYYGCALQFYFFCXFADXESFILAAMAYDRYVAICNPLLYXVVMSRGICMRLIVLSYLGGNMSSLVHXSFAFILKYCDKNVINHFFCDLPPLLKLSCXDXXINEWLLSXYGSSVEIICFIIIIISYFFILLSVLKIRSFSGRKKXFSXCASHLXSVXIYQGXLLFIYSRPSYLYSPNXDKIISVFYXIFIPVLNPLIYSLRNKDVKDAAEKVLRSKVDSS

SEQ ID NO: 19006 - protein, 312 aa, Homo sapiens
  MOD_RES (7)..(7): Selenocysteine
  MOD_RES (10)..(10): Selenocysteine
  MOD_RES (18)..(18): Selenocysteine
  MOD_RES (38)..(38): Selenocysteine
  MOD_RES (52)..(52): Selenocysteine
  MOD_RES (57)..(57): Selenocysteine
  MOD_RES (91)..(91): Selenocysteine
  MOD_RES (109)..(110): Selenocysteine
  MOD_RES (133)..(133): Selenocysteine
  MOD_RES (146)..(146): Selenocysteine
  MOD_RES (156)..(156): Selenocysteine
  MOD_RES (160)..(160): Selenocysteine
  MOD_RES (192)..(192): Selenocysteine
  MOD_RES (201)..(201): Selenocysteine
  MOD_RES (210)..(210): Selenocysteine
  MOD_RES (213)..(213): Selenocysteine
  MOD_RES (240)..(240): Selenocysteine
  MOD_RES (246)..(246): Selenocysteine
  MOD_RES (249)..(249): Selenocysteine
  MOD_RES (254)..(254): Selenocysteine
  MOD_RES (279)..(279): Selenocysteine
MADDNFXVVXEFILLGLXDHAELKAVLFVVFLVIYAIXLLRNLGMILLIQIXSKLHXPMYFLLSCLSFVDACYSSAIAPKMLVNLLVVKAXISFSACMVQHLCFGVFIXXEGFLLSVMAYDRYVAIVSPLLYXVAMSDRKCVELVXGSWIGGIVNXLIHXISLRRLSFCRLNAVSHFFCDIPSLLKLSCSDXSMNELLLLXFSGVIAMAXFLXVIISYIFIAFASLRIHSASGRQQAFSXCASHLXAVXIFYGXLIFSYIQPSSQYFVEQEKVVSMFYXLGIPMLNLLIHSLRNKDVKEAVKRAIEMKHFLC

SEQ ID NO: 19007 - protein, 308 aa, Homo sapiens
  MOD_RES (7)..(7): Selenocysteine
  MOD_RES (15)..(15): Selenocysteine
  MOD_RES (18)..(18): Selenocysteine
  MOD_RES (25)..(25): Selenocysteine
  MOD_RES (38)..(38): Selenocysteine
  MOD_RES (51)..(51): Selenocysteine
  MOD_RES (57)..(57): Selenocysteine
  MOD_RES (78)..(78): Selenocysteine
  MOD_RES (106)..(106): Selenocysteine
  MOD_RES (109)..(109): Selenocysteine
  MOD_RES (145)..(146): Selenocysteine
  MOD_RES (210)..(210): Selenocysteine
  MOD_RES (224)..(224): Selenocysteine
  MOD_RES (240)..(240): Selenocysteine
  MOD_RES (279)..(279): Selenocysteine
MAEENHXMKNEFILXGFXDHPELKXLLFVVFFAIYLIXVVGNISLVALIFXHRRLHXPMYIFLGNLALVDSCCACAIXPKMLENFFSENKRISLYECAVQFYFLCXVEXADCFLLAAMAYDRYVAICNPLQYHIMMSKKLCIQMXXGAFIAGNLHSMIHVGLVFRLVFCGSNHINHFYCDILPLYRLSCVDPYINELVLFIFSGSVQVFXIGSVLISYLYILLXIFKMKSKEGRAKAFSXCASHFLSVSLFYGSLFFMYVRPNLLEEGDKDIPAAILFXIVVPLLNPFIYSLRNREVISVLRKILMKK

SEQ ID NO: 19008 - protein, 316 aa, Homo sapiens
  MOD_RES (7)..(7): Selenocysteine
  MOD_RES (15)..(15): Selenocysteine
  MOD_RES (18)..(18): Selenocysteine
  MOD_RES (25)..(25): Selenocysteine
  MOD_RES (38)..(38): Selenocysteine
  MOD_RES (51)..(51): Selenocysteine
  MOD_RES (57)..(57): Selenocysteine
  MOD_RES (78)..(78): Selenocysteine
  MOD_RES (106)..(106): Selenocysteine
  MOD_RES (109)..(109): Selenocysteine
  MOD_RES (145)..(146): Selenocysteine
  MOD_RES (181)..(181): Selenocysteine
  MOD_RES (210)..(210): Selenocysteine
  MOD_RES (224)..(224): Selenocysteine
  MOD_RES (240)..(240): Selenocysteine
  MOD_RES (279)..(279): Selenocysteine
MVEENHXMKNEFILXGFXDHPELKXLLFVVFFAIYLIXVVGNISLVALIFXHCRLHXPMYIFLGNLALVDSCCACAIXPKMLENFFSEGKRISLYECAVQFYFLCXVEXADCFLLAAVAYDRYVAICNPLQYHIMMSKKLCIQMXXGAFIAGNLHSMIHVGLVFRLVFCGLNHINHFYCDXLPLYRLSCVDPFINELVLFIFSGSVQVFXIGSVLISYLYILLXIFRMKSKEGRAKAFSXCASHFSSVSLFYGSIFFLYIRPNLLEEGGNDIPAAILFXIVVPLLNPFIYSLRNKEVISVLRKILLKIKSQGSVNK

SEQ ID NO: 19009 - protein, 321 aa, Homo sapiens
  MOD_RES (15)..(15): Selenocysteine
  MOD_RES (18)..(18): Selenocysteine
  MOD_RES (25)..(25): Selenocysteine
  MOD_RES (38)..(38): Selenocysteine
  MOD_RES (57)..(57): Selenocysteine
  MOD_RES (78)..(78): Selenocysteine
  MOD_RES (93)..(93): Selenocysteine
  MOD_RES (109)..(110): Selenocysteine
  MOD_RES (134)..(134): Selenocysteine
  MOD_RES (139)..(139): Selenocysteine
  MOD_RES (145)..(145): Selenocysteine
  MOD_RES (167)..(167): Selenocysteine
  MOD_RES (210)..(210): Selenocysteine
  MOD_RES (222)..(222): Selenocysteine
  MOD_RES (225)..(225): Selenocysteine
  MOD_RES (238)..(238): Selenocysteine
  MOD_RES (277)..(277): Selenocysteine
  MOD_RES (321)..(321): Selenocysteine
MNKENHSLIAEFILXGFXYHPKLKXVLFVVFFAIYLIXMVGNIGLVALIYIEQRLHXPMYIFLGNLVLMDSCCSSAIXPKMLENFFSEDKRIXLYECMAQFYFLCLAEXXDCFLLAAMAYDCYVAICNPLQYHXMMSKXLCIQMXAGAYLAGNLHPMIEVEFLLRLXFCGSHQINHFFCDVLPLYRLSCINPYINELVLFILAGSIQIFXIVLVSYFYILFXIFXMKSKEGRGKALSXCASHFLSVSIFCDSLLFMYARPGAVNEGDKDIPVAIFYXLVIPLLNPFIYSLRNKEVINIMKKIMKKRKFCHILKQMSSPLAX

SEQ ID NO: 19010 - protein, 321 aa, Homo sapiens
  MOD_RES (18)..(18): Selenocysteine
  MOD_RES (25)..(25): Selenocysteine
  MOD_RES (38)..(38): Selenocysteine
  MOD_RES (57)..(57): Selenocysteine
  MOD_RES (78)..(78): Selenocysteine
  MOD_RES (109)..(110): Selenocysteine
  MOD_RES (117)..(117): Selenocysteine
  MOD_RES (134)..(134): Selenocysteine
  MOD_RES (139)..(139): Selenocysteine
  MOD_RES (145)..(146): Selenocysteine
  MOD_RES (167)..(167): Selenocysteine
  MOD_RES (190)..(190): Selenocysteine
  MOD_RES (210)..(210): Selenocysteine
  MOD_RES (213)..(213): Selenocysteine
  MOD_RES (224)..(224): Selenocysteine
  MOD_RES (240)..(240): Selenocysteine
  MOD_RES (269)..(269): Selenocysteine
  MOD_RES (311)..(311): Selenocysteine
MARENHSLAAEFILIGFXNYPELKXLLFVVFSAIYLVXMVGNLGLVALIYVERRLLXPMYIFLGNLALMDSCCSCAVXPKMLENFFSEDRIISLYECMAQFYFLCLAEXXDCFLLAXMAYDRYVAICHPLQYHXMMSKXLCIRMXXGAFKAGNLHSMIHVGLLLRLXFCRSNKIHHFFCDILPLYRLSCXDPSINELMIYIFSIPIQIFXIAXVLISYLCILLXVFKMKSKEGRGKAFSXCASHFLSVSIFYICLLMYIGPSEEGDKDXPVAIFYAIVIPLLNPFIYSLRNKEVINVLKKIMRNYNILKQXCSIANLFLIY

SEQ ID NO: 19011 - protein, 311 aa, Homo sapiens
  MOD_RES (7)..(8): Selenocysteine
  MOD_RES (38)..(38): Selenocysteine
  MOD_RES (57)..(57): Selenocysteine
  MOD_RES (106)..(106): Selenocysteine
  MOD_RES (110)..(110): Selenocysteine
  MOD_RES (133)..(133): Selenocysteine
  MOD_RES (135)..(135): Selenocysteine
  MOD_RES (153)..(153): Selenocysteine
  MOD_RES (193)..(193): Selenocysteine
  MOD_RES (197)..(197): Selenocysteine
  MOD_RES (204)..(204): Selenocysteine
  MOD_RES (210)..(210): Selenocysteine
  MOD_RES (216)..(216): Selenocysteine
  MOD_RES (223)..(224): Selenocysteine
  MOD_RES (240)..(240): Selenocysteine
  MOD_RES (246)..(246): Selenocysteine
  MOD_RES (249)..(249): Selenocysteine
  MOD_RES (254)..(254): Selenocysteine
  MOD_RES (275)..(275): Selenocysteine
  MOD_RES (279)..(279): Selenocysteine
MGKENCXXVAEFILLGLSDVPELRVCLFLLFLLIYGVXLLANLGMIALIQVSSRLHXPMYFFLSHLSSVDFCYSSIIVPKMLANIFNKDKAISFLGCMVQFYLFCXCVVXEVFLLAVMAYDRFVAICNPLLYXVXMSWKVRVELASCCYFCGXVCSLIHLCLALRIPFYRSNVINHFFCDLPPVLSLACSDIXVNEXLLFLVAXLNESVXIMIILXSYLLILXXILKMGSAEGRHKAFSXCASHLXAIXVFHGXVLSIYCRPSSGNSGDADKVAXVFYXVVIPMLNSVIYSLRNKDVKEALRKVMGSKIHS

SEQ ID NO: 19012 - protein, 311 aa, Homo sapiens
  MOD_RES (7)..(8): Selenocysteine
  MOD_RES (38)..(38): Selenocysteine
  MOD_RES (46)..(46): Selenocysteine
  MOD_RES (57)..(57): Selenocysteine
  MOD_RES (106)..(106): Selenocysteine
  MOD_RES (110)..(110): Selenocysteine
  MOD_RES (135)..(135): Selenocysteine
  MOD_RES (145)..(145): Selenocysteine
  MOD_RES (153)..(153): Selenocysteine
  MOD_RES (193)..(193): Selenocysteine
  MOD_RES (197)..(197): Selenocysteine
  MOD_RES (204)..(204): Selenocysteine
  MOD_RES (210)..(210): Selenocysteine
  MOD_RES (216)..(216): Selenocysteine
  MOD_RES (223)..(224): Selenocysteine
  MOD_RES (240)..(240): Selenocysteine
  MOD_RES (246)..(246): Selenocysteine
  MOD_RES (249)..(249): Selenocysteine
  MOD_RES (254)..(254): Selenocysteine
  MOD_RES (275)..(275): Selenocysteine
  MOD_RES (279)..(279): Selenocysteine
MGKENCXXVAEFILLGLSDVPELRVCLFLLFLLIYGVXLLANLGMXALIQVSSRLHXPVYFFLSHLSFVDFCYSSIIVPKMLANIFNKDKAISFLGCMVQFYLFCXCGVXEVFLLAVMAYDRFVAICNPLLYMVXMSQKLRVELXSCCYFCGXVCSLIHSSLALRILFYRSNVINHFFCDLPPLLSLACSDVXVNEXLLFLVAXLNESVXIMIILXSYLLILXXILKIHSAESRHKAFSXCASHLXAIXVSHGXILYIYCRPSSGNSGDVDKVAXVFYXVVIPMLNPLIYSLRNKDVNKALRKVMGSKIHS

SEQ ID NO: 19013 - protein, 315 aa, Homo sapiens
  MOD_RES (7)..(7): Selenocysteine
  MOD_RES (10)..(10): Selenocysteine
  MOD_RES (18)..(18): Selenocysteine
  MOD_RES (38)..(38): Selenocysteine
  MOD_RES (51)..(51): Selenocysteine
  MOD_RES (57)..(57): Selenocysteine
  MOD_RES (78)..(78): Selenocysteine
  MOD_RES (91)..(91): Selenocysteine
  MOD_RES (99)..(99): Selenocysteine
  MOD_RES (110)..(110): Selenocysteine
  MOD_RES (146)..(146): Selenocysteine
  MOD_RES (163)..(163): Selenocysteine
  MOD_RES (192)..(192): Selenocysteine
  MOD_RES (240)..(240): Selenocysteine
  MOD_RES (246)..(246): Selenocysteine
  MOD_RES (249)..(249): Selenocysteine
  MOD_RES (254)..(254): Selenocysteine
  MOD_RES (274)..(274): Selenocysteine
  MOD_RES (279)..(279): Selenocysteine
  MOD_RES (295)..(295): Selenocysteine
MFSPNHXIVXEFILLGLXDDPVLEKILFGVFLAIYLIXLAGNLCMILLIRXNSHLQXPMYFFLGHLSFVDICYSSNVXPNMLHNFLSEQKXISYAGCFXQCLLFIALVIXEFYILASMALDRYVAICSPLHYSSRMSKNICVCLVXIPYMYGFLSGFSQSLLXFHLSFCGSLEINHFYCADPPLIMLACSDXRVKKMAMFVVAGFNLSSSLFIILLSYLFIFAAIFRIRSAEGRHKAFSXCASHLXIVXLFYGXLFCMYVRPPSEKSVEESKIXAVFYXFLSPMLNPLIYSLRNXDVILAMQQMIRGKSFHKIAV

SEQ ID NO: 19014 - protein, 315 aa, Homo sapiens
  MOD_RES (7)..(7): Selenocysteine
  MOD_RES (10)..(10): Selenocysteine
  MOD_RES (18)..(18): Selenocysteine
  MOD_RES (38)..(38): Selenocysteine
  MOD_RES (51)..(51): Selenocysteine
  MOD_RES (57)..(57): Selenocysteine
  MOD_RES (78)..(78): Selenocysteine
  MOD_RES (91)..(91): Selenocysteine
  MOD_RES (99)..(99): Selenocysteine
  MOD_RES (110)..(110): Selenocysteine
  MOD_RES (146)..(146): Selenocysteine
  MOD_RES (160)..(160): Selenocysteine
  MOD_RES (163)..(163): Selenocysteine
  MOD_RES (192)..(192): Selenocysteine
  MOD_RES (206)..(206): Selenocysteine
  MOD_RES (240)..(240): Selenocysteine
  MOD_RES (246)..(246): Selenocysteine
  MOD_RES (249)..(249): Selenocysteine
  MOD_RES (254)..(254): Selenocysteine
  MOD_RES (279)..(279): Selenocysteine
MLSPNHXIVXEFILLGLXDDPVLEKILFGVFLAIYLIXLAGNLCMILLIRXNSQLQXPMYFFLGHLSFVDICYSSNVXPNMLHNFLSEQKXISYAGCFXQCLLFIALVIXEFYFLASMALDRYVAICSPLHYSSRMSKNICISLVXVPYMYGFLNGLSQXLLXFHLSFCGSLEINHFYCADPPLIMLACSDXRVKKMAMFVVAGFXLSSSLFIILLSYLFIFAAIFRIRSAEGRHKAFSXCASHLXIVXLFYGXLFCMYVRPPSEKSVEESKIIAVFYXFLSPMLNPLIYSLRNRDVILAIQQMIRGKSFCKIAV

SEQ ID NO: 19015 - protein, 305 aa, Homo sapiens
  MOD_RES (4)..(4): Selenocysteine
  MOD_RES (10)..(10): Selenocysteine
  MOD_RES (18)..(18): Selenocysteine
  MOD_RES (38)..(38): Selenocysteine
  MOD_RES (57)..(57): Selenocysteine
  MOD_RES (64)..(64): Selenocysteine
  MOD_RES (74)..(74): Selenocysteine
  MOD_RES (78)..(78): Selenocysteine
  MOD_RES (83)..(83): Selenocysteine
  MOD_RES (90)..(90): Selenocysteine
  MOD_RES (98)..(98): Selenocysteine
  MOD_RES (109)..(109): Selenocysteine
  MOD_RES (135)..(135): Selenocysteine
  MOD_RES (145)..(145): Selenocysteine
  MOD_RES (162)..(162): Selenocysteine
  MOD_RES (166)..(166): Selenocysteine
  MOD_RES (191)..(191): Selenocysteine
  MOD_RES (211)..(211): Selenocysteine
  MOD_RES (239)..(239): Selenocysteine
  MOD_RES (248)..(248): Selenocysteine
  MOD_RES (253)..(253): Selenocysteine
  MOD_RES (263)..(263): Selenocysteine
  MOD_RES (266)..(266): Selenocysteine
  MOD_RES (278)..(278): Selenocysteine
MSNXNGSAIXEFILLGLXDCPELQSLLFVLFLVVYLVXLLGNLGMIMLMRLDSRLHXPMYFFLXNLAFVDLCYXSNAXPQMSXNIVSEKXISFAGCFXQCYIFIALLLXEFYMLAAMAYDRYVAIYDPLRYSVKXSRRVCICLAXFPYVYGFSDGLFQAILXFRLXFCRSSVINHFYCADPPLIKLSCSDXYVKEHAMFISAGFNLSSSLXIVLVSYAFILAAILRIKSAEGRHKAFSXCGSHMMAVXLFYGXLFCMYIRPPXDKXVEESKIIAVFYXFVSPVLNPLIYSLRNKDVKQALKNVLR

SEQ ID NO: 19016 - protein, 307 aa, Homo sapiens
  MOD_RES (5)..(5): Selenocysteine
  MOD_RES (8)..(8): Selenocysteine
  MOD_RES (16)..(16): Selenocysteine
  MOD_RES (36)..(36): Selenocysteine
  MOD_RES (76)..(76): Selenocysteine
  MOD_RES (89)..(89): Selenocysteine
  MOD_RES (91)..(91): Selenocysteine
  MOD_RES (144)..(144): Selenocysteine
  MOD_RES (153)..(153): Selenocysteine
  MOD_RES (158)..(158): Selenocysteine
  MOD_RES (161)..(161): Selenocysteine
  MOD_RES (190)..(190): Selenocysteine
  MOD_RES (196)..(196): Selenocysteine
  MOD_RES (206)..(206): Selenocysteine
  MOD_RES (210)..(210): Selenocysteine
  MOD_RES (238)..(238): Selenocysteine
  MOD_RES (244)..(244): Selenocysteine
  MOD_RES (252)..(252): Selenocysteine
  MOD_RES (262)..(262): Selenocysteine
  MOD_RES (277)..(278): Selenocysteine
MLNFXDVXEFILLGLXSRREWQVLFFIIFLVVYIIXMVGNIGMMVLIKVSPQLNNPMYFFLSHLSFVDVWFSSNVXPKMLENLLSDKKXIXYAGCLVQCFFFIALVHVEIFILAAMAFDRYMAIGNPLLYGSKMSRVVCIRLIXFPYIYGFLXSLAAXLWXYGLYFCGKIEINHFYCADPPLIKMACAGXFVKEYXMIILAGINFXYSLXVIIISYLFILIAILRMRSAEGRQKAFSXCGSHLXAVIIFYGXLIFMYLRRPXEESVEQGKMVAVFYXXVIPMLNPMIYSLRNKDVKKAMMKVISRSC

SEQ ID NO: 19017 - protein, 311 aa, Homo sapiens
  MOD_RES (6)..(6): Selenocysteine
  MOD_RES (9)..(9): Selenocysteine
  MOD_RES (17)..(17): Selenocysteine
  MOD_RES (28)..(28): Selenocysteine
  MOD_RES (37)..(37): Selenocysteine
  MOD_RES (77)..(77): Selenocysteine
  MOD_RES (145)..(145): Selenocysteine
  MOD_RES (154)..(154): Selenocysteine
  MOD_RES (159)..(159): Selenocysteine
  MOD_RES (162)..(162): Selenocysteine
  MOD_RES (191)..(191): Selenocysteine
  MOD_RES (230)..(230): Selenocysteine
  MOD_RES (239)..(239): Selenocysteine
  MOD_RES (245)..(245): Selenocysteine
  MOD_RES (248)..(248): Selenocysteine
  MOD_RES (253)..(253): Selenocysteine
  MOD_RES (278)..(279): Selenocysteine
MRRNCXLVXEFILLGLXSRRELQILLFXLFLAIYMVXVAGNLGMIVLIQANAWLHMPMYFFLSHLSFVDLCFSSNVXPKMLEIFLSEKKSISYPACLVQCYLFIALVHVEIYILAVMAFDRYMAICNPLLYGSRMSKSVCSFLIXVPYVYGALXGLMEXMWXYNLAFCGPNEINHFYCADPPLIKLACSDXYNKELSMFIVAGWNLSFSLFIICISYLYIFPAILKIRSXEGRQKAFSXCGSHLXAVXIFYAXLFFMYLRPPSKESVEQGKMVAVFYXXVIPMLNLIIYSLRNKNVKEALIKELSMKIYFS

SEQ ID NO: 19018 - protein, 310 aa, Homo sapiens
  MOD_RES (5)..(5): Selenocysteine
  MOD_RES (8)..(8): Selenocysteine
  MOD_RES (11)..(11): Selenocysteine
  MOD_RES (16)..(16): Selenocysteine
  MOD_RES (36)..(36): Selenocysteine
  MOD_RES (76)..(76): Selenocysteine
  MOD_RES (87)..(87): Selenocysteine
  MOD_RES (89)..(89): Selenocysteine
  MOD_RES (137)..(137): Selenocysteine
  MOD_RES (158)..(158): Selenocysteine
  MOD_RES (161)..(161): Selenocysteine
  MOD_RES (196)..(196): Selenocysteine
  MOD_RES (206)..(206): Selenocysteine
  MOD_RES (217)..(217): Selenocysteine
  MOD_RES (238)..(238): Selenocysteine
  MOD_RES (244)..(244): Selenocysteine
  MOD_RES (252)..(252): Selenocysteine
  MOD_RES (262)..(262): Selenocysteine
  MOD_RES (277)..(278): Selenocysteine
  MOD_RES (304)..(304): Selenocysteine
  MOD_RES (306)..(306): Selenocysteine
MPNFXDVXEFXLLGLXCRQELQVLFFVVFLAVYMIXLLGNIGMIILISISPQLQSPMYFFLSHLSFADVCFSSNVXPKMLENLLSEXKXISYVGCLVQCYFFIAVVHVEVYILAVMAFDRYMAGCNPLLYGSKMSRXVCVRLISVPYVYGFSVSLICXLWXYGLYFCGNFEINHFYCADPPLIQIACGRVHIKEIXMIVIAGINFXYSLSVVLISYXLIVVAVLRMRSADGRRKAFSXCGSHLXAVSMFYGXPIFMYLRRPXEESVEQGKMVAVFYXXVIPMLNPMIYSLRNKDVKEAVNKAIXKXYVRQ

SEQ ID NO: 19019 - protein, 322 aa, Homo sapiens
  MOD_RES (10)..(10): Selenocysteine
  MOD_RES (13)..(13): Selenocysteine
  MOD_RES (21)..(21): Selenocysteine
  MOD_RES (74)..(74): Selenocysteine
  MOD_RES (87)..(87): Selenocysteine
  MOD_RES (105)..(105): Selenocysteine
  MOD_RES (130)..(130): Selenocysteine
  MOD_RES (134)..(134): Selenocysteine
  MOD_RES (156)..(157): Selenocysteine
  MOD_RES (192)..(192): Selenocysteine
  MOD_RES (206)..(206): Selenocysteine
  MOD_RES (220)..(220): Selenocysteine
  MOD_RES (227)..(227): Selenocysteine
  MOD_RES (236)..(236): Selenocysteine
  MOD_RES (238)..(238): Selenocysteine
  MOD_RES (242)..(242): Selenocysteine
  MOD_RES (245)..(245): Selenocysteine
  MOD_RES (250)..(250): Selenocysteine
  MOD_RES (252)..(252): Selenocysteine
  MOD_RES (264)..(264): Selenocysteine
  MOD_RES (275)..(275): Selenocysteine
  MOD_RES (316)..(316): Selenocysteine
  MOD_RES (322)..(322): Selenocysteine
MNSLKDGNHXALXGFILLGLXDDPILRVILFMIILSGNLSIIILIRISSQLHHPMYFFLSHLAFADMAYSSSVXPNMLVNFLVERNXVSYLGCAIQLGSAAFFAXVECVLLAAMAYDRFVAICSPLLYSXKMSXQVSVQLLLVVYIAGFLIAVSYXXSFYFLLFCGPNQVNHFFCDFAPLLELSCSDISVSXVVLSFSSGSIIVVXVCVIAVCYIYILIXILKMRSXEGHHKAFSXCXSHLXVVXLFYGXIXFIYVMPNFSYSXDQNKVVSVLYXVVIPMLNPLIYSLRNKEIKGALKRELVRKILSHDACYFSRXSNNDIX

SEQ ID NO: 19020 - protein, 311 aa, Homo sapiens
  MOD_RES (3)..(3): Selenocysteine
  MOD_RES (7)..(8): Selenocysteine
  MOD_RES (13)..(13): Selenocysteine
  MOD_RES (21)..(22): Selenocysteine
  MOD_RES (38)..(38): Selenocysteine
  MOD_RES (57)..(57): Selenocysteine
  MOD_RES (78)..(78): Selenocysteine
  MOD_RES (90)..(90): Selenocysteine
  MOD_RES (106)..(106): Selenocysteine
  MOD_RES (109)..(109): Selenocysteine
  MOD_RES (134)..(134): Selenocysteine
  MOD_RES (158)..(158): Selenocysteine
  MOD_RES (194)..(194): Selenocysteine
  MOD_RES (210)..(210): Selenocysteine
  MOD_RES (224)..(224): Selenocysteine
  MOD_RES (231)..(231): Selenocysteine
  MOD_RES (240)..(240): Selenocysteine
  MOD_RES (242)..(242): Selenocysteine
  MOD_RES (246)..(246): Selenocysteine
  MOD_RES (249)..(249): Selenocysteine
  MOD_RES (254)..(254): Selenocysteine
  MOD_RES (256)..(256): Selenocysteine
  MOD_RES (268)..(268): Selenocysteine
  MOD_RES (279)..(279): Selenocysteine
MGXGNDXXVVEFXLLGLSEDXXVCAILFLVFLGIYVVXLMGNISIIVLIRRSHHLHXPMYIFLCHLAFVDIGYSSSVXPVMLMSFLRKEXSLPVAGCVAQLCSVVXFGXAECFLLAAMAYDRYVAICSPLLYSXCMSPGVCIILVGMSYLGGCVNAWXFIGCLLRLSFCGPNKVNHFFCDYSPLLKLACSHDFXFEIIPAISSGSIIVAXVCVIAISYIYILIXILKMHSXKGRHKAFSXCXSHLXAVXLFYGXIXFIYVMPKSSYSXDQNKVVSVFYXVVIPMLNPLIYSLRNKEIKGALKRELRIKIFS

SEQ ID NO: 19021 - protein, 324 aa, Homo sapiens
  MOD_RES (10)..(10): Selenocysteine
  MOD_RES (18)..(18): Selenocysteine
  MOD_RES (38)..(38): Selenocysteine
  MOD_RES (47)..(47): Selenocysteine
  MOD_RES (53)..(53): Selenocysteine
  MOD_RES (57)..(57): Selenocysteine
  MOD_RES (78)..(78): Selenocysteine
  MOD_RES (91)..(91): Selenocysteine
  MOD_RES (99)..(99): Selenocysteine
  MOD_RES (106)..(106): Selenocysteine
  MOD_RES (110)..(110): Selenocysteine
  MOD_RES (134)..(134): Selenocysteine
  MOD_RES (160)..(160): Selenocysteine
  MOD_RES (163)..(163): Selenocysteine
  MOD_RES (167)..(167): Selenocysteine
  MOD_RES (192)..(192): Selenocysteine
  MOD_RES (216)..(216): Selenocysteine
  MOD_RES (231)..(231): Selenocysteine
  MOD_RES (240)..(240): Selenocysteine
  MOD_RES (247)..(247): Selenocysteine
  MOD_RES (249)..(249): Selenocysteine
  MOD_RES (254)..(254): Selenocysteine
  MOD_RES (270)..(270): Selenocysteine
  MOD_RES (279)..(279): Selenocysteine
  MOD_RES (316)..(316): Selenocysteine
MAEVNIIYVXVFILKGIXNRPELQAPCFGVFLVIYLVXVLGNLGLIXLIKIDXRLHXPMYYFLSHLAFVDLCYSSAIXPKMMVNFVVERNXIPFHACAXQLGCFLXFMIXECFLLASMAYDCYVAICSPLHYSXLMSRRVCIQLVAVPYIYSFLVALFHXVIXFRLXYCGPNLINHFYCDDLPFLALSCSDXHMKEILIFAFAGFDMISSSSIVLXSYIFIIAAILRIRSXQGQHKAISXCGSHMVXVXIFYGXLIFMYLQPKSNHSLDXDKMASVFYXVVIPMLNPLIYSLRNKEVKDASKKALDKGCENLQILXFLKIRKLY

SEQ ID NO: 19022 - protein, 326 aa, Homo sapiens
  MOD_RES (19)..(19): Selenocysteine
  MOD_RES (22)..(22): Selenocysteine
  MOD_RES (30)..(30): Selenocysteine
  MOD_RES (50)..(50): Selenocysteine
  MOD_RES (87)..(87): Selenocysteine
  MOD_RES (90)..(90): Selenocysteine
  MOD_RES (111)..(111): Selenocysteine
  MOD_RES (118)..(118): Selenocysteine
  MOD_RES (121)..(122): Selenocysteine
  MOD_RES (158)..(158): Selenocysteine
  MOD_RES (169)..(169): Selenocysteine
  MOD_RES (172)..(172): Selenocysteine
  MOD_RES (175)..(175): Selenocysteine
  MOD_RES (204)..(204): Selenocysteine
  MOD_RES (222)..(222): Selenocysteine
  MOD_RES (252)..(252): Selenocysteine
  MOD_RES (258)..(258): Selenocysteine
  MOD_RES (261)..(261): Selenocysteine
  MOD_RES (266)..(266): Selenocysteine
  MOD_RES (279)..(279): Selenocysteine
  MOD_RES (291)..(291): Selenocysteine
MSGLPSDMDLYKLQLNNFXEVXMFILISFXEEFDVQVFLFLLFLAIYLFXLIGNLGLVVPIIGDFWLHSPMYYFLGVLSFLDVCYSXVVXPKMLVNFLAKNKSISFLGCAXQMFLACXFGXXECFLLAAMAYDRYVAIYNPLLYSVSMSPRVYVPLIXASYVASILHAXIHXVAXFSLSFCGSNEIRHVFCNMPPLLAISCSDXHVIQLLFFYFVGSIEIVXILIVLISYGFILLAILKMQSAEGRRKVFSXCGAHLXGVXIYHGXILFMYVRPSSSYXSDNDMIVSIFYXIVIPMLNPIIYSLRNKDVKEAIKRLLVRNWFINKL

SEQ ID NO: 19023 - protein, 359 aa, Homo sapiens
  MOD_RES (9)..(9): Selenocysteine
  MOD_RES (46)..(46): Selenocysteine
  MOD_RES (49)..(49): Selenocysteine
  MOD_RES (57)..(57): Selenocysteine
  MOD_RES (64)..(64): Selenocysteine
  MOD_RES (77)..(77): Selenocysteine
  MOD_RES (117)..(117): Selenocysteine
  MOD_RES (125)..(126): Selenocysteine
  MOD_RES (148)..(149): Selenocysteine
  MOD_RES (196)..(196): Selenocysteine
  MOD_RES (199)..(199): Selenocysteine
  MOD_RES (202)..(202): Selenocysteine
  MOD_RES (231)..(231): Selenocysteine
  MOD_RES (233)..(233): Selenocysteine
  MOD_RES (249)..(249): Selenocysteine
  MOD_RES (279)..(279): Selenocysteine
  MOD_RES (285)..(285): Selenocysteine
  MOD_RES (293)..(293): Selenocysteine
  MOD_RES (318)..(318): Selenocysteine
  MOD_RES (357)..(357): Selenocysteine
MSYSIYKSXVNIPLSHGVVHSFCHNMNCNFMHIFKFVLDFNMKNVXEVXLFVLKGFXDNLELQXIFFFLFLAIYLFXLMGNLGLILVVIRDSQLHKPMYYFLSMLSSVDACYSSVIXPNMLVDFXXKNKVISFLGCVAQVFLACSFGXXECFLLAAMAYDRYVAIYNPLLYSVSMSPRVYMPLINASYVAGILHAXIHXVAXFSLSFCGANEIRRVFCDIPPLLAISYSDXHXNQLLLFYFVGSIELVXILIVLISYGLILLAILKMYSAEGRRKVFSXCGAHLXGVSIYYGXILFMYVRPSSSYASDHDMIVSIFYXIVIPLLNPVIYSLRNKDVKDSMKKMFGKNQVINKVYFHXKK

SEQ ID NO: 19024 - protein, 340 aa, Homo sapiens
  MOD_RES (4)..(4): Selenocysteine
  MOD_RES (6)..(6): Selenocysteine
  MOD_RES (17)..(17): Selenocysteine
  MOD_RES (37)..(37): Selenocysteine
  MOD_RES (40)..(40): Selenocysteine
  MOD_RES (45)..(45): Selenocysteine
  MOD_RES (48)..(48): Selenocysteine
  MOD_RES (68)..(68): Selenocysteine
  MOD_RES (105)..(105): Selenocysteine
  MOD_RES (108)..(108): Selenocysteine
  MOD_RES (129)..(129): Selenocysteine
  MOD_RES (136)..(136): Selenocysteine
  MOD_RES (139)..(140): Selenocysteine
  MOD_RES (176)..(176): Selenocysteine
  MOD_RES (187)..(187): Selenocysteine
  MOD_RES (193)..(193): Selenocysteine
  MOD_RES (222)..(222): Selenocysteine
  MOD_RES (224)..(224): Selenocysteine
  MOD_RES (240)..(240): Selenocysteine
  MOD_RES (270)..(270): Selenocysteine
  MOD_RES (276)..(276): Selenocysteine
  MOD_RES (279)..(279): Selenocysteine
  MOD_RES (284)..(284): Selenocysteine
  MOD_RES (309)..(309): Selenocysteine
MDSXFXGYNLYNLQVKXEMDKLSSGLDIYRNPLKNKXEVXMFILXGFXDDFELQVFLFLLFFAIYLFXLIGNLGLVVLVIEDSWLHNPMYYFLSVLSFLDACYSXVVXPKMLVNFLAKNKSISFIGCAXQMLLFVXFGXXECFLLAAMAYDHYVAIYNPLLYSVSMSPRVYVPLIXASYVAGILHAXIHIVAXFSLSFCGSNEIRHVFCDMPPLLAISCSDXHXNQLLLFYFVGSIEIVXILIVLISCDFILLSILKMHSAKGRQKAFSXCGSHLXGVXIYHGXILVSYMRPSSSYASDHDIIVSIFYXIVIPKLNPIIYSLRNKEVKKAVKKMLKLVYK

SEQ ID NO: 19025 - protein, 321 aa, Homo sapiens
  MOD_RES (7)..(7): Selenocysteine
  MOD_RES (10)..(10): Selenocysteine
  MOD_RES (29)..(29): Selenocysteine
  MOD_RES (34)..(34): Selenocysteine
  MOD_RES (38)..(38): Selenocysteine
  MOD_RES (48)..(49): Selenocysteine
  MOD_RES (51)..(51): Selenocysteine
  MOD_RES (57)..(57): Selenocysteine
  MOD_RES (74)..(75): Selenocysteine
  MOD_RES (160)..(160): Selenocysteine
  MOD_RES (163)..(163): Selenocysteine
  MOD_RES (192)..(192): Selenocysteine
  MOD_RES (202)..(202): Selenocysteine
  MOD_RES (209)..(209): Selenocysteine
  MOD_RES (224)..(224): Selenocysteine
  MOD_RES (240)..(240): Selenocysteine
  MOD_RES (258)..(258): Selenocysteine
  MOD_RES (265)..(265): Selenocysteine
  MOD_RES (282)..(282): Selenocysteine
  MOD_RES (291)..(291): Selenocysteine
  MOD_RES (303)..(303): Selenocysteine
  MOD_RES (320)..(320): Selenocysteine
MERKNQXAIXEFIILGFSNLNELQFLLFXIFFLXYFCXLGGNILIILXXVXDPHLHXPMYYFLGNLAFIDICYXXSNVPQMMVHLLSKKKSISYVGCVVQLFAFVFFVGSECLLLAAMAYDRYIAICNPLRYSVILSKVLCNQLAASCWAAGFLNSVVHXVLXFCLPFCGNNQINYFFCDIPPLLILSCGNXSVNELALLSXGVFIGWXPFLCIVLSYICIISXILRIQSSEGRRKAFSXCASHLAIVFLFYGSAIFXYVRPISXYSLKKDRLVSVLYSVVXPMLNPIIYXLRNKDIKEAVKXIGSKWQPPISSLDSKLXY

SEQ ID NO: 19026 - protein, 321 aa, Homo sapiens
  MOD_RES (7)..(7): Selenocysteine
  MOD_RES (10)..(10): Selenocysteine
  MOD_RES (29)..(29): Selenocysteine
  MOD_RES (34)..(34): Selenocysteine
  MOD_RES (38)..(38): Selenocysteine
  MOD_RES (48)..(49): Selenocysteine
  MOD_RES (51)..(51): Selenocysteine
  MOD_RES (57)..(57): Selenocysteine
  MOD_RES (74)..(75): Selenocysteine
  MOD_RES (160)..(160): Selenocysteine
  MOD_RES (163)..(163): Selenocysteine
  MOD_RES (192)..(192): Selenocysteine
  MOD_RES (202)..(202): Selenocysteine
  MOD_RES (209)..(209): Selenocysteine
  MOD_RES (224)..(224): Selenocysteine
  MOD_RES (240)..(240): Selenocysteine
  MOD_RES (258)..(258): Selenocysteine
  MOD_RES (265)..(265): Selenocysteine
  MOD_RES (282)..(282): Selenocysteine
  MOD_RES (291)..(291): Selenocysteine
  MOD_RES (303)..(303): Selenocysteine
  MOD_RES (320)..(320): Selenocysteine
MERKNQXAIXEFIILGFSNLNELQFLLFXIFFLXYFCXLGGNILMILXXVXDPHLHXPMYYFLGNLAFIDICYXXSNVPQMMVHLLSKKKSISYVGCVVQLFAFVFFVGSECLLLAAMAYDRYIAICNPLRYSVILSKVLCNQLAASCWAAGFLNSVVHXVLXFCLPFCGNNQINYFFCDIPPLLILSCGNXSVNELALLSXGVFIGWXPFLCIVLSYICIISXILRIQSSEGRRKAFSXCASHLAIVFLFYGSAIFXYVRPISXYSLKKDRLVSVLYSVVXPMLNPIIYXLRNKDIKEAVKXIGSKWQPPISSLDSKLXY

SEQ ID NO: 19027 - protein, 321 aa, Homo sapiens
  MOD_RES (7)..(7): Selenocysteine
  MOD_RES (10)..(10): Selenocysteine
  MOD_RES (29)..(29): Selenocysteine
  MOD_RES (34)..(34): Selenocysteine
  MOD_RES (38)..(38): Selenocysteine
  MOD_RES (48)..(49): Selenocysteine
  MOD_RES (51)..(51): Selenocysteine
  MOD_RES (57)..(57): Selenocysteine
  MOD_RES (74)..(75): Selenocysteine
  MOD_RES (160)..(160): Selenocysteine
  MOD_RES (163)..(163): Selenocysteine
  MOD_RES (192)..(192): Selenocysteine
  MOD_RES (202)..(202): Selenocysteine
  MOD_RES (209)..(209): Selenocysteine
  MOD_RES (224)..(224): Selenocysteine
  MOD_RES (240)..(240): Selenocysteine
  MOD_RES (258)..(258): Selenocysteine
  MOD_RES (265)..(265): Selenocysteine
  MOD_RES (282)..(282): Selenocysteine
  MOD_RES (291)..(291): Selenocysteine
  MOD_RES (303)..(303): Selenocysteine
  MOD_RES (320)..(320): Selenocysteine
MERKNQXAIXEFIILGFSNLNEWQFLLFXIFFLXYFCXLGGNILIILXXVXDPHLHXPMYYFLGNLAFIDICYXXSNVPQMMVHLLSKKKSISYVGCVVQLFAFVFFVGSECLLLAAMAYDRYIAICNPLRYSVILSKVLCNQLAASCWAAGFLNSVVHXVLXFCLPFCGNNQINYFFCDIPPLLILSCGNXSVNELALLSXGVFIGWXPFLCIVLSYICIISXILRIQSSEGRRKAFSXCASHLAIVFLFYGSAIFXYVRPISXYSLKKDRLVSVLYSVVXPMLNPIIYXLRNKDIKEAVKXIGSKWQPPISSLDSKLXY

SEQ ID NO: 19028 - protein, 310 aa, Homo sapiens
  MOD_RES (10)..(10): Selenocysteine
  MOD_RES (18)..(18): Selenocysteine
  MOD_RES (26)..(26): Selenocysteine
  MOD_RES (57)..(57): Selenocysteine
  MOD_RES (75)..(75): Selenocysteine
  MOD_RES (77)..(77): Selenocysteine
  MOD_RES (133)..(133): Selenocysteine
  MOD_RES (146)..(146): Selenocysteine
  MOD_RES (161)..(161): Selenocysteine
  MOD_RES (192)..(192): Selenocysteine
  MOD_RES (201)..(201): Selenocysteine
  MOD_RES (210)..(210): Selenocysteine
  MOD_RES (240)..(240): Selenocysteine
  MOD_RES (242)..(242): Selenocysteine
  MOD_RES (254)..(254): Selenocysteine
  MOD_RES (274)..(274): Selenocysteine
  MOD_RES (279)..(279): Selenocysteine
MDWENCSSLXDFFLLGIXNNPEMKVXLFAVFLAVYIINFSANLGMIVLIRMDYQLHXPMYFFLSHLSFCDLCYSXAXGPKMLVDLLAKNKSIPFYGCALQFLVFCIFADSECLLLSVMAFDRYKAIINPLLYXVNMSSRVCYLLLXGVYLVGIADALIHMXLAFRLCFCGSNEINHFFCDIPPLLLLSRSDXQVNELVLFXVFGFIELSXISGVFISYCYIILSVLEIHSAEGRFKALSXCXSHLSAVAIFQGXLLFMYFRPSSSYSLDQDKMXSLFYXLVVPMLNPLIYSLRNKDVKEALKKLKNKILF

SEQ ID NO: 19029 - protein, 327 aa, Homo sapiens
  MOD_RES (41)..(41): Selenocysteine
  MOD_RES (44)..(44): Selenocysteine
  MOD_RES (55)..(55): Selenocysteine
  MOD_RES (76)..(76): Selenocysteine
  MOD_RES (78)..(78): Selenocysteine
  MOD_RES (104)..(104): Selenocysteine
  MOD_RES (115)..(115): Selenocysteine
  MOD_RES (195)..(195): Selenocysteine
  MOD_RES (199)..(199): Selenocysteine
  MOD_RES (203)..(203): Selenocysteine
  MOD_RES (219)..(219): Selenocysteine
  MOD_RES (227)..(227): Selenocysteine
  MOD_RES (245)..(245): Selenocysteine
  MOD_RES (251)..(251): Selenocysteine
  MOD_RES (275)..(275): Selenocysteine
  MOD_RES (309)..(309): Selenocysteine
MEWRNHSGRVSEFVLLGFPAPAPLQVLLFALLLLAYVLVLXENXLIIMAIRNHSXLHKPMYFFLANMSFLEIWYVXVXIPKMLAGFVGSKQDHGQLISFEGCMXQLYFFLGLGCXECVLLAVMAYDRYMAICYPLHYPVIVSGRLCVQMAAGSWAGGFGISMVKVFLISGLSYCGPNIINHFFCDVSPLLNLSCXDMSXAELXDFILAIFILLGPLSVXGASYVAIXGAVMHIPSAAGRYKAFSXCASHLXVVIIFYAASIFIYARPKALSAFDXNKLVSVLYAVIVPLLNPIIYCLRNQEVKRALCCXLHLYQHQDPDPKKASRNV

SEQ ID NO: 19030 - protein, 311 aa, Homo sapiens
  MOD_RES (7)..(7): Selenocysteine
  MOD_RES (10)..(10): Selenocysteine
  MOD_RES (38)..(38): Selenocysteine
  MOD_RES (71)..(71): Selenocysteine
  MOD_RES (77)..(77): Selenocysteine
  MOD_RES (95)..(95): Selenocysteine
  MOD_RES (110)..(110): Selenocysteine
  MOD_RES (134)..(134): Selenocysteine
  MOD_RES (190)..(190): Selenocysteine
  MOD_RES (195)..(195): Selenocysteine
  MOD_RES (214)..(214): Selenocysteine
  MOD_RES (224)..(224): Selenocysteine
  MOD_RES (230)..(230): Selenocysteine
  MOD_RES (238)..(238): Selenocysteine
  MOD_RES (247)..(247): Selenocysteine
  MOD_RES (280)..(280): Selenocysteine
MELENQXRVXKFILVGFPGSLSMRAAMFLIFLVAYILXVAENVIIILLVLQNRPLHKPMYFFLANLSFLEXWYISVXVPKLLFSFWSVNNSISFXLCMIQLYFFIALMCXECVLLAAMAYDRYVAICRPLHYPXIMSHGLCFRLALGSWAIGFGISLAKIYFISCLSFCGPNVINHFFCDISPVLNLSCXDMSIXELVDFILALVIFLFPLFIXVLSYGCILAXILCMPXGKQKAFSXCASHLVVVXIFYSAIIFMYARPRVIHAFNMNKIISIFYAIVXPSLNPFIYCLRNREVKEALKKLAYCQASRSD

SEQ ID NO: 19031 - protein, 312 aa, Homo sapiens
  MOD_RES (7)..(7): Selenocysteine
  MOD_RES (11)..(11): Selenocysteine
  MOD_RES (19)..(19): Selenocysteine
  MOD_RES (34)..(34): Selenocysteine
  MOD_RES (53)..(53): Selenocysteine
  MOD_RES (78)..(78): Selenocysteine
  MOD_RES (99)..(99): Selenocysteine
  MOD_RES (110)..(110): Selenocysteine
  MOD_RES (137)..(137): Selenocysteine
  MOD_RES (154)..(154): Selenocysteine
  MOD_RES (167)..(167): Selenocysteine
  MOD_RES (190)..(190): Selenocysteine
  MOD_RES (194)..(194): Selenocysteine
  MOD_RES (214)..(214): Selenocysteine
  MOD_RES (222)..(222): Selenocysteine
  MOD_RES (232)..(232): Selenocysteine
  MOD_RES (240)..(240): Selenocysteine
  MOD_RES (246)..(246): Selenocysteine
  MOD_RES (249)..(249): Selenocysteine
  MOD_RES (253)..(253): Selenocysteine
  MOD_RES (279)..(279): Selenocysteine
  MOD_RES (282)..(282): Selenocysteine
  MOD_RES (310)..(310): Selenocysteine
MSGENVXKVSXFILVGLPXAPGLQYLLFLLFLLXYLFVLVENLAIILIVWSSXSLHRPMYYFLSSMSFLEIWYVSDIXPKMLEGFLLQQKRISFVGCMXQLYFFSSLVCXECVLLASMAYDRYVAICHPLRYHVLVXPGLCLQLVGFSFVSGFXISMIKVCFISSVXFCGSNVLNHFFCDISPILKLACXDFSXAELVDFILAFIILVFPLLAXILSYWHIXLAVLRIPSAXGCWRAFSXCASHLXVVXVFYXALLFMYVRPQAIDSQSSNKLISAVYXVVXPIINPLIYCLRNKEFKDALKKALGLGQXSH

SEQ ID NO: 19032 - protein, 331 aa, Homo sapiens
  MOD_RES (7)..(7): Selenocysteine
  MOD_RES (11)..(11): Selenocysteine
  MOD_RES (19)..(19): Selenocysteine
  MOD_RES (34)..(34): Selenocysteine
  MOD_RES (48)..(48): Selenocysteine
  MOD_RES (53)..(53): Selenocysteine
  MOD_RES (78)..(78): Selenocysteine
  MOD_RES (99)..(99): Selenocysteine
  MOD_RES (110)..(110): Selenocysteine
  MOD_RES (137)..(137): Selenocysteine
  MOD_RES (154)..(154): Selenocysteine
  MOD_RES (167)..(167): Selenocysteine
  MOD_RES (190)..(190): Selenocysteine
  MOD_RES (194)..(194): Selenocysteine
  MOD_RES (214)..(214): Selenocysteine
  MOD_RES (222)..(222): Selenocysteine
  MOD_RES (232)..(232): Selenocysteine
  MOD_RES (240)..(240): Selenocysteine
  MOD_RES (246)..(246): Selenocysteine
  MOD_RES (249)..(249): Selenocysteine
  MOD_RES (253)..(253): Selenocysteine
  MOD_RES (279)..(279): Selenocysteine
  MOD_RES (282)..(282): Selenocysteine
  MOD_RES (308)..(308): Selenocysteine
MSGENVXRVGXFILVGFPXAPGLQYLLFLLFLLXYLFVLVENLAIILXVWSSXSLHRPMYYFLSSMSFLEIWYVSDIXPKMLEGFLLQQKRISFVGCMXQLYFFSSLVCXECVLLASMAYDRYVAICHPLRYHVLVXPGLCLQLVGFSFVSGFXISMIKVCFISSVXFCGSNVLNHFFCDISPILKLACXDFSXAELVDFILAFIILVFPLLAXMLSYAHIXLAVLRIPSAXGCWRAFFXCASHLXVVXVFYXALLFMYVRPQAIDSRSSNKLISVLYXVIXPILNPLIYCLRNKEFKNALKKAFGLXSCAVEGRLSSLLELHLQIHSQPL

SEQ ID NO: 19033 - protein, 312 aa, Homo sapiens
  MOD_RES (5)..(5): Selenocysteine
  MOD_RES (8)..(8): Selenocysteine
  MOD_RES (16)..(16): Selenocysteine
  MOD_RES (32)..(32): Selenocysteine
  MOD_RES (38)..(38): Selenocysteine
  MOD_RES (42)..(42): Selenocysteine
  MOD_RES (45)..(45): Selenocysteine
  MOD_RES (47)..(47): Selenocysteine
  MOD_RES (55)..(55): Selenocysteine
  MOD_RES (72)..(73): Selenocysteine
  MOD_RES (89)..(89): Selenocysteine
  MOD_RES (108)..(108): Selenocysteine
  MOD_RES (140)..(140): Selenocysteine
  MOD_RES (145)..(145): Selenocysteine
  MOD_RES (176)..(176): Selenocysteine
  MOD_RES (190)..(190): Selenocysteine
  MOD_RES (204)..(204): Selenocysteine
  MOD_RES (208)..(208): Selenocysteine
  MOD_RES (222)..(222): Selenocysteine
  MOD_RES (229)..(229): Selenocysteine
  MOD_RES (233)..(233): Selenocysteine
  MOD_RES (238)..(238): Selenocysteine
  MOD_RES (277)..(277): Selenocysteine
  MOD_RES (306)..(306): Selenocysteine
  MOD_RES (310)..(310): Selenocysteine
  MOD_RES (312)..(312): Selenocysteine
MRNHXEIXEFILLGLXDDPNFQVVIFVFLLIXYMLSIXGNLXLIXIXLLDSHLQXPMYFFLRNFSILEISFXXVSIPKFLGNIISGDKXISFNNCIVQLFFFILLGVXEFYLLAAMSYDRYVAICKPLHCLSIMNRRVCXLLVFXSWLVSFLIIFPALMLLLKLHYCRSNIIDHFXCDYFPLLQLACSDXKFLEVMGFSCAAFXLMFXLALIFLSYIYIIRXILRIPSXSQRXKAFSXCSSHMVVVSISYGSCIFMYIKPSAKDRVSLSKGVAILNXSVAPMMNPFIYSLRNQQVKQAFINMARKXVFFXSX

SEQ ID NO: 19034 - protein, 312 aa, Homo sapiens
  MOD_RES (5)..(5): Selenocysteine
  MOD_RES (9)..(9): Selenocysteine
  MOD_RES (16)..(16): Selenocysteine
  MOD_RES (32)..(32): Selenocysteine
  MOD_RES (38)..(38): Selenocysteine
  MOD_RES (42)..(42): Selenocysteine
  MOD_RES (45)..(45): Selenocysteine
  MOD_RES (47)..(47): Selenocysteine
  MOD_RES (55)..(55): Selenocysteine
  MOD_RES (72)..(73): Selenocysteine
  MOD_RES (89)..(89): Selenocysteine
  MOD_RES (91)..(91): Selenocysteine
  MOD_RES (108)..(108): Selenocysteine
  MOD_RES (140)..(140): Selenocysteine
  MOD_RES (190)..(190): Selenocysteine
  MOD_RES (208)..(208): Selenocysteine
  MOD_RES (222)..(222): Selenocysteine
  MOD_RES (238)..(238): Selenocysteine
  MOD_RES (276)..(277): Selenocysteine
  MOD_RES (289)..(289): Selenocysteine
MKNHXVIRXFILLGLXGDPHLQVLLFIFLFLXYMLSVXGNLXIIXLXLVDHHLKXPMYFFLRNFSFLEVSFXXVCIPRFLYNISMGDNXIXYNACASQIFFVILFGAXEFFLLAAMSYDRYVAICKPLHYVVIMNNRVCXLLVLCCWVAGLMIIVPPLSLGLQLEFCDSNAIDHFSCDAGPLLKISCSDXWVIEQMVILMAVFALIIXLVCVILSYLYIVRXILKFPSVQQRKKAFSXCSSHMIVVSIAYGSCIFIYIKPSAKDEVAINKGVSVLXXSVAPLLNPFIYXLRNKQVKQAFSDSIKRIAFLSKK

SEQ ID NO: 19035 - protein, 311 aa, Homo sapiens
  MOD_RES (4)..(4): Selenocysteine
  MOD_RES (7)..(7): Selenocysteine
  MOD_RES (31)..(31): Selenocysteine
  MOD_RES (37)..(37): Selenocysteine
  MOD_RES (41)..(41): Selenocysteine
  MOD_RES (44)..(44): Selenocysteine
  MOD_RES (46)..(46): Selenocysteine
  MOD_RES (54)..(54): Selenocysteine
  MOD_RES (71)..(72): Selenocysteine
  MOD_RES (84)..(84): Selenocysteine
  MOD_RES (88)..(88): Selenocysteine
  MOD_RES (107)..(107): Selenocysteine
  MOD_RES (113)..(113): Selenocysteine
  MOD_RES (130)..(130): Selenocysteine
  MOD_RES (139)..(139): Selenocysteine
  MOD_RES (152)..(152): Selenocysteine
  MOD_RES (189)..(189): Selenocysteine
  MOD_RES (203)..(203): Selenocysteine
  MOD_RES (207)..(207): Selenocysteine
  MOD_RES (221)..(221): Selenocysteine
  MOD_RES (237)..(237): Selenocysteine
  MOD_RES (268)..(268): Selenocysteine
  MOD_RES (276)..(276): Selenocysteine
  MOD_RES (288)..(288): Selenocysteine
MNHXMVXEFVLLGLSDDPDLQIVIFLFLFIXYILSVXGNLXIIXLXFVDSHLQXPMYFFLRNFSFLEISFXXVCIPRFLGAIIXRNKXISYNNCAAQLFFFIFMGVXEFYILXAMSYDRYVAICKPLHYXSIMNRKLCXLLVLCAWLSGFLXIFPPLMLLLQLDYCASNVIDHFACDYFPLLQLSCSDXWLLEVIGFYFALVXLLFXLALVILSYMYIIRXILRIPSASQRKKAFSXCSSHMIVISISYGSCIFMYANPSAKEKASLXKGIAILNXSVAPMLNPFIYXLRNQQVKQAFKNVVHKVVFYANQ

SEQ ID NO: 19036 - protein, 309 aa, Homo sapiens
  MOD_RES (5)..(5): Selenocysteine
  MOD_RES (16)..(16): Selenocysteine
  MOD_RES (32)..(32): Selenocysteine
  MOD_RES (42)..(42): Selenocysteine
  MOD_RES (45)..(45): Selenocysteine
  MOD_RES (47)..(47): Selenocysteine
  MOD_RES (55)..(55): Selenocysteine
  MOD_RES (72)..(72): Selenocysteine
  MOD_RES (81)..(81): Selenocysteine
  MOD_RES (84)..(85): Selenocysteine
  MOD_RES (97)..(97): Selenocysteine
  MOD_RES (108)..(108): Selenocysteine
  MOD_RES (132)..(132): Selenocysteine
  MOD_RES (162)..(162): Selenocysteine
  MOD_RES (190)..(190): Selenocysteine
  MOD_RES (204)..(204): Selenocysteine
  MOD_RES (208)..(208): Selenocysteine
  MOD_RES (213)..(213): Selenocysteine
  MOD_RES (217)..(217): Selenocysteine
  MOD_RES (222)..(222): Selenocysteine
  MOD_RES (233)..(233): Selenocysteine
  MOD_RES (238)..(238): Selenocysteine
  MOD_RES (277)..(277): Selenocysteine
  MOD_RES (280)..(280): Selenocysteine
  MOD_RES (289)..(289): Selenocysteine
MKNRXMFGEFILLGLXNQPELQVMIFIFLFLXYMLSILGNLXIIXLXLLDPHLQXPMYFFLRNFSFLEISFXSIFIPRFLXSMXXGNKVISFAGCLXQYFFAIFLGAXEFYLLASMSYDRYVAICKPLHYLXIMSSRVCIQLVFCSWLGGFLAILPPIILMXQVDFCVSNILNHYYCDYGPLVELACSDXSLLELMVILLAVVXLMVXLVLVXLSYXYIIRXILRIPSAQQRXKAFSXCSSHMIVISLSYGSCMFMYINPSAKEGGAFNKGIAVLIXSVXPLLNPFIYXLRNQQVKQAFKDSVKKIVKL

SEQ ID NO: 19037 - protein, 314 aa, Homo sapiens
  MOD_RES (16)..(16): Selenocysteine
  MOD_RES (34)..(34): Selenocysteine
  MOD_RES (47)..(47): Selenocysteine
  MOD_RES (55)..(55): Selenocysteine
  MOD_RES (72)..(73): Selenocysteine
  MOD_RES (82)..(82): Selenocysteine
  MOD_RES (85)..(85): Selenocysteine
  MOD_RES (89)..(89): Selenocysteine
  MOD_RES (97)..(97): Selenocysteine
  MOD_RES (108)..(108): Selenocysteine
  MOD_RES (149)..(149): Selenocysteine
  MOD_RES (171)..(171): Selenocysteine
  MOD_RES (179)..(179): Selenocysteine
  MOD_RES (188)..(188): Selenocysteine
  MOD_RES (190)..(190): Selenocysteine
  MOD_RES (199)..(199): Selenocysteine
  MOD_RES (204)..(204): Selenocysteine
  MOD_RES (208)..(208): Selenocysteine
  MOD_RES (217)..(217): Selenocysteine
  MOD_RES (222)..(222): Selenocysteine
  MOD_RES (238)..(238): Selenocysteine
  MOD_RES (240)..(240): Selenocysteine
  MOD_RES (249)..(249): Selenocysteine
  MOD_RES (267)..(267): Selenocysteine
  MOD_RES (277)..(277): Selenocysteine
  MOD_RES (289)..(289): Selenocysteine
MKNKSMEIEFILLGLXDDPQLQIVIFLFLFLNYXLSLMGNLIIIILXLLDPRLKXPMYFFLRNFSFLEVIFXXVCIPRFLIXIVXRDKXISYNNCAXQLFFILLPGVXEFYLLAAMSYDRYVAICKPLHYPIIMSSKVCYQLVLSSWVXGFLIIFPPLVMGLKLDFCASKXIDHFMCEXSPILQISCXDXHVLELMSFXLAVVXLVVXLVLVILSYXCIIKXILKFSSAQQRNKAFSXCXSHMIVVSMXYGSCIFMYIKPSAKERVXVSKGVALLYXSIAPLLNPFIYXLRNQQVKEVFWDVLQKNLCFSKRPF

SEQ ID NO: 19038 - protein, 312 aa, Homo sapiens
  MOD_RES (5)..(5): Selenocysteine
  MOD_RES (16)..(16): Selenocysteine
  MOD_RES (32)..(32): Selenocysteine
  MOD_RES (47)..(47): Selenocysteine
  MOD_RES (55)..(55): Selenocysteine
  MOD_RES (72)..(73): Selenocysteine
  MOD_RES (85)..(85): Selenocysteine
  MOD_RES (88)..(89): Selenocysteine
  MOD_RES (108)..(108): Selenocysteine
  MOD_RES (131)..(132): Selenocysteine
  MOD_RES (171)..(171): Selenocysteine
  MOD_RES (188)..(188): Selenocysteine
  MOD_RES (190)..(190): Selenocysteine
  MOD_RES (204)..(204): Selenocysteine
  MOD_RES (208)..(208): Selenocysteine
  MOD_RES (217)..(217): Selenocysteine
  MOD_RES (222)..(222): Selenocysteine
  MOD_RES (238)..(238): Selenocysteine
  MOD_RES (260)..(260): Selenocysteine
  MOD_RES (277)..(277): Selenocysteine
  MOD_RES (289)..(289): Selenocysteine
  MOD_RES (303)..(303): Selenocysteine
MPNMXSIREFILLGFXDNPELQVVIFFFMLIXYLLSVSGNMIIIMLXLSNIHLKXPMYFFLRNFSFLEISFXXVFIPRFLINIAXGDXXISYNASMAQVFFLILLGSXEFFLLAVMSYDRYVAICKPLHYXXIMSNKVCNWLVISSWLAGFLIIFPPVIMGLQLDFCDSSXIDHFICDSSPMLLIACXDXQFLELMAFLLAVFXLMVXLALVVLSYXLILKXILKIPSAQQRKKAFSXCSSHMIVVSVSYGSCIFMCVKXSAKEGMALSKGVAVLNXSVAPMLNPFIYXLRNQQVKQALREFXKKILSLNKQ
